United States Patent Application Publication US 2007/0061916 A1 - sequence listing, part 2

SEQ ID NO: 3949 - DNA, 853 bp, Gossypium hirsutum
  Clone ID: GOSHI-09MAY01-C3921_2
aagctttgagattcatcaatggcggagaagagtttcaagtacgtcatcctcggtggtggtgtcgctgccgggtatgcggcgagggagtttgccaagcagggagttcagcctggtgagctagccattatttccaaggaagcggttgctccatatgaacgtcctgctctgagtaaggcgtatctcttccctgagggagctgcaagacttcctggtttccatgtctgtgttggaagtggtggagagagattgcttcctgagtggtacaaggaaaaaggaattcagttgatccttagcactgaaatagtgaaagcagatcttcctgccaagactctagtaagcgcagctggagaaacattcaaatatcaaattttgatcattgcaactggttccacagttataaggttgacagattttggcgtggaaggagctgatgccaaaaacatcttttacctgagagaaattgatgatgctgataagttggtagaagcaatcaaagcaaagaagaatggaaaggctgttatcgttggtggaggttatattggtcttgagcttgctgcagccttgaaaattaacaatcttgatgtcagcatggtgtacccggaaccatggtgcatgccccggcttttcacctctggcatagctgctttttatgagggttattatgctaataaagggatcaaaattataaaggggacagttgcggttggattcacctctaactccaatggagaggtgaaggaagttcaacttaaggatggcagagttctggaagctgacattgttgtggttggtgttggtggaaggcctctcacagcactatttaaaggacaggttgaagaggaaaaggtggaat

SEQ ID NO: 3950 - DNA, 865 bp, Gossypium hirsutum
  Clone ID: GOSHI-09MAY01-C3921_1
cggaacgcacgcccgacaacttgtttaattaccaaaaggttaagagcaaaagacagggcagagtaagctaagctttgagattcatcaatggcggagaagagtttcaagtacgtcatcctcggcggtggtgtcgctgccgggtatgcggcgagggagtttgccaagcagggagtgcagcctggtgagctagccattatttccaaggaagcggttgctccatatgaacgtcctgctctgagtaaggcgtatctcttccctgagggagctgcaagacttcctggtttccatgtctgtgttggaagtggtggagagagattgcttcctgagtggtacaaggaaaaaggaattcagttgatccttagcactgaaatagtgaaagcagatcttcctgccaatactctagtaagcgcagctggagaaacgttcaaatatcaaattttgatcattgcaactggttccacagttataaagttgacagattttggcgtgcaaggagctgatgccaaaaacatcttctacctgagagaaattgatgatgctgataagttgctggaagcaatcaattataaagggaacagttgcagttggattcacctcgactccatggaaggtgggaagttaaacttaaggacggcagagctctagaactgcatcgttgtgtggtgtttgtggaaggcctcttacacactatttaaggacaggttgaagaggaaaaggtggaataaagactgaggcttatttcgaaaaagtgttcccaaggatatgctggggtgatctaccccttttctctggagtatccatgaatgagaaggtggacacgttgcacttcccggaataactgactggcgtaaggtttcaggagggg

SEQ ID NO: 3951 - DNA, 527 bp, Gossypium hirsutum
  Clone ID: LIB3828-003-Q1-K6-G4
cagttataaggttgacagattttggcgtggaaggagctgatgccaaaaacatcttttacctgagagagaaaattttaaggctgccagaactaaagaagctgatcaaatggataaagatgagagagatacgcaagatgcttttgatagagaaaagcaagagagattggagcgcgagaggcaacaaagagaaatggaggaggaagaaagagagcaaaggagacatgaattggagagggaaagggaggagaagaagagagaacaaagaagccttgaaaaagagagggagagagtcagggagatggagagggaaagggaaagggctagacaagctgttgaaagggctactagagaagcacgtgaaagagcagctgctgaggctcgtgctagagctgaaagggttgctgttgaaaaggcagctgctgaagctcgagagcgtgcggaaagggctgcagtgcagagagcgcaaactgaagcccgtgaaagggcagctgccgaggctagagaaagagcagaaagagctgcagcag

SEQ ID NO: 3952 - DNA, 1629 bp, Gossypium hirsutum
  Clone ID: GOSHI-09MAY01-C3851_1
cccacgcgtccgcccacgcgtccgcccacgcgttcgtccacgcgtccgccctcgcgtccgaatatatcatgtcctaccagcaaggggaggatttctattacatggatgaagattttgtagatgacatggatgaagacaactacggtcaagctggtggagatgtggatgctgatgaatatgacatgctgaccaaggtgaccgatacgacttctgcgcaagcgcggaaggggaaagacattcaggggattccgtgggaaagactgaacataactagagaaaaatataggttgacaaggcttgagcagtataagaactatgagaatatgccttcttccggtgaagctgttgacaaggaatttaaacatataaagaagggtgggaactactatgaattcttctacaatactagattaattaaacctacgatccttcattttcagctcagaaacttggtttgggctacttcaaagcatgatgtttaccttatgtccaattattcggttatgcattggtcatcattgtcatgtaatctgtccgagatccttaattttgctgggcatgtggcacctaccgagaaacatcccggaagtttgttagaaggttttacacaaactcaaataagcacgctagcagtcaaagacaattttatggttgcaggaggcttccaaggagagcttacttttaagcacttggacagaaaaggcgtaaccttttgtacccggacaacgtatgacgataatgcaattacaaatgctattgagatatatgacagcttgaggggtggaattaattttatggccgccaacaatgactgtagcgtgagagaatatgatacggagagatttcagcttctaaaccatctccgtttcccttggccagtaaatcatacatcagtcagccctgaccgaaggcttattactgttgttggagatagcttggatgggttgcttgtggatttgcaaaacggaaagactgtagccacggtggtaggtcatctagattactcctttgcatctgcatggcacccagatgggcgcatatttgccactggaaatcaggataagacttgccgtgtgtgggacgttcgaaacctctcaaggccagttgcaactctcaaaggaaacttgggtgccatacgatcaatccgcttttcatccgatggtcaattcatggtggctgctgaacctgcagatttcgttcacgtgtatagtacgcgtgctgattacgagaaaagacaagagattgacttctttggggagatttcgggagtatctctgagtccagacgatgaatctttgtatataggaatatgggacagaacgtatgcaagtttgctgcaatacaacaaaagacacacatatgcatacttggattcgtacttgtgataatgtcaactgcgtgctgttgtagttatggcgctctcttttgtgctctgttttgtttgtgtagggtgatatgaatgaagattaaatattatatgacagtataataagtgtatgttgtgttagaacttttctagaaaggtgcatgtacagtacaatatcatcctctaaatcatatgctatttgtatgatcgattttctgttcttaaatgtaagttaataatagagtaaaattaacttgcttggt

SEQ ID NO: 3953 - DNA, 536 bp, Gossypium hirsutum
  Clone ID: LIB3585-066-P1-K1-H6
cccacgcgtccgaatcctccattttcagcttcgaaacttggtttgggctacttcaaagcacgatgttcaccttatgtccaattattcagttatgcattggtcatcattgtcatgtcatctctctgagatccttaatttctccgggcacgtggcacctactgagaaacatccgggaagtttattagaaggttttacacaaacccaaataagtacactggcggtcaaagacaattttatggttgcaggaggtttccaaggagagcttacttttaagcacttggacagaaaaggggtagcattttgtacgcgaacaacctatgacgataatgcaattacaaatgctattgagatatacgacagcttgaggggtggaatcaattttatggctgccaataatgactgtagcatgagagaatatgatacggagagatttcagcttctaaaccatctccgtttcccttggccagtaaatcatacatcaatcagccctgaccgaaggcttattactgttgctggagaaagcttggatgggttgc

SEQ ID NO: 3954 - DNA, 454 bp, Gossypium hirsutum
  Clone ID: LIB3585-067-P1-K1-B8
ggggtttcgtcttttggcttagattttgaggcttgtttatctatatatcaatttctatccacgggtaaaagtctcggcatttgcgggttttgcttctcacctacttcctacttgcatagagacacttgccctcaatgtgatcaatcgatggtcgtttagaaggcaatggttgctcaacctaaagctgctgggaaccaatggttctaatcaccatttccgtgaaaatcgcccttcaacgggttcaaataatgctaacagaggtcaatccactaaggaggaggtttttgctaaccaggctcaaatgacttggcatgaggctagaagacagtgggccggggatcagtctgaaaaatcaagaagaattgcccgggaaccacatatgagctggaccacaacttatgaagatttgctttggtcgaccgaacgatttcaacagctctattccattagctga

SEQ ID NO: 3955 - DNA, 450 bp, Gossypium hirsutum
  Clone ID: LIB3135-050-Q1-K1-C9
cccacgcgtccgatagatgttgttgttaggatctaattttagctgttctttgtccccctttgtttcattactaaaaattctcgaatctccagaggaaatatctttctttttttttattaagaacaataaagagagagaaaaaagccaaaaccatcagtgtcttctttaatgctcaacatagttttaagttaaaaaaactactttcaagaggttctttacagttcttgccctcaatgtgatcaatgatggtggtttagaagtcaatggttgctcaacctaaagcaaatggaaaccaatggtactaatcaccattcccgtgaaaatcgcccttcaacgggttcaaataatgctaacagaggtcaatccactaaggaggaggtttttgttaaccaggctcaaatgactttgcatgaggttagaagacagtgggccggggatcagtctcaaaaa

SEQ ID NO: 3956 - DNA, 432 bp, Gossypium hirsutum
  Clone ID: LIB3145-009-Q1-K1-F4
gaaatatctttcttttttttttattaagaacaataaagatagagaaaaaagccaaaaccatccgcgcgttctttaatgctcaacatagttttaagttaaaaaaactactttcaagttcttgccctcaatgtgatcaatgatggtggtttagaagtcaatggttgctcaacctaaagcaaatggaaaccaatggtactaatcaccattcccgtgaaaatcgcccttcaacgggttcaaataatgctaacagaagtcaatccactaaagaggaggtttttgttaaccaaggtttgcttgtctttatctgaatatggacttcagtagcagaaactttatcaacacgagattggtgtgaactggctatggtgttgcgaactatctggacttattgttgttggggtgtatgacgtttctcaataaaggggttataaa

SEQ ID NO: 3957 - DNA, 399 bp, Gossypium hirsutum
  Clone ID: GOSHI-09MAY01-C3811_8
ctagttctagatcgcgagcgccgccctaaaatatattttttttttttatatttggctcatctctaggcagaggaataagtattctctgtctgaagcaccacgacaaccgatttcttccttcgaattcccctcttataccaaatttcttctcttctcttcgctaatttcagtgaacatgagttcatcaacacaaaaacttatcatctttataatcaatcaccagagaggtaatatataatagatagaacaacagacagaagagacctatgcaagtacttgcggcagctccaattagaattttgctgccatgcgtgtctagaaagaacatgagaatcgggccaagcggtttggtaactccaaggggtctgctgctcatctgcttacccgaagaaacgtatc

SEQ ID NO: 3958 - DNA, 510 bp, Gossypium hirsutum
  Clone ID: GOSHI-09MAY01-C3811_5
gcgttttgctttacttgaactgaaagtctgtcccacgcgcccgggccaaagcatccatggtggatgacctccaaaacaaaaatcaggagttgatgaagcagatagaaatttgccaggaagagaacaaaattttggacaaaatgcatcgccaaaaggttgcggaggttgagaagcttacacaaacagggggggagctggaagaggctgttcttgctggcggtgctgctgcaaatgctgttagggattaccagcggaaagttcaggagatgaatgaggaaagaaaaactcttgatcgagagctagcacgtgcaaaagtaactgctaatagggttgccacagttgtagcaaatgagtggaaagattctaatgacaaagtgatgcctgtaaaacaatggctggaagaacgaagattcttgcagggagaaatgcagcaacttcggggacaagcttgctataagtgagcgtacgggcaaaatctgaagctcagttgaaagagaaatatcaattgcg

SEQ ID NO: 3959 - DNA, 422 bp, Gossypium hirsutum
  Clone ID: GOSHI-09MAY01-C3811_4
cccactcgtccgcccacgcgtccgcccacgcgtccgtattaattttagttgcagcagcggcaaggagcaaatttgcataggtctcctcggtcctttgttttatttttctctttatatatttttttacctctactttggtgattgattataagattataacttgcatgctgatgaacctatattcactgaaattgatttgtgaagaaatctggaaaaagagtaaaccagaggaagaaaaccgctgaatctgtatgtgactgtctgacatagagtgctattatttccctctgcttagagatgaactaaaaagaaaggaatgagaaaaaaaaaaaaaaaaaggaactattgactatgggctaaccttttgtcaggttttctttggagtggccagtggttatgttggttgtataggtgtgcctttt

SEQ ID NO: 3960 - DNA, 1464 bp, Gossypium hirsutum
  Clone ID: GOSHI-09MAY01-C3811_3
gctgaactgaagcttgctcggcaagagattgctaaacttcaagatgataacaaagcacttgatcgtttaactaaatcaaaagaagcaggttgactcgaagctgaaaggactgtacaggttgcattggccaaagcatccatggtggatgatctacaaaataaaaaccaggagttgatgaagcagatagaaatttgccaggaagaaaacaaaattttggacaaaatgcatcgccaaaaagttgcagaggttgaaaagcttacacaaacagtaagagagctggaggaggctgttcttgccggtggtgctgctgcaaatgcagttagggattaccagcggaaagttcaggagatgaatgaggaaagaaaaactcttgaccgaaagctggcacgtgcaaaagtaactgcaaatagagtggccacggttgtagcaaatgagtggaaagatgctaatgacaaagtgatgcccgtaaaacaatggcttgaagaacggagattcttgcagggagaaacgcagcagcttcgtgacaagcttgctataactgagcgaactgcaaaatctgaagcacagttgaaagagaaatatcaattgaggcttaaagttctggaagagagcttgagaggatcttctaacagtcttagtcgcagtacatcagatggaagaagcgtgagcaatgggccttctaggcgtcagtctctgggtggagctgataacttctcaaaacttacccccagtggggttttatccaagagatcaccaagctttcaattgagatcatctttctcgtctagtacagtattgaagcatgctaaaggaacatccaagtcatttgatggaggcacaagatcgttagatgtgacaaaagtgcttttaaatggaacagactcaaatagttcactcaaccagccttctgagggaaaggctcaggcaccaagtgatgaaaaaccaaataatttcctggcagtggatgcagaggataatgtaccgggagtattgtatgatttgttgcaaaaagaggtcatagctttgaggaaagctggtcacgagaaagatctaagccttaaggataaggatgaggcaattgagatgcttgccaagaaggtggaaacattgacaaaggcaatggaagttgaggctaaaaagatgcgacgtgaagtagccactatggagaaagaggttgctgccatgcgtgtcgagaaagaacatgagaatcgggccaagcggtttggtaactccaaggggtctgctgctcagctgccttaccggaagaaacgtatccccccctcccctcccccccagcactcaatgacaacaagattctaattggagctgccgcaaggacttgcataggtctcttctgtctgttctatttattatatattacctctttggtgattgattataaagatgataagtttttgtgttgatgaactcatgttcactgaaattagcgaagagaagagaaga

SEQ ID NO: 3961 - DNA, 1771 bp, Gossypium hirsutum
  Clone ID: GOSHI-09MAY01-C3811_1
cccacgcgtccgtggaaagcaagaacctagaaatcaagaaaataaatgatgagaagaaggcatccatggctgctcagtttgcagctgaggccactctgcggagggttcatgctgctcaaaaggacgatgatatgcctccaattgaagcaattcttgcacccttggaggctgagctgaagcttgctcggcaagagattgcaaagcttcaagatgataacaaagctctcgatcgtctaactaaatcaaaagaagcagctttaattgatgctgaaagaactgtagagtttgcattggcgaaagcttccatggtagatgatctccaaaataaaaaccaggaattgatgaagcagatagaaatttgccaggaagaaaacaaaattttggacaaaatgcatcgccaaaaggttgcagaggttgaaaagcttatgcaaacagttagggagctggaagaggctgttcttgctggtggtgctgctgcaaatgcagtgagggactaccagaggaaagttcaggagatgaatgaggaaagaaaaacacttgatcgagagctggcacgtgcaaaagtaagtgctaatagagtggccacagttgtagcaaatgagtggaaagatgctaatgacaaagtgatgcctgtaaaacaatggcttgaagagcggagatgcttgcagggagaaacgcagcagcttcgtgacaagcttgctgtaactgagcgaactgcaaaatgtgaagcatgctaaaggaacatccaaatcatttgatggaggcacaaggtcattagagagggctaaattgcttttaaatggaacaggctcaaatacttcattcaaccagtccttccggcaggaaccaaggagagtgagtgcacataaatgatggaaaagcccactgatttccagcctgtgcacacagaggataatgttccaggtgtattgtattgatttgctgcagaaagaggtcatagctttgagaaaagctggtcacgagaaagatcataaggctgagggataaggatgatgcaattgagatgcttgctaagaaggtggaaacattgacaaaggcaatggaagttgaggctaaaaaaatgagaagagaagtagctgcaatggagaaagaggttgcggccatgcgcgtggagaaagaacatgagaatagggcgaagcggtttggtaactccaagggatctgctgctcagctgcttactggaagaaatgcatctcgaagtgggttaacacgcagcactcaatgacaaaaaattttagttgcagcagcggcaaggagcaaatttgcataggtctcctcggtcctttgttttatttttctcttttatatatttttttacctctactttggtgattgattataagattataacttgcatgccgatgaacctatattcactgaaattggtttgtgaagaaatctggaaaaagagtaaaccagaggaagaaaaccgctgaatctgtatgtgactgtctgacataaagtgctatttattccctctgttatagatgaactaatatgaacggattgaaaatatatcattattattggatctatggactttggcctaccttttgctatgttttcattggagggcccatggttatgatcggtgtatacgatgcaggattactttttattatgtctatagtctattgttattgtgagctgacttatatcgtgttatgactttacaattctggttttcatattatgcgttgtgtgattctattgctaatactgtattatttcatctaaagctttaattaaa

SEQ ID NO: 3962 - DNA, 674 bp, Gossypium hirsutum
  unsure (1)..(674): unsure at all n locations
  Clone ID: LIB3543-002-Q1-K1-B8
gccttctgaggaaccaggngggtgaagcaccaagtactgcaattcctgatgatttccggcccgttgacaaagaggataatgttccaggagtattgtatgatttgctgcagaaagaggtcatagctttgaggaaagcaggtcacgagaaagatcaaagcctcaaggataaggatgatgcaattgaagttgatactttgtactttcaagttgatgtcattttgttttatcattctggataaatgctctagtaatcctagtatttttcagatgcttgctaagaaggtagaaacattgactaaggcaatggaagttgaggctaaaaagatgagaagagaagtggctgccatggagaaagaggtttctgccatgcgtgtggagaaagaacatgagaatagggccacgcggtttggtaactccaagggatctgctgctcagctgctttctggaagacaaaattactatcccatccatgaaaccttagtagaagatagtgtacttgtgaccttgttggcccatgcccattctgctacttgctcaggaccaaatcaaagtgatagcataaactgtcatctagcacatcagattaatggcttttaaaaaaattttgaagtatggagcatatctacatgctttatcaaccttcctttgattntccttttctgcccttggcaaaa

SEQ ID NO: 3963 - DNA, 392 bp, Gossypium hirsutum
  unsure (1)..(392): unsure at all n locations
  Clone ID: LIB3196-016-P1-M1-B1
cggacgcgtgggggagaccgctggtgaacttttgcataagtgccatgtatatgttaggattcatcttaatttggtacttaaagttgtagtgatcaattgaaatgaacctacctgttaattatttccgatattctgccaatttgattttggatgacttgctgaagtcaaggcctgcaatagacggatgtcacatgctcattttgctttcattgcctagtatattgttgattttcaatgtaagtaacggacaacttctcaaatttatgcagaaatgtatctcgaagtgggttaacacgcagcactcaatgacaaaaaattttagttgcagcagcggcaaggagcaaatttgcataagtctcctcggacctttgttntatttttctctttatata

SEQ ID NO: 3964 - DNA, 455 bp, Gossypium hirsutum
  unsure (1)..(455): unsure at all n locations
  Clone ID: uC-gsflnu33B094c07b1
ctggaagagagcttgagaggatcttgtaacagttttattcgcagtacatcagatgtaagaagcatgagcaatgggccttctaggcgtcagtctctgggtggagctgataacttctcaaaacttacatccaatgggtttttgtcaaagaaatcgccaagctctcaattgagatcctctttgtcttctagtacagttttgaagcatgctaaaggaacatccaaatcatttgatggaggcacaaggtcattagagagggctaaattgcttttaaatggaacaggctcaaatacttcattcaaccagccttctgacagaaccaaggagagtgaggcacaaaatgatganaagcccactgattttcagcctgtggacacagaggataaatgtccaggtgtattgtatgatttgctgcagaaagaggtcatagctttgagaaaagcttgtcacgagaaaga

SEQ ID NO: 3965 - DNA, 1456 bp, Gossypium hirsutum
  Clone ID: GOSHI-09MAY01-C3831_1
gagagagctttcatttgaaaaaaaaaacgaaaaaagaaagaaaagggagaaaggaaaactagaaaatgaatagaaagagaattcattcagttctgtaattccgttctaaaccgaagaccaaaaagaaagtgtgaaatttgaaatacagaggtcgttgcttccccatttccaaagatgaacggcggcccctctggtttcaataatgctccggtgaccaaaacctttgtaattgcatctgccctcttcaccgtattctttgggatccaaggtcgttctttcaagctcggtttgtcctatcaggatattttcacaaaacttagcatatggaagttaatcacatcagtctttgccttttcatctacaccagaactgatgtttggactttatctactgtactacttcagggtctttgagcgacaaattggttccaataagtactctgtttttattttgttctcagtaatggcttcattcctctttgaggttatggcagtagctatccttaaagatcccacatctaacctgctcacttctggaccttatggcctcatatttgcttcattcgtacccttttttttttgacatcccggtttcaacatggtttcgtatttttggtgttcgcttctccaataagtctttcatctctctagctggtcttcagctgcttctatcatcttggaaaagatctctcttgccagggatatgtggcatccttgctggttccttatatcgtctaaatgtcttccacatccgaaaggctaagttccctgagtttattacatcattcttttcgcgtgtttcttggccttctattgggaatccacctacaacaccagctaggaatcttgcaggaaatgtaccttcctacacaactcgccaagtggagagaacctatgcatccgcagtcgcgtcttcagccatagagccatcggaggatgctgttgctacgctggtgtctatgggctttgatcagaactcagctaggcaggcacttgtgcatgctagaaatgacatcaatgctgccacaaacattcttcttgaagcacagtcccactaattgaaacatagaattgctggcgaaaagtggatgccgggatgttatttcatcggtataaatgcataatcacacatatagtggatggcaaccgatttgcttgcctcctggggttatgtggcattccaagatttcactatggagtagtattttcttccattttgccctcacgtatttctgttagtagcagtaatcatacaccaatgcaactcaaaacttggggagttcttttttttttttttgaaattgtttaccctcatgcaaatgcatgcgtcttaccaaaaggatacatgtgcgtaatgatgcaagttttgcatttgaggcttatggtccaaaattactgacaagtttgtaaatttgttcgacttaaatagacaatttaggtaccatttagttcctgcc

SEQ ID NO: 3966 - DNA, 527 bp, Gossypium hirsutum
  Clone ID: LIB3829-034-Q1-K6-E9
ctttgaggttatggcagtagctatccttaaagtttcaacatggtttcgtatttttggtgttcgcttctccaataagtctttcatctatctagctggtcttcagctgcttctatcatcttggaaaagatctctcttgccagggatatgtggcatccttgctggttccttatatcgtctaaatgtcttccacatccgaaaggctaagttccctgagtttattacatcattcttttcgtgtgtttcttggccttctattgggaatccacctacaacaccagctaggaatcttgcaggaaatgtaccttcctacacaactcgccaagtggagagaacctatgcatccgcagttgcgtcttcagccatagagccatcggaggatgctgttgctacgctggtgtctatgggctttgatcagaactcagctaggcaggcacttgtgcatgctagaaatgacatcaatgctgccacaaacattcttcttgaagcacagtcccactaattgaaacatagaattgctggcgaaaaga

SEQ ID NO: 3967 - DNA, 355 bp, Gossypium hirsutum
  Clone ID: LIB3048-001-Q1-L1-A4
gaccagggcaccttttccttgctggaatggccttcatggttgccccaacctttgttctggaaccccagtccacctaatggaaccttagaatggctggcgaaaagtggatgccgggatgtaatttcatcggtttaaatgcttaatcacccatataggggatggcaaccgatttgcttgcctcctggggttatgtggcattccaagatttcactatggagtagtattttcttccattttgccctcacgtatttctgttagtagcagtaatcatacaccaatgcaactcaaaacttgggagttcttttttttttttttgaaatgtttaccttcatgcaaatgcatgcatcttaccaaa

SEQ ID NO: 3968 - DNA, 619 bp, Gossypium hirsutum
  unsure (1)..(619): unsure at all n locations
  Clone ID: LIB3583-052-P1-K6-G2
ccgggtcgncccagcgtccgccccgcgtccgccccgcgtccgcttttccaaacttaaacctttcagtacgtaacactatcgctttctccgctgccgttttactcttttttggtctcgccgttttggattaggcggtggcgngaaatgagcgttgagggtgaggcaactcaacttcgcgatgctgccttgccataataatatctcagtaaccaatgaacgacccactcgtctccctcgaagtcgatgtcgtcgttggcgtcagagccgtgccggtattgccttcgttgcggttgccgcgttgcttatctctactgccgcttggctttctcttgttttctccggcactaccactcatcggtggcgtcgtttgaagtactgggaagggagtccacattccctttccggttccataccctggtcttcttttcctgatcggttaccgattcctcctcttcctccttggtttgattcgncacaagacactcctcgtaaccgcagtctctctgagcgtggaaatggaaaacgagagatttcgttaaacgacctcgtattcggtatagctggatcctcgcatctatggaagcgacggagagagaaagttcggctttggtggcgacct

SEQ ID NO: 3969 - DNA, 422 bp, Gossypium hirsutum
  Clone ID: LIB3272-022-P1-K1-C1
gtaacactatcgctttctccgctgccgttttactcttttttggtctcgccggtttggattaggcggtggcggaaatgagcgttgagggtgaggcaactcaacttcgcgatgctgccttgccataataatatctcagtaaccaatgaacgacccactcgtctccctcgaagtcgatgtcgtcgttggcgtcagagccgtgccggtattgccttcgttgcggttgccgcgttgcttatctctactgccgcttggctttctcttgttttctccggcactaccactcatcggtggcgtcgtttgaagtactgggaagggagtccacattccctttccgggtccgattcctcctcttcctccttggtttgattcgacacaagacacttcttgtaaccgcagtctctcttagcgtggaaatggaaaac

SEQ ID NO: 3970 - DNA, 616 bp, Gossypium hirsutum
  Clone ID: LIB3583-051-P1-K6-H7
ccccgcgtccgccccgcgtccgggcgtaggggtggtgggtttaaaatttttattttatgaatgaaataatttttatatttatatttgttgttatatgacatggtatcataatctttgcttttggatgttttcaggttgctcaattttgtgtttaataggtgttgaggttgttgactgagagctggcgcaattgtctattgacaaagtgactgaagtagacaaatcatttcttcatgaaaatgggaaactggataaggatccagtttataataaccccattgaagttgattcacatagtgaggaaccagataaggaagaagagaatggtgcatttgatccccactttccgaaggatgtggtcaatgagtggcctacacctaagcagatccactcttttcattttattaggtatcgcttctacgaagatccggctataaaagccaaacttgatcaggctgataaagagatacgaaagtggaataaagccaggtttaagcttaccgatgaattaaaagcaaaaagagtgagtgaaaagttattaatttcagttagatgtatagcatggtagccattaattgtcatacttttaagataattattaggcctatcattatgt

SEQ ID NO: 3971 - DNA, 679 bp, Gossypium hirsutum
  unsure (1)..(679): unsure at all n locations
  Clone ID: LIB3582-061-P1-K1-D11
tgactccttttactctcaaaatttgaattcagccaccatagctactccttttctgtcgatctgttagggtttntggagaaacaaatagatattgaagagaaggagaacgaggaagaagaagaagaagaagaggaagagaagacgggggaggaggaagaagaagagagtgaagatgaagggactaaaaggtcgaaggtagtagtagaaaggcagccagaataggtagctcaattttgtgtttaataggtgttgaggttgttgactcagacctggcacaattgtctattgacaaagtgattgaagtagacaaatcatttcttcatgaaaatgggaaactggataaggatccagtttataataaccccattgaagttgattcacatagtgaggaaccagataaggaagaagagaatggtgcatttgatccccactttccgaaggatgtggtcaatgagtggcctgcacctaagcagatccactcttttcattttattaggtatcgcttctacgaagatccggctataaaagccaaacttgatcaggctgataaagagatacgaaagtggaataaagccaggtttaagcttaccgatgaattaaaagcaaaaagattgagtgaaaagttattaatttcagttagatgtatagcatagtagccattaattgtcatacttttaag

SEQ ID NO: 3972 - DNA, 553 bp, Gossypium hirsutum
  Clone ID: LIB3582-006-P1-K1-E4
agggactaaaaaggtcgaaggtagtagtagaaaggcagccagaataggttagttgatgtacagagtatctttattgccattgtatatgggccactctagtttcttgaatttgtagtttgctgaccgtgtgtggtgtgctgcatatattactgtcgcggttgtggcgtctttgcgcatcttcaattcaatctgatcattctgagtcagtaaagcaattcgactggtgtggaacgctgtaatgggatatgcacaactggttattggtcttgcacgcagtggaaaggtagctcaatttcgtgtttaatacgtgttgaggttgttgactcagacctggcacaattgtctattgacaaagtgattgaagtagacaaatcatttcttcatgaaaatgggaaactggataaagatccagtttataataaccccattgaagttgattcacatagtgaggaaccagataaggaagaagagaatggtgcatttgatccccactttccgaaagatgtggtcaatgaagtgcctgcacctaaacaaatccactcttttcatttta

SEQ ID NO: 3973 - DNA, 1179 bp, Gossypium hirsutum
  Clone ID: GOSHI-09MAY01-C3451_1
cccaaaggctctctcttcacaatcacatcttcattttcagaatttaaccaaaataatattagaaaaaaaaaatttaaaagaaatccaagaagaaaagataagtagcatcgaatctttttttattcgttatttttattttatttttttgcttgttttctcttcgcagctcactgccggcagatcggctcaatctcaagactttgtttgtattcttgtagctgccaagtggcgttgtagtcccgataaccatatgatacaacaagggtgcattcctgagtttggcgtatcagatgatttgtagtatctatattatgctttgtcagtgccattatgggcattcgtctgatgaaatatcaatggccatggctgcttctcattctaatctcttttatcctagcaaacagaatcagagctatcagtcctgatggagaggcacttctgagctttcgggtagcaattattagttcagatggtgtgctttctcagtggagaccagaggatcctgatccatgcaaatggaaaggggtgaattgtgatagtaaaaccaagagagtgacaactttgagccttaccaatcataaactgagtggtcctatatcgcctgaccttgggaagttggagcacttgaggcttttaatgcttcataataacaacttttatggggcaattccatccgagctgggtaattgcacagagttgcagggaatttatttgcagggtaattacttaagtggattaattccaagcgaattgggcaatctttcttcacttcagaatctggatatctcaagcaactctctcagtggatctatccctccctcaattggaaggctagataagcttgttacattcaatgtgtcaaacaattttctggttgggcctataccatcgcaaggtgtcttcagcaactatacagctagctcttttgttggaaatcgtgatttatgtggaaagcagatcaatgtagcatgcaaagatgacaatgggggagctacaccgtattctgagtcacctacttcagctcaagttggtaaaaggaaatactccggaaagcttctcattagtgcatcagcaactgtaggtgcactgcttttggtggcacttatgtgtttttgggggtgcttcctatacaagaagtttggtaaaaaaagaaacagaactctttgccatgatgtcggt

SEQ ID NO: 3974 - DNA, 389 bp, Gossypium hirsutum
  Clone ID: GOSHI-09MAY01-C3441_3
tcgaaaaggcgtattacctcgtgagctctctccttccttatttcatatttctacttctgctgcggcattattttcatttttccctttcttttattttttaataatgtttaatccatctacaaacgcactctcactgacgttcccctcacacgttgttgtagcattcggagatatgacgtcagatggggcgacgtcgacgccggcaccagtgccaaggaggaaaccttcttgcagggagagagagaacaacaggaggagggagaggaggagaagagctatcgctgctaagatatatactgggctgagcgctcaaggaaattataatctgcccaagcactgggataacaacgaggtcctcaaagctctttgtgccgtggctgattgggttg

SEQ ID NO: 3975 - DNA, 1206 bp, Gossypium hirsutum
  Clone ID: GOSHI-09MAY01-C3441_1
tttcttcaacgcgccccccgacgttccctcccctccctacatctgcaccttcaccgttgttgtagagtcagagaaatgacgtcagatggggcgacgtcgacgccggcaccggtgccgaggaggaaaccgtcttggagggagagagagaacaacaggaggagggagaggaggagaagagctatcgctgctaagatatatactgggctgagagctcaaggaaattataatctgcccaagcactgtgataacaacgaggtcctcaaagctctttgtgccgaggctggttgggttgttgaagatgatggcaccacttatcgaaagggatgtaagccacctccgattgatatagcaggcagttcagctaaaattaccccatattcttcccaaaatcctagtcccttatcttctgcatttccaagtccaattccttcatgtcaagtcagtccttcctcctcttccttccccagtcccactaggactgatgcaaataatccgtctagtctccttccgttcctcagaagcgccattccttcgtctctgcctcctctcagaatctctaatagtgcccccgtgacaccaccactttcttctccaacctccagaaatcctaagcccattcccaactgggaggcccttgccaaagagtccatggcctcttttaactaccctttttatgctgtctctgcaccagctagtccaacccatcgtcatttccatgcccctgctactataccccaatgtgatgaatcagacacgtccacagttgaatctggtcaatggataagctttcaaaagtttgcaccttctacatctcaagtgccgacttcgccaacattcaatcttgtgaaacctttggctccacaaagtttgcccaccggttttattggagagcaagggcgagtttcagagtttcagttcgagagcggacaggtaaagccgtgggaaggtgaaaggattcacgaggtaggattggatgatctggaactcacactcggaagcgggaaagctcggtgttgaaaagaggctaacagtctgagtgattgttgtgaaagcgtgttacaacagaagaaagagccggttttcccttcctgattctaggttctcacaggcagatactaaagagcggtaattgtcgtttcatccactcagtgaaagctggaaatcatagaacaaaggtggcagaagagttacagtttcatccgcatt

SEQ ID NO: 3976 - DNA, 581 bp, Gossypium hirsutum
  Clone ID: LIB3584-038-P1-K1-H2
cttcggcccacgcgtccgcccacgcgtccgttcattttgttttggttgtaatttggttggatctagttcccatagtgattttagtttggttatgctttctgggtttttttacttgatctgctttatttcagtttgatttggcttctgtttgcttgcttggaatattggaaaaatcaaaagacagtcctacatgaaaacagtagttcttacttaaaggcaataatctattgatctgtgttggaactgaaactttattgactggactgtgaacaaattttcttgattagctgctattttttcttgtataatcctcttgagccttgatttgttgataatttttggtttttaaatggatttgttgtccagggatgtaagccacctccgattgatatagcaggcagttcagctaaaattaccccatattcttcccaaaatcctagtcccttatcttctgcatttccaagtccaattccttcatgtcaagttagtccttcctcctcttccttccccagtcccactaggactgatgcaaataatccgtctagtctccttccgttcctcagaagcgccattccttcgtc

SEQ ID NO: 3977 - DNA, 374 bp, Gossypium hirsutum
  Clone ID: LIB3196-046-P1-M1-A8
caatggataagctttcaaaagtttgcaccttctacatctcaagtgccgacttctccaactttttttaaacttgtgaaacctttgcctccccaaaatttgcataatgatttgggcgtaaaagataaaggaagaggtgcagagtttgagtttgagagtggacaggtgaaaccatgggaaggagagaggattcatgacataggaatggatgatctggagctcacgctgggaagcggaaagcctcagtgttaaaccgagcctaatggtgtcgccaaagcatgttaaaaccaaagacaaaaaaaagctcacagttctgttcttcatctgctctgttctgtcttcttttatatcttttttggtttttttttggtcttttt

SEQ ID NO: 3978 - DNA, 784 bp, Gossypium hirsutum
  Clone ID: GOSHI-09MAY01-C3471_1
cagcgtccggtaataacctcttttgcaggacacaaatctctcgcaaagaattaactcatttttttagcttcgccttaccgccattgaagaaactaatcaaagctttctttgactattcttttcaaactctcaagatcaaaatgggttcaactaaccaagtgggtacactttatgttcaagaaattgagctgggtattatttttctttcaacattgggtagttcttttttcgtctttcacatggagtcaaacgcaggggcgacggagaccagatctaatgtaacggtgccggatgggggagaagttgcggcactcgagtcgctccaatttaccgacgaaatccaccgtttgatttcggctccggcaactgataatgctagttccttcacggctctacttgaactaccggctacacaagtcgttgagcttcttcactctcccgagtcggtgaagctcatagttgcttcggctccgaacgttgaagatttcaaaggcagcttccattttccttctaatactggtttgattcaaaaagatgcaaggttctctgtgttttctggagaaggtaacaacaagaatgagaagagcaactcgcctgaaatgacgtcgaaaaattcaagcgcgaatcttgagaaggcggtaaagagtgagccggcagaaaccgtgtcatccctgccgttggtgtctgatccaacgatggagaaccggaatatcaagcggaaagatcgagaaaagaaggttaaagggtcaacaaagaaaagcaaaactgcaacaaatgagagatt

SEQ ID NO: 3979 - DNA, 699 bp, Gossypium hirsutum
  Clone ID: GOSHI-09MAY01-C3461_2
tcaaacatgctttctaatatggtgggaacccaaagatattgacactgagttgtctactgctgcaataagctgtcagtcatttggtgtgccaaatatacctttcaagacaggatgctcaaatgatgttgccataaatgagacaggagttttaaatggcggattgtggaccaaccaaactcaacgcatgcgaacatatacaaaggtgcaaaagcgtggttctgtgggaagatcaattgatgtgacccgctataaagcccacgcggcccgccgcccggccctagcccgcatgttcggtatcgaggggcagctggaggagccacagagttctgactggaaattagtgtatgtggatcatgaaaatgacatattacttgttggtgacgatccttgggaagaatttgtaagttgtgttcagagcataaagatactgtcgtcagcagaagtacagcagatgagcttggatggtaatcttggaaatgtgtcagttcccaatcaagcttgcagtgggtctgaaaacggaaatgcatggagaggacattatgatgatacctcagcagtctcatttaacagatgatgtctctaaattcggatattgagatgtcttcttcccttgaactttgcccgggcctgtggatgaatatattgtatgcttgttcactcaaaggagtacaatgcagtccagtccttcaagagaagtga

SEQ ID NO: 3980 - DNA, 1578 bp, Gossypium hirsutum
  Clone ID: GOSHI-09MAY01-C3461_1
cccacgcgtacgtgagaacccattctggtcttactgatggagatgctacatcatgttcgagctaaccttgtaccaataatcgacaggtttcaccatcaagctttctaagcagaagttagctggtaccatccatggtagtgacagatccagttgttgcgcctgcaagtgcactggttcaggagcttcagagcaagcctgatctccgaatgaaacacgagttgcttgcctataaaggtccagatcaatcaacggacacaagtactgtgacagaccagtttgaagcatcctcttctggaacatcatactgcctggatgcaggcaccatccagcataatttctctctccccacctttctggaaggtgatgtccaatcacatcctcggaacaatcttcctttttcagcgaatattgacggactggcacctgacaccttgttaccaaggggatatgactctcaaaaggatcttcaaaacctgctttctaattatggtagcaatccaagagatattgacacagagttgtctactgctgcaataagtccccagtcatttggtgtgccaaacatacctttcaagactggatgttcaaatgatgttgccataaacgatgcaggagttttaaatggtggattgtgggccaaccaaactcaacggatgcgaacatatacaaaggtgcaaaagcgtggctctgtgggaagatcaatcgatgtgacccgctacaaagggtatgatgaactcaggcatgatctagcccgcatgtttggtatcgaaggacagatggaagatccacaaagttctgactggaaattagtatatgttgaccatgaaaatgacatattacttgttggtgatgatccttgggaagaatttgtaagttgtgttcagagcattaaaatactgtcatcccttgaagtacaacaaatgagcttggatggtgaccttggaaatgtgccagttcccaatcaagcttgtagtgagatcgacagtggaaatgcatggagaggacattatgatgatacttcagctgcctcctttaacagataaaaaagtcaaaaacaaattgattggactttacataggctcattggtggatgcctttccattaagaagatcaatttaatgaagttcttccaaattcagaggtgttaaaaccactgccatggaattggcagaaggatggatcttgttctaactttagcatccactttttttgactttgccctttaatcactagttttactacgaggtaaggtgcaaaagggagctttggggcaagtttatcattgatgtataatataaccatattttaaaagctgatctgacattatcagcaagatttgtagtgtttgtagctattgctcagttaaagatacaattagcatcaataaaaattagatatatagatataactcgagggggggcccggttcccaattcgccttatgtgagtcgttttacaattactggccgcgctttacaacgttgtgattgggaaaccctgcgttcactaattaatgccttgtgcaattccttttccaattgcttatacaaaaggcccttcgttgccttccacattgtcg

SEQ ID NO: 3981 - DNA, 566 bp, Gossypium hirsutum
  unsure (1)..(566): unsure at all n locations
  Clone ID: LIB3829-023-Q6-K6-D2
acctttcaanatgggggggggagggggggggccataaacaatgcaggagttttaaatggtggattgtgggccagccaaactcaacggatgcgaacatatacaaaggtacaaaagcgtggcttcttgtgggnaagaatcaatttttatttgtacnnccgctacnnaaagggtatgtatgaggggggggggggatctancccgcatgtttgntatcgaaggacagatggaagatacacaaagttctgactggaaattagtatatgttgaccatgaaaatgacatattacttgttggtgatgatccttgggaagaatttgtaagttgtgttcagagcattaaaatactgtcatcccttgaagtacaacaaatgagcttggatggtgaccttggaaatgtgccagttcccaatcaagcttgtagtgagatcgacagtggaaatgcatggagaggacattatgatgatacttcagctgcctcctttaacagataaaaaagtcaaaaacaaattgattggactttacataggctcattgctggatgcctttctattcctaagatcaatttaa

SEQ ID NO: 3982 - DNA, 580 bp, Gossypium hirsutum
  Clone ID: LIB3585-066-P1-K1-B6
gcggggcacgaggaggcctattccgcataccaacaacaactctttcttccactccatgaggatatctagagcaaggtggtttaaccttttaagaagagtttttcattaccaaaatggatcaaggtctgatcttgggtccaaccctttcaattctagcacttggatgatgctggagttcttagctttggtcattcaaataagcatcatagcattcactttggcaatttcaaatgaggaaaggccaatttggcctatgagaatatggatagttggctatgatattggttgtgtccttagcttgttacttctttatgggaattatcatcttcaaataactcaaggaaatcgttttggcctttccgatatcgaacaacagagaaccagtgaagaatcaaggagctcacatttgatgaacaaatgccggacttcactagagctgttctttgcaatatggtttgtaatgggaaacgtttgggtgtttgattctcgatttcgatccttccatcgagctccgaatctccacgtactttgtatctcattgctagcttggaatgctctgagctactctttcccatttctg

SEQ ID NO: 3983 - DNA, 299 bp, Gossypium hirsutum
  Clone ID: uC-gsflnu33B008h06b1
ttcacgcgtccggttggctatgatattggttgtgtccttagcttgatacttctttatgggaattatcatcttcaaataactcaaggaaatcgttttggcctttccgatatcgatcaacagagaaccagtgacgaatcaaggtgctcacatttgatgaacaaatgccgtacttcactagagctgttctttgcattatggttcgtaatgggaaacgttgggccgtttcggtctgaacatatgcccttctgtctggctcctactgtacacgtactcaggctgtctttggtagctggtaatgt

SEQ ID NO: 3984 - DNA, 938 bp, Gossypium hirsutum
  Clone ID: GOSHI-09MAY01-C3741_1
ctccttatctcaccttcaccgccgtcttcttcatcctactacttcttcaacagccaccgttataaccactgcaacgccgcctctttcttcttcttcttcttcctcctcttccactactaagactaaccctgctcagccggttgatgcttcactagctattgctaccagatctagcgcttcccttaacatcgatgattctacaaagaagaatcaacccaacttgccaccagtcgtcgaacccaccggcgaaacggtccactaaagaccgtcacacgaaggtggatggtcggggacggcgtataagaatgcctgcagcttgtgcagcttggggttttcagttgactagagagttgggtcataaatctgatggtgaaacgattgaatggcttttacagcaggctgagccggcgatcattgcagccaccggaactggtactataccggccaatttttcgactcttaacgtttcgttgagaagtagtgggtctacgctttcagctccaccgtcgaaatctgctcctcactcgttccatggtgctttagctttggcttctcatcatcacccatatgaagaagggtttgctcatagcgctttgttcggtctccaccatcatcagcaacagctgttaagggcaggtcaaatagctgaaactttacctgcaggtggcggtggtagcggcggcggtgggaattcaagtgagaactatatgaggaagcgctttagggaggacttgttcaaggatgataaccaacaacaaggtgaaaccggtggcggcggtggcagcggagacggtgacagtggcggtgatggatcctccattaaggcttttataactggcttacctcaattgcataagccatcgaatatcttacctgccactgccatgtgggcagtggcaccagctcccagcagtacaactggaagacgttctggatgc

SEQ ID NO: 3985 - DNA, 738 bp, Gossypium hirsutum
  Clone ID: GOSHI-09MAY01-C3771_1
cccacgcgtccgttcaaaactaaaaaatggccccgccccgcgtccccaacaacccggctttcgacgccgacgaggactgcccaattaacccatctcacgaattagcccagtttggagccggttgtttctggggagtagaattagcgtttcaacgagttgaaggtgtaatcaaaacaacggttggctactcccaaggtcatgttcatgacccgaattacaaactggtatgcaccggttcaacaaaccacgtcgaggtggttcgggtccaattcgaccctcaaatctgcccttacgttaatctcctctctcttttctggtcccgccatgatcccaccactctcaatcgtcagggtggagatgtgggagcacaatatagatcagggatatactactataacgaaaaccaagctcgtcttgcaagagagtcaatggaagctaagcaattagagttaaaagataagaaaattgtaactgagattcttccggcgaaacgtttttataaggcggaagagtaccatcagcaatatttgggaaaaaggtgggaggtttaggggcataaacagtctgctgaaaagggttgcactgaccccatttggtgctttggctgaagaaagcccttttggatatgtttttttttaatatcatgatggcacttaagcttcttgtctggtaataaacaagttatcatggtttccttttgttgtgttctgaagacatatatatatatcaatggagtct

SEQ ID NO: 3986 - DNA, 366 bp, Gossypium hirsutum
  Clone ID: LIB3585-042-P1-K1-F12
cttcaaaactaaaaaatggccactaccgtcgacaccaacaacccggctttcgacgccgacgaggactggcgaatggacccatctcacgaattagcccagtttggagccggttgtttctggggagtagaattagcgtttcaacgagttgaaggtgtaatcaaaacaacggttggctactcccaaggtcatgttcatgacccgaattacatactggtttgcaccggttcaacaaaccacgttgaggttgttcgggtatcaattcgtacctttatattttgccttacgttaatattatgatctgttttattggtcccgcccagtgatttcttatctacatattaattgtttgggggggggttatttttt

SEQ ID NO: 3987 - DNA, 1007 bp, Gossypium hirsutum
  Clone ID: GOSHI-09MAY01-C3761_1
gagaaacagaggggaaaaaaaacaaggtaaaaggttttcgtttaattgatctgcaggaaatgggtttttgcccttgttttggttggaccaaaggcaagaagctgaagggcgatgacaagaaagaacttggcagaaaatgcaagcctcaattgtgtgctggagttggttcagtaggatcaaaaagcattgcaggcttaagaaaggagtcatctgctacaactgatgagcctaatgatgacaagagggctcacactttcaaccatcaacaactagcgaatgcaacacaaaatttcagaaaagaatccttgatagggcacggtggatttggggctgtttataaagggcaattagaaagtactggtcaggttcttgctgcttttccgcgttctttgtccccctttcttgtttgtatttctatcttaatcacatgcatgcactatggttattagcaggttgtagctgttaaacagcttgataagacagggctccaaggggaaaaggagttccttgtggagggtctcatgctttctctcttgcgtcacccgaatcttgtcaatttgattggttattgtgccgaaggagatcaacgacttctcgtatatgagtacatgcagctaggatccttggaagatcacctccattatcttagacctgatcagaaacctttggattggaatacaagaatgacaatagctgctggtgcagcaaaaggcttggaatatcttcacactgaagctaatcctcctgttatatatagagatttaaagtcatctaacatactattaggtgagggattcaacccaaaactctctgatttcgggcttgcaaagttcggtccgagtggagataaatcacatgtttccaccaggatcatgggaacccacggttactgtgcccctgagtacctcactagtggaaaatgactatgaagtctgacatcttagttttggggtagtcttattggagctgataacgggacgtaaagctcttgatgatagccgtgctcg

SEQ ID NO: 3988 - DNA, 347 bp, Gossypium hirsutum
  Clone ID: GOSHI-09MAY01-C3711_1
agattatccaaagtccacaacaaaaaatgcgactctgttcgtttgtcccttgactgaatacgccagctatggaatacatggggacagtcatcctcctcctgtttacaccgtggacaacgagcatcagaaacaactcttctttgcttcagattaaaaaaagttgggatgtaattccaagctatccttcatattgtaattttaacttttgagggcatctgtaaattccatagctttttgaaaaaacttttagtttcggtctgtataataatagcatttatagtagcctactgtaatagtttataggcgcttcgaatagaaaaattaccagaaggctctcctttccagaa

SEQ ID NO: 3989 - DNA, 292 bp, Gossypium hirsutum
  unsure (1)..(292): unsure at all n locations
  Clone ID: LIB3145-025-Q1-K1-E5
cccacgcgtccgatcagaaacaactcttctttgcttcagattaaaaaaagttgggatgtaattccaagctatccttcatattgtaattttaacttttgagggcatctgtaaattccatagctttttgaaaaaacttttagtttcggtctgtataataatagcatttatcgtnaaaaaaaaaaaaaaaaaaaaaaaaaaaaaaaaaaaaaaaaaaaaaaaaaaaaaaaaaaaaagaaaaaaaaaaaaaaaaaaaaaacaaaacaaaaaaaaaaaacaaaagggcgcctcccat

SEQ ID NO: 3990 - DNA, 896 bp, Gossypium hirsutum
  Clone ID: GOSHI-09MAY01-C3691_1
ctccgtcatcccaagaacaactggaggccaggtgtattattattaccccttctctgctgtatctgatcctgcaaagctctacaatgaccttagatggaacatcaccaggccccaaggttttgaggctgtaatgcgtgtgagatgcagccagggtattcaagttcaagattactctggaaacttctgcaaacgcattccgaccgacattgacctacctgggattgactgtgacaaatgtatattggtaaccctaaagcatgatgacaaattacaagatggttctgaatgtgcttttcagtgtgcccttctctataccactgtttatggccaaagaagaattcgagttacaaacttatccttgccatgcacaaatatgctaagtaatttgtttcgctctgctgacttggatactcagtttgcatgtttattaaaacgagctgccattgaaattcctacaagcccacttgtgcaagtgagggaacaagtgacaaatctttgcatcaacattttgttttcatatcgtaaattttgcgccactgtatcatcatctggacagcttattcttcctgaggccctgaagctacttcccctatacacccttgcactaatcaagagtacaggattgcggaatgatggcagaataaatgaccgttccttctggttcaattatgtttcctccctttctactcctttggcagtcccattggtttaccctaggatgtttgctattcacaaccttagtacacaggaaagagatgagtctgttcttcctcctataatccctctatctagtgaacatgtcagcgatgatggaatctattttctggagaatggtgaggatgctctaatatattttgggagctcagtggattcaagcctcttgcaacaacttttgc

SEQ ID NO: 3991 - DNA, 550 bp, Gossypium hirsutum
  Clone ID: LIB3585-056-P1-K1-D7
cccacgcgtccgcccacgcgtccgcccacgcgtccggtcacaaacttatccttggcgtgcgagcaaatatgctaagtaatttgtttcgctctgctgacttggatactcaattcacatgtttcttaaagcaagctgcaattgaaattcctacatgcccacttcttcaagtgagggaccatgttacaaatctttgcatcaacattctgctttcgtatcgtaaattttgcgccacagtatcatcaactggacagcttattcttcctgaggctcttaagcttctccctctatatactcttgcattaatcaagagtagagggttgcgaaatgatggcagaatagatgaccgttctttctggttcaattatgtttcctccctttctactcctttggcaatcccattggtttatcccaggatgtttgccatccacaatgttgattcaaaggatggggatgaatctgttcttcctcctacaatcccactttctagtgaacatgtctgtgatgatggaatctatctttttgagaatggtgaggatgctttaatatattt

SEQ ID NO: 3992 - DNA, 875 bp, Gossypium hirsutum
  Clone ID: GOSHI-09MAY01-C3671_1
tccggggaggttctcttatccccatggccaaaaatctctcagctgctttcctcatcaccgatgtcttcaagcttcctcatatctacccattcatagtggttccatcagtcctcctgcacccctccattgagctcaccaactgcgcgaacctccacgaacccaatactgattgggagggaccctgaccctgcccgtcccaggttggagtgcacccaacaaccactctttcctgccctcttcaactccaccagccctggtcgtcagaatcgttcctgaccccagagtggtttgctgggctccgtattccctctcagtgggcccaacccttctcccacattcagccttgtctttcctcaaatccctttggattttcaaagaggaagttttagctggtggaggatcccgtatgtggactccagggcaaagcggaacatgcctctcctgcaatagctgcaggatcagatcatacggctgatgttccaatgtctgaagttatatcagacgagttcgcatttggaagcaatgcaacaggactcgtgaaaccgtgggaaggagagaggattcatgaagattgcggatcggatgacctagaactcacccttggcagttccaggactaggtgagttttttaagcttattgagtagatagatggccaaaattgactccttttgttttcccttcctgtttttactttgtgttacaataccttgcatataaagcaatctgtatgaactttgattccatattttgctctctgaaaaaagggaacaaaagggatcagggtgagcatgaatcttattattagccttcatttaattttataattttttttctctaaatatatagtcagtttttcaatggtgatttcttagca

SEQ ID NO: 3993 - DNA, 975 bp, Gossypium hirsutum
  Clone ID: GOSHI-09MAY01-C3161_3
ggggcatctgattatctctacgccgctttgaagacgatagatatttaagattatgtaagctaaacaagtcaaatccggtcccctccactgaatgagcctcttaaaacttgggttctacaatcaacgcttccatttgcttcgctttattccaccacagtcttccaatgtctccccatctaccttttgggtgcaaaatctgaccaacaataacaccaccaaccactcatcgttatcttgttatactcccaggattaatcctgtaatagccaaggcactgcgtactgaagcagctgccacagcacagcccataaaaatggtgaaagctatcagggttcatcaacttggtggacctcaggtccttaaatgggaggatgtggaacttggggaacccaaagagggtgagatacgtattaaaaacatagctattggactgaatttcatcgatatctattttcggaaaggagtttataaggctgctaccatgcccttcactccaggtatggaagctgttggagaggtgactgctgggggacctggactgactggccggaaagttggagatattgtagcttatgctggtaatcctatgggttcatatgccgaggagcagattcttccagctgacaaagttgtgccagttcctccttcggttgaccctattactgctgcatccatcatgctgaagggtatgactgcccagtttctagtacgtcgttgcttcaaggtcgaatccggacacacagttcttgttcatgctgcagctggtggggttggatctttattatgccaatgggcaaatgcacttggtgccactgtcattggaactgtctcgaccaaagagaaggcggctcaagcaaaggaagacggatgtcaccatgcaataatttataaggaagaggattttgtttcccgtgtcaatgagataacatgtggcaagggggtggaagttgtctacgattctgtagggaaaggata

SEQ ID NO: 3994 - DNA, 1295 bp, Gossypium hirsutum
  Clone ID: GOSHI-09MAY01-C3161_2
cgggccggaaaacctgggaaccacgcgttccctcacgcgtccgcagtcttccaatgtctccccatctaccttttgggtgcaaaatctgaccaacaataacaccaccaaccactcatcgttatcttattatactcccaggattaatcctgtaatagccaaggcactgcgtactgaagcatctgccacagtacagcccataaaaatggtgaaagctatcagggttcatcaatttggtggatctcaggtccttaaatgggaggatgtggaacttggggaacccaaagagggtgagatacgtattaaaaatatagctattggagtgaatttcatcgatatctattttcggaaaggagtttataaggctactaccatgcccttcactccaggtatggaagctgttggagaggtgactgccgtgggacctggactgactggcaggaaagttggagatattgtagcttatgctggtaatcctatgggttcatatgccgaggagcagattcttccagctgacaaagttgtgccagttcctccttcggttgaccctattactgctgcatccatcatgctgaagggtatgactgcccagtttctagtcgaatccggacacacggttcttgttcatgctgcagctggtggggttggatctttattatgccaatgggcaaatgcacttggtgccactgtcatcggaactgtctcgaccaaagagaaggcggctcaagcaaaggaagacggatgtcaccatgttataatttataaggaagaggattttgtttcccgtgtcaatgagataacatccggcaagggggtggaagttgtatacgattctgtagggaaagatacctttgagggctcgttggcatgtttaaagccccgtggctatatggtgtgctttgggcagtcatccggtacaccagatccggttccgttgtctgcacttgcacccaaatcattgttcttgactaggccttccatgatgcaatacacgtcaactcgggatgagctgctggaaactgcaggggaagtgtttgctaatgttgcatcaggcgtattgcgggttcgggtgaatcacaagtaccccttgtcagaagcagcgcaggcacatgcagacctcgagaatcgtagaacaactggatcagttgtgctgattccatgaaagcatctcggttgtgactttgaacaccaattgcatgagaaaaataaaaaaaaaactataacgtgtgggattatgtaagaacttgatctatatatatatggaagtgcatgttgaaggcttgaagccacagttgaat

SEQ ID NO: 3995 - DNA, 1057 bp, Gossypium hirsutum
  Clone ID: GOSHI-09MAY01-C3161_1
cgttttcgttttttttagtactttttttgcggggagcgggtatttgtcgattcgactgttttttgttatttgattttgagggaatagggagagatggtgggaggaggaagcaggagagacgaaggatctatggtgatcaacaacaccaacgtgtttgcggctcttgaaactctacggaagaagaggaggtctgataaggaccgaggttcttctaaaaagtcttcttctaagtctcagcaatcacaaccgcaaaaagaacctgaaccgcaggtcttttgggctccggcaccgcttaatgtcaaatcatgggccgatgttgatgacgatgatgattattatgctacaactgctcctcctcagtcggtttgggggtcctctgagccgtctcatgaagataagaccgtcaacgaagagatgttgcacaagaaaagaaagatggagagggagaaaagaaggaaaatcctccaggggagtctaaaccccccgaccggaagaaaaagaggataaatcgaaggagggtaaagaatcacaggatcagctgactagtacagatgtcaccaatgggccagatgaagctgctggaactgaacagaatgaggaggatgcatcagctgctgacgtgaaagagcggctaaagaagatggcatctatgaagaagaagaaatccagtaaagacatggatgcagctgcaaaagctgctgcacaagaggctgctgcaaggagtgcaaggcttgctgctgcaaagaagaaagagaagaaccattacaatcagcaaccagtgcggtaaacgcctccttttttgttctacattacatatacatatatgaacatgttttctcgttgttcattcaacaatgcgaaataaacagtgggccaaaagatgactgttttagttttatttgaatggacgagaagaaagtttgatctgttttttttgctttttggatcctattgtttctcctttatcatggatttggaactcatttgttatggcacgtcttctttatgctaaaaattcttcattggacagcatttcaaatatttgggggggggggag

SEQ ID NO: 3996 - DNA, 420 bp, Gossypium hirsutum
  Clone ID: LIB3197-053-Q1-M1-G12
gcttgctgagctggaggctcttcttgctgattttggagtaacacagaaggagagcaatggccaggatgagtcgcgtgatgttgcacaagaaaagaaagatggagagggagaaaagaaggaaaatcctccaggggagtctaaaagtgccaagaagaagaaaaagaaggataaatcgaaggagggtaaagaatcacaggatcagctgacgagtacagatgccaccaatgggccatatgaagctgctggaactgaacagaatgaggaggatgcatcagctgtgacgtgaaagagcggctaaagaagatggcatctatgaagaagaagaaatccaagtaagacatggatgcagctgcaaaagcttgtgcacaagaggctgcttcaaggagtgcaaggcttgctgctgcaaagaagaaagagaag

SEQ ID NO: 3997 - DNA, 378 bp, Gossypium hirsutum
  Clone ID: LIB3189-046-P1-K1-C5
gttcatatgccggggagcatattgtagcagcagactatctagtgcctgtccctccttcggatgaccctattaccgctgcatccatcatgctgaagggtatgactgcccagtttctagtacgtcgttgcttcaaggtcgaatccggacacacggttcttgttcatgctgcagctggtggggttggatctttactatgcctatgcgcatatgcacatgtagactgtgtgccaccaccggaaccactaccagtaccggcgccaaaagatgactgatgtaggtttatttgaatggacaagaagaaagtttgatctgttttttttgctttttggatcctattgtttctcctttatcatggatttggaactcatttgttatggc

SEQ ID NO: 3998 - DNA, 348 bp, Gossypium hirsutum
  Clone ID: LIB3165-060-Q1-K1-E7
cccacgcgtccgaacgtgtttgcggctcttgaaactctacggaagaagaagaagtctgataaggaccgaggttcttctaaaaagtcttcttctaagtctcagcaatcacaaccgcaaaaagaatctgaaccgcaggtcttttgggctccggcaccgcttaatgtcaaatcatgggccgatgttgatgacgatgacgatgacgattattatgctacaaccgctcctcctcagtcggtttggggatcctccgagccgtctcatgaagataagaccgtcaacgaagaggatagtgagagtgaagaagatattttagatgaaagtgatgatgatatagaagaagatcatgat

SEQ ID NO: 3999 - DNA, 326 bp, Gossypium hirsutum
  unsure (1)..(326): unsure at all n locations
  Clone ID: LIB3825-033-Q6-K6-A4
ctctatcgcctgctttgctggttcttacttttagggtgaatctattcttaagtggaggcattaaaggattacaatatccacggagacagatgatataacttcactgaactttgtagcattctactaaaggttttatattttgttngggctttttggaatgtttaaagcggcgtgggggtggggtgagctttgggcagtcatccggtacaccagatccggatccgttgtctgctcttgcacccaaatcattgtttttgagtaggccttccatgatgcaatacacgtttactctgnatgagctgttggtanctgcatgggatgtgatt

SEQ ID NO: 4000 - DNA, 706 bp, Gossypium hirsutum
  Clone ID: GOSHI-09MAY01-C3111_1
gaaaaaaattgcagcaaaactttactgaagttaacgattccgcggataaagttattaaggaataggagagagattcagataaagcagatgcgccgcgacattgccaagcttcttgagactggccaagaagctactgctcgaattcgggtatgtgtatatatacatatatattttaattcactgtttatcgaagtagatatatatatttgatactcgaaatatgctgtttttttaatattttgtgaagtgagttaggttttccggtacattctaaatttgctgtttttagaaggtattctaattctttttggtactacttgaaaaatgagtcgatagcttcttatgagacaatggttggggggttccatttttggtggaacatataataagggaagagaacgggatggctgctcaggagatcctcgaactgtcttgcgagcttattgccgtccggcttccgatcatagagactcaaagggaatgtcctctagatttgaaggaagcaacatctagtgtttggtctgctgcaccaagacgtgccgatctaccaaaggtgctgcaggttcaaatgctatttgcttacaagaacggcaaggaatttgcatcaactgcatctgaactgacgccagattgctgagacaatcagcagttgatacaattgttatacatacgcgtggcttcacctgaagcaaaactgaagattctg

SEQ ID NO: 4001 - DNA, 832 bp, Gossypium hirsutum
  Clone ID: GOSHI-09MAY01-C3131_1
gtcaaacttgctgcgcctctaatggatatgaacataaacaaaatggtgcatgggtgcccctggagacatccacaaaagatatacttacaggtaatatatcccgttggaaaaaagtatgcatatactccttcagcacctagcctgaaatcgatgtcaactactgagctgagagctctgtttacaatcgacgatgtcaagcttacttcatggttggctggaatgtgcatggctgaatatctgcctcatctagaagattctcttcagaaacaggtcctggaagctgtttcattaattgacataagaagacacttgatagaggcattagccccattgtctggaagacctttgcaagctgatccggccttttgcagaaaggcaacattgcttgcttcctctggatcctaccgttgttttcctggtgcactgccatatttcaactctgtttcctaagcagcagccagctctgatgctccaaagctctcagcatatatcgccgcaaggaataccgcaagagtcacctcttctagcagaatatccatggagtccgagatgggaagcatcacaaatggcggagcggatattcgatttcttggcggatgagtctcttaacttcaaacggttctgtaatgagtctcaacctcaacactagtacgataaggggatgctgaagtttggtatgggttatgttttattcatccaagttgtctaaaaaatgcttaatggaacatttggtagttttcttttaatacaatttcgaaactggtgtctaagttgtagaaaggaaatgcaatgatctatctttcccttcctaaaaaaaaaaaaaaaaaaaaat

SEQ ID NO: 4002 - DNA, 454 bp, Gossypium hirsutum
  Clone ID: LIB3149-003-P1-K1-B1
cgtttttacttaactcggtctctgctaaaagtcaacttttgatagtactgttgttgtaggtgcacttccatatttcaactctgtttcctaagcagcagccagctctgatgttccaaagttctcagcatatatcgccacaaggaataccgaaaaagtcacctcttctagcagaatatccatggagtccgagatgggaagcatcacaaatggcagagcggatattgtgagtttcattagtcttagtagattctcaatcattttcagtgtgttttattaacatgtattgatttcttcagcgatttcttggcggatgagtctctgaacttcaaacggttctgtaatgagtctcaacctcaacactagaacgataaagggatgctgaagtttggtatgggttatgttttattcattcaagttgtctaaaaaatgcttaatgggacatttggtagttttc

SEQ ID NO: 4003 - DNA, 1298 bp, Gossypium hirsutum
  Clone ID: GOSHI-09MAY01-C3041_1
gctgctgttgtccccctattttcctaacagagccttctcaaaaacgacattcaacaatggcgaattcaatggcgaagtctttccttcaagttgcagctactgaagaggttgtttctcctctcagagttgtccagatcgaaggcctggtgatattgaaaataatcaagcactgcaaggaattttcacctgctctggttaccggccaacttcttggattagatgttggcattgttcttgaagttactaactgtttccctttcccgatccgcgaggaagatgaggagattgaagctgatggagctaattatcagcttgagatgatgagatgtctaagggaggttaatgttgataacaacactgttggatggtaccaatcaacgattttgggttcatatcagacagttgagctcattgagacttttatgaattatcaggagaatattaggaggtgtgtatgcattatctacgatccttcgaggtctaatcaaggtgtcttggctcttaaggctttgaagctatctgattcttttatggaactttaccgagctaatagctttactggagaaaagttgagggagaaaaacttgtcatggatggatattttcgaggaaattcctatcaaagtctcaaattctgcccttatcagtgcctttatgactgagctggaatctgacacaccagttacacagtgtgattatgatcgtctgcaattgtcaagcaatccatatatggagaggaatatggaatttttgattgaatgcatggatgatttgtcagtggaacagcagaagttccaattttactacaggagcctgtcacgtcaacaagcccagcaacaggcatggcttcagaaaagaagggcagataacatgcaacgaaaagctgctggggaggatcctttgcctgaggaggacccttcaaatcccatcttcaagccaatccctgagccatcaccgttggagagcttcctcataacaaatcaaatcgcaaattactgcaaccaaatcaacggggtttctgggcagagcttcaacagattgtatttaatgaaatcggtgcacgataactgaaactcgcaatgtcgtctgcaattttttgcaggtataaatgatgcattgtctagattagctgaaaatttttgcaatatctgagtagaattataatttatggttgtgatttttatttgaagatgaatgtgattgaaaatttttcccatgctgttaatgttttacatttaatctgtaagcctgatcatttgcccgcattaaatcttagtattactatttgaatatgaaatg

SEQ ID NO: 4004 - DNA, 809 bp, Gossypium hirsutum
  Clone ID: GOSHI-09MAY01-C3021_1
aactgtgttgtcccgacagatctctgagcttggtatttatcctgctgtggatcctttggattctacatctcgtatgctctctcctcatattttgggtgaggaacactacaacactgctcgtggtgttcagtaggttctccaaaactacaagaacttgcaagatattattgctattttggggatggacgagcttagtgaagatgataaattaactgttgcacgtgctcgtaagatccaaaggttcttgagccagcctttccatgtggcagaagtgttcactggtgctcctggcaagtacgtggagttgaaggagagcatcaccagcttccagggcgtgttggatggaaagtatgatgacctgcccgagcagtcgttttacatggttggaggaatcgaggaagtgattgcgaaggcagataagattgccaaggaatccgcagcctaatcaaatccacataccttaatttctgccgagtaatttcgaaaataatctaggtggtgttggcaatgccagcaacagacctgttcatttattttgggggttttgtttatgtttaatgatgttattcaagagtgtaaaagagcacttcggccccgcttttttctttgtttaaataagggaaatagaaggcggatgtgtacatttttttttttgttcgaaaacgctggctgctaaagccttatcctttctgactgccgtttattcgaaactacttctgttttgaaatgcattcgagactaatgtttcctgaacccttggggtttcaattttattgttcttaatgaacaaattggcgaattttattctc

SEQ ID NO: 4005 - DNA, 396 bp, Gossypium hirsutum
  Clone ID: LIB3083-002-Q1-L1-H4
gttattttggttttctatctcattttcgttgttttggtgcatttcaaaacagaagttgtttcgaataaactgcagtcagaaaggataaggctttagcagccagcgttttcgaacaaaaaaaaaatgtacacatccaccttctatttcccttatttaaacaaagaatatagcggggcctaagtgctcttttacactcttgaataacatcattaaacataaacaaaacccccaaaataaatgaacaggtctgttgctggcattgccaacaccacctagattattttcgaaattactcggcagaaattaaggtatgtggatttgattaggctgcggattccttggcaatcttatctgccttcgcaatcacttcactgattccttcaaccatgtaaaact

SEQ ID NO: 4006 - DNA, 394 bp, Gossypium hirsutum
  Clone ID: uC-gsflmaxxa091a12b1
cgattgtgtagacagccctgccaagcctacttcaactgttaatggtttagaaccaatgattagaggcattgaaaagccaagaaatttggaggatgtgtctgataaaaccaaaccttgggagctaaccgagattgttgatcctactcaatgtcgaacagtcaccttgccagataactctgagattgctagcaaggttgctagacttctttacacaaattctggtgttggggttcttgctttatatacaaatggggttcaaaaactacttctgttttgaaatgcattcgagactaatgtttcctgaacccttggggtttcaattttattgttcttaatgaacaaattggcgaattttattcttaaaaaacaaaaacaccattatatatataaaata

SEQ ID NO: 4007 - DNA, 1154 bp, Gossypium hirsutum
  Clone ID: GOSHI-09MAY01-C3391_4
ttcccggttcgacccagcgttcgtcccgcgtccgcttgaagaaaaagggggggggggggtggtcggaggaagaagatatgggaagcgagtcatacgaggaagccattgcagctttgtcgaagcttctcagtgacaaagctgatctcgggagtgtcgccgccgcaaaaatcaagcagataacagccgagttagaggcagctgccgaggccactcagttcgacccggtcaagcggctcgagaccggtttccttcacttcaagaaagaaaaatttgacaaaaatcctgatctgtacggtgcacttgccaaagggcaaagacctaagttcttggtatttgcatgctccgactctcgggtgtgcccctcccacatcctgaatttccaaccaggggaggcttttatcgtccgtaacattgccagcatggtcccgccctatgacaagaaaaaatactctggagctggggcggccatcgaatacgctgtcctgcatctgaaggtggagaatatagtagttattggacacagttgctgtggaggtatcaaagggcttatgtccatcccagacgacgggaccactgctagtgatttcatagaacaatgggttagcatctgtacaccagcaaagaccaaagtgaaatcagaacagaatgagctaagtttctcggagcaatgcaccaactgcgagaaggttatgtacattttttgtttagtgtagaataaaacgttaagtatgtgataatgttgtgaattaaattaaccaaaaaatgcaggaggcagtgaatgtatcactggggaacctattgacgtatccgtttgtgagagaacaggtggtgaagaaaacagtggccctgaaaggtgcacattacatttcgtgatgggaagtttgaccagtggaatctggatttcaagatttcacccactttagcaatatgaggatgcatgcagcatttttttcgacttaatcaaagctcttctattgctctagtcaaactaaggcctgccttcacttatgtttcttcatcgtcattgctaatttcagagattaaaagtatgttggagttccatcctggttcatttaataattctgtgtgaaaaagaaaagtgtcaaaagaatgtggttaattgcactctaaggaaatctgagcttacgataggg

SEQ ID NO: 4008 - DNA, 680 bp, Gossypium hirsutum
  Clone ID: GOSHI-09MAY01-C3391_3
cgccattctacctgctttttccaggaaaccaaacgccattcttcctcacctcattgtcaactgttacaaggtgaattgaagcatggctgcaaaatttaaaaagtgcatgatgttgttcggcaaaggtctcaaaaaaaagtgataatcaacttgtcagaaggaagttgatatgggaagcgagtcataccaggaagccattgcagctttgtcgaagcttctcagtgacaaagctgatctcgggagtgtcgccgccgcataaatcaagcagataacagccgagttagaggcagctgccgagtcccactcagttcgacccggccaagccgctcgcgaccggcttccttcacttcacgatcgaaacactttgatcaccaaccctgacctggaccgtgcacttgccaaagggcaaccgccctaactctcctggtctcctgcttccccccactctcgggttgcccctcccgctcccttcccccctcccgccatcctccccctttgccacgctcccccccatctgcacccctcttctcccttccccccccccccattccttgaacttactctccaacctccccctctatccccatccccctaccttatctcctcctccaatccccccccatccctctttccctctgtacaactctccctctccaccctcccctctctaccccccctcc

SEQ ID NO: 4009 - DNA, 732 bp, Gossypium hirsutum
  Clone ID: GOSHI-09MAY01-C3391_2
cgccattctacctgctttttccaggaaaccaaacgccattcttcctcacctgactgtcaactcttacaaggtgaattgaagcatggctacaaaatttaaaaagtgcatgatgttatgttgttcggcaaaggtctcgtcggaagggaagaagatatgggaagcgagtcatacgaggaagccattgcagctttgtcgaagcttctcagtgacaaagctgatctcgggagtgtcgccgccgcaaaaatcaagcagataacagccgagttagaggcagctgccgattccactcagttcgacccggtcaagcggctcgagaccggtttccttcacttcaagaaagaaaaatttgagtacgccactgcactctctcttttttttttttccctttcatatcgcgtgcctagttgtctctccaatttaacaaggcgtttttaatggctttccaaaaaaaaaaagagaattgttattactatttttgtttttaaatataataaagcaagtggatttggaaaaggtaacagcaaatgaattattaattgcagaaaagggaaaaagatatggttgaatttgaatgttggcaggcttcagattcccgtggacctttttattttgcataataattagcttaactttaatctgtttgtcttgttttcttttctcttttttttttctgcctccaattttttccagcaaaaatcctgatctgtacggtgcacttgccaaagggcaaag

SEQ ID NO: 4010 - DNA, 1099 bp, Gossypium hirsutum
  Clone ID: GOSHI-09MAY01-C3391_1
ggcttcccggttcgaccctccgctcgtagaaaaaaaaaagtgataatcaacttgtcagaaggaagaagatatgggaagcgagtcatacgaggaagccattgcagctttgtcgaagcttctcagtgacaaagctgatctcgggagtgtcgccgccgcaaaaatcaagcagataacagccgagttagaggcagctgccgagtccactcagttcgacccggtcaagcggctcgagaccggtttccttcacttcaagaaagaaaaatttgacaaaaatcctgatctgtacggtgcacttgccaaagggcaaagtcctaagttcttggtatttgcatgctccgactcccgggtgtgcccctcccacatcctgaatttccaaccaggggaggcttttatcgtccgtaacattgccagcatggtcccgccctatgacaagaaaaaatactctggagctggggcggccatcgaatacgctgtcctgcatctgaaggtggagaatatagtagttattggacacagttgctgtggaggtatcaaagggcttatgtccatcccagacgacgggaccactgctagtgatttcatagaacaatgggttagcatctgtacaccagcaaagaccaaagtgaaatcagaacagaatgagctaagtttctcggagcaatgcaccaactgcgagaaggaggcagtgaatgtatcactggggaacctattgacgtatccatttgtgagagaagcagtggtgaagaaaacagtggccctgaaaggtgcacattacgatttcgtgaatgggaagtttgatctgtggaatctggatttcaagatttcacccactttagcaatatgaggatgcatgcagcatttttttcgactgatcaaagctcttctatttgcttctagtcaaactaaatgcctgccttcagcttttatgtttcttcatcgtcattgctaatcacagagaataaaagtagtgctggtgttcctatcttggttcattttaataattttatgtgtgaaaaaagaattaagtatttaaaaggaagtgttgtttaatttgtactctagaaagaaaatcttgagcttgatggagtagtgttttatc

SEQ ID NO: 4011 - DNA, 633 bp, Gossypium hirsutum
  Clone ID: GOSHI-09MAY01-C3301_6
agctttcagtggaaagcaatcggataccagaggctgctcttatggctcgatcttatcttccaagcaaggtttcagagatagtgacaatttggagaaaagacctcaacaaggttaatcccaaagctgctgaatctttggccgatcctggagagtatcctaacttgtttgaggattgggagctttctctttctgttgagtctaaagtggcagaaacaaggggtgtttatcctactgcatcgggctatttgaaccatgctgatacatcggagatgacacttgtggaagctttcagaaacatgcaagttgaggatgaggagcctcttgtgaatggtgttcttgatcatgaggctggcagaaccaaatgggcgtggtctgatttcagaggagccagaatggagaagatggtagccaagaggagcctgttgttgtagatgctgattctaacgatggtgcagtacttgttaatggttacgagccagaataagagaggggttcgaatactgaatgaaccctgtcagcctaaatgcaattgtgcttacaccagatcactaggttttatgaaaacattcagtttgagctccatttatcatgtacttaatatatcatactattagcgcgaacgatgtgaatttt

SEQ ID NO: 4012 - DNA, 692 bp, Gossypium hirsutum
  Clone ID: GOSHI-09MAY01-C3301_5
atagatcacatatgacacttgtggagactttcagaaacatgccaacagaggaggagcctcttgagaatggtgaccttgatcatgagaatctagaggatcagaatggagaagagggtagccaagaggaggctgttgttgtggatgctgattcaaacgatggtgcagtgctcgttaatggcaatgaacctgaagaagagtgggtgcttacaccggatcactaggttccttcaagacattcagttcgagctctattcagaacatatttaagatttcgacctagacagatgtgatattaaaatatttcgtcttggctgattgtcttgcgttcctggaggtttggtttggatctatctacaaaagcacattgaattttgggatgggggcataatacaaagtattttcaattaagcgttccagttatgatattagattcttggccttttgggtttttagcatatatatattcttttttttttctgaggcattttggtccaagattttttattgtgccattgtgaatgtagaaagaacttgagaatcttagtgatgatttgatttaaccaaatcgagttgagcccattttatgtttggttttaaattttaggtacactatttgcctaattgcctcgctcaatatcagaacttgtactgtaaaacatatctacataataataaataaaaaacattatgtc

SEQ ID NO: 4013 - DNA, 467 bp, Gossypium hirsutum
  Clone ID: GOSHI-09MAY01-C3301_4
cccacgcgtccgcaagtagcagaaacaaggggcatttatcctcctgccgcagactatttgaaacatgctgatagatcacatatgacacttgtggagactttcagaaacatgccaacagaggaggagcctcttgagaatggtgaccttgatcatgagaatctagaggatcagaatggagaagagggtagccaagaggaggctgttgttgtggatgctgattcaaacgatggtgcagtgctcgttaatggcaatgaacctgaagaagagtggggtacgaataatgaaggaaccccgtcagcctaaaagcaattggtcggggcagtgtgaaaatccaaattttgtctctgtgcttacaccggatcactaggttccttcaagacattcagttcgagctctattcagaaacatatttaaggtgagaaaccataatcattgttattatttcttaaaggagaaaacattattag

SEQ ID NO: 4014 - DNA, 1470 bp, Gossypium hirsutum
  Clone ID: GOSHI-09MAY01-C3301_1
tgttgagcgtatttttgggggcactttactggcgatgtgctccaatgattttatttgtttttatagttgggctgaatgcagattgattcgtcggattgatgttaccgttaaaaatctttactgggctgatagtggtgacttggtggcaattgccagtgatacatcgttctatatcctaaagtacaatcgggatgtagttcaatcatacttagatagtggaacaccagttgatgaacaaggagttgaggatgcatttgagcttcttcatgaaaccaatgaacgtgttaggactgggatatgggttggggactgtttcatttacaacaactcttcatggagacttaattactgtgttggtggagaggtcaccactatgtttcatttggaccgtcctatgtacttgctgggatatcttgctagccaaagtcgggtgtatctgatagacaaagagtttaatgttatggggtacacgttacttctcagccttattgagtacaaaactcttgtgatgcgtggagacttggaaagggccaatgaaattttaccttcaattcccaaagagcaccataatagcgtggctcatttcctagaatcacccggcgtcctggaggatgctttaggagtagctacagaccctgattacagatttgagcttgccgtacagcttggtaaattaggtattgctaaggagatagccactgaagttcagagtgagtctaaatggaaagcagttgggagaattagctatgtccactggaaagctacaaatggctgaggaatgcatgaagcatgcaatggacctgagtggtttactgctgctttattcctctttgggagatgcagaaggaatatcaagacttgcatccctttccaaagagcaagggaagaataatgttgctttcctttgtttattcatgttgggtaaattggaggattgcctccagcttctggtggaaagcaatcggataccagaggctgctctgatggcacgatcttatcttccaagcaaggtttcagaaatagtagcaatttggagaaaagacctcaacaaggttaatccaaaagctgctgaatctttgtctgatcctgaagaatatcccaacttgtttgaggattggcaacttgctcttactcttgaatctcaagtagcagaaacaaggggcatttatcctcctgccgcagactatttgaaacatgctgatagatcacatatgacacttgtggagactttcagaaacatgccaacagaggaggagcctcttgagaatggtgaccctgatcatgagaatctagaggacccagaatggagaagggggtacccaagaggaggctgttgttgtggatgctgattcaaacgatggtgcagtgctcgttaatggcaatgaacctgaagaagagtggggtacgatttgtggacccgccccgtcgcatggtcggcatgtaaatcgattgcttggctacccgaactgg

SEQ ID NO: 4015 - DNA, 600 bp, Gossypium hirsutum
  Clone ID: LIB3829-009-Q6-K6-B7
tccggattacaattcttgactatacaatagttggaaagcacaagttcgcatgaacaaggggattgagagagtcattgtgaacttgcttcatcgaaaccaatgaacgtgtcaggactggcatatgggttggggactgtttcatttacaacagcacttcatggagacttaattactgtgttggtggagaggtgaccacaatgtttcatttggatcgtcccatgtacttgttgggatatcttgcaagccaaagtcggtgttatgggttatacattacttctcagcctgattgagtacaagacccttgtgatgcgaggagactttgaaagggccaatgaaatattaccttcaattcctaaggaacaccataatagtgtggctcatttcctggaatcacgaggtatgatagaggatgctctagaagttgctactgaccctgattacagatttgatcttgctatgcagcttgataaactagagattgctaatgaaatagccacagaagctcagagcgagtctaaatggaagcagttgggagaattggctatgtcaactggaaagttctattaatcatgctaaacttgtcattgcaacttgcaatgg

SEQ ID NO: 4016 - DNA, 586 bp, Gossypium hirsutum
  Clone ID: AI728607.1
agtaatcggatacctgaggctgctctgatggcgcgatcttatcttccaagcaaggtttcagagatagtagcaatctggagaaaagacctcaacaaggttaatccaaaagctgctgaatctttggctgatcctaaagagtatccaaacttgtttgaggattgggaacttgctctttctgttgaatctaaagtggcagaaacaaggggtgtttacccccttgcagtggattatttgaaccatgctgatagatcgaagatgacacttgtggaggctttcaaaaacatgcaaattgatgatgaggagcctcttatgaatgatgaggagcctcttgtgaatggtgtacttgattatgaggctggagaaccaaatgggcatggtctgaattcagaggagcagaatggagaagatggtagccaagaggagcctgttgttgtaaatgctgattctaacgatggtgcagtactcgttaatggtaacgagccacaagaagagtggggtacgaatactgaaggaaccccgtcagcctaaaagcaattggttggggcagtgtgaaaatccaaattttgtctctggtgattaattgttt

SEQ ID NO: 4017 - DNA, 791 bp, Gossypium hirsutum
  Clone ID: GOSHI-09MAY01-C3271_4
caccgccataagcgaaatcaaaagccagcagcgctgcagctaaaagagcagtcgtttgacaattattcgccatgggtaaggttcacggatctctagctcgtgctggtaaggtgagaggccaaactcctaaagtggccaagcaagacaagaagaagaagccccgtggccgcgcttacaagcggatgcaatacaaccgccgcttcgtcaccgcagtaatgagtttttggggattttttcacagtggttggatttggcaaaaagaggggacctaactcatctgagaagtaagagatctatgtaggtgaaagaaggcaagaagccttgttgaaagctttgatggattttaagtctttgttttcttttgataatgttttatgatactggtttcaaggattggattgaactaccattttgcttgctagatattatgtgatattgttatcaattatcttaattttgggtttactatgagtttcgattcctcttcatccatgctgtaattgacttgccgttcccctccctgcattcactgccgaaactaattgttctactagttagggctgaatggagaatgatttgaaatactactatctgagaatgtggagtccaaaataatgaacgaatggatagattattctcgttttatgtgaagaccaagaacaagaaaaaaacgatgcacaagccctcccgcaagcttttataacgcatgaggcgaacccaactgatccagttctcctcgcccgacttggtgatcttatctactaagacgggcgggccccgcttttaaggaa

SEQ ID NO: 4018 - DNA, 464 bp, Gossypium hirsutum
  Clone ID: GOSHI-09MAY01-C3271_2
cccacggagaggcgaattccaaggagccaaaaaacccgcagttcagcaaccagggagcactcattcgacaagtccgccatgggtaaggttcatggatctttagctcgtgccggtaaggtgagaggccaaacacctaaagtggctaagcaagacaagaagaagaagccccgtggccgcgcttacaagaggatgcaatacaaccgtcgtttcgtcaccgcagtggtcggattcggcaaaaagaggggacctaactcatccgagaagtaagagctatgcaattgaaaaaaggtcttgtttgaagcttttatgggtttagtctgtgttttccccccctttttttttgtaatgttttatgatacttatttttatccactggtattaaggttcaagttgaacttggaagttttgttagctaaatattatgtgatttcgatatttgttaagcttaattcttggttcattac

SEQ ID NO: 4019 - DNA, 705 bp, Gossypium hirsutum
  Clone ID: GOSHI-09MAY01-C3271_1
cggaccggtcgccaccgccataagcgaaatcaaaagccagcagcgctgcagctaaaagagcagtcgtttgacaattattcgccatgggtaaggttcacggatctctagctcgtgccgggaaggtgagaggccaaactcctaaagtggccaagcaagacaagaagaagaagccccgtggccgcgcttacaagcggatgcaatacaaccgacgcttcgtcaccgcagtggttggatttggcaaaaagaggggacctaactcatctgagaagtaagagatctatgtaggtgaagaaggcaagaagccttgttgaaagctttgatggattttaagtctttgttttcttttgataatgtttttatgatattggtttcaaggattggattgaactgccattttgtttgctagatattatgtgatattgttatcaattatcttaatttttggtttactatgagtttcgattcctcttcatccatgctgtaattgacttgccgttcccctccctgcattcactgccgaaactaattgttctactagttagggctgaatggagaatgatttgaaatactactatctgagaatgtggagtccaaaataatgaacgaatggatagattattttcgttttatgtaattgatttcccacttgattcttctatatgttctcgtgatcatggaaatttaaatttagtctttgaattcatt

SEQ ID NO: 4020 - DNA, 474 bp, Gossypium hirsutum
  unsure (1)..(474): unsure at all n locations
  Clone ID: AI732018.1
caaaagccagcagcgctgcagctaaaagagcagtcgtttgacaattattcgccatgggtaaggttcacggatctctagctcgtgctggtaaggtgagaggccaaactcctaaagtggccaagcaagacaagaagaagaagccccgtggccgcgcttacaagcggatgcaatacaaccgccgcttcgtcaccgcagtggttggatttggcaaaaagaggggacctaactcatctgagaagtaagagatctatgtaggtgaaagaaggcaagaagccttgttgaaagctttgatggattttaagtctttgttttcttttgataatgtttttatgatactggtttcaaggattggattgaactaccattttgtttgctagatattatgtgatattgttatcaattatcttaattttggtttnnnnnannnnnnnnaaaaaaaaaaaaaaaaaaaaaaaaaaaaaaaaaaaaaaaaat

SEQ ID NO: 4021 - DNA, 423 bp, Gossypium hirsutum
  unsure (1)..(423): unsure at all n locations
  Clone ID: LIB3166-004-P1-K1-C6
gcgaaatcaaaagccagcagcgctgcagctaaaagagcagtcgtttgacaattattcgcggagtgggtaaggttcacggatctctagctcgtgctggtaaggtgagaggccaaactcctaaagtggccaagcaagacaagaagaagaagccccgtggccgcgcttacaagcggatgcaatacaaccgccgcttcgtcaccgcagtggttggatttggcaaaaagaggggacctaactcatctgagaagtaagagatctatgtaggtgaaagaaggcaagaagccttgttgaaagctttgatggattttaagtctttgttttcttttgataatgtttttatgatactggtttcaaggattggattgaactnaaaaaaaaaaaaaaaatattattaatattttttttattataaaaaaaatatat

SEQ ID NO: 4022 - DNA, 648 bp, Gossypium hirsutum
  Clone ID: GOSHI-09MAY01-C3201_1
ctagctgattcctgggagtatacgtctactgatcagtttctgcattgtctaccactacatcatgttcacgggctttttaatgctttacttgcccctttgtatgctggctcaactgttgaatttataccaaagtttagtgtaaggaatatttggcaaagatggcgtgaggcatacccaaaaaatggggctaaggctgatgatgccattactgtttttacgggtgttccaacaatgtacgctagattgatacaaggttaccaagcaatggatccagagcaacaagctttatctgcctatgctgcacaacagttgcgtcttatgatgtctgggtcttctgcacttcctcaacctgtcatgcacgaatgggaaaccatcactagacactgccttttagaacggtatgggatgactgagtttgtcatggcaatatcaaatccattaaggggtgctcggaaggcaggcacagttggcaaaccatttcctggtgtgcaggtcaggattgctgaagatagaagcggcgatggtacgattggcgagggtgaactttgtgttaaaagtccttcattgtttaaagaatactggaaacttcctcaggtaaccaaggaatcgtttactgatgatgggtttttcaagactggggatgcttgt

SEQ ID NO: 4023 - DNA, 579 bp, Gossypium hirsutum
  Clone ID: GOSHI-09MAY01-C3221_1
aaaaagaaaaaaagtactagtaatcccatagcaaaccttgtttgaagccgttttgtaaaacgctctcgggtactactaactgattacaaacgtactcacagtcttccatgctttcaagccatggtggagggtaaaaccatccgtccatcgagtttgcgaatataaactcactccccaactccaccgactcgtaacttgtccctagacttggtagctccactatctcggttaattcgtctgacgctgaagataagtccaagtgagaaaccagagaggatagggatgacgatgatgacaatgttgaagtggaagatgatgatgtagtggatggtgatggggagtccaagtttcccatttgggcagctttggctgccgcagcttggacgtcgcggggtgctaatgacacgggtcgaggtaaagagttggcgagttcagggaagttgagaatggctgagttgcctttgatacttaaagcggccacgtcgtgtgcccgagctgccatttctggagtagggaaagtaccgacccaaatgcgggatttcttgcgtggctcgcggatttctgacacccatttgcccc

SEQ ID NO: 4024 - DNA, 665 bp, Gossypium hirsutum
  Clone ID: LIB3543-066-Q6-K6-D2
ctttcctgctttccttcaattattgtcccacttccttttgccttcaaaatttccttgggattcctatggctaccgctgaggttgcatcagttcaaactgcacttcatgaggagaaaactgaagaatcagtgaaggatcaagaagctacaacagatgaagtagttgccgaagctccagcagcggaaccagttgccgaagagccaaaggaagcggagcctgcggcggtggtagtcgaggaacctgaagcctcagttgaagttgaaaccaaggaggtggtagaagaaccaaaggctgttactgaggagccagtagtagaggaggctcctaaggaaacaatgccagaaccagttgccgaggagatcaaggaaaccactgaacaaaccgttgaaaccaaagaaactacagagtctagtgaggcagcagcagaagcacccaaagaggaagttaagaaggaagaagaagctgatccagcagagaagactgagtaaataataaagcttttgtgatgaaaatgcgggtgtcaatggaagtgtgtttcaaatggctacagtttgataagtttgcatgtcaagtcaactagttttcttctatgtaggtcaataaggatgtagtaatgtggctgatggaggcccaccgatagtagtcctgcaatgtggctaggttaa

SEQ ID NO: 4025 - DNA, 476 bp, Gossypium hirsutum
  Clone ID: LIB3585-010-P1-K1-A11
ctcacactgcttttcttcaattattacccacttgctttcgccttcaaaattaccttgggattcctatggctaccgctgaggttgcatcacttcaaactgcactttatgaggagaaaactgaagaatcagtgaaggatcaagaagctacaacagatgaagtactcgccgcagctccagcagcggaaccagtagccgcagagccaaacgaagcggagcctgcagcggtggtagtctaagagatcaaggaaaccactgatcaaaccgttgaaaccaaagaaactacagagtctagagaggcagcagcataagcacccaaagaggaacgttaagaaggaacaagaagccaaaccagccgaagtggacgagaaagttgaaacaaaagctgatccagcagagaagactgagtaaatcataaaactcttgtgattaacatgcagttgtcaatggaagggtgattgaaatggctacagtttgat

SEQ ID NO: 4026 - DNA, 301 bp, Gossypium hirsutum
  Clone ID: LIB3165-003-P1-K1-C6
cccacgcgtccgcaaaaagaaaattggcttctgcttccgctactctcctcaagtctgcacctattaccaatctaccatcgatgggaaaaagatggtcgatgttcttgttgagcaaaagattgtccctggtatcaaagttgacaagggtttggttccactccctggttccaacaacgagtcatggtgccaaggtcttgacggtctttcatcccgcacagctgcctactaccagcagggtgctcgtttcgccaaatggcgtaccgttgtgagcattccaaatgttccatctgccttggcagtt

SEQ ID NO: 4027 - DNA, 548 bp, Gossypium hirsutum
  Clone ID: LIB3584-050-P1-K2-C7
cccacgcgtccgcccacgcgtccgcccacgcgtccgaactgcacttcatgaggagaaaactgaagaatcagtgaaggatcaagaagctacaacagatgaagtagttgccgaagctccagcagcggaaccagttgccgaggagatcaaggaaaccactgaacaaaccgttgaaaccaaagaaactacagagtctagtgaggcagcagcagaagcacccaaagaggaagttaagaaggaagaagaagcaaaaccagctgaagtggaggagaaagttgaaacagaagctgatccagcagagaagactgagtaaataataaagcttttgtgatgaaaatgcgggtgtcaatggaagtgtgtttcaaatggctacagtttgataagtttgcatgtcaagtcaactagttttcttctatgtaggtcaataaggatgtagtaatgtggctgatggaggcccaccgatagtagtcctgcaatgtggctaggttaacatgcatttgcatatgtcaaagagtgacatacttcaagttccattgtgggggaatttttat

SEQ ID NO: 4028 - DNA, 647 bp, Gossypium hirsutum
  unsure (1)..(647): unsure at all n locations
  Clone ID: LIB3543-011-Q1-K6-B2
cccagcgtccgcggncgcgtgggcggacgcgtgggcgaggagatcaaggaaaccactgaacaaaccgttcgaaaccaaagaaactacagagtctagtgaggcagcagcagaagcacccaaagaagaagttgagaaggaagaagaagcaaaaccggctgaagtggagaaagttgaaacagaaactgatccagcagagaagagctgagtggtgatggtggatcaagcggagtcgatatggacaaggacttgaaaagaatgaaggcgaatttcgatgagttgtgtggtgaagataagattctggtgtttttcaagaggttgttgaatgagtggaatcaagagctggatgagatgggcgaggctgagaaaaggacggcgaaaggcaagtccatggtcgccacgtttaagcagtgcgctcgttatttgaatcccttgttcaagttttgtaggaagaaggttcttcccgatgatatccgtcaagcattattggtggtggttgagtgttgcatgaagcgggactacctagccgcaatggaccagtacattaaattggctatcggtaatgcaccctggccaattggtgtcactatggttggtatccacgaacgttcagctcgtgaggagatctacaccaacagtggtgcacacat

SEQ ID NO: 4029 - DNA, 415 bp, Gossypium hirsutum
  Clone ID: LIB3147-007-Q1-K1-D7
gcgacggaccgggcccaagtcccctggaaaggggcgccggagagggtgagagccccgtcgtgcccggaccctgtcgcaccaagaggcgctgtctacgagtcgggttgtttgggaatgcagccctaatcgggcggtaaattccgtccaaggctaaatacgggcgagagaccgatagcgaacaagtaccgcgagggaaagatgaaaaggacttgaaaagagaagaggcataaatagtgcattgtacgttaaatacgagaattgctattgactaagcggatgactgatctcccgtttttccttagctttacatttaaaaaagacctagctatgaataatgcaggatgtatttttatttttagaaggtttagacgatgttataatagttctgtaacagttaaatttgctataggaaaca

SEQ ID NO: 4030 - DNA, 373 bp, Gossypium hirsutum
  Clone ID: LIB3272-030-P1-K1-C8
cccagctcctaatcctgttgttgccaaaccaaagccggcgccaaaacccaaattcactccaacccctggtatattctttgcttctcttttaaatgatttccccataaacattgttggacctactcttaggaattaggacacaatctgctattgatgaaggaacatttggttctgtttctcattatagtagctattaaatttcaagatctgatagtgggggaattttttgtttatttggcagctacatcgtctaatccaattaccatagagcagatgatgacaactttctggtatgccaagggaaaaacctactactggtattccacaattgtgaccaacaaggcttacaagacactgaaggatctcaagcttt

SEQ ID NO: 4031 - DNA, 897 bp, Gossypium hirsutum
  Clone ID: GOSHI-09MAY01-C1_8
attcgtccttgtttttgagataacctatatcgcaggttgcagaagacggctgatggtgaggacccttcaaccccttgtctgtgataatggaacagggatggttaagggtacctcgacctgattggttgtcattttaagtgctaaagcaataatatgtttagcgcttgaacttaatgtagttttgaaattttgcttcttaggctggatttgctggggatgatgctccgagggcagtgtttcctagcattgttggtcgaccacgtcatacaggtgtgatggttggaatgggacaaaaagatgcatatgtaggggacgaggctcaatctaagcgtggcattttaactttaaagtacccaattgagcatggcattgtcaacaattgggatgacatggagaaaatttggcatcatactttttacaatgaacttcgtgtcgctccagaggagcatccgattctcctcactgaagctcctctcaacccaaaggccaaccgtgagaagatgacccaaattatgtttgaaaccttcaatgctgggtggtatgtatgttgccattcaggctgttctttccctttatgctagtggtcgtacaactggtattgtgcttgattctggagatggtgtcagccacacagtccctatttacgagggatatgcacttccccatgcaatcttacgtcttgatcttgctggtcgtgacctcaccgatgccttaatgaagattttaactgaacgtggttattcattcaccacatcactgagcgggaaattgtaagagacataaaagaaaagttggcatacattgccctcaattttaagcaaaatctataaacctccaataccaactcttcagtttagaataactatgaactgccttattggcaagtgatcaccatct

SEQ ID NO: 4032 - DNA, 787 bp, Gossypium hirsutum
  Clone ID: GOSHI-09MAY01-C1_9
tacaatggcatcttcaactcttacaggtaagcttgaggcagatgtagatattaaggcttctcccgagcagttccatgaaatgttcgcccacaaaccacatcacgtgcaccacaagattcaaggatgcgatctacatgaaggtgaatgagggaaagtcggtatcattgtccactggagttatgtgcatggtatgatataacataacaaacccaatttcttttaatgcttatcacctgatttgttgctctttttgttttgttaaagaaaaaaggttatttgcttagatggaaaggctaaaaaggcaaaggaagtagtggaagcggtagaccctgataagaatttgatcactttcagagtgattgaaggagatctaatggaagagtacaagagctttgtagctatgattctagtttcgcccaagagcgaggatagtggcagcatagtgcactggactttggaatacgagaagctacacgatgggattgcgcaccccgagactctactgcaattggtttaagatatctccaaagacattgacgcccacctcatccaagcaaactaaacaatatcgcatgttgctattgttaccgctacttggagcatctatttaatgaatgaagtgacagcttcctttctcatgtattttgatatgaatatgtatgtttagatcaatatgcagtcaaggggagggagctttgtattttcttcatgtttgtctatttaattatgttaaaattcaatgtatcctaagcttttatttgtaagtatagaaatatttatgactttt

SEQ ID NO: 4033 - DNA, 515 bp, Gossypium hirsutum
  Clone ID: GOSHI-09MAY01-C1_10
cgtctctgttaaccttttaaaaaacataaaagatggtaaaggttgccttttgttgtgttcttattggctttggtacttctcaatccaattagtagtggggacccaggatgaggaggctatagatgaggaagtatcccaggaagccgatgatgtacttttgagttcaggggcaactaatctcgttgaaaactttaaaagctctgctggagataattcccagagtgtggatgggccaacttctggcttaactgatgagattgcagcttctccagaatcggaagtagaagttgctattgaatctgctggtgggatgaagcgtaaaatggcataatagacccctatgatgtttagaaagatacatcatacctaaatttttttaaagaggtggctaaaactgttaaaaataataaaaacaatgcaaaaaataataaaagcaacatccatagtttttgtaaagtatgtaatgcaataatttaattttaaaaataaaaaaagttaccttaacatttattggt

SEQ ID NO: 4034 - DNA, 580 bp, Gossypium hirsutum
  Clone ID: GOSHI-09MAY01-C1_11
cccacgcgtccgcccacgcgtccggaaaactaaacgccaggctctaaacgcgggtagcagttgaagaaaataacctcaaataacgtgaaatctcttaacacaaaatttttttttgaagattgtagaagatggctgagggtgaggatattcaaccccttgtctgcgataatggaactggaatggtgaaggctggatttgctggtgacgatgctcctagggcagtgtttcctagcattgtcggtcgtccacgtcatactggggtaatggttggtatgggacagaaagatgcgtatgtaggcgacgaggctcaatcgaaacgtggtattttaactttaaagtacccaatcgaacatggcattgtcaataattgggatgacatggagaaaatttggcattataccgtttacaatgaactacgtgttgctccggaagagcatcctattctcctcactgaagcccctcttaacccgaaggccaatcgtgagaagatgacccaaatcatgtttgaaaccttcaacgcacctgctatgtatgttgccattcaggctgttctttccctttatgctagtggtcgaacaac

SEQ ID NO: 4035 - DNA, 418 bp, Gossypium hirsutum
  Clone ID: GOSHI-09MAY01-C1_12
cccacgcgtccggagagtgacccttcgtattatcaacttccttatcttgtaagacaaggtgaacagcctagggaaggtttcctgctgcttgtaaatcttcttgaggaccagatgggcggtactgttggttacgtggattggataatgcaaatacatcgacaagtccaacaaaatgcatgatatacgggtaattgttcaagaggttgctaaactttcatagtcttcttgaacttaagaacaactattgttcctttcatttgggataacttttaatctaatttttggttgagacaagcaagtttttcgagtcaggatctttagtcagtcttagtctcggagttaatggtgtttgagttaggggcttctttttatggaattacattgtaatgaatcatcatttgcttttgattctgattac

SEQ ID NO: 4036 - DNA, 633 bp, Gossypium hirsutum
  Clone ID: GOSHI-09MAY01-C1_13
gattagcactctctaaatgagtacctctaaaaggaggatatgcagacgctcagcttgatgaacgctgcgcagcaggtttcaccatgatggcattacccgttaaaaagttgttgaagcttttatatcctagcttgattcgaatcgatgaatatcttttgaagccatccgctcaagccgatgatttcaaaaacatcatgaagagattgcctttgctcgcagaaagcctagattcaagaggcctttatttgtatgatgatggcttacgctttgttatttggttcggtagaatgctttcacccgatatagcaaggaatttacttggaccagagtttgcagcagaattatcgagggttacgcttaccgagcatgataatgaaatgtcaagaaggctgatgaagatgttaaagagactaagagagagtgacccttcgtattatcaacttccttatcttgtaagacaaggtgaacagcctagggaaggtttcctgctgcttgtaaatcttcttgaggaccagatgggcggtactgttggttacgtggattggataatgcaaatacatcgacaagtccaacataatgcatgatatacgggagttcatcatcttacgtcataaaactcatctgttttgcccg

SEQ ID NO: 4037 - DNA, 628 bp, Gossypium hirsutum
  Clone ID: GOSHI-09MAY01-C1_14
aaacttaccaggattcccctagtaacggcgagccgaacccgggaaaagcccagcttgagaatcggtcgccatcggcgtccgaattgtagtctggagaagcgtcctcagcgacggaccgggcccaagtcccctggaaaggggcgccggagagggtgagagccccgtcgtgcccggaccctgtcgcaccaagaggcgctgtctacgagtcgggttgtttgggaatgcagccctaatcgggcggtaaattccgtccaaggctaaatacgggcgagagaccgatagcgaacaagtaccgcgagggaaggtttcctgctgcttgtaaatcttcttgaggaccagatgggcggtactgttggttacgtcgattggataatgcaaatacaccgacaagtccaacaaaatgcatgatatacgggagttcatcatcttacgtcgtaaaattcatctgtattgtccggtttcctctggagcttgtgtgttgaaccgatggaaccaatcggtccgaagatttgcaggaaagaattttttgttcattacgaaattcaataactaggaaaagagagaaaacacctgtgcttctagctatttgctatttgagtgcttgagaattcaagttgaaaacaaacga

SEQ ID NO: 4038 - DNA, 629 bp, Gossypium hirsutum
  Clone ID: GOSHI-09MAY01-C1_15
aaaaacataaaacatggtaaaggttcctttagttgtgttctcattggctttggtgctctcaatccaattcgtaatgggacacgacgagaaggctttagatgaggcagcatccccggaagctgaagatgcagttttaagttcaggggcagctaaacttgttgaaaactttaaaagctctgctggagatgattcccagagtgtggatgggccaacttctgacttcgttgatgagattgcagcttctccagaatcagaagtagaagttgctactgaatctgtcgatgggccacattctggcttagctgatgagattgcagtttctccagaatcgtaagtagaagttgctactaaatctgtcggagggaggatgcgtaaaacggcatagtggaccccgatgatgtttagaaagcaacatagacccaaattttctttaaagaggcggctaaagcagctaaaaataataaaaacaatgaaaataataataaaagcaacatccatagtttttgtaaaatatgtcttgtagtaatttacttttaaaaataaaaaaagttactttcacatttgtttgcacaatttttgtcagttctttcctaaattatactcaagttcccaataggtaattttttttc

SEQ ID NO: 4039 - DNA, 413 bp, Gossypium hirsutum
  Clone ID: GOSHI-09MAY01-C1_16
cttaccaggattcccctagtaacggcgagcgaaccgggaaaagcccagcttgagaatcggtcgccatcggcgtccgaattgtagtctggagaagcgtcctcagcgacggaccgggcccaagtcccctggaaaggggcgccggagagggtgagagccccgtcgtgcccggaccctgtcgcaccaagaggcgctgtctacgagtcgggttgtttgggaatgcagccctaatcgggcggtaaattccgtccaaggctaaatacgggcgagagaccgatagcgaacaagtaccgcaagggaaaggaaagatagggaacgagagaaggaaaaggagagggaaagagctagggagaaggaaagggaaagggaaaagcgtgaaagggaaagggaaagggaaagagaaagggagaagaggg

SEQ ID NO: 4040 - DNA, 378 bp, Gossypium hirsutum
  Clone ID: GOSHI-09MAY01-C1_17
ggaaggtgagaggacaaaggaagacatcattgacttcatttgaaaataacaggggaaaaaactgctcatcaagaggcattaaaagatgagctctgaagaggggccttgaaaagagaagagccataaatagtgcattgtacgttaaatacgagaattgctattgactaagcggatgactgatctcctttttttaccttatctcctttagctttacatttaaaaaagacctagctatgaataatgcaggatgtatttttatttttagaaggtttagacgatgttataatagttttgtaacagttaaatttgctataggaaacatccgagcaaaacctagagacaggatattttaatttattttctctttgcttccctttt

SEQ ID NO: 4041 - DNA, 535 bp, Gossypium hirsutum
  Clone ID: GOSHI-09MAY01-C1_18
ttgggaatgcagccctaatcgggcggtaaattccgtccaaggctaaatacgggcgagagaccgatagcgaacaagtaccgcgagggaaagagaaaggactttgaaaagagagtcaaagagtgcttgaaattgtcgggagggaagcggatggggccaccagccgggtattattatactccatattgatttttccacatataaaatagataacttttctttgcttaccttctgtattatctttttctagttttctttccctttttatcgtttcctttgagatgatatgatgttctgaaatatgttcacgaaggacttgctcattctgtggatttttttttttgtgctgggaggttcatgatctggttgtgatgtctctttgtgcttttgtaatattagaattttatttacattcttattttcattgtgtgaccctctcgttaacatccattgaattggctctgcagtgattaaatcgtgattgattatcccaaaaatttacatttatcataatttgtagattttcttgtcaactttt

SEQ ID NO: 4042 - DNA, 567 bp, Gossypium hirsutum
  Clone ID: GOSHI-09MAY01-C1_19
aaaaaacataaaatatggtaaatgttcctttcgttgtgttctcatttgctttggtgctctcaatccaattcgtagtgggacatgatgagaaggctttagatgaggcagcatcccctgaagccgaagatgcacttttgagttcaggggtagctcaacttgttgaaaactttaaaagctctgctggagataattcccaaagtgtggatgggccaacttctggcttagctgatgagattgcagctactccagaatcggatgtagaagttgctactgaatatgccgatgggccaacttctggcttagctgatgagattgcagtttctccagaatctgaagtagaagttgctactgaatctactggcgggaggaagcgtaaaatggcatagtagaccccgatgagatctagaaagcaacatcatacccattttttttaaagaggtggctaaagccattaaaaataataaaaacaatgcaaaaataataaaatcaacatttattatttttgtaaaatatgtcttgcagtaatttacttttaaaaataataaagttacattaacatttgttcgc

SEQ ID NO: 4043 - DNA, 580 bp, Gossypium hirsutum
  Clone ID: GOSHI-09MAY01-C1_20
cccatcccaatattttggatctagctcgcaacaatatatgccttcggggagtcgagccgaagttgaagttcagaggttaagagaccagatggctcagatgcaagcgacaacaattgagcaaattacacaacttaaagcggaggcaacatcgagagaagttgaggttcaaaaaagatatgaagaactccagctacaactaaaagcagatgcagcagcgagagaagctgaggttcaacgaaagtatgaagaactccagcagcagcttaaagtagatgcggcagtaagagaagcagaggcggcagctagagaagtacaggctgtagtgagggaagcagaggctaaagcgagggaagcagaggctgcagcgagggaagtagagcagcgtcaaaagttcgatgaactccaacaacagcttcagagcatgatgaagatgtttcagcagtcgcaacagccgccgtcttagactatcgtgtaaatatacttcgattttaacttttaattatcattttaacttttaacatttttgtaagaataatacgaaatttattttatttattgatatttattatattatttgttt

SEQ ID NO: 4044 - DNA, 640 bp, Gossypium hirsutum
  Clone ID: GOSHI-09MAY01-C1_21
aagggcccaagaagagaggccgaaaaccgaagccgaaggacgagaaagaacagcagcaacagcaacaaagtgcgggtaaaatgaaagaaggaaagaaagcccaacaaccaagcgttgtatgagaagtacactcaatggaagtctttggtccctgttctctatgactggcttgctaatcacaatctcgtttggccttctctctcttgccgctggggaccgcagcttgagcaagctacctacaagaatcgacagcgtctctacctctcagagcagacggatggtagtgttccaaatacgcttgtgattgcaaattgtgaagttgtcaaacctagggttgctgctgctgaacacatatctcagtttaatgaagaagcacgctcaccatttgtgaagaagtacaagacccttatacatcctggagaggtgaacagaatcagagaacttccacagaactctaagattgttgccacacacactgatagtccagatgttcttatttgggatgttgaagctcaacccaaccgtcatgctgtccttggagctacacattctcgcccagatttgattttgactggacatcaagataatgctgaatttgctctcgcaatgtgtcccaccgaaccctatgtgatctctggag

SEQ ID NO: 4045 - DNA, 1069 bp, Gossypium hirsutum
  Clone ID: GOSHI-09MAY01-C1_22
ccggaccaccaaaagccctgttatgatgaaacctgttggagcgaccttgaattcatccaggccaaaaaaatgactggttgggttagtattccaaattcccgccccaaaacacaatcagggttaaaattttgccaaattctaacccttgttttctttgtcgtatagatgtattttgtctccaagacaatggcagagcaagcagcctggaaattcgctaaagaaaataacattgattttgtcagcataataccacctttggtggtcggtccatttattatgcaatcaatgccgccaagcctcataactgcactttctcctatcaccggtacagtcttctgtaatttcacagcttgaatcaattatccacatattttttcaccccactttctgacgagatgtcttaaaatgtagggaacgaagctcattattcgatcataaaacaaggccaattcattcatttggatgacttgtgcagagctcatatctttctattcgagaatccaaaagcggaaggtcggcacatttgggcctttttaacatgctaccattatcgatcttgcaaaaatgctcagtgaaaaataccctgaatataatgttcccaccaagttcaaagatgtggatgagaacctgaagagtgtggagttctcctcaaagaagctcttggacttgggatttgagtttaaatatagcttggaagacatgttcgtaggagctgtcgagacatgccgagaaaagggactgcttcctctttctaatgagaagaagaccaacaacatagactgaaaaatatgaactttcaacaattgagtgcctacccgtctttcatttctagtggtgaaaacaatatagatttaaatctattatctgtttcctggtattgaaaaatttttaattgcaaacattggtaatgtaatttggagtctattttgggcaaaaaaaaaaaaaataaaaaaaacaaaaaaaacccaaaaaaaaaaaaaaaaaacaaaaaataataaaacaccaaaaaaaaaaacaaaaaatattttaaaatctaaactgggggcggcccttttaggggatccaagtt

SEQ ID NO: 4046 - DNA, 504 bp, Gossypium hirsutum
  Clone ID: GOSHI-09MAY01-C1_23
cggacgcgtgggcggacgcgtgggcttttttgcttaaccttttaaaaaacataaaagatggtaaaggttccttttgttgtgttcttattggctttggtgctttcaatccaattcgtagtgggacaagatgaggaggctatagatgaggaagtatcccgggaagccgacaatgtacttttgagttcaggggcaactaatctcgttgaaaactttaaaagctctgctggagataattcccaaagtgtggatgggccaacttctggcttagctgatgagattgcagcttctccagaatcggaagtagaagttgctactgaatctgccggtgagatgaagcgtaaaatggcataatagacccccatgatgtttagaaagaaacatcagacctaaagttttttaaagaggtggctaaagcggttaaaaataataaaaacaatgcaaaaaataataaaagcaacatccatagttttgcaaaatatgtaatgcaacaatttacttttaaaa

SEQ ID NO: 4047 - DNA, 702 bp, Gossypium hirsutum
  Clone ID: GOSHI-09MAY01-C1_24
aaacaccttccccgaggggaatcatcagttgttggccctcttgttagacttttcaagccttttgatgaactcgttgttgactttaaggattttaaaccggaagctctagagaagtttattgaagaatctagcattcctcttgtgactctgtttaacaaagacccaagcaatcacccctttgttgcgaagttctataactgtcccaatgctaaggctatgttgtttgctgacttgagtactgaaggatttgattcattgcaatcaaaatatcgtgaagttgcggagcaatacaaaggaaagggcattagtttccttttgggagatgttgaggctagccaagctgccttccagtatttcggagttgaagaaagccaagtacctctaatcatcattcagagtgatgatgggaagaagtattttaaaccaaatttgaaggctgatgacattgcaccatgggtgaaggatttcaaggaaggaaaagttgcaccgtatgtgaagtctgaacctattcccaaggagaacaatgaaccagtgaaagtggtggttgctgacacccttcaagacatggttttgaaatcagggaaaaatgttctgctcgagttctatgccccttggtgtggacattgcaaaaaattggcaccaatcttggatgaagttgctgtccattatgaaaaagatgccgatgttttaatcgcaaaactt

SEQ ID NO: 4048 - DNA, 975 bp, Gossypium hirsutum
  Clone ID: GOSHI-09MAY01-C1_25
cggccgcgtcgaccttggggacaatccaaggggtacaagttacatggttggttatgggaacaatttccctcgacaagttcatcatcgtggttcttcgattgtttccatcaaggttgactctaaattcatagcctgccgacaaggttatgcagcttggtatacaaggaaagcaagtgatcctaatgtcctcactggtgctgtggttggagggcccgacgcctatgataacttcgctgatgaaagggacaattatgaacaaaccgagccagctacctacaacaatgctcctcttcttggcatactagctaggctcgggagcggtcattctggttataaccagctgcttcccgaggctgtcccagttcctaaaccagtagctgctaaaccgaaggcagagccgaaagccaaatcgactccaaatcctgccacaacttctagtccaatttccatacggcaaaagatgacaacttcctggaatgacaaaggaagaacttattacagatattccatagtgatgaccaacaagtcttccaagacactaaaggatctaaagctgtctatatcaaagctttatggtccaatatggggtctcactaaatctggcaattcttatggtttcccaacatatctcaactctttacctgcagggaagagtctcgagtttgtatacatccatgctgcttctccggctgatgtctcagtttcaagttacaacgtggcttaacaacagaagaaaattgctacaacttggtgtaagatttgtgcagctttactgaatgcattccatgggtaaagaaaagggttatttttcattttcttgtttaagggtttttaacttacttgttgattataggtaaaataacattctatgatgttatgagatagttgtgaagtgtgattttatttaatttgattgcttattctttttttctatcactatatttggttattagatttttatattttgttagtttt

SEQ ID NO: 4049 - DNA, 521 bp, Gossypium hirsutum
  Clone ID: GOSHI-09MAY01-C1_26
cccacgcgtccgcccacgcgtccgtgctttttcttagttttcctttttgtcccttgtttatttgatatttccccctcatggccgccgctgatgtcgagttccggtgcttcgtcggagggctcgcatgggccaccgacgaccgggccctcgaagaagccttcagtgcgtttggtgaaatcgtcgaatcgaaggtccgtttgttgcagggatcggactccagatctgacttgatccgacccgatctgggcgcccctgtcatatgatctgtgatccttgttctgttcttttgtgttacttgttacttgatactactctcttgttactattctcttttaaaactctcaccgatcattaatgatcgtgagactggaagatcccgaagctttggattcgttactgtccgtgacgagaaaactatgatggacgctatcgaaggaatgaacggtcaaaatcttgatggaaggaacatcaccgtcaaccaagcccaatcgcgcagaaatggaggcggtggcggaggattt

SEQ ID NO: 4050 - DNA, 614 bp, Gossypium hirsutum
  Clone ID: GOSHI-09MAY01-C1_27
ctcactcgtccgcccacgcgtccgcccacgcgtccgcttttttccttaaccttttaaaaaacataaaagatggtcaaggttccttttgttgtgttctcattggctttggtgctctcaatccaattcgtagtgggacaagatgaggaggctatagatgaggaagtatcccgggaagccgatgatatacttttgagttcaggggcaactaatctcgttgaaaaccttaaaagctctgctggagataattcccagagtgtggatgggccaacttctggcttagctgatgagattgcagcttcttccagaatcggaagtagaagttgctattgaatctgccggtgggatgaagcgtaaaatggcataataatcccaatgatgtttagaaagaaacatcagacccaaattttttaaagaggtggctaaagccgtaaaaaaataataaaaacaatgcaaaaaaaataaaagcaacatccatggtttttgtaaaatatgtcatgcagtaatatacttttaaaaataaaacaatttggtttaacatttgttcgcacatttttttgtcacttattttctcaataatatacacgttcccaatagatatatttagttttcatttt

SEQ ID NO: 4051 - DNA, 971 bp, Gossypium hirsutum
  Clone ID: GOSHI-09MAY01-C1_28
gggccggtatgatcttctaccgcaaaggaccaaagctcttcaaagaagggccaacctgaaggtgcggtgtatgattttgaagacaaaatcaattttgcggatttcccatcccttcagggtggtccgcacaatcaccagattggtgctttggctgttgccttgaaacaatccatgtcacccgggttcaaggcttacgctaaacaagttaaggccaatgcagttgccattggaaagtaccttatgagcaaaggataccagcttgttacaggaggaaccgagaaccaccttgttctttgggatctacgaccttttggattgactggcaacaccgttgagaaactctgtgacctgtgcagcatcactgtcaacaagaatgctgtatttggtgacagcagtgccttggcacctggaggagtacgaattggtacccctgccatgacttcgagaggtttggtcgagaaagacttcgaacagataggtgaggttcttcaccgagcggtgaccatcaccttggacatccaaaagcagtacggaaagctcttgaaggacttcaacaaaagtttggagaacaacaaggagatcgaaaagctgaaagccgatgtcgaaaagtttgcatcctcatttgacatgccgggtttcaagatgtccgaaatgaagtacaagaattagatcttatagatatttatggttttattcatgcttattgctgttattatcggcatatgtgtcatctggaaatttgcctctgctgatttccaaggagttgatgttagaaaaaaaaaatggaaaagaaaatgaagtaaaggcttccatctatggtatgtttttttaaagttttttaagcccattacttgtgagagcttccataaaaaccatgtaacaattttatatattgtttttgttgctggaaagtttagggttttaattaccaataaacgagatattggggtttaaaaaaaataaattctatt

SEQ ID NO: 4052 - DNA, 499 bp, Gossypium hirsutum
  Clone ID: GOSHI-09MAY01-C1_29
gctgattacaccctcaagctcctccacaggagaatccccccagctgtccctggaatcatgttcttgtctggcggacaatccgaggttgaagcaaccctcaacttgaacgcaatgaaccaatctccaaacccatggcacgtctcgttctcgtatgccagagctctccagaacacttgcttgaagacatggggaggcagacctgagaacgttaaggctgctcaggattcacttcttgtccgtgctaaggccaactcacttgctcagctcggcaaatacaccggcgagggagaatcagaggaggccaagaaaggaatgttcgtaaagggatatgtctactaagctgctgcaaacaaagcttagctgagatgatggagatttcatgatatggtttctctttcattctcattgagagtaatgctctatagaccctggagactactttttgttctggattgccacgtactgctagttaataaacttcttgccgatgagggtactc

SEQ ID NO: 4053 - DNA, 633 bp, Gossypium hirsutum
  Clone ID: GOSHI-09MAY01-C1_30
cccacgcgtccgcgatggtcagattattaccatcggggccgagcgttttagatgccctgaagtgcttttccaaccatcgatgatcggtatggaagctgcaggcatccaccagacaccttataactcgataatgaaatgtgacgtcgatattaggaaagacttgtacggtaacattgtactcagtggtggtacaactatgttccccggtatcgctgatagaatgaccaaggagatctcggctttagctcctagcagcatgaagattaaggttgctgctccacctgagaggaagtatagtgcctggattggcggatcgatcttggcttcccttagcacattccaacaaatgtggatcgccaaggcagagtacgatgaatcgggtccatcaattgtacacaggaaatgcttgtaaatgtttttcgacatgagctttgatctatcaacatatgtgtattctcttgtcggatagaacgatcattccttttttagaaagagtttttttatttttgttttaactcttatttttttattattttttttaatagaagttttctttttttttttacttttcatattattattatattctttttttttatctatttatttcatattttttatatttgttatttt

SEQ ID NO: 4054 - DNA, 655 bp, Gossypium hirsutum
  Clone ID: GOSHI-09MAY01-C1_31
cccacgcgtccggcggttataatcagctccttcctgtggttgtcccagctcctaatcctggtgttgccaaaccaaagccggcgccaaaacccaaattcactccaacccctgctacatcgtctaatccaattaccatagagcagaagatgacaacttcctggaatgccaagggaaaaacctactacaggtattccacaatagtgaccaacaagtcttacaagacactgaaggatctcaagctttctatatcaaagctttatggtcctctatggggtctctccaagtctggcaattcttatggtttcccaacatggctcaactctctacctgctggaaagagtattgagtttgtatacatccattctacttctcctgctgatgtctcggtttcaagctacaatttggcttaagaatgaaaggaccaacaacaatgctatagcagagttaaaaatccactctgtttcctgggttattgtggtgcttaaagttgtgcagtataccgaatacctatccaaaaaaaagggttttctttctcttgtttggggatatccaactttacttgttgattatggttgtaggtgatatattaggtataaaaaacaatgaaaaaatgaggagaagagtgaaaaaacaatttaaaagaagagctcatccc

SEQ ID NO: 4055 - DNA, 811 bp, Gossypium hirsutum
  Clone ID: GOSHI-09MAY01-C1_32
ccccgcgtccgcaaaaatctgctttttcttagttttcctttttgtcccttgtttatttgatatttccccctcatggccgccgctgatgtcgagttccggtgcttcgtcggagggctcgcatgggccaccgacgaccgggccctcgaagaagccttcagtgcgtttggtgaaatcgtcgaatcgaaggtccgtttgttgcagggatcggactccagatctgacttgatccgacccgatctgggcgcccctgtcatatgatctgtgatccttgttctgttcttttgtgttacttgttacttgatactactctcttgttactattctcttttaaaactctcaccggtacgttctttcttcatccctttgggccgaagatcgatcgattttaacaaatcttttttttaatttttattttgaaattttttcaattaagtaatgttttgttgttttcattttcagatcattaatgatcgtgagactggaagatcccgaggctttggattcgttactttccgtgacgagaaagctatgagggacgcgatcgaaggaatgaacggtcaaaatcttgatggaaggaacatcaccgtcaacgaagcccaatcgcgcagaagtggaggcggtggcggaggatttggaggaggaaacggtggttacagccgcggtggaggcggcggcggatatggtggtcgccaaggaggatatggtggcggacgccgtgaaggtggatacggaaatggtggaaggtatggtggtggtgggtaccgaggtggacgccgtgaaggaggatatggtgacggcggatctcgttact

SEQ ID NO: 4056 - DNA, 641 bp, Gossypium hirsutum
  Clone ID: GOSHI-09MAY01-C1_33
cccacgcgtccgcttcgcccccttcagtttccatttctattaacaaaaaaaatggatccagttaacacatggggcaactcctcccttgaatccgtcgacccagaaatgcatgacctcatcgagaaagagaagcgtcgtcaatgccgcggcatcgagctcatcgcttccgagaacttcacttccttcgccgttatcgaagccctcggcagtgccctcaccaacaagtactccgagggcatgcccggtaaccgttactacggtggcaacgaattcatcgacgagatcgagaatctctgcaggtctcgcgctttgcaggcttttcatctcgaccctactaagtggggtgtcaatgtgcagccgtactccggttctccggctaacttcgctgcttacacggcggttttagagccgcatgatcggatcatggggctggatttaccctccggtggtcatttaactcatgggtattatacctctggtgggaagaagatctctgctacttcaatttactttgagagtttgccttataaggtgaaccccagcaatgggtacctcgactacgataagttggaagaaaaggcattggattttaggcctaagcttatcatttgcggtggcagtgcttatcctagggactggga

SEQ ID NO: 4057 - DNA, 469 bp, Gossypium hirsutum
  Clone ID: GOSHI-09MAY01-C1_34
aaaaaaggtgaagatatcttacagctttgcgataatggcgagaagtgtttgcgtttggtttgccttggctgcaattgtatgctctttatcggccatttctgctgaagaaagcagtgagtcgaaagaattcgttttgactttggatcactctaattttactgacactgttagcaagcacgatttcattgtcgtcgaattttacgctccttggtgcgggcactgtaagcatcttgctcccgagtatgagaaagcaatcattatgcatgaactagtagttattatataatattagcttcaagtaaataatgctgagagaactgattgttaattaagattgccttgtttgaagcagcagcatgtatatatatatatatgcttgcttacaaggtttgtctctcagagtccttctctttgtactcttttcagcttaatgaataaactgtctacttaaaaaaaaaaaaaaaaaaaa

SEQ ID NO: 4058 - DNA, 1434 bp, Gossypium hirsutum
  Clone ID: GOSHI-09MAY01-C1_35
atccaacgactgtatataaactcgtgatcgttcaagatttacatgtttcacattatctcgtatatcttgctctgagctgcctctgcgtgcgggggcaggatcggagattgtttggtcggcgaagtttgagacctgtctttgtagtccaatcgactgctaatattcgagttggattgcgacaatggaggcagagaagaaacattcatcagccgtttctaatgtgggagcttgggcaatgaacgttattagctccgtcgggttaatcatggccaacaagcaactcatgtcccctaccggtcatgccttcgcttttgcgacaacattaactgggttccacttttgtacaactgccttaatcggtttggtgtcaaatgccactggttacacaacataaaaagaatgttcctttgtgggagcttctttggttctcggttgttgccaatacttcaattaccgcgatgaacttgagcctcatgttgaattcggttggattttatcagatttcaaagctaagtatgattcctgttgtttgttttctggaatggctcctcaatggtaaacattactcgagtaaagtcaagatggcagtggtggtggtggtggtgattggtgtaggtgtttgtacagttactgatgtaaaaattaattcgcatggatttctttgtgcctgtgtagctgtcctatctacctccttacaacaaatttcaattgggtccttacagaagaagtactcaataggatcttttgaactgcttagccaaacagctccaatccaagctttatctcttttgttgcttggtccattcgttgattacttcctcactggcaagttactagcaagttataagatctccacagctgcattttttttcatagtactgtcatgttccttagctgttttctgcaacataagccagtacctgtgcattggacgattctcggcggtgtctttccaagtgctaggacacatgaaaacagtatgcgtgttgatattaggatggatgctgtttgattcagagctgacattgaaaaacatactagggatgagcatagctgtgaatgggatgataatatatagttgggcagttgagggagataagccaatgcaataccgaaaagatgctacatcagatgtaaaggtacttataaagcaagtggacggctcatcactactcaaggacgttgagcttggcaaatctcaaggatagttgttgcccaaaatcttagggatttttgtttttccaataactggctaaccaccggttgttcaaaaatcttcaattttttctctttattcatttttttcctccttttatttcttgatatttcgttgtagtttaagttataatggaaaatgattttttccataataatatctcttctgaactacatgagagtggataggtaaggctaaatataaaggtttggattggc

SEQ ID NO: 4059 - DNA, 1038 bp, Gossypium hirsutum
  Clone ID: GOSHI-09MAY01-C1_36
cttgtcttgtctgtttggttcctgagaaagcgaaagaaaacgcaacggtctgtttttaaagacaaaacagtagtggtaatttgattccccctccccccttaattcttgctttaggtatctgttaaaggataaaggtgcgattcttttggtgaaaaaaacaatgaggcctgtgtttgtggggaacttcgagtacgagactcggcaatcagagctggagcgtttgttttcaaaatacgggaggatcgaacgggatgatatgaaatctggatttgcctttgtttattacgaggatgaacgtgatgctgaagatgctattcgtgaacttgataatattccttttggttatgaccgacggcgactgtctgtggagtgggctaagggtgaacgtggtcgacgtgttgatggttctaggtcagtgacaaatcatagacccaccaaaaccttgtttgttatcaactttgatccaatccgtactagggaacgagatattctaaggcactttgagccatatgggaaggttcttcatgttcgcattaggcgaaactttgcgtttgttcagtttgcaacacaagacgatgctaccaaagctctcgaggctacacaaaggagcacagtactacacagagtcgggtctgttgaatatgctttaagggatgatgatgagagggataacagattctatagtcctaaaagaggaggttacgatagacgtagagatagtccatatggggaggcctcaagtcctgtataccataggcgacaaagtcctgattatggtagagctcgtagtcctgtttatgaacgttataatggtcctgcttatgacagacgcaaaagtcctgattacgggaggcataggagtcctgaatatggcagataccgcagccgatcacctgttcgaaggtcccgaacatagaagggcatcagattaacggtgaaaagtatttcgtagctctatgcctagctttctatgtattttggtatgtactttaagaacctaatgttcatgttaatatatgtacttggctttggattaac

SEQ ID NO: 4060 - DNA, 633 bp, Gossypium hirsutum
  Clone ID: GOSHI-09MAY01-C1_37
cggacgcgtggggacaaaacggacccaaagaagaagaaaaaaaaaaggtgaagatatcttacagctttgcgataatggcgagaagtgtttgcgtttggtttgccttggctgcaattgtatgctctttatcggccatttctgctgaagaaagcagtgagtcgaaagaattcgttttgactttggatcactctaattttactgacactgttagcaagcacgatttcattgtcgtcgaattttacgctccttggtgcgggcactgtaagcatcttgctcccgagtatgagaaagcagcatccattttgagtaaacatgatcctccaatctttctagcgaaagttgatgccgatgatgaagcaaacaaagatttagcaagccaatacgatgtcaagggttaccctacgcttcaaattttgagaaatggaggaaagaatgttcaagaatacaaaggtccacgtgaagctgatggtattgtagagtatttaaagaaacaaagtggcccctgcttctgttgaaataaaattaacagaagatgccagtaaccttattgatgacaagaagatagtaattgttggggtgttcccaaaattttctggggaagagtttgagagctatatggcactcgctgagaaa

SEQ ID NO: 4061 - DNA, 688 bp, Gossypium hirsutum
  Clone ID: GOSHI-09MAY01-C1_38
cccacgcgtccgggattacccgctgagtttaagcatatcaataagcggaggaaaagaaacttaccaggattcccctagtaacggcgagcgaaccgggaaaagcccagcttgagaatcggtcgccatcggcgtccgaattgtagtctggagaagcgtcctcagcgacggaccgggcccaagtcccctggaaaggggcgccggagagggtgagagccccgtcgtgcccggaccctgtcgcaccaagaggcgctgtctacgagtcgggttgtttgggaatgcagccctaatcgggcggtaaattccgtccaaggctaaatacgggcgagagaccgatagcgaacaagtaccgcgagggaaagatgaaaaggactttgaaaagagagtcaaagagtgcttgaaattgtcgggagggaagcggatggaggcggcggagaagaagagctgagtggtgatggtggatcaagcggagtcgatatggacatggacttgaaaagaatgaatgccaatttcgatgagttgtgtggtgaagataagattctggtgtttttcaagagattgttgaatgattggaatcaagagctggatgagatgggtgaggctgagaaaaggacggcgaaaggcaagtccatggtcgccacgtttaagcagtgcgctcgttatttgaatcccttgttcaagttttgtagga

SEQ ID NO: 4062 - DNA, 650 bp, Gossypium hirsutum
  Clone ID: GOSHI-09MAY01-C1_39
ccccgcgtccgcccacgcgtccgggggggcgtgggggccgccgttgtcgttcagcagcagaacagcaaaagaagcaaagcaatggcaaggatcaaggttcatgagttgcgacagaaatcaaaaaccgagcttttagctcagttgaaagatctcaaagctgaacttgctcttcttcgcgttgctaaagttaccggtggtgcacctaacaagctttctaagataaaggtggtgaggctgtccattgctcaagttctgactgtaatctcacagaagcagaagtctgcattgagggaggcatacaagaataagaaattcttgcctcttgatctccgtcccaagaagacccgagccatccgcagaaggcttaccaagcaccaggcatctttgaagaccgaaagggagaagaagaaggaaatgtacttcccaatgaggaagtatgccattaaggtgtagggcaggatctcacattctatttaaaccgagttgtgattttgtttcgattttcatgtttggaaactcttttttgccccctgttaaaaaccaagattctggtctttttgattgaatggtaatttatggatattttgcatttcttgatgaggagtgattgaaattcaattagtttgagaagttttaattcgatattattg

SEQ ID NO: 4063 - DNA, 638 bp, Gossypium hirsutum
  Clone ID: GOSHI-09MAY01-C1_40
cggacgcgtgggttaatattagggtttcatcatactttaagaaagacagagagaagccggcacttctgaagagcagcggaagaagcaatggcgagaatcaaggtccatgagttgagacagaaatcaaaaactgagcttttggctcagttgaaagatctcaaagctgagctcgctcttcttcgtgttgccaaagttaccggtggtgcacctaacaagctttccaagataaaggtggtgaggttgtcaattgctcaggtgttgacagtgatctcacagaagcagaaggctgcactgagggaggcatataagaagaagaagttcttgccccttgatctccgtccaaagaagaccagagccatcaggagaaggcttaccaagcatcaggcatcgctgaagacagaacgtgaaaagaagaaggaaatgtacttccccatgaggaagtatgccattaaggtgtaggataagatatttgagattctattttgaaatccgtttgtgtttacttatttgtgaaaacccgagctgtgattttgtttggtttttatgtttttgaacattttcccatatgtcaaatctagattttaatctttttgatggaagtggtaaattaaatgagggactttctgcttaagaatgaa

SEQ ID NO: 4064 - DNA, 1467 bp, Gossypium hirsutum
  Clone ID: GOSHI-09MAY01-C1_41
gcgagaagtgtttcagtttggttggctttgtccgcaatcttatgctctgtaacggcgatctcagctgaacagagcagtgaaacgaaggactttgttttgactttggatcattccaacttcaccgacactgttagtaagcacaaatttatcgtcgtcgagttttacgctccttggtgtgggcactgtaagaatcttgctccagagtatgagaaagcagcatctatattgagtaaacacgaccctccagtcattcttgccaaagttgacgccaatgaggaagcaaacaaatatctagcaaatgaatatgaagtcaggggttaccctacacttaaaattttgagaaatggaggaaagaatgttcaggaatacaaaggtccacgtgaagctgatggtattgtggagtatttgaagaaacaaagtggtcctgcttctgctgaactaaagtcagcagaagatgccagtaatcttattgatggcaagaagatagtagttgttggggtgttcccaaaattctctggcgaagagtttgagagttatatggcacttgctgagaaattgcgttctgattatgaatttggtcatactttggatgctaagcaccttccccgtggtgaatcgtcagtgaccggccctgtggtcagacttttcaagccttttgatgaactctttgttgacttcaaggactttaatgtggaagctctaaagaagtttgttgcagaatctagcatgcctcttgttacccactttaacaaggacccaagcaatcaccaatttgttatcaagttctataacagtcccaatgctaaggctatgttgtttgcaaacttgagtgttgaaggtattgattctttaacttcaaaatatcgtgaagttgctgagcaattcaaaggacagggaattggtttccttttgggtgatcttgaggctagtcaagctgccatccagtattttggagttcaagaaagccaagtacccctaatcatcattcagaataatgataggaagaagtatttgaaaccaaatttgcaggctaatgacattgcaccttttgtgaaggattacaaggaaggaaaagttccaccatatctcaagtctgaacctattcccgaggagaataaggaacctgtaaaagtggtggttgctgacacccttgaagacatggttttcaaatcaggcaaaaatgttctgcttgagttttatgccccttggtgtggacattgcaagaaattggccccaatcttggatgaagttgctgttcattatgaaaaagatgataatgttgtgattgcaaaacttgatgccactgcaaatgatattgtgggtgagaactttgatgttagaagctacccaaccatttactttaaatcaactagtggaaacataactccttatgaaggcaataagaccaaggaagacatcgtcaacttcattgaaaagaacaaggataaaacttgccaacaagagtca

SEQ ID NO: 4065 - DNA, 1325 bp, Gossypium hirsutum
  Clone ID: GOSHI-09MAY01-C1_42
acgcggcctataataagcgaacagggagacaactggtccaggggatgtctcaaaggttttctcttttaggacacaactaatgcagggaggctcgctgtgaccaatctggcgactgcaagccaaagcatgacccatataacccaccgatgacacgctttcacacacaagtggacaaagaggcacatgaagctgatgatcaatgagactggaataacactctatagctgtgaacaaaaaaatcagtgcttatgttaagcacaaaaagaaacagaatcagatttgctggatctgggaaaaggtcagcccagataatgatggcggattccagcggctcttggatactgttcagtacaaagctaatagcatacttcgttatgagcgcacctttggtgaaagaattgcgagcacaggaggaatagaaacaacgaaagaatttgtggcgaagttggatctaaagcctggccaaaaggttctagatgttggctgtggcataggtggaggtgacttttatatggcaaaagaatttggagtctatgttgtgggcatcgatctgtccataaatatgatatcttttgctcttgaaagagccaatggactcgattgctctgtggaatttgaagttgctgattgcactacaaagacttatccagataacagctttgatgttatctacagccgtgacacgattctacacattcaagacaagcctgcactatttagatatttctacaaatggttgaagccagggggcaaagttcttataagtgattactgcaaaagcgcaggagcttcatcgcccgaatttgcagagtacatcaagcagagaggctatgatctccatgatgtaaaagcttatggccagatgcttaaggatgctggttttgatcaggtcattgcagaggatcgaaccgatcagttcatacaagttctgcagcgtgaattagacaaagttgagaaggacaaggataccttcatcaccgacttttctcaggaagactacgacgatatcgttgggggatggaaggcaaagctgattaggaccagatttggggagcagagatggggtcttttcattgccaacaaaaactaagtcctgcttcttctctaatgttactttctcatttctctaataaatgattcatagtaataagagtgtacttagcattagatgtttctacttgatgcttgttgcttctgatgttatgaacttaaacatccttttgccttgaataaattacccctttttcgtcagttaaaaaaaaaaaaaaaaaaaaaaaaaaaaaaaaaaaaaaaaaaaaaaaaaaaaaaaaaaaaagggcggccgc

SEQ ID NO: 4066 - DNA, 1363 bp, Gossypium hirsutum
  Clone ID: GOSHI-09MAY01-C1_43
cccacgcgtccgcttctcgctttaatcctcgcttttctccgccatcaaccacttcctcgttttctcaaggttgtagaagatggcagagggcgaggatatccaaccccttgtttgcgacaatggaacaggaatggttaaggctggatttgctggggatgatgcaccacgagctgtgtttcctagcatcgtcggtcggcctcggcacaccggtgtaatggttggtatgggccaaaaagatgcatatgttggtgatgaagctcaatcaaaaagaggtattttgacattgaaataccctattgaacatggtattgttaacaactgggatgatatggaaaagatttggcatcatactttttataacgagcttcgtgttgccccggaagaacaccccattttacttaccgaagcccctcttaaccctaaagcaaatcgtgagaagatgacccaaattatgtttgagaccttcaacgcacctgctatgtatgtcgccattcaggccgtgctctctctttatgccagtggtcgtaccaccggtattgtgttggattccggagacggtgttagccacacggtccctatatacgaaggttacgccctcccgcatgctattcttcgtatcgacttggctggccgtgacctcaccgataaccttatgaaaattttgaccgagcgtggatattcattcacaaccacagccgagcgggaaatcgttagggacgtgatggaaaagctatcatacattgctctggatttcgagcagggaatagagacctctaaaacaaactcatcggtagagaagacttacgagttaccagacggtcagattattaccatcggggccgagcgttttagatgccctgaagtgcttttccaaccatcgatgatcggtatggaagctgcaggcatccacgagacaacttacaactcgataatgaaatgcgacgtcgatattaggaaagacttgtacggtaacattgtactcagtggtggtacaactatgttccccggtatcgctgatagaatgaccaaggagatctcggctttagctcctagcagcatgaagattaaggttgttgctccacctgagaggaagtatagtgtctggattggcggctcgatcttggcttcccttagcacattccaacaaatgtggatctccaaggcagagtacgatgaatcgggtccatcaattgtccacaggaaatgcttctaaatggttttcgacatgagctttgttctatcaacatatgtttattctcttgtcggataaaacgataaagcatcagagaaagagaaatgtttcatcgtgtgtggaccaattctttcaattctttttaatgagaagttggtttttttaccatct

SEQ ID NO: 4067 - DNA, 1735 bp, Gossypium hirsutum
  Clone ID: GOSHI-09MAY01-C1_44
gcgggaaaacaatcgctgtaattttttttctcttcttcctttttcttttttaaaagtatcagcaaaattcccaatctaaaaaaatggagtctcctcaaccccaacaacagcaacaacaaggtcctaagaagagaggtcgaaaaccaaagccaaaggaagagaaagaacagcagcaacaacaaagtgctagtaaaatgaaagagggaaagaaagctcaccaacctagcgttgatgagaagtacactcagtggaagtctttggttcctgttctttatgactggcttgctaatcacaatctcgtttggccttctctttcttgccgctggggaccacagcttgagcaagctacttacaagaatcggcagcgtctctacctctctgaacagactgatggtagtgttccgaatactcttgtgattgctaattgtgaagttgtcaaacctagggttgctgctgctgagcacatatctcagtttaatgaaaaaacacgctcaccatttgtgaagaagtacaaaaccatcatacatcctggagaagtcaacagaatcaaggaacttccacagagctctaggattgtggcaactcacactgatagtcctgatgttcttatttgggatgtcgaggctcaacccaaccgccatgcggttcttggagcaacccattctcgcccagatttgattttgactgggcatcaagataatgctgaatttgctcttgcaatgtgtccaactgagccttatgtgctctctggagggaaggacaaatcagtggttttgtggagcatccaggaccacataacaacaatggctacagaccctactaaatctcctggatctggcggatcaatcatcaaacaaaacaagcctggggaaggtaatgacaaagctgctgatgggccttctttaggtcctcgtggtgtcttctgtgggcatgaggatacagttgaagatgttacattctgtccatcaagtgcacaagagttttgtagtgtaggtgatgattcctgcctcatactatgggatgcacgagttggcactggccccactgtcaaggttgaaaaggcacataatgctgatctccattgtgttgattggaacccccatgatgacaatcttatcctgactgggtctgcagatcatactgtacgtatgtttgatcgaagaaatcttacttctaatggaattggatcacccatttacaagtttgagggtcataaagctgctgttctatgcgtgcagtggtctccagacaaatcatctgtatttggcagttctgctgaggatgggctcttgaacatttgggactatgacaaggttggcaagaaggtggaacgtgcttcaagatctcctagtgcttctgcgggactgtttttccagcacgctggacacagggacaaagttgttgacttccattggaatgcatttgatccatggactgttgttagtgtgtttgatgactgtgaaacaactggtggaggagggacattgcaaatatggggcatgagtgatttgatttataggccggaaaaggaggttttagcttagctggagaaattcaagtcccatgtcattttgtgggcgacaaaggcattaaaaaggtttagtagccctaatggtatgcctatttgaggctcctttgtagtgattgtagatttaaagaccctttgctttacctaatcaacgaaccctgtcaaacaaccttactattaaatccagggattcatccagcgtttggg

SEQ ID NO: 4068 - DNA, 1042 bp, Gossypium hirsutum
  Clone ID: GOSHI-09MAY01-C1_45
aatacacccagttctccttactgaggctcctcttaacccaaagctaatcgggagaaaatgacccaaattatgttcgagaccttcaatgcccctgctatgtatgtagctatccaggccgtgctctcactttatgccagtggtcgtacaaccggtattgtgatggactcgggagatggtgtcagccacacagtgcctatttacgagggttatgccctcccacatgccattcttcgtcttgacttggctggtcgagacctcactgattacttgatgaaaattctgactgagcgtggatattccttcaccaccacagccgaacgggaaattgtgagagacgttaaggaaaagttgtcttacattgcccttgactatgaacaggagctagagacctcaaaaacaagctcatcagtagagaagagctatgagttacctgatggtcaggttattaccattggtgctgaacgtttcagatgccccgaagtgcttttccaaccatccttgattggtatggaagctgcaggcatccatgagactacatacaattcaataatgaagtgcgatgtggatatcaggaaggacttgtatggtaacattgtccttagtggtggtacaaccatgttcccgggtattgccgacagaatgagcaaggagctttcggcactcgctccgagcagcatgaagatcaaggttgtcgctccacctgagcgaaagtacagtgtctggatcggaggctcgatcttggcttccctcagcaccttccaacaaatgtggattgcaaaggccgagtatgatgaatcaggtccagcgatcgtccacaggaaatgcttctaaatgttattggtatggggataggatgaaagagagaagtactgtttcattgtttcttgatgcagcttggaactttgctttgttctaatggctttgttatccttctgtgtgttttcatgttggagtgaaacaatgaactttgagaaagccagtgatttaatttttgttccaattctttgaatctcagacaaactttttctgttctttttactat

SEQ ID NO: 4069 - DNA, 743 bp, Gossypium hirsutum
  Clone ID: GOSHI-09MAY01-C1_46
ccttctcgtccgcccacgcgtccggtatatttagggcggaaaacagaaagaggccgccgttgtcgtccctgcagcagaacagcaaaagaagcaaagcaatggcaaggatcaaggttcatgagttgcgacagaaatcaaaaaccgatcttttggctcagttgaaagatctcaaagctgaacttgctcttcttcgcgttgctaaagttaccggtggtgcacctaacaagctttctaagataaaggtggtgaggctgtccattgctcaagttctgactgtaatctcacagaagcagaagtctgcattgagggaggcatacaagaagaagaaattcttgcctctcgatctccgtcccaagaagacccgagctatccgcagaaggcttaccaagcaccaggcatctttgaagaccgaaagggagaagaagaaggaaatgtacttcccaatgaggaagtatgccattaaggtgtagggtaggatctctcacattctatttacatatcgattcgctctttactttctagcatcgtcttccgtaaaacccgagttgtgattttgtttcaatcttcatgtttggaaactcttttttgtccccttgttaaaaaccaagattctggtctttttgattgaatggtaatttatggatttttttgcaaatattttaaaaaaaagaattttttgatgactaactaattttgacttggtttaaagggatattctggtgctaaaaggttattaaaatata

SEQ ID NO: 4070 - DNA, 1505 bp, Gossypium hirsutum
  Clone ID: GOSHI-09MAY01-C1_47
tctacgcgtccggaaacttaccaggattcccctagtaacggcgagcgaaccgggaaaagcccagcttgagaatcggtcgccatcggcgtccgaattgtagtctggagaagcgtcctcagcgacggaccgggcccaagtcccctggaaaggggtgccggaggggtgagagagtgctcggtggaattttgagatctgttcttggaatccatccgagcgccaagcttcagtttttgaactccgaaaatggattcactgaagaaacaatcatcagccgtatccgatgtgggagcttgggctatgaacgttgtcagttccgttggccttattatggccaacaagcagctcatgtcccctgccggttatgccttcgtctttgcgactacattaactggattccacttttctatgactgccttaatcggtttggtatcaaatgctacgggtaactcaacaagaaaaaaagttcctttatgggagcttctttggttctctgtcgttgccaatacttcaatcaccgggatgaacttgagcctcatgctgaattcagttggattttatcagatttcaaagctaagtatgattccagttgtttgtgtgatggaatggatactacacagcaaacactattcggacaaagtcaagatttctgtccttgtcgtggtggttggtgttggtgtttgtacagtcactgatgtaaaagttaatgctcaaggatttatttgtgcctgtgtcgctgtcctgtctacctccttacagcaaatttcaattggctccctacaaacgaagtactcgataggctcatttgaattgctcagtcaaacagctccaatccaagctctgtctcttttgttgttcggtccctttgttgattactacctcactggcaaattactagcaagttacaagttctcctcagctgcattttttttcatactactatcgtgctcgttagcggtattttgcaatataagtcagtatctttgcatcggacgattctccgccacatctttccaagtcctaggccacatgaaaacggtttgtgtattgatattgggatggctactctttgattcggagctgacactgaaaaatatactcgggatggcgattgccatcctcggcatggtagtctacagttgggctgttgaagctgataaacaaacggaatccaaggtttcaccactccccaaggaagcttctgaagaaaatgttgaattgttaaaacaacagcagcaatcggacggttctccgctcaaggacgttgagcttggcaaatatcagccttagatttgtatgttcttcattttttttttgattctttttcaaaaattgatttgtttaatgttttaagctcttggaattggctgtacaaattttaaaagtttactaatttttttcctacgttttctttttaatatttcattgtagtaaagtcattccaggataagctattttctgattgataagcaacaacaggaattttaactgttgggtctgctgagaaa

SEQ ID NO: 4071 - DNA, 780 bp, Gossypium hirsutum
  Clone ID: GOSHI-09MAY01-C1_48
ctcggctctcgcatcgatgaagaacgtagcgaaatgcgatacttggtgtgaattgcagaatcccgtgaaccatcgagtctttgaacgcaagttgcgccccaagccattaggccgagggcacgtctgcctggggtcgccgcgaagcccatcaagcccaagaaatctactggaaagcctgttggccgccccaagaagacaacggatggagcagcatcatatggcgatctgaagagaaaacttgaattctttcaatcaaaagtgaagcaagcagttggagtactaaagtctcagttcagcagtgaaagcaacatcagtgcaatcgatgctatccaagagttagaagtacttgcagctatggacattaacaaaccatttaaagatgatgctcagccaccgcccccaccacccccagcaccagaaccaacacagccagcaccgatgccccaaaatatggagggacaagtatattaataacgaagccctatctctctgtatgattattaagaaggcaaggcgtggaagaaaatgttctgaccctagacatatgatatttctgtaaagggaaaagtaggaagttgcagatcatctaatttgtgttgttattgttgttgaggtgtgtgttcgtttgtgaaccctgttcatcgacttttaattattccccctcatttagtgcaacattagtcaagcatccttgttcgcttggtttttgcttgagtgttattattattattatgaatttgatattagtagtagtgtatttgaaatatccaaaaaaaaaaa

SEQ ID NO: 4072 - DNA, 850 bp, Gossypium hirsutum
  Clone ID: GOSHI-09MAY01-C1_49
ggagaggagtattgccttagacattgacactagtctataaataatgtctagcctaaacatcaacgcaaaccactcccacattaaacaaaccactcccacattaaatattgttgctgaaacaatggcgttttcagctctgacaggtaagcttgaggcagatgtagagattaaggcttctcctgagcagttccatgaaatgtttgcccacaaaccgcaccacgtgcaccatacttgctatgacaagattcaaggatgcgatttacatgaaggtgaatgggggaaagtcggtaccattgtccattggagttatgtgcatgatggaaaagctaaaaaggcaaaggaagtagtggaagcagtagaccctgataagaatttggtcactttcagagtgatcgaaggagatctaatggaagagtataagagctttgtaatcacgattcaagtttcgcccaagagcgagggtagtggcagcttagtgcactggactttggaatacgagaagctgcacgatgggattgcgcatcccgagactctgctgcaattcgttcaagatgtctctaaagacattgacgcccacctcacccaagcaagctaaacagtatcacatgttgctattgttaccgctacttcaagcactattcatctatttaatgaataaagtgacaacttcctttctcatgtattttgatctgaatatgtatgtttagatcaatatgcagtcaaggggagggagctttgtattttcttgcatgtttgtctttttagttctgtatgaattcaatgtatcctatgcttttatttgtgttcaaatgaatatatgtaagtaaaattttcgaatctatttccactc

SEQ ID NO: 4073 - DNA, 840 bp, Gossypium hirsutum
  Clone ID: GOSHI-09MAY01-C1_50
cccacgcgtccgaaacaaaccactcccatattaaacattgttggtgaaacaatgacgtcttcagctctgacaggtaagcttgaggcagatgtagagattaaggcttctcctgagcagttccatgaaatgtttgcccacaaaccgcaccatgtgcaccatacttgctatgacaagattcaaggatgcgatttacatgaaggtgaatgggggaaagtcggtaccattgtccattggagttatgtgcatgatggaaaggctaaaaaggcaaaggaagtagtggaagcagtagaccctgataagaatttggtcactttcagagtgatcgaaggagatctaatggaagagtataagagctttgtaatcacgattcaagtttcgcccaagagcgagggtagtggcagcgtagtgcactggactttggaatacgagaagctgcacggtgggattgagcatcctgagactctgctgcaattcgttcaagatgtctctaaagacattgacggccacctcacccaagcaagttaagcagtatcacatgatgctattgttgccgctacttgaagcactattcatctatttaatgaataaagtgacaacttcctttctcatgtattttgatctgaatatgtacgtttagatcaatatgcagtcacggggaggagctttgtattttcttgcatgtttgtctttttaattctgtatgaattcaatgtgtcctatgcttttatttgtgttctaataaatatttgtaagtatgatatcgtaaaaaaaaaaaaaaaaaaactgaaaataaaactttacccacctttgtttgtaaaactaacaaattaaaaaatgaag

SEQ ID NO: 4074 - DNA, 985 bp, Gossypium hirsutum
  Clone ID: GOSHI-09MAY01-C1_51
tctagatcgcgagcggccgctcgcgatctagatctccttcgcgtccggcgggattacccgctgagtttaagcatatcaataagcggaggaaaagaaacttaccaggattcccctagtaacggcgagcgaaccgggaaaagcccatcttgagaatcggtcgccatcggcgtccgaattgtagtctggagaagcgtcctcagcgacggaccgggcccaagtcccctggaaaggggcgccggagagggtgagagccccgtcgtgcccggaccctgtcgcaccaagaggcgctgtctacgagtcgggttgtttgggaatgcagccctaatcgggcggtaaattccgttcaaggctaaatacgggcgagagaccgatagcgaacaagtaccgcgagggtttggttgagaaggactttgaacagataggcgagttcctccaccgagccgtgacaatcactttgaacatccaaaagcaatatggtaagcttttgaaggacttcaacaaagggttggacaacaacaaggagatccaagagctgaaggttgatgttgagaagttcgcatcctcattcgatatgcctggcttcaagatgtccgaaatgaagtacaaggattagatctaaataaccatacgatctaattgatgttattatcagcatctgccactttttgggttgcccccatttgatgtcttatgagtgaaaggaaaaagaaagggaaaagagaaggatggcaaatgccttccacgtagtacggttttaagtgtcttcatttactggtcaatttgatatgatatttttcaagtttttgctgttctgtctttataagagtttgcataaaacgtatgtactaattttatgtattcttttttgttgctagaaaagttttttttttgggggggggagataaaggagagaaatgaatggtgtttgattgaacatcccaaactctggaaaataaaaagaggaaaaattattcaccttctgcat

SEQ ID NO: 4075 - DNA, 1779 bp, Gossypium hirsutum
  Clone ID: GOSHI-09MAY01-C1_52
aaaggaaaagaggtccgataatgtggagaatcgtttcagtttggcttgctttttttgtcatcgcatgctctctaacggcgatctcagctgaagagagcggcgaatcgaaggagtttgtcttgactttggatcaatctaatttcactgacaccgttagtaagcaagatttcatagtcgtcgaattttacgctccttggtgcggacactgtaagaatcttgctccagagtatgagaaagcagcatctatattgagtaaacatgatcctccgatccttctagctaaagttgatgccaatgaggaatcaaataaagatttagcaaatgaatatgaagtcaggggtttcccgactcttaaaattttgagaaatggaggaaagaatgttcaagaatacaaaggtccacgtgaagctgatggtattgtggaatatttgaagaaacaaagtggtcctgcttctgctgatatcaagtctgctgaagatgccagtaattttattgatgaaaagaagatagtaattgttggggtgttccccaaattctccggtcaagagtttgacaactatatggctcttgctgagaaattgcgtcctgattatgaatttggtcatactttggatgctaagtaccttccccgtggcgagtcatcagtgactggccctgtcgtcagacttttcaagccttttgatgaactctttgttgacttcaaggattttaatgtggaagctctagagaagtttgttgaagaatctagcattcctcttgtgactctctttaacaatgacccaagcaatcaccccttcattatcaaattctataacagtccccttgcgaaggctatgttgtttgcaaatttgagcaatgaaggagttgattccttaaaatctaaatttcgtgaagttgctgagcaatacaaaggacagggtatcggtttccttttgggagatcttgaggctagtcaagctgccttccagtattttggagttcaagaaagccaagtacctctcatcatcattctggagaatgatgggaagaagtatttgaagccaaacttggaggctgatcacattgcaccatgggtaaaggattacaaggaaggaaaagttccaccgtatgtaaaatctgaacctattccggtggaaaataatgaacctgtgaaagtggtggttgctgacacccttgatgacatggttctcaaatcaggaaaaaatgttctgcttgagttttatgccccctggtgcggacattgccagaaattagcaccaatcttggaggaagttgctatccactatgaaaaagatgctagtgttttgattgcaaaacttgatgcaactgcaaatgatatcgtggatccaaactttgatgttagaggctacccaactgtttactttagatcagcggacggaaacataagtgcatacgaaggtgagaggacaaaggaagacatcattgacttcattgagaagaacagggaaaaaactgctcatcaagaggcattaaaagatgagctctgaagaggggacttgaaaagagaagaggcataaatagtgcattgtacgttaaatacgagaattgctattgactaagcggatgactgatctcccgtttttccttagctttacatttaaaaaagacctagctatgaataatgcaggatgtatttttatttttagaaggtttagacgatgttataatagttctgtaacagttaaatttgctataggaaacatccgagcaaaacctagagaggatattttaatttattttctctttgcttcaaaaacc

SEQ ID NO: 4076 - DNA, 1510 bp, Gossypium hirsutum
  Clone ID: GOSHI-09MAY01-C1_53
ctaaagaatcgttctctccataaaaatttgaaaggccagtattgattcccattccctttaaatatttgatttttggcgtttctttcacatcattcccttgtctttcgaaatatttcctcgctctctcttttatcctcactttctcagccatcaaagacacccttttcttttcttaaggttgtaaaagatggcagatggtgaggatattcagccacttgtttgcgacaatggaactggaatggtgaaggccggatttgccggtgacgatgctccgagagccgtgttccctagcattgttggccggcctcgtcacaccggtgtgatggttggtatgggccaaaaagatgcatatgttggtgatgaggctcaatctaaaagaggtattttgacattgaaatacccaattgagcacggtattgtgaacaattgggatgatatggaaaagatttggcatcatacattttacaacgagcttcgtgttgccccagaagagcacccggttttacttaccgaagctccccttaacccgaaagctaaccgtgagaagatgactcaaatcatgttcgagacctttaattcacctgctatgtatgttgccatccaggctgtgctctctctgtatgctagtggtcgtacaaccggtattgtgttggattcgggagatggtgttagccacacagtccctatttacgagggttatgccctcccgcatgctattcttcgtctcgatttggctggtcgtgatcttaccgttaacttgatgaagattctgaccgaacgtgggtattcattcaccaccacagctgagcgggaaattgtaagggacgtgaaggaaaagctgtcatacattgctctcgactacgaacaagagctagagacctccaaaacagactcatcggtagagaaaacctacgaattacccgacggtcagattattaccatcggtgctgaacgttttagatgccctgaagtgcttttccaaccatctttgatcggtatggaagctgcaggcattcatgagacaacatacaactccataatgaagtgcgacgtggatattaggaaagacttgtacggtaacatcgtcctcagtggtggtacaaccatgtttcccggtatctccgataggatgaccaaggagatctcctcattagcacccagcagcatgaagatcaaggttgttgcaccacctgagaggaagtacagtgtctggatcggtggctcgatcttggcttccctaagcaccttccaacaaatgtggattgccaaggcagagtacgacgaatccggtccgtcaatcgttcaccgcaaatgtttctaaacagttcaatgggagaaaatgatcaaaaagagaaagcaatgactgctattagtgcagctctgctttgttctacggttctttttcgtctatttgtttttatcttcatgaacattgagagaaagcgaggggtttcattgtcttctaattcttttatttgttataaatgaatttgatgttcacaagcatttc

SEQ ID NO: 4077 - DNA, 2040 bp, Gossypium hirsutum
  Clone ID: GOSHI-09MAY01-C1_54
cggacgcgtggggttcaagttattccccattttttggtctttctttatgccaactgataatcaaatgaaagacatgaaaccgaattccataatgggatcgtcagtcaccgacggcgagatcgtgtgcgtaacaggcggctctgggttcattggttcatggctcatcaagctgctcttggaacgcggttatgtcgtccgagccactgtgcgcgaccctggcaactcgaagaaggtgaagcatttactagagctacctaaagcagagacgcacttgactctttggaaagcagatttagctgaagagggaagctttgatgatgcaattcaagcttgtacgggtgtgttccatgtggccacgcctatggacttcgagtccgaggacccctgagaatgaagtcataaaaccaacaatcaatggagtgctaagcatcatgaaagcttgcgccaaagccaaaactgttagaaggttagtgttcacatcatcagctggaactattgatgttgcagaacaacaaaagccctgttatgatgaaacctgttggagcgaccttgaattcatccaggccaaaaaaatgactggttggatgtattttgtctccaagacaatggcagagcaagcagcctggaaattcgctaaagaaaataacattgattttgtcagcataatacccacctttggtgggtcggtccatttattatgcaatcaatggccgccaagcctcataactgcactttctcctatcaccgggaaccgaagctcattattcgatcataaaacaaggccaattcattcatttggatgacttgtgcagagctcatatctttctattcgagaatccaaaagcggaaggtcgccacatttgcgcctctcaccatgctaccattatcgatcttgcaaaaatgctcagtgaaaaataccctgaatataatgttcccaccaagttcaaagatgtggatgagaacctgaagagtgtggagttctcctcaaagaagctcttggacttgggatttgagtttaaatatagcttggaagacatgttcgtaggagctgtcgagacatgccgagaaaagggactgcttcctctttctaatgagaagaagatcaaaaacatagactgaaaaatatgaactttcaacaattgagtgcctacccatgtcttccatttctagtagtgaaaacaataaagatttaaatctattatctgtttcctggtattgtacaatttttaattgcaaacattggtaatgtaatttggagtctattctgggaaaaaaaaataaaaaaaataaaaaaaaaaaaaaaaaaaaaaaaagattaaaaaagtgagtaagtgacctaaacgaattatttgagaaaaatgaaagatgaataccaacaagggattaacatggatgaccaaaaaccttatagaagtttctttcaagtgatggtttcgttgttggatacacccataaaccctaacgataaagatcaaccctacatcattggtagagaaaacatcaaggctataatggtggacatggtggcagcttccttcgacactacatccacggccattgagtggacatttacagaacttctaaagcatcctcgagtcatggttgctctccagaaagagctagaaagtgttgtcggaaggaatagaatggtagaagagtcggacctaccgaaacttgcctatttggatatggtcatcaaagagagtttcaggttgcatcccgtggcgccgttattagtcccgcacgagtcaaccgaagatgtcaccgttaaatgggtatttcatacctaagaagtcgcggcttttggtgaacacttggtccatggggcgaaatcccaagatatggtcgagcaatgccgaagagttctttccagaaagattcaaggataggaagatagaccttcgagggcatgatttcgaactcattccgttcggaaccggtcgtagaggatgtcccggaatgcagttagctctaatcagcatgcgtcttattttagctcaattagcccattgctttgattgggagttgcctgatgggatg

SEQ ID NO: 4078 - DNA, 614 bp, Gossypium hirsutum
  Clone ID: GOSHI-09MAY01-C1_55
ggaaggccggtattgaagagataagattatagtgtaaatttagacataataaagcccctcataacatccttcgacttgcttcattgattagccctctgaaagcccaagaaaaatggcttctgcttccgctactctcctcaagtcttcacctattatcgacaagtccgagtggattaagggccaaaacctccgccacccttcggtttgttttgtacggtcacaccctacatcgggccgcctttaccgtccgtgctagttcatatgccgatgagcttgttaagaccgcgaaaactgttgcatctccaggtcgtggtattttggccatggatgaatcaaatgctacatgtgggaagcggcttgcctcgattggtctcgagaataccgaggcaaaccggcaagcttaccgtacccttctcgtgtctgcccctggcctcggtgactacatctcgggagctatccttttcgaggagactctctaccaatctaccatcgatgggaaaaagatggtcgatgttcttgttgagcaaaagattgtccttggtatcaaagttgacaagggtttggttccactccctggttccaacaacgagtcatggtgccaaggtcttgacggt

SEQ ID NO: 4079 - DNA, 1392 bp, Gossypium hirsutum
  Clone ID: GOSHI-09MAY01-C1_56
atatgcttggtggtttctttttattttgtttagtctcctatggtttttctttttttgggtggaggtaagtgacagtctgatttgttaaataataataataaacctgccaaatattttcaccccaaatccggtgattggatgggttaccataatatagcccacttaaatgatagattatcatcctaacataagattatatatccaatgaaaggggggggggggggacagtctaacatgaggatccatgcttcataccaacaaaaaacagagtcaaatttggcttattacacacttaaaaccctgatatcctcctctcctaaggaaacaccacaaactacaaaactaaagtttcccacaaggttgtttatgttgaacttcaattctttttcacagtggccgacttgatgatatccacgaactcaggcttcagagaagctccaccaaccaaaaagccatccacatctggctgtccagccaattccttgcagtttgctccatttacagaacctccatatataattctaactgatgcagcaatgtcagcaccaacattttgattaagccatttcctcaattcacaatggacttcctgagcctgagcaggagttgcaactttcccagtaccaatggcccacacaggttcataagccaaaacaacattatcccaatttgttactttatcagcaattgctttggtctgtgcagcaacgacagccatggtagagcctgattctcgctgttcaagagtctctccaatgcaagcaatcactttcaagccttgagaaagcgcatacgctactttatctccaacaaactcattggactcattcaagagagcccttctctccgagtgaccaataataactcaaggaatgcctagattaacaagcatctccgcactaacttctccggtaaaagcaccacccttgcgaacccagcagttctgagcggcaacatgaaaatcggaccgcaacagacttttgacaagggtaaggaacacaaatggagggctcacaacaacctccacaacatcatgagaaggaacttcagcttcattcaatgttgtaacaatcttcttaacctcctcagttgtcccattacatttcccagttgccgccgacaaagaatttccgaagccatgaaatttttgttttttgacttttcttctttttttttctccgatgaaaacgagaactaagagaatcaataaataaaacactgcaaaaagctcactgtgtaataagagtggacgacagtaaccgtgggctgtcgcccaaggtaattataatggtaaagctttcttgtaattactataatgccattttcatttccccaaatgtggtaaatttaaatccctagttttacgaatcacttgacctaaaagttcttaac

SEQ ID NO: 4080 - DNA, 1877 bp, Gossypium hirsutum
  Clone ID: GOSHI-09MAY01-C1_57
cctatgcgtccgcccacgcgtccgttcaatttctgggggttctctgaaatccaatggatccagtaagcagttggggcaattcctccctcgactccgtcgatcccgaaatccatgacctcatcgagaaagagaagcgtcgccaatgccgcggcatcgagctcatcgcttccgagaacttcacttccttcgccgtcatcgaagccctcggcagtgccctcaccaacaaatactccgagggcatgcctggtaaccgttactacggtggaaacgaattcattgatgagatcgagaacctctgcagatctcgcgctatccaggctttccacctcgaccctaccaaatggggtgtcaatgtccagccttactccggttccccggccaacttcgctgcttacacggccgttctccagcctcatgataggatcatgggactcgatttgccttcaggcggtcatttgactcatgggtattatacctccggtgggaagaagatttctgctacgtctatttacttcgagagtttgccttacaaggtgaactccactacggggtacattgactacgataagttggaagagaaggcgttggatttcaggcctaagcttatcatttgcggtggaagtgcgtatcctagggactgggattacgctaggttcagggccgttgctgacaagtgtggtgctctgttgttgtgtgatatggctcacattagtggccttgttgctgctcaggaggcaaacaatccgtttgagttctgtgacattgtcacaaccaccacccacaagagcttgaggggtcctagggctggtatgattttctatcgcaagggaccaaagccaccaaagaagggccaacccgaagatgcagtgtatgactttgaagacaagatcaactttgcagttttcccttcccttcagggtggtcctcacaatcaccagattggtgccctggctgttgccttgaaacagtccatgacacctgggttcaaggcatatgctaaacaagtgaaggccaatgcagttgcccttggaaagtacctgatgggcaagggataccagcttgttactggtggaactgagaaccaccttgttctttgggatctccgacctcttggattgactggcaacaaggttgagaagctttgtgacctctgcaacatcactgttaacaagaatgctgtttttggtgacagcagtgccttggctccgggaggtgtacgaattggtacacctgccatgacttcaaggggtttggttgagaaggactttgaacagataggcgagttcctccaccgagccgtgacaatcactttgaacatccaaaagcaatatggtaagcttttgaaggacttcaacaaagggttggacaacaacaaggagatccaagagctgaaggttgatgttgagaagttcgcatcctcattcgatatgcctggcttcaagatgtccgaaatgaagtacaaggattagatctaaataaccatacgatctaattgatgttattatcagcatctgccactttttgggttgcccccatttgatgtcttatgagtgaaaggaaaaagaaagggaaaagagaaggatgcaaatgccttccacgtacggttttaagcgtcttcatttactggtcaatttgatatgatctttgtcaagctttttgctgttctgtctttataagagtttgcataaaacgtatgtactaattttatgtattcttttttggtgctagaaaaagtttgagggtggggtgggggggataaaggagagaaattcatggcgtttgatttaacatcccaaactctggaaaataaaaagaagaaaaggtattcaccttctgcgtatttgagctgctggtcaagagatgagaggcatgggcca

SEQ ID NO: 4081 - DNA, 960 bp, Gossypium hirsutum
  Clone ID: GOSHI-09MAY01-C1_58
cccacgcgtccgcccacgcgtccgcccacgcgtccggagcaaccctttcactgctttccttcaattatttcccacttccttttgccttcaaaatttccttgggattcctatggctactgctgaggttgcatcagttcaaactgcacttcatgaggagaaaactgaagaatcagtgaaggatcaagaagctacaacagatgaagtagttgccgaagctcctgcagcggaagcagctgccgaagagccaaaggaagcggagcctgcggcggtggcagtcgaggaacctgaagcctcggttgaagttgaaaccaaggaggtggtagaagaaccaaaggctgttactgaggagccagtagtagaggagactcctaaggaaacagtgccagaaccagttgccgaggagatcaaggaaaccactgaacaaaccgttgaaaccaaagaaactacagagtctagtgaggcagcagcagaagcacccaaagaagaagttgagaaggaagaagaagcaaaaccggctgaagtggagaaagttgaaacagaaactgatccagcagagaagactgcagtaaataataaagcttttgtgatgaaaatgagggtgtcaatggaagattgtttcaagtggctacagtttgataagtttgcatgtcaagtcaactagttttcttctatgtaggtcaataaggatgtggtaatgtggctgatggaggcccaccgatagtagtcttgcaatggctaagttaacatgcatttgcatatgtcaaagagtgacatacttcatgttccattgtgggggaatttttatgggtcatctgttatctgtaaagggatgggtttcttgggtcccaaaccacctttctttgcttatgtttattggtttgcttgtatggttattaggagaggcagtatcaagtatgcatgttgtcttggttataataaatcttagtccttttgtttaac

SEQ ID NO: 4082 - DNA, 868 bp, Gossypium hirsutum
  Clone ID: GOSHI-09MAY01-C1_59
acgcccacgcgtccgcccacgcgtccggctctttacaaaatatctgctcctctcttagtttccctttttgtcccttgtttatttgatactcccccctcatggctgccgctgatgtcgagttccggtgcttcgtcggagggctcgcatgggccaccgacgaccgggcccttgaagaagccttcagtgcgtttggtgaaatcgtcgaatcgaagatcattaatgatcgtgagactggaagatcccgaggctttggattcgttactttccgtgagcgagaaagctatgagggacgcgatcgaaggaatgaacggtcaaaatcttgatggaaggaacataactgtcaacgaagcccaatcgcgcagaagtggaggcggtggcggaggatttggaggaggaaacggtggttacagccgcggtggaggcggcggcggatatggtggtcgccaaggaggatatggtggcggacgccgtgaaggtggatacggaaacggtggggggtatggtggaggtggatacggaggtggacgccgtgaaggaggatacggtgacggcggatctcgttactcaagaggcggcggtgcatctgaaggcaactggaggtcttaaatttagggtttcaaagtgggcttgggcctatattgttatgggtttggtttgggtttggtagttggtaattctaaagttactctgttactgtttggtttgggttctctcgtttttgatcgatgttgttactgttctcttaaaagcataaaaatggaatgaagtatcttcttttcaatttcctgccttatttcttacgaccttactttttttaaaataatgttaaaaattcattatattaaaaaaattttgtatcttaatttgt

SEQ ID NO: 4083 - DNA, 1421 bp, Gossypium hirsutum
  Clone ID: GOSHI-09MAY01-C1_60
tttaaaagaaccggttcctcaatctctctaatcctcgctttcttccccatcaaacacaccttcgattttcccaagcaggttgctagaagatggcagaaggtgaggatattcagccacttgtttgtgacaatggaactggaatggttaaggctggatttgctggggatgatgctccccgagccgtattccctagcatcgtcggtcggccacgtcacaccggtgtgatggttggcatgggccagaaagatgcatatgttggtgatgaagctcaatcaaagagaggtattttgactttgaaataccctattgagcatggtattgtgagcaactgggatgatatggaaaagatttggcatcataccttttataacgagcttcgtgttgccccggaagagcacccagttctccttactgaggctcctcttaacccaaaagctaatcgggagaaaatgacccaaattatgttcgagaccttcaatgcccctgctatgtatgtagctatccaggccgtgctctcactttatgccagtggtcgtacaaccggtattgtgatggactcgggagatggtgtcagccacacagtgcctatttacgagggttatgccctcccacatgccattcttcgtcttgacttggctggtcgagacctcactgattacttgatgaaaattctgactgagcgtggatattccttcaccaccacagccgaacgggaaattgtgagagatgttaaggaaaagctgtcttacattgcccttgactatgaacaggagctagagacctcaaaaacaagttcatcagtagagaagagctatgagttacctgatggtcaggttattaccattggtgctgaacgtttcagatgccccgaagtgcttttccaaccatccttgattggtatggaagctgcaggcatccatgagactacatacaattcaataatgaagtgtgatgtggatatcaggaaggacttgtatggtaacattgtccttagtggtggtacaaccatgttcccgggtattgcggacagaatgagcaaggagctttctgcactcgctcctagcagcatgaagatcaaggttgtcgctccacctgagcgaaagtacagtgtctggatcggaggctcgatcttggcttccctcagcaccttccaacaaatgtggatcgcaaaggctgagtatgatgaatcaggtccagcgatcgtccacaggaaatgcttctaaaatgcccataccatgaaagagagaagtactgtttcattgtttcttgatgcagcttggaactttgctttgttctaatggatttgttatccttctgtgtgttttcatgttggagtgaaacaatgaactttgagaaagccagtgatttgatttttgttccaattctttgaatctcagacaactttttctgatctttttact

SEQ ID NO: 4084 - DNA, 1493 bp, Gossypium hirsutum
  Clone ID: GOSHI-09MAY01-C1_61
cccacgcgtccggaaggccaacattgaagagataagattatggtgaaaaactaaacataataaagtccctcataacattcttcgacttgcttcattgattagcccaaagataaacataaccaaaaagaaaaatggcttctgcttccgctactctcctcaagtcttcacctattatcgacaagtccgagtggattaagggccaaaacctccgccacccttcggtttgttttgtacggtcacaccctacatcggccgcctttaccgtccgtgctagttcatatgccgatgagcttgttaagaccgcgaaaactgttgcatctccaggtcgtggtattttggccatggatgaatcaaatgctacatgtgggaagcggcttgcctcgattggtctcgagaataccgaggcaaaccggcaagcttaccgtacccttctcgtgtctgcccctggcctcggtaactacatctcgggagctatccttttcgaggagactctctaccaatctaccatcgatgggaaaaagatggtcgatgttcttgttgagcaaaatattgtccctggtatcaaagttgacaagggtttggttccactccctggttccaacaacgagtcatggtgccaaggtcttgacggtctttcatcccgcacagctgcctactaccagcagggtgctcgtttcgccaaatggcgtaccgttgtgagcattccaaatggtccatctgccttggcagttaaagaagcagcttggggacttgctcgctatgccgccatttctcaagacagtggattggtcccgattgtggagccggaaatcttgcttgatggtgaccatggaattgataggactttcgaagtagcgcagaaggtttgggctgaggttttcttctaccttgctgagaacaatgtaatgtttgagggcatccttcttaagcccagcatggtcactcctggtgctgaatgcaaagacaaggccaccccacagcaagttgctgattacaccctcaagctcctccacaggagaatccccccagctgttcctggaatcatgttcttgtctggcggacaatccgaggttgaagcaaccctcaacttgaacgcaatgaaccaatctccaaacccatggcacgtctcgttctcgtatgccagagctctccagaacacttgcttgaagacatggggaggcagacccgagaacgttaaggctgctcaggatgcactccttgtccgtgccaaagccaactcactcgctcagctcgggaaatacaccggcgagggagaatcagaagaggccaagaaaggaatgttcgtaaagggctacgtctactaagctgctgcaaacaaagctttagctgagatgatggagatttcatgatatggtttctttctctttgtgttgaatgttttataggctctggagactactttttgttctggattgcaatgtactgttaaataaacttcttgctgatgagattacttataaatgcatcatcat

SEQ ID NO: 4085 - DNA, 1863 bp, Gossypium hirsutum
  Clone ID: GOSHI-09MAY01-C1_62
aataggcaattcaactgcaaagatcaaagattagagcaatagcaatttgtaaggtaaattcagggaaagtccgaaatgaggatcaatgcctcaaccaccacaaaaaaaacacattgttaaatttggcttattacatcgggaaattttcaacagacattaggttccaaggaaagatctcaactacaaaaattaaagtttcccagaaggttgtttctgtttcacctttaattcctgcttttcaacttctaattctttttcaccgtcgcagccttgatgatatcaacaaactcgggctttagagaagctccaccaaccaaaaagccatcaacatcgggttgtgcggccaattccttgcagtttgctccatttacggaacctccatatataattctagttgatgcagcaatgtcaccgccaacattctcatgaagccatttcctcaactcgcaatgaacttcctgagcctgagcaggggttgcaactttccctgttccaatggcccaaacaggttcataagccaaaacaacattgtcccaatttgttacttttccagcaattgctttggtttgcgcagcaacaacagccatggtagagccagattctcgctcttcaagagtctccccaatgcaggcaataaccttcaagccttgagaaagtgcatacgctactttgtctccaacaaactcattggactcattcaagagagcccttctttcagagtgaccgatgataacccatggaatgctcagattaacaagcatctcagcactaatttctccggtaaaagcaccacctttgcgaacccaacagttctgagcagcaacatggaaatcagaccgcaacagacttttcacaaaggtaagaaaaacaaatggagggctcacaacaacctccacaacatcctcagaaggaacttcagcttcattcaatgttgtaacgatctttttaacctcctcaggtggtcccatgcaattccaggtgcccccccccaaagaatttcgaagcattgaaatttcccacgcgtccgcccacgcgtccgcccacgcgtccgcccacgcgtccgaaaccactctcacattaaatattgttagtgaaacaatggcgtcttcagctctgataagtaagcttgaggcagatgtagagattaaggcttctcctaagcagttccatgaaatgtttgcccacaaaccgcaccatgtgcaccatacttgttatgacaagattcaaggatgcgatttacatgaaggtgaatgggggaaagtcggtaccattgtccattggagttatgtgcatgatggaaaggctaaaaaggcaaaggaagtagtggaagcagtagaccctgataagaatttggtcactttcagagtgatcgaaggagatctaatggaagagtataagagctttgtaatcacgattcaagtttcgcccaagagcgagggtagtggcagcgtaatgcactggactttggaatacgagaagctgcacggtgggattgcgcatcctgagactctgctgcaattcgttcaagatatctctaaagacattgacgcccacctcacccaagcaagctaaacagtatcacatgttgctattgttgccgctacttgaagcactgttcatctatttaatgaataaagtgacttcctttctcatgtattttgatctgaatatgtatgtttagatcaatatgcagtcaaggggagggagctttgtattttcttgcatgtttgtctttttaattctgtatgaattcaatgtatcctatgcttttatttgtgttctaatgaatataagtaagtatgatttcgtaaaaaaaaataaaaaaaaaaaaaaaaaaaaaaaaaaaaaacaaacaaatacatg

SEQ ID NO: 4086 - DNA, 1371 bp, Gossypium hirsutum
  Clone ID: GOSHI-09MAY01-C1_63
gcgagcaagtccccaagctgctcttttactgccaaggcagatggaccatttggaatgctcacaacggtacgccatttggcgaaacgagcaccctgctggtagtaggcagctgtgcgggatgaaagaccgtcaagaccttggcaccatgactcgttgttggaaccagggagtggaaccaaacccttgtcaactttgataccagggacaatattttgctcaacaagaacatcgaccatctttttcccatcgatggtagattggtagagagtctcctcgaaaaggatagctcccgagatgtagttaccgaggccaggggcagacacgagaagggtacggtaagcttgccggtttgcctcggcccacgcgtccgcccacgcgtccgcccacgcgtccgcccacgcgtccgcaaccctttcactgctttgccttcaattatttcccacttccttttgccttcaaaatttccttgggattcctatggctaccgcctgaggttgcatcagttcaaactgcacttcatgaggagaaaactgaagaatcagtgaaggatcaagaagctacaacagatgaagtagttgccgaagctccagcagcggaaccagttgccgaagagccaaaggaagcggagcctgcgggcggtggtagtcgaggaacctgaagcctcagttgaagttgaaaccaaggaggtggtagaagaaccaaaggctgttactgaggagccagtagtagaggaggctcctaaggaaacaatgccagaaccagttgccgaggagatcaaggaaaccactgaacaaaccgttgaaaccaaagaaactacagagtctagtgaggcagcagcagaagcacccaaagaggaagttaagaaggaagaagaagcaaaaccagctgaagtggaggagaaagttgaaacagaagctgatccagcagagaagactgagtaaataataaagcttttgtgatgaaaatgcgggtgtcaatggaagtgtgtttcaaatggctacagtttgataagtttgcatgtcaagtcaactagttttcttctatgtaggtcaataaggatgtagtaatgtggctgatggaggcccaccgatagtagtcctgcaatgtggctaggttaacatgcatttgcatatgtcaaagagtgacatacttcaagttccattgtgggggaatttttatgggtcatctgttatctgtaaagggatgggtttcttgggtcccaaaccacctttctttgcttatgtttattgttttgcttgtatggttattaggagaggcagtatcaagtatgcatgttgtcttggttataataaatcttagtccttttgtttaacatttgttcaatgcccaatttcttactattcctccaat

SEQ ID NO: 4087 - DNA, 1814 bp, Gossypium hirsutum
  Clone ID: GOSHI-09MAY01-C1_64
tcgggaccgggggtttcgtagtgaaccgggaggatattgtcgaaacctgcctagcagaacgacccgcggacgcgttgcaaacaacaccggaggtggtgcgggtgcatcctcgcctctcgccacccccgtgtctcggagcggccagtctcgtcgtccctttgcccgtcgggtggggtgagatgccgggatcaacctcttcgaggcaaagcgaacaaacccccggcgcgaatcgcgccaaggaatcgaaacgaaagaaggggcacgtcttctgtcgccgcaccgttcgcggtgtcgatgcttcagtgatgttgttctcttgtcgcaaaatatacagaacgactctcggcaacggatatctcggctctcgcatcgatgaagaacgtagcgaaatgcgatacttggtgtgaattgcagaatcccgtgaaccatcgagtctttgaacgcaagttgcgccccaagccattaggccgagggcacgtctgcctgggtgtcacgcatcgtcgcccccatccaaccatgagccctcgagcctcggttggaccgcgggcggaaattggcctcccgtgcgctcacagccagcggttggcctaaattcgagtcctcgacgacatcatcgtcgcgacgatcggtggtaatgctgcaagcaacctcgttcggagtcgtgcgcgtccgtcgatcgagacccttgaaccctttcggcatcgcaaggacggtgctcgcatcgcgaccccaggtcaggcgggattacccgctgagtttaagcatatcaataagcggaggaaaagaaacttaccaggattcccctagtaacggcgagcgaaccgggaaaagcccagcttgagaatcggtcgccatcggcgtccgaattgtagtctggagaagcgtcctcagcgacggaccgggcccaagtcccctggaaaggggcgccggagagggtgagagccccgtcgtgcccggaccctgtcgcaccaagaggcgctgtctacgagtcgggttgtttgggaatgcagccctaatcgggcgggtaaattccgtccaaggctaaatacgggcgagagaccgatagcgaacaagtaccgcgaggggaaagatgaaaaggactttgaaaagagagtcaaagagtgcttgaaattgtcgggagggaagcggatgggggccggcgatgcgcccccggtcggatgtggaacggcgagagccggtccgccgatcggctcggggcgtggaccgacgcgggtcgtggcggcggcccaagcccgggcctttgatacgcccgtgggagacgtcgtcgcctcgatcgtgggattcagcacgcgccgcctcggcgtgcttcggcacctgcgtgctccgggcgtcggcctgcgggctccccattcggcccgtcttgaaacactgaccaaggagtctgacatgtgtgcgagtcaacgggctagaaaaggccgtaaggcgcaaggaagctgattggcgggatccctcgcgggtgcaccgccgaccgaccttgatcttctgagaaggagttcgagattgaactgaaaaaggagcctgagtcaatgacagagcaaccgaaggagaataccactgctgttagtgaagagaagaaaccagatcttgaggtctctagctcaaaggaaagtgtatgaattcctaaaatcatcgtcttgttggtgaaatttctcaattcgtatgtctgttgtatcgatgaacatcgaacaaataattttgaatgtagatcagttatgttagtgattgctcaattaaatggtaagataatctttcagtaaaataaacttgtgcccgttgtaatatggaattaaaaa

SEQ ID NO: 4088 - DNA, 512 bp, Gossypium hirsutum
  Clone ID: GOSHI-09MAY01-C91_1
cccacgcgtccgcccacgcgtccgcccacgcgtccgcgcgcaacctcttacccaaggaaccgtgggagagcccagacaccaagctttcttcaaagtcagaccatttcgatcatagattgtgacaatgagcgacggagaagacgctgtacgacgccataatgctattgcggagtaccggaagaaactccttcaacacaaagagtatgaatcgagaattcgagcaggtagggagaatttgagagctgcgaagaaggactttaacaaaacagaagatgatttaaagtctcttcagagtgttggacagatcattggagaagttctcaggcctcttgataatgaacgcttgattgttaaagcaagcagtggccctcgctatgtggttggttgccgcagcaaagttgataaggagaagctaacttcgggaactagagtagttcttgacatgacaacactgacaataatgcgggctcttccacgtgaggttgatccagttgtttacaacatgctgcatg

SEQ ID NO: 4089 - DNA, 508 bp, Gossypium hirsutum
  Clone ID: GOSHI-09MAY01-C81_3
attttattatcatactaaactcggaggcgaagttcaaaattataaattggttttaaaaaagccggaacaaaagaggcggacgcgcggcgaagaagagatgaaggaaaaggaatggtagatcgcaagcgctggaagttaccgagaagactttatagatccctattatcggaaagagggaatttcagcggataacagaagtgcattttaatttataaaatcatgggggccactgctgctacatcctcatgctttccaatcacttcttccccggactccattgactcaaaaaacaagaagcttggaaatggatctactaaccttggaggtataaagttgaaaccatctgcttcttctggaagtttgcaagttatggcaaatgcacaagcccccccaaagataaatggtaccacggttgtgatgactccagtagaaggtttcacgagcgaagatgctgcaagttccacacctcccaggacgtttatcaatcagctccctgattggagcatgc

SEQ ID NO: 4090 - DNA, 800 bp, Gossypium hirsutum
  Clone ID: GOSHI-09MAY01-C81_2
cccacgcgtccgaaaaaagccggaacaaaagacccacacaggcagcgaagaagagatgaaggaaaagtaatggtagatcgcaagcgctagaagttaccgagaagactttatagatccctatgtaacgcactactttctccattttgcgttttttctccactacatttcccttttttattttggttgagtatcggaaagagggaatttcagcggataacagaagttcattttaatttataaaatcatggttgccactgctgctacatcctcattctttccaatcacttcttccccggactccattgactcaaaaaacaagaagcttggaaatggatctactaaccttggaggtataaagttgaaaccatctgcttcttctggaagtttgcaagttatggcaaatgcacaagcccccccaaagataaatggtaccacggttgtgatgactccagtagaaggtttcacgagcgaagatgctgcaagttccacacctcccaggacgtttatcaatcagctccctgattggagcatgcttcttgctgctatcacaaccattttcctggctgctgagaagcagtggatgatgcttgattggaagccaaggcggcctgacatgctcattgacccatttgggatagggaggattgttcaggagggtcttgtttttcgtcagaacttctcaattaggtcttatgagataggtgctgatcgtacagcatccatagagacgctaatgaatcatttacaggaaacagcgattaatcattgtaaaagtgctggactgctaggagatggttttg

SEQ ID NO: 4091 - DNA, 1896 bp, Gossypium hirsutum
  Clone ID: GOSHI-09MAY01-C81_1
ggaaaaattatttttttaaaaaaagaagcagaagaaacaaaaggtaggggagcgaacaaaaaagagtaaggaaaagcagtactttgatcgccagccctagaagctaacccatgcaccagctgcttgtataaaaagctttacattttgcaaaagaagggatttcagcacgaaattgaagttgtttttaaaaaccatggttgccacggctgtgacatcggcgtttttcccagtcacttcttcacctgactcctctgactcgaaaaacaagaagctcggaagcatcaagtcgaagccatcggtttcttctggaagtttgcaagtcaaggcaaatgctcaagcacctccgaaaataaacggcactgtggcgtcgacgactcccgtggaaggttccaagaacgatgacggtgcaagttcccctcctcctaggacgtttatcaaccagttacctgattggagcatgcttcttgctgctatcacaaccattttcttggctgctgagaagcagtggatgatgcttgattggaagccgaggcggcctgacatggtcattgatccgtttggcatagggaagattgttcaggatggtcttgttttcagtcagaacttctcgattagatcatatgagataggcgctgatcaaacagcatccatagagacactaatgaatcatttacaggaaacagctataaatcattgtcgaagtgctggactgcttggagaaggttttggtgcaacacctgagatgtgcaagaagaacctaatatgggttgtcacacggatgcaagttgtggttgatcgctatcctacttggggtgatgttgttcaagtcgacacttgggtcagtgcatcggggaagaatggcatgcgaagagattggcttgtcagcaatagtgaaactggtgaaattttaacacgagccacaagtgtatgggtgatgatgaataaactgactagaaggttatctaaaatcccagaagaggttcgaggggaaatagaacctttttttatgaattcagatcctgttctggctgaggatagccagaaactagtgaaactcgatgacagcactgctgaacacgtgtgcaaaggtctaactcctaaatggagcgacttggatgtcaaccagcatgtcaataatgtgaagtacattggctggatccttgagagtgctccattaccaatcttggagagtcacgagctttccgccatgactctggagtataggagggaatgcgggagggacagcgtgctgcagtcactgaccactgtgtctgattccaatacggaaaatgcagtaaatgttggtgaatttaattgccaacatttgctccgactcgacgatggagctgagattgtgagaggcaggacccgatggaggcctaaacatgccaaaagttccgctaacatggatcaaattaccgcaaaaagggcatagaaatccaagtaatctcattgctgtgtgtagtatctatcgtgctcttttcggatttatatacatatattccttatgattattagtcttcctttgagaaaaaaaaagggggttgtaattaggcttgtttaggagtcgggttttcgtacatagccttgtaaggctcagctcgtctcgccccggcctcggacacggattttgtgaagttgggcccgtgccctaaccagcataggctctttccatggaaaggtgggtctgcttttgaaaaattgaatagccatgtgagatggctctctccctacattatgggcttttaaccagttagagaccgggtagtttaggataaaatttatctttaatttgggaggatttgtatattttttttgcctttattttaacctaaatttgcttataattatttggttttatatttaggtattgaatcaatgaagtttttaaatttt

SEQ ID NO: 4092 - DNA, 298 bp, Gossypium hirsutum
  Clone ID: uC-gsronu33B132d01b1
tacggattttgtgaattcgggcctgtgccctaaccagcataggctctgtccacggaaaggtggttctgcttttgaaaaattgaatagccatgtgagatggctctctccctacattatgggcttagagaccgggtagtttaggataaaatttatctttaatttgggaggatttgtatattttttttgcctttattttaacctaaatttgcttatgcaaaaaaaaaaaaaaaaaaaaaaaaatgaaggaagagaaagaaaaagaaaaaaaaaaaaaaaaaaaaaaaaaaaaaaaataaaa

SEQ ID NO: 4093 - DNA, 748 bp, Gossypium hirsutum
  Clone ID: GOSHI-09MAY01-C51_1
gatcattggcattgatttgaaccccagcagattcgaacaagccaagaaattcggtgttacagagttcgtgaatccaaaagattacaacaaacctgtccaagaggtcattgttgagatgactggtggaggagtcgatcgcactgttcaatgtacggggagtatccaggccatgatttccgcatttgaatgcgtccacgatgggtggggagttgcggtgcttgtgggtgttccaaacaaagacgatgcgttcaaaactcacccagtgaatctgctgaatgagaggactctcaagggtactttctttggaaactacaaacctcggtctgacattcctgctgttgtggagaaatatatgaacaaggaacttgagctggataaattcatcacacacactgtgcctttctcagagatcaacaaggcatttgagttaatgcttgcgggtgagggactgagatgtgtgtattcgcatggatgcataaggaatggatagcctggattgatcatccatggatgaagggcttttctgtagggtttggatttcctcatagtttacggacacaatatacaccacctatttaaatatttttaaaagtccttgtttcttgtttaatcaattacccctaaaaaaatttagtggctaaaaagttgtctgagattttacatactttgagcttgagtttttccttttgtatatgcacatgtgcaaagtgtgattaaggaaataaataaagtggtacatggttttgct

SEQ ID NO: 4094 - DNA, 344 bp, Gossypium hirsutum
  Clone ID: U53703
gaattcaaaactcacccagtgaatctgctgtatgagaagacactcaagggtactttctttggaaactacaaacctcgttctgacattcctgctgttgtggagaaatatatgaacaaggaacttgagctagataaattcatcacacacactgtgcctttctcagagatcaacaaggcatttgagttgatgctggcgggtgagggactgagatgtgtgattcgcatggatgcataaggagtggctggcctggatttttcatacaaggatgatggagttttcatttttatatttatatgtgcaaagagtgattaaggaaatgaataatgtattctacatgagaattc

SEQ ID NO: 4095 - DNA, 348 bp, Gossypium hirsutum
  Clone ID: GOSHI-09MAY01-C41_33
ctcgtgccgaataattaaaagacagaggagtcgataaaggtaaaagccgtccaaaacccaaaccaggataggcaaacgaaaagaaaaaatggctgtgaattttaatgccatcgcctcgaaatctcagaagctcccttgctttgctcttccaccaaaggccacccttagatctcccaagttttccatgatctccaccattccttctggctccaaagaggttgggaatctgaaaaagcctttcacgcctccaaaggaggtgcctgttcagatcacccactccatgccgcctcacaagattgagatctttaaatctttggagggctgggctgagaacaacattctgactca

SEQ ID NO: 4096 - DNA, 410 bp, Gossypium hirsutum
  Clone ID: GOSHI-09MAY01-C41_30
tctgtattccttaaataccactcgcatccttagtttggaccaacctacgtctcctaatccgacggtcgagatggctctatcacacctcgccgcttctgcttctcgctcctccagtcttcttaaacccctctcgtcggctctttccctccgacgcccgatctccggcgataactctcccttgaccgtcgagacctctgtccctttcacctctcaccagtgcgaagctccctcacgttccgtcgagaccaatccgaaggagctccttacctttttccgagacatggcgctgatgcgtcggatggagatcgctgccgattcactctacaaggctaagcttatccgtggtttctgtcatctatacgacgggcaagaagccgtcgccgttggcatggaagccgccattaccaaaa

SEQ ID NO: 4097 - DNA, 456 bp, Gossypium hirsutum
  Clone ID: GOSHI-09MAY01-C41_28
ttgattttgctcttgttggggccttcaagagggagagggataaagaagccgctttacaggcactgactgctgaaaaccaggcagctatgcagttgatggtatggggacggctgagtggagagccgcaaagagtcctgcttactacaaacgtggggattatgctcctggtttgaatgatacacaggagttgtaactggaattagtgagatggatcctgttagatggtctggttcaaaatggagatgcttgctggtatggttgcagacattgcttatacatttccaaaatatgttcaacatctgagtggactgaaatttgctcttctgtttctcttgtacttttttacatcatggtatgtactagttttattactataggtctgattttgtttaaagattttagttgaattgagcttttttctgttaaaataattaatcgaatcgaaccaacttcaat

SEQ ID NO: 4098 - DNA, 547 bp, Gossypium hirsutum
  Clone ID: GOSHI-09MAY01-C41_27
tgaggagtctataaagttaaaagccgtccaaaacccaaaccaggaaagccaaacgaaaagaaaaaatggctttgaattttaatcccatcgcctcgaaatctcagaagctcccttgctttgctcttccacgaaaggccaccctcagatctcccaagttttccatgatctccaccattccttctggctccaaagaggttgggaatctgaaaaagcctttcacgcctcccaaggaaggtccctgttcagatcaacccactccatgccgcctcacaagattgagatctttaaatcctttggagggctgggctgagaacaacattctgactcacctcaaaccagttgagaaatgttggcaacccgccgactttcttccagatcctaattctgacggatttcatgagcaagtcaaagagcttagggaaagggcaaaggaaatcccagatgattactttgtagttttggttggtgatatgatcactgaggaagccctttcaacttatcaaacaatgcttaataccttggatggaactcgtgatgagacaggtgc

SEQ ID NO: 4099 - DNA, 801 bp, Gossypium hirsutum
  Clone ID: GOSHI-09MAY01-C41_20
aaaaatgtttacgcgtggggacgaagcagaagaaggaaacgaagagagaaacaaaaggaaaatggagattgtttggcaaactcctgctcatcctgctcagaaacaagattatgtttttcacaacgggaagcgccatgtacgaccttactactttgagttcgtctctcatgttaataaacgatgggaaggtaaaacaatagtggatttgttcgctcaagagttcagaggtcgatctagagattactatgttagtgctgtcaaatgtggacggatacaagtggatggagagaatatacctgtttcatacatagttaaacgatgccagaagattagccacttcttacataggcatgaaccaccagtgatggcttgggatgttgaagttcttcaaaatgaacctgatgtactgacagtttgcaaacctgcatcagttcctgtacatccatgtggtcaatatcgtaaaaacacagttttgggtattctccaagcagagtatggattggctcctttgtatcccattcatcgactagatcgtctagtctcaggactgcttatcgtggccaaaaatccagctaaagctgacatttcaggcagcatatcgaagctggactagtgcagaaacagtatgttgcaaaggttgttggagtgtttccggatgctgagcaagttgttgatgccaacatagattacaatgctagagagggaaggagcactgcagaggttggcatctctaatggtgatactaccttgaagggaaaggctgcttgtacaaagtttactaggattagcaccaatgggatt

SEQ ID NO: 4100 - DNA, 833 bp, Gossypium hirsutum
  Clone ID: GOSHI-09MAY01-C41_19
cttcattgcttaagagacggacttttccttgaaaaatgcttttctttgaaagccatgaagaacggccttcatttggtagcaaattttcagaagctgagaagtgcttttgggcagatggagaagtgaaaaatttttagcttttcagccaaaaagtgcttttggctggttcatttacttttttagccacacacgaacgcccttctttgctctctgctctttgctggttctttgccctcatcgctgccctctgctggttctttgttctgccctttgctggttctttattcctccaccctctgctggttgaataggagataaccttaggttgtcaatgcttccttcatctcctacatcgagcgaaaagagtaagagacaacaatggttactttccgggagaaggggatattgttttccaagtgcttaactgggacaaagagattggaaagcatggcttgaactttgaaaggttcccatcttaaagttgcttcctgtttgcttctacctgctattcagctggttgtgggaattagccatccctcgtggatttctttgacatttttcattggaagctgtgttgggctagtggattggtctttgactagcaattttctaggactattcaggttgtggaaggctctccagttttatgcaggcttcagcattttcatgctttatgtgtatcaactccctatagagttctcaagtatgttacagtggataactgattttgttggtctattcaaaatatgttcaacatctgagtggactgaaatttgctcttctgtttctcttgtacttttttacatcatggtatgtactagttttattcctat

SEQ ID NO: 4101 - DNA, 668 bp, Gossypium hirsutum
  Clone ID: GOSHI-09MAY01-C41_18
cccacgcgtccgatgaatttggctcagttatgtggttcaattgcggcagatgaaaagcgccacgagacagcatacactaaaatccccgcgcggccctttgagatcgatcctgatgggtcagtcttggcatttgctgacgtgatgaggaagaaaatctccatgccagcccacttgatgtatgatggcagcgatgaaaaccttttctaccactactcgtctgtcgcacaaagaattggggtttacactgcccgggactatgctgatatagttgaatatctggttgaccgatggaagttgaaggaactcattggactttcacccgagggccgtgaagctcaggaatttgtgtgtggacttgcaccgagaattagaaagctagaggagagagctcaattgaggaccaaggaatcacccagtgttccattcagttgggtttctggtagagaagtgaagctctaaattggctatcctccaagtgacttgtaatacaagaaagaaacaacagggcttagggaggagcatgatgaaaactgcaactctgtgtttagctggaatgcaataagtggaggaagtgtgtgtgtgctgtttcgttgttacttttcttaaaacaagtaatatcaacatcttcctcctatttgatgaaatggataaacgatatctataggcat

SEQ ID NO: 4102 - DNA, 1039 bp, Gossypium hirsutum
  Clone ID: GOSHI-09MAY01-C41_17
aacatactaaactctcttattcgctttccttttccttcgctctctctttagatccgatcaaccgccatctcttaatacgacggtgggcatggctctatcgcggctcgcctcttcttcttcacgctccgctgatcttctgaaacccctctgctcttctatctccctccgccgcccgatctccaccgataccactcccataactgtggagacctccgttcctttcacccctcaccagtgcgaacccccctcacgttccgtcgagaccaatccgaaggagctccttacctttttccgagacatggcgctgatgcgtcggatggagatcgctgccgattcactctacaaggctaagcttatccgtggtttctgccatcttgtacgacgggcaagaagccgtcgccgtcggcatggaagccgccattaccaaaaaggactgcatcataaccgcctaccgcgaccactgcacgttcgtcagctcgcggtgggaccctgctggaagttttcgccgagctgatgggacgccaggctggttgctctaagggcaaaggaggttcgatgcatttttacaagaaggattcgaatttctatggcggtcacgggattgtcggagcccaggttcctttaggatgtggcttggccgttgcccaaaagtattcttaagacgaagcggtcacctttgctttatatggtgatggggctgctaatcaagggcagttgtttgaggcgttgaacatctctgcactttgggatctgcctgcaattttggtctgcgagaataatcattatggtatggggacggctgagtggagagccgcaaagagtcctgcttactacaaacgtggggattatgctcctggtttgaaggtggatggaatggatgcttttgctgtgaagcaagcttgcacgtttgccaaagaacatgctttgaagaatggaccaattattcttgatatggacacttataggtatcatggtcattccatgtctgatcctggaagcacctatcgaacccgtgatgagattactggtgttagacagg

SEQ ID NO: 4103 - DNA, 646 bp, Gossypium hirsutum
  Clone ID: GOSHI-09MAY01-C41_14
ttaacacggttaaaggagacgttcgtaattgttctagtggaatgcggatacttttggacacgcctctttggacacgaaaccatactttctagattcgtgtgcatttgcagtgtacaggtcatccaatagccaatgacatgctttatctttcggacgatgttgttaatcgctctacgttaggaacaactgctgatagagctgcagctctttttggaggttctcctgaaaccagttgtgagagtcataagggcgttcgcaagtactgtagtgaagatttcagcatcgatcctatgtgtacgcactgtcctaatttagctccaaacgggtatgatgggcatgaagaaggattatggctacactgtgtgcgttacactggaccggaatgggtttacgaatgcccatatcctgactgggcatcactcacttaatttcactcttctttatatatttccgagaaaatgcggtgccgtgccaaccattcttgtaattttctgaaagacaattcattttgaaaatttgttgtagtaattgaagatgattcagtttctaactgcgaatgtacaacctatttgttatcattcaaatgctgatatgtatttcataaaattacatgccgagttgaagcttctttcacttatatcaaata

SEQ ID NO: 4104 - DNA, 1106 bp, Gossypium hirsutum
  Clone ID: GOSHI-09MAY01-C41_12
tttcacgcgttcgggaggctgaagctcagtcaaagtgctgtcttaaaaccataggtgttgagctcactttcaggtgccatggagtaccagggctggaactggtgtagaaagcaggcgtggggatctgcttaataagtatctgtacttgtctgggagagtggacatgaggcaaattgagaggacaatccagtacttgattggatcgggaatggatcctcatacagagaatagtccttaccgaggattcatatacacttcgttccaagaaagggcaacttttatttcccatgggaatacaggcaggctggccaaggagtatggggatattaacttggctcaaatttgtggtagcattgcctcagatgagaagcgccacgagacagcctataccaaaaatcgttgaaaagctgtttgagattgatcctgatgaaacagtccaggcatttgctgatttgatgaagacgaaaattgccatgccggctgagttcatctatgatggcagagattataacttatttgaccactactcagctgtcgcccaaggaatcggggtttacactgctaaggactatgttgatatagtagagcacctggtggatcgatggaaggtgaaggagctagctgggctttcggccgaggggcgcaaagctcaggactacttgtgtgcacttccttcgagaattagaaggttagaggagagagcgcaagaaaaggccaaggaagcacccagtatcccattcagttggatctttgatagagaagtgaaactttaggccatgaaatacagttaagactcctgcaatgcatttgaggaaacaaacacgaagaagctgaatgcaaacttctctttatatatccgatgtaatagtggttgtatatgtaatagggtagcacttgttttctggatgtgttgtgtccttaaaaaataatgccgatagtggcagctgtgatagttttagatgtttgttttcataatgtctgttatatcgttgtacgagtagtatgtgttgtttttgttgaaacaatcttcatatcttagtgataatgctgcgtagtcatagtttttagtttgcaataaaaacttccttctcggaaaacatcaaaat

SEQ ID NO: 4105 - DNA, 1183 bp, Gossypium hirsutum
  Clone ID: GOSHI-09MAY01-C41_11
ccctctcgtccgatcgaacccgtgatgagattactggtgttagacaggagcgtgatccggttgaaagaattaggaagctgatattgtctcatgacctagctactgagaaagagttgaaggacattgacccgcgcgtccgaaaagaggtagatgacgcaattgctcaagctaaggaaaatccactgcctgaatcttctgagctcttcacaaatgtgtacgcaaaaggtttgggtgttgagtcatttggagcagataggaaagaagtaagagctatacttccataaattgggactttgttggaacgtcttcattcttttctttagttttaccaccctcaaccttggaagaaagaagaataaagaaccaaaagagggtaaccagctcttccaagttacaaatatgacttagcatttgtatttgtacggaatacttattattttccctaaaaattacgggcagaattgctccatttaaattgtgggttaacccgcccatggttttacactcctatgattaaattggttggtgtttggctcacagcaatccctggatattcatcgcttgagatgccgaggacctttaatgctcccttccgtcgatccatatacacttcgttccaagaaagggcaacttgtatttcccatgggaatacaggcaggctggccaaggagtatgggcatattaacttggctcaaatttgtggtagcattgcctcagatgagaagcgccacgagacagcctataccaaaatcgttgaaaagctgtttgagattgatcctgatgaaacagtcctggcatttgctgacatgatgaagaagaaaatcgccatgccggctgagttcatctatgatggcagagattataacttatttgaccactactcagctgttgcccaaagaatcggggtttacactgctaaggactatgttgatatactaaagttcctggtgaacaaatggaaggtgacggagttaactggactttcagccgatgggcgtaaagctcaggattatgtgtgtggacttccgccaagaattcgaaggctggaagagagagctcaaggaagggccaaggaagcacccaggttccattcactggatatttgataaaaaaatccagctctaaggcttttttaagttttctgatgatgaaaaatggtgatttcagtttcctgcaacagaat

SEQ ID NO: 4106 - DNA, 677 bp, Gossypium hirsutum
  Clone ID: GOSHI-09MAY01-C41_10
ttttgtgtgcgagaacaatcactatggtatggggacagcagagtggagagccgcgaagagtccagcgtcccacgcgcccgcccacgcggcccctggtttgaaggtggatggcatggatgcccttgctgtgaagcaagcttgcacgtttgccaaagagcatgccttgaagaatggaccaattattcttgaaatggacacatacaggtatcatggccactccatgtctgatcctggaagcacctatcgaacacgtgatgagattagtggtgttagacaggagcgtgatccaattgaaagaatcaggaagctgatattgtctcatgatctagctactgaaaaagagttgaaggatgttgaaaaggaagtgagaaaagaagtagatgatgcaattgctcaagctaaggaaagtccaatgcctgaaccttctgaactcttcacaaacgtgtatgcgaaaggtttgggtgttgagtcatttggagcagataggaaagaagtaagagctacacttccatagtttgagacttctctggagtgagttcattaatttttaactcgttgcccaccaatcaatcttgcaagactgaaaagaaataaagcagctagggaaggtgatctgatttcccggctatcaatttgattttgcacttctatttgtatttgtatagagtactttattt

SEQ ID NO: 4107 - DNA, 896 bp, Gossypium hirsutum
  Clone ID: GOSHI-09MAY01-C41_9
cggactcgtgggcggacgcgtggttttgactccttcagatacttactatctttccctcaaaaatggttactttcaggtttcatcagtaccaagttgttggaagggctcacccaacagagagcgatgagcatcctaagatctataggatgaagctctgggccaccaatgaggttcgggcaaaatccaagttctggtacttcttgaggaagctgaagaaggttaagaagagcaatggtcaagtccttgccatcaatgagatttttgagaagaaccctaccaagattaagaattacggtatctggctccggtaccaaagccgaactggttaccacaacatgtacaaggagtaccgtgacactactttgaacggagctgttgaacagatgtacaccgagatggcttctcgccacagagtccgtttcccttgcatccagattatcaaaactgcaacaatcccagccaagctatgcaagagagagagcaccaagcagttccacaactccaaaatcaagttcccattggtggtcaagaaggtaaggccgcctaccccaggaagctgaagaccacctacaaggcatcaaagcctaacttgtttatgtaagttctctcattgcaatgaaaagagagttgatgtggtttatagttctaaaatttttggtagtgaacatctggcagtttgttgattgggtattgcttttcatttgagaagccgaggccacatctgactggttgaagttgaattttctttaatttactatcacattttgtttacttcgaaaaaaaaaaataaaaaaaaaaaaataaaagaagagaaattcaactaaaatttatattcggaacttccataaaaatgaagagaattcagaaactttaccctttgaaggaaaatacctttt

SEQ ID NO: 4108 - DNA, 512 bp, Gossypium hirsutum
  Clone ID: GOSHI-09MAY01-C41_7
gttgatatagtagagcacctggtggacccacgcgtccgaaaggagctaactggcctttcagccgaggggcgtaaagctcaggactatgtgtgtgcactttcttcgagaattagaaggctggaggagagagcacaagaaaaggccaaggaagcaccctgtattccattcagttggatctttgatagagaagtgaagctctaaaggtcttgaaatgcactcgaggaaacaaacttgaagaagctgaatttaacttgtctttgtattctgatgaaatggtgctggtgtgtgtaagaggaatagtgcctggctttagtggttttagatgttttgttgtattagatgtagcgtctgtctgtcatatcatgtgcgaatagcatgtgctgtgtcgtgtaggtgttcttgtagaagcaaacattgttggtatcattgatgataaagaaaacataatactgcagcagcagtttgtttgcaataataaattgcatcttaaattaggcttagttttgaatggc

SEQ ID NO: 4109 - DNA, 745 bp, Gossypium hirsutum
  Clone ID: GOSHI-09MAY01-C41_6
ctagcttccttcatctcctacatcgagcgaaacccgcgcgtgacaacaatggttactttccggtttcaccagtaccaggttgttgggagggctcttccaacggagaacgatgagcaccctaagatttacaggatgaagctttgggccaccaatgaggttcgggccaaatccaagttctggtacttcttgagaaagctgaagaaggttaagaagagcaatgggcaagtccttgccatcaatgagatttttgagaagaaccctaccaagatcaagaattatggaatctggctccgttatcaaagccgtactggttatcacaacatgtacaaggaataccgtgacactactttgaatggagctgttgaacagatgtacaccgagatggcttctcgtcacagagtcaggttcccttgcatccagattattaagacggcgaccatcccagctaagctatgcaagcgggacagcacgaagcagttccacaactcaaaaatcaagttcccattggtattcaagaaggtgagaccacctaccagaaactgaaaacaacttataaggcatcgaaacccaacttgtttatgtaatttgttttatcatttgatgagaaatttttgttagtgaaatcatatcagtctgttgatcagatattgttttcatttgaaaggttggaacttttgtttgtttgggtttttcatattcatttgttttatcaatcgcccgaaaagtgcatattaagcactctccc

SEQ ID NO: 4110 - DNA, 1522 bp, Gossypium hirsutum
  Clone ID: GOSHI-09MAY01-C41_5
cgtgtccggaattcccggtcgccggcgccaccccgccctcttctcgcctcaagcaaagcaaaaaaaaaaaaaaaaagggaaaaaaatggctatgcaattcaatcccatcgcttctcaaactaagaaactcccttcatatgctcttccacccatggcaagtcttagatctcccaaggtttctatggtctccactcttccacctcgctccaaaggggttgaagatctgaaacggcctttcatggctccaaagctggtacaccaggcttcccacaccatgccacctgagaagattgaaatctttaaatctttggatgattgggctagggataacattctgattcatcttaaacaagttgataaatgttggcaacccaaggattttcttcccgatccttcgtccgatggatttgaagatcaagttagagaacttagagaacgggcaaaggagattccggatgagtactttgtcgtgttggttggtgatatgatcacggaggaagcccttccaacttaccaaactatgcttaataccttggatggaactcgtgatgaaactggtgctagccctacttcttgggcaacttggaccagggcctggactgccgaagaaaacagacacactgatctacttaataagtatctctacttgtgtgggagagtggacatgaggcaagttgagaagaccatccagtatttgatcggttcaggaatggatccgggtacggagaatagtccttatctgggattcatctacacaacattccaagaaagggcaacttttatctcacatgggaatacagctaggctagccaaggtgcatggtgacatgaatttggctcagttatgtggttcaattgcggcggacgaaaagcgccacgagacagcatacactaaaatccttgaaaagctctttgagatcgatcctgatgggtcagtcttggcatttgctgacatgatgaggaagaaaatctccatgccagcccacttgatgtatgatggccgtgacgaaaaccttttcgaccactactcgtctgttgcacaaagaattggggtttacactgcccgggactatgctgatatagttgaatatctggttgaccgatggaagttgaaggaactcattggactttcacctgagggccgtgaagctcaggaatttgtgtgtggacttgcaccgagaattagaaagttagaggagagagctcaattgagggccaaggaatcacccagtgttccattcagttgggtttctggtagagaagtgacgctctaaattggctatcctccaagtgacttgtaatccaagaaagaaacaacagggcttagggagaagcatgatgaaaactgcgactctgtgtttagctggaatgcaataagtggaggagaagtgtgtgtgtgctgtttctttgttatttttcttaaaacgagtaatatcaacatcttcctcctatttgatgaaaatgatagacgatatctatagcagtgaacctaaataaaaaccttaaaagatactattgccatc

SEQ ID NO: 4111 - DNA, 801 bp, Gossypium hirsutum
  Clone ID: GOSHI-09MAY01-C41_4
gccgccgtgacttcttcagaaactatctttccctcaaaaatggttactttcaggtttcaccagtaccaagtagttggaagggctcacccaacagagagcgatgagcatcccaagatctataggatgaagctctgggccaccaatgaggttcgggccaaatccaagttctggtacttcttgaggaagctgaagaaggttaagaagagcaatggtcaggtccttgccatcaatgagatatttgagaagaaccctaccaagattaagaattatggtatatggctccgctaccaaagccgtaccggttatcataacatgtacaaggaataccgtgacactactctaaacggagctgttgaacagatgtacactgagatggcttctcgccacagagtccggttcccatgtatccagattatcaagactgcaactatcccagccaagctatgcaagagagatagcaccaagcaattccacaactccaaaatcaagttcccattggtgttcaagaaggtaaggccgcctaccaggaagctgaagaccacttacaaggcatcaaagcctaacttgtttatgtaagttctctcattgcaatgaaaagagagttgatgtggtttatagttctaaaatttttggtagtgaacgtctggcagtttgttgattgggtattgtttttcatttgagaagcctaggccacatctgactggttgaagttgaattttctttaatttactatcacattttggttacttcgatgagctggtttgcaatgtttgaaccctattggccagggtttttgtttct

SEQ ID NO: 4112 - DNA, 706 bp, Gossypium hirsutum
  Clone ID: GOSHI-09MAY01-C41_3
ggctcagatatgtgtaacatgcgcctggggtgaaaagcgccacgagactgcgatatactaaaatcgttgaaaagctctttgagatcgatcccgacggaacagtcctggcttttgctgacatgatgaggaagaaaatctccatgccagcacacttgatgtatgatggccaagatgacaatctttttgataatttctcagctgttgcacagagacttggggtttacactgccagagactatgctgatatactagagttcctggtgaacaaatggaaggtgacggagttaactggactttcagccgacgggcgtaaagctcaggattatgtgtgcggacttccaccaagaattcgaaggctggaagagagagctcaaggaagggccaaggaagcacccagggttccattcagctggatatttgatagagaagtccagctctaaggcttttttaaattttctgaagatgaaaaatggtgatttcaatttcctgcaacagaggtagaagttttcaacatgcaatttctctttttaaattcccccatgtaatgtttgcttgaacaagtttcagtccatcagattcaagttaaaagttttaaactggataaataatgtttataatccgttagtgcccaaaccaaagtggctatgaactggatcaaattcaattgatttccgatcagttatatacagacttatgcttctgtgtc

SEQ ID NO: 4113 - DNA, 1538 bp, Gossypium hirsutum
  Clone ID: GOSHI-09MAY01-C41_2
cggacgcgtgggcggacgcgtgaactgaagctgccaaagctcgagaattcaaaccgaaacaaaaaagaaaaagagctcttaaacccccaaaatacctaaaaagaaatggctctgaaattcaaccccatcacttttcaatctcagaaactcccttcatttgctcttccaccaatggctggccttaggtctcccaagtttttcatggcctctactcttcgttctggttccaaagaggtcgatctcaagaagcctttcatgcctcctagcgaggtgcatgttcaggtcacacactcgatgccccctcagaagattgagatcttcaaatctttggaggactgggctgagaacaacattctaacttacctcaaaccagttgagaaatgttggcaaccccaagattttcttccggatcccgcgtcagatggatttcatgagcaagtcaaagaacttagggaaagggcaaaggagattccagatgattactttgttgttttggttggtgacatgatcacagaggaagcccttccaacttaccagacgttgcttaactaccttagatggagttcgtgatgaaacaggtgctagccttactccttgggccatttggacgagggcttggaccgctgaagaaaacaggcatggtgatctacttaataagtatctctacttgtccggaagggtcgacatgaggcaaatcgagaagacaatccagtatttgattggatcaggaatggatccacgtactgagaataatccttatctgggattcatctacacatcattccaagaaagggcaactttcatctcccatgggaatacagcccggctcgcaaaggagcatggggacactgagttggctaaaatatgtggtttcattgccgcggatgaaaagcggcacgagacagcctataccaaactcactaacaagctgtttgaggtggatcctgacgaaaccgttcgagcctttgccaacatgatgaggaagaaaatcacgatgcctgcttacttgatgtacgatgggcaagacgaaaaccttttcgaccacttctcggctgttgcacaaagacttggggtttacactgcttccgactatgctgatattgtggagttcttggtggatcgatggaacgtgaaggaattaactggactttcagctgatgggcgtaaagctcaggattttgtatgtaatcttgctccaaaaattagaaaattggaagagagatttcaattaagagcaaagcaagcgtcaagtcttcccttcagttggatttttaatagagaagtcatgctctaaagtcttgaaacaacaactatggaatgcgatcttatctttcaagtaaagtcatagctattcaaaatattataaagtataaaagtttgagtatttctatggagatttgattttcttaaactattaaatataatattttatggatgttttatcatataaaggtataggtatagctttctaattttgcaaatattatgtgtagtttttttacggatttaagttttattatgtttggctcttttttagt

SEQ ID NO: 4114 - DNA, 1673 bp, Gossypium hirsutum
  Clone ID: GOSHI-09MAY01-C41_1
caaaaggaaatcaaagcccctcgcccccgcccacgcggccgcccactgtgactgtgagtgagggaatcaggtaaggttttccagaacaaaaatcaaagcccaataaccacccgaaaagaaaaaatggctttgaattttaatcccatcgcctcgaaatctcagaagctcccttgctttgctcttccaccaaaggccaccctcagatctcccaagttttccatgatctccaccattccttctggctccaaagaggttgggaatctgaaaaagcctttcacgcctccaaaggaggtgcctgttcagatcacccactccatgccgcctcacaagattgagatctttaaatctttggagggctgggctgagaacaacattctgactcacctcaaaccagttgagaaatgttggcaacccgccgactttcttccagatcctaattctgatggatttcatgagcaagtcaaagagcttagggaaagggcaaaggagatcccagatgattactttgtagttttggttggtgatatgatcactgaggaagccctttcaacttatcaaacaatgcttaataccttggatggaactcgtgatgagacaggtgctagccttaccccttgggccatttggaccagggcttggactgctgaagaaaacaggcatggtgatctgcttaataagtatctctacttgtctgggagagtggacatgaggcaaattgagaggacaatccagtacttgattggatcgggaatggatcctcatacagagaatagtccttaccgaggattcatatatacttcgttccaagaaagggcaacttttatttcccatgggaatacaggcaggctggctaaggagtatggggatattaacttggctcaaatttgtggtagcattgcctcagatgagaagcgccacgagacagcctataccaaaatcgttgaaaagctgtttgagattgatcctgatgaaacagtcctggcatttgctgacatgatgaagaagaaaatcgccatgccggctgagttcatctatgatggcagagattataacttatttgaccactactcagctgttgcccaaagaatcggggtttacactgctaaggactatgttgatatagtagagcacctggtggatcgatggaaggtgaaggagctagctgggctttcagccgaggggcgtaaagctcaggactacttgtgttcacttccttcgagaattagaaggttagaggagagagcgcaagaaaaggccaaggaagcacccagtgtcccattcagttggatatttgatagagaagtgaaactttaggtcatgaaatacagttaagactcctgcaatgcatttgaggaaacaaacacgaagaagctgaatgccaacttctctttatatatccgatgtaatagaggttgtatatgtaacaggaggaattgcgtggctttggttagggtagcacatgttttctggatgtgttgtgtccttaaaaaataatgccgatagcggcagctgtgatagttttagatgtttgttttcataatgtctgttatatcgttgtacgagtagtatgtgttgtttttgttgaaacaatcttcatatcttagtgataaatgataatgctgtgtaggcatagtttttagtttgcaataaaaaattccttcttcgggaaaaag

SEQ ID NO: 4115 - DNA, 623 bp, Gossypium hirsutum
  Clone ID: LIB3543-060-Q6-K6-H8
gccaaacgtacctgccacgctcgggagggggaccgtacaaaatgaccagagctctcaggcccccagatacctaaaagcaaaggctctgaatttcaacacccattgctttacaatctcagaaacttccttgatttgctcttccaccaatggctgcccttaggtctcccagcgtgtgatggcctctactcttcaatctggttccaaagggcctatctcaagaagcctttcctgcctcctagcgaggtgcatgttcaggacacacactcttagccccctcagaagatgtgagatctttaaatgtttgtaggactgctctgagaacaacattctaacttacctgaaaccagttgataaatgttgatatccccaagattttcttacatactccgatcaagatcgtatttcatgatcaagcgaaagaacttagggtaagggcactagagactacatatgattactttgcactgacaggctgtcgacatgatcacggtgcgaagctcttcctacttaccaaacaatgcttactaccttaggatggagttcgcgatgaaacatgctctagccttactacttgtgcaattaggacatggcttggactgctgaagaaacagcatggcgatcta

SEQ ID NO: 4116 - DNA, 573 bp, Gossypium hirsutum
  Clone ID: LIB3828-024-Q6-K6-E7
gcagccccaactgaatcgaagaaaaaaagaaagatggcgttgaaattgaatcacatcccacaaaactcccagttttggtcttccggcaatggctaccttctcatctcccaagcttttcatggtctccactctcccttctgcctccaaggaaagtgaaaatctgataaatcatatatgcctcgtccagataagcatgttcaagtcacacattcgatgcccccgcaaaagatcgaggtgtttaaatctttggagaactgggtagaggaaaaccttttcagtctcctaaaaccaattgacaacaattggcaaccccacgattttcttcccgatcctacgtctgatgggttctatgatcaaatccaagatatacaggaaagaaccaatgagatcccagatgattactttgttgttttggctggtgatatgatcacagaggaagcccttccaacttaccagacgttgcttaacaccatggatggaactagtgatgaaacaggtgctagcctttctccttgtgccatttggacgagggcatgcaccgctgaagtacacaggcatggcgacctacttaat

SEQ ID NO: 4117 - DNA, 386 bp, Gossypium hirsutum
  unsure (1)..(386): unsure at all n locations
  Clone ID: LIB3145-031-Q1-K1-H7
caaaaggaaaatggagattgtttggcaaactcctgctcatcctgctcagaaacaagattatgtttttcacaacgggaagcaccccgtattccattcagttggatctttgatagagaagtgaagctctaaaggtcttgaaatgcactcgaggaaaccaacttgaagaagctgaattcaacttgtctttgtattctgatgaaatggtgctggtgtgtgtgtaagaggaatagtgcctggctttagtagttttagatgttttgttgtattagatgtagcgtctgtctgtcatatcatgtacgagtagcatgtgctgtgtcgtntangtnttcttgtagaagcaaacattgttggtatcattgatgataaagatgacataatactgcana

SEQ ID NO: 4118 - DNA, 625 bp, Gossypium hirsutum
  Clone ID: AW187893.1
gctttctgctggttctttgccctcatctctgccctctgctggttctttttttctctgccctgtgccggagataaacttaggttgtcaaggctgccttcatctcctacatcgagcgaaaagagtaagagacaacaatggttactttccgggtaaggattgaatctcctttacatataaaagccggcccttagttaagaagattctttctgaaaagaaaaatgtctgggctgggttactgaaaaactctcaaactctgaaaaaaaaaacagagaagattttatacttagaaaaaccaaacgcgatgcagtggaatttctcttcggattcggttaaatttcagtttccctgttgatacttaatttcttttccgtatatttcctttttgtttcgtgacaatgtccggcgaaacggcatcgtcttccggaatcatcttggaaggaattgatgatgtggaggactacgtgtccacatgcccagaaggatcaacgcatttgtgatgcgtatgtgaagtgccgagaaaagaacgaggatgaagttgtgtctgcgtttctccggcggatatcattacaagctagtccaggggtggcatgtcattccaattggggctgagatgggagcagtggct

SEQ ID NO: 4119 - DNA, 437 bp, Gossypium hirsutum
  Clone ID: LIB3120-037-P1-K1-E2
cccacgcgtccgtttgttctttgttcctcttccgcatgtagaatatgatattctcagatgctagcatttgatgttggtgaattatgtgacctttggtggagagtgtgaggctctgcgctgagcaaatagatgcaggcagttggcttttagtagtaatgaagaacatacaggttgtggaaggctctccagttttatgcaggcttcagcattttcatgctttatgtgtatcaactccctatagagttctcaagtatgttacagtggatagctgattttgttggtctattcaaaatatgtgcaacatctgagtggactgaaatttgctcttctgtttctctcgtacttttttacatcatgggatgtaccacttttattactataagtctgattctgtttaaagattttagctgaacctttaaatgaaatgcaatacacgc

SEQ ID NO: 4120 - DNA, 530 bp, Gossypium hirsutum
  Clone ID: LIB3583-023-P1-K1-D6
aaaatccagctaaagctgacagtttcaggcagcatatcgaagctggactagtgcagaaacagtatgttgcaaaggttgttggagtgtttctggatgctgagcaagttgttgatgccaacatagattacaatgctagagagggaaggagcactgcagaggaatctctcctttcctaaggctggaaaattcgtgaggtttccgaggaagtttcttatccattagtttattatctgattagaaatttacccaattaaatgaaagtggttcgctgctgtactgaatcatagagagtcttcctttttatgcaggttggcatctctaatggtgatactaccttgaagggaaaggctgcttgtacaaagtttactaggattagcaccaatgggattcatagcattgtcttgtgtgaaccagttaccggccgaactcatcaaattcgtgtgcatttgcagtgtacaggtcatccaatagccaatgacatgctttatctttcggacgatgttgttaatcgctctacgttaggaacaact

SEQ ID NO: 4121 - DNA, 473 bp, Gossypium hirsutum
  Clone ID: uC-gsronu33B110h10b1
tctcttcgtccgccacgcgtccgcggacgcgggggtcgataacaaggcttatatattctacatctttatattatgggtgacattcttcatatgctcttccacccatggcaagtcttagatcacccaaggtttctatggtctccactcttccacctagctccaaaggggttgaagatctgaaacggcctttcatggctccaaagctggtacaccaggcttcccacaccatgccacctgagaagattgaaatctttaaatctttggatgattgggctagggataacattctgattcatcttaaacaagttgataaatgttggcaacccaaggattttcttcccgatccttcgtccgatggatttgaagatcaagttagagaacttagagaacgggcaaaggagattccggatgagtactttgtcgtgctggttggtgatatgatcacggaggaagcccttccactttaccaacta

SEQ ID NO: 4122 - DNA, 410 bp, Gossypium hirsutum
  unsure (1)..(410): unsure at all n locations
  Clone ID: LIB3145-018-Q1-K1-A2
cccacgcgtccgcccacgcgtccgcccacgcgtccgggctatgcaattcaatcccatcgcttctcaaactaagaaactcccttcatatgctcttccacccatggcaagtcttagatctcccaaggtttctatggtctccactcttccacctcgctccaaaggggttgaagatctgaaacggcctttcatggctccaaagctggtacaccaggcttcccacaccatgccacctgagaagattgaaatctttaaatctttggatgattgggctagggataacattctgattcatcttaaacaagttgataaatgttggcaacccaaggattttcttcccgatccttcgtccgatggatntgaagatcaagttagagaacttagagaacgggcaaaggagattccggatgagt

SEQ ID NO: 4123 - DNA, 444 bp, Gossypium hirsutum
  Clone ID: uC-gsronu33B116h10b1
gtctttgttctagatcgcgagcggccactcctgggggaaggtacaaattgtgcctgtgaaatggcaactaccaggcaacatcagggccaagtggctggaagggttcaccccacagagagcgaggagcagcctaagatctataggttgaggctctgggccaccaatgaggttcgggcaaaatccaagttctggtacttcttgaggaagctgaagaaggttaagaagagcaatggtcaagtccttgccatcaatgagatttttgagaagaaccctaccgggatttagaattacggtatctggctccggtgccaaagccgaactggttaccacatcatgtacaaggagtaccgtgacactactttgaacggagctgttgaacagatgtacaccgagatggcttctcgccacaaagtacgttttccttgcatccagattattaaaact

SEQ ID NO: 4124 - DNA, 595 bp, Gossypium hirsutum
  unsure (1)..(595): unsure at all n locations
  Clone ID: LIB3825-011-Q1-K6-C11
gaaaggaacgaanaagaacaaaggaaatggagattgtttggcaaactcctgctcatcctgctcagaaacaagattatgtttttcacaacgggaagcgccatgtacgaccttactactttgagttcgtctctcatgttaataaacgatgggaaggtaaaacaatagtggatttgttcgctcaagagttcagaggtcgatctagagattactatgttataggcatgaaccaccagtgatggcttgggatgttgaagttcttcaaaatgaacctgatgtactgacagtttgcaaacctgcatcagttcctgtacatccatgtggtcaatatcgtaaaaacacagttttgggtattctccaagcagagtatggattggctcctttgtatcccattcatcgactagatcgtctagtctcaggactgcttatcatggccaaaaatccagctaaagctgacagtttcaggcagcatatcgaagctggactagtgcagaaacagtatgttgcaaaggttgttggagtgtttctggatgctgaggttggcatctctaatggtgatactaccttgaagggaaaggctgcttgtacaaagtttact

SEQ ID NO: 4125 - DNA, 427 bp, Gossypium hirsutum
  Clone ID: LIB3145-042-Q1-K1-F7
gagaatagatgaacttgtttaatgttgggaacttagttggagaacttgtgaatagctaaacatggtatatttctttgttttggtaaaagaatctaatgccagtaagtgcccattggggtatattcctgttccattttttaacataagttttggcttttctctgctaaagcttgatttatacttaaaacatttaatcaagagccattcttctctctacggcgcttggctcacagccttctgtttgtaaatttgttcccaggtagaatatgatattctcagatgctagcatttgatgttggtgaattatgtgacctttggtggagagtgtgaagctctgcgctgagcaaatagatgtaagcagttggcttttagtagtaatgaagaacatacaagtgtttccctttttttataagtaattatatgtata

SEQ ID NO: 4126 - DNA, 368 bp, Gossypium hirsutum
  Clone ID: LIB3196-032-P1-M1-A7
attccctgtcttctcctttaatccctaaattttcatccccaagctcccaacccatttgccaccgaagatgccgaccggaccacctggtgcatcgccctcgactaacccctctgctgcgtctccgtcgccgtcgctctctactaccacagctaatcgataaagggctcagatagtttggtttctattgttgcttctaggtctggaaaagggctcccaattctttcatactatctaacgttaacaacctaaaaggctattgcagcaatgatgcgtgctcaggaagccgatcctatcaatctggaaatacttcttgctcttggtgtgagtcatacaaatggctagtgaatgcttatccctttaatcaagat

SEQ ID NO: 4127 - DNA, 386 bp, Gossypium hirsutum
  Clone ID: LIB3083-085-Q1-L1-G6
catttggtagcaaattctcagaagctgagaagtgcttgtgggcagattgagaagtaaaattttttagcttttcagccaaaaagtgcttttggctggttcatttatttttttagccacacacgaacgcccttctttgctctctgctctctgccctctgctggttctttgccctcatctctgccctctgccggttctttgttttgccctctgccggtcctttgttcctctgccctctgccggtcactgtaaatcatgtttttgatcaattgcatgagaaccaatgttttgcgaagctgaagtatttttaataagaaaattgcatggatctttcttttaaacaaataagaatgcagatggctagtggacttgggcctagagttgttcat

SEQ ID NO: 4128 - DNA, 378 bp, Gossypium hirsutum
  unsure (1)..(378): unsure at all n locations
  Clone ID: LIB3135-004-Q1-K1-A9
aagaaccatgctctttgaagaaatgtgaccacatctttgaacccgcagcacactttcgcaagactgtggtcccatgcttatatctatgaaacagtgtgttcagcactttacttacaatccaagatacacacggacttgtaacccggaattagtgagatggatcctgttagatggtctggttcaaaatggagatgcctgctggtatggttgcagacattgcttatacatttccaaaatatgttcaacatctgagtggactgaaatttgctcttctgcttctcttgtacttttttacatcatggtatgtactagttntgttactataggtctgattttgcttaaagattttagctgaacctttaaatgaaatgcaataca

SEQ ID NO: 4129 - DNA, 351 bp, Gossypium hirsutum
  Clone ID: LIB3166-053-P1-K1-D8
tccttatttcctatcaaccgccatctcttaatacgagggttttcatgactctatcgcggctcacctcttattcttcaacttcacactccgatcatcttctgaaacccccctgctctgccatatacctccgacgcccgatctccaccgataccactcccataactgcggagaccttcgttcctttcacctctcaccagaacgacaccccctcacgctccgtccagaccaatgccaaggagctcctcaccttctaacggcacatggcgctgatgcgtcagatggagatcgctgccgattcactctacaaggccaagctcatacacggatactgccacttgtacgactgtcaag

SEQ ID NO: 4130 - DNA, 377 bp, Gossypium hirsutum
  Clone ID: LIB3166-025-P1-K1-H10
cccacgcgtccgcccacgcgtccgtgccgctactccctctgttccctcatttagcttcacaattttatggtgattttattatgttaagttatgcttggtttcggtccattcgaaaatttctttatttcattttggctagaaagttgtcagtaaatatgctggtttatggatctttaagtaattacagggaggagtgttgctttaagctgtatttgaattaatatgagaaatgggggaggggaagacagaaaattttgattttggttttggtaatggttgcagtttcatcagtaccaagttgttggaagggctcacccaacagagagcgatgagcatcctaagatctataggatgaagctctgggccaccaatgaggt

SEQ ID NO: 4131 - DNA, 335 bp, Gossypium hirsutum
  Clone ID: LIB3197-031-Q1-M1-F11
attccatctcttctcctttaatccctaaattttcatccccaagttcccaacccagttgccaccgaagacgctgaccggaccacctggtgcatcgccctcgactaacctctctgctgcgtcgccgtcgcctgctcatcctactcagaaacgagattatatttttcacaacagtaaattaaatgggaagcgccatgtacgaccttactactttgagttcgtctctcatgttaataaacgatgggaaggtaaaacaatagtggatttgttcgctcaagagttcagaagtcgatctagagattactatattatttttctagaaacaatatgcaacgatg

SEQ ID NO: 4132 - DNA, 200 bp, Gossypium hirsutum
  Clone ID: uC-gsflnu33B099g11b1
gttaccatccagtatttgatcggttcaggaatggatccggttacggagaatagtccttatctgggattcatctacacaacattccaagaatgggcaactcttacctcacatgggaatacagataggtttgccaaggtgcatggttaaaataaatttgttacatatttattatcttctttatattgtattttttttatata

SEQ ID NO: 4133 - DNA, 3455 bp, Gossypium hirsutum
  Clone ID: GOSHI-09MAY01-C71_1
tttcactttctggtgttcagtcataagttacccattattttatctgtttttctagcgatttcttggtgtggggcatcacggaattcacttccaaagagataggatttgattcatcttttgttttccgggtttgggtttgggttcggcggattcttcgccacaaattatttttatccttttacaccgcaaaataataaatttcatccgtaattgttcctttctttttcctgcctttcattggttcataatttaaagttttggctttggtagtcaagtaaaaagacagagatggcaggtagaaaagtagagaagatggcttcaatagatgcacaactaaggctattagcacctgggaaagtctctgaggatgataagttggttgaatatgatgctgtgctactggatcgttttcttgatattcttcaggatttgcatggagaggatatcagagaaacggttcaagaatgctacgagctttctgcggagtacgaaggaaagcatgatcctaaaatattggaggagcttggcaaggtacttacaagcttggatcctggggactcaattgttgttaccaaatcattttcccacatgcttaacttgggaaacttggccgaggaggttcaaattgcatatagacgaaggattaagttgaagaaaggagattttgctgatgagagttcagcaacaactgaatcagatattgaagagacgttcaagcgacttgtggggcagttgaacaagtcccctgaagaagtttttgatgctttgaagaatcagactgtagatttagtcttaactgcacatcctacacagtctgttcgaagatctttacttcaaaaacacggaaggatacgtaattgtttgacacaattgtatgctaaagacattacacctgatgataagcaggaacttgatgaggcactacaaagggagattcaagctgcttttcgcacagatgagatccgaaggaatcctcccaccccacaagatgagatgagagcaggaatgagctacttccacgagacaatctggaaaggtgtaccaaaattcttgcgtcgtgttgacacagctttgaagaacatagggataaatgaacgtgttccatacaatgcccctcttattcaattctcttcatggatgggaggggatcgtgatggaaaccccagggtaactcctgaagttacaagagatgtctgcttattagctagaatgatggctgctaacttgtacttctcccaaatagaggatcttatgtttgagttatcaatgtggcgttgcagcgatgaacttcgtattcgtgcagatgaactccataggtcctccaaaaaggatgcaaagcattacatagaattttggaaacagattcctccaaatgagccatatcgcattattcttggtgatgtgagggacaagctgtataatacacgtgaacgtgctcgtagcctgttggccaatggattttctgacattcctgaagaagcagcatttaccaatgtggagcagtttctggagcctcttgaactctgctatagatcactctgtgcttgtggtgatcggccaatagctgatggaagccttcttgatttcttacggcaagtttctacctttgggctttcacttgtgaggcttgatatccgacaggaatctgatagacatactgatgtccttgatgctatcacaaagcacctggatattggatcttatcgagaatggcctgaggaacgccgacaggaatggctcttatctgaactcagaggcaagcgccctctattcggccctgatcttcccaaaacagaagaagtcgctgatgtattggacacatttcccgcccgttcggaactgccttcagacagctttggtgcctatataatctcaatggctacagccccatctgatgtgcttgctggtgagcttttacaacgtgaatgccatgtaaagcaaccattacgggtagttccattgtttgaaaaactcgctgatcttgaagctgctcctgctgctgtggctcgtctcttctctatagattggtacagagaccggatcaatgggaaacaggaagtgatgataggttattcagattcaggaaaggatgctggccgtctttctgcagcatggcagctatacaaggctcaggaggaacttgtaaaggtggcaaagcagtatggtgttaagcttacaatgttccatggccgaggagggacagttggaagaggagggggacccacgcatcttgctatattgtctcaaccacccgacccacgcctccgatcacttcgtgtaacagttcaaggtgaagttattgaacaatcatttggagaggagcacttgtgcttcaggacgcttcaacgttttactgctgctacacttgagcatggaatgcatccccctgtctcaccaaatccagaatggcgtgcactcatggatgaaatggcagtagttgcaacaaaggaataccgttctgtagtcttccaggaacctcgctttgttgaatacttccgcctagcaacaccagaattggagtatggtcggatgaatattggaagccgtccatcaaaaaggaaaccaagtggaggcattgaatcactccgtgcaatcccatggatctttgcatggactcaaacaagatttcatttacctgtgtggcttggctttggggctgcatttaagcacgtcattcagaaggatataaagaatctccacatgctccaggagatgcacaaccaatggcctttctttagggtcacaatggacttaattgaaatggtatttgccaagggagaccctggaatcgctgccttatatgacaagctgctagtgtcaaaggaactctggccctttggagagaacttgagagctaactatgaagacactaaacgacttgttctccaggttgctggacacagagatcttcttgaaggtgacccttacctgaagcagaggctccgacttcgtgatgcttacatcacaacccttaatgtgtgccaagcgtacactttgaaaaggatccgtgaccctgattatcatgtcaaggtcaggcctcacttatccagggaatacatggaatcaagcaaggcggcagctgagcttgtgaaacttaaccctacaagcgagtatgctcctggtctggaagacacccttattttgaccatgaagggtattgctgctggaatgcaaaacactggttaaaacttgcggattgttgtttccttgtgttgttatgctccttagtttatttttaatggatgttgctttgcgtcaagtaaaccttttatattactattattatcggttgggttaatttcatatttggctcatatattactaagtgttgtcagtctggtatctctataataatacatattaacatgatttcccattcaaaaaaaaaaaaatataaaaaaagttaaagaaaaaataatagttaaaaaaaagtatatatgtattaaaaaaagaaa

SEQ ID NO: 4134 - DNA, 554 bp, Gossypium hirsutum
  unsure (1)..(554): unsure at all n locations
  Clone ID: uC-gsflmaxxa061g05b1
gcattgttttctctgtttgccatttgccttaatcatcttcctctttctttaaaacctcttgaactctgctatagatcactctgtgcttgtggtgatcggccaatagctgatggaagccttcttgatttcttacggcaagtttctacctttgggctttcacttgtgaggcttgatatccgacaggaatctgatagacatactgatgtccttgatgctatcacaaagcacctggatattggatcttatcgagaatggcctgaggaacgccgacaggaatggctcttatctgaactcagaggcaagcgccctctattcggccctgatcttcccaaaacagaagaagtcgctgatgtattggacacatttcatgtcatttctgaactgccttcagacagctttggtgcctatataatctcaatggctacagccccatctgatgtgcttgctgttgagcttttacaacgtgaatgccatgtaaagcaaccattacnggtagttccattgtttgaaaaactcgctgatctngaaactgaatcaaaggaggtggtaaagag

SEQ ID NO: 4135 - DNA, 6127 bp, Gossypium hirsutum
  Clone ID: GOSHI-09MAY01-C61_1
ttttacctttgctacttttctttttcattgatctcgtctccttttgctgtcttaaaattaaatcaaaaccaccattcctttctatttcagcgtctacttttattcaaaaacctcccgagttctcatcgattgaactcgtttcaactcggatgctagggtttttccttacagttatctgaatttgtgtgacttatatataccgaaatgtctcgagctgaggagctatgggagcggctagtacgggcggcgttaagaagggaaagatttgggatgggttcagtaggacatcctgctggtggaattgctggatacgttccttcatctcttaataatagagatatagatacaattctgagagttgcagatgaaattcaggatgaagaacctaacgtagctagaattttatgtgagcatgcctattcacttgctcaaaatctggatcctaatagtgaaggcagaggtgttttacaattcaagactggtctaatgtctgtgatcaagcaaaagctagcgaaaagagaggttgggaccatagataggagccaagatgttgctcgcttgctggagttctataggctttatagagagaagaacaacgttgacaagctacgtgaagaagaaatgatgttgagggaatcgggtgttttcagtggcaaccttggggagttggagcggaagacattgaaaaggaaaagggtttttggaacgctaagagtattggggatggtattggagcagttgacagaagaaatacctgcagagttgaaacgggtcattgaatcagatgcagccatgactgaggacctgattgcttacaacattatcccattcccactggatgctcctaccataacaaatgctattgtgtcattccctgaggtacgagcagcagtgtcggcattaaagcactataggagcttgccaaaattgcctagtgatttttctattcctgagacaaggagccctgatcttatggattttctgcattatgtttttggatttcagaaagacaatgtttctaaccaacgtgaacacgtagtgctcctcctcgccaatgaacaatctagacatggtattcctgaggaacctgagccaaaattggacgaggctgctgtgcagaaggtgtttctgaagtctcttgataactacatcaaatggtgcaactacttgtgcattcaacctgtttggagcagtctggatgctgttagcaaggagaaaaaagtactctttgtttctttgtatttcttaatttggggtgaagctgccaacattagattccttccagaatgcttgtgctacatatttcatcatatggcgagggaaatggatgaagctctaaggcagcagattgctcagccggccaatagttgttctaaagatggtgtagtatcattcctcgatcaagttatcactccgctttatgatgttgttgctgcggaagccgcaaacaatgagaatggccgagcaccacattctgcttggagaaattatgatgattttaatgaatacttttggtcacttcattgttttgatcttagctggccttggcgcaaaacttcatttttccagaagccagaaccaaggtcaaagaatccactgaaattgggaggaggtcaacatcgaggaaaaacttcatttgttgagcatcggacattttttcatctttaccatagttttcatcggttgtggatatttctcgttatgatgtttcagggtcttacaatcattgcattcaataatggacatctgaatgccaagactttacgggaagttcttagtcttggtccaacttttgtagtgatgaagtttacagaaagtgttttggatgtcatcatgatgtatggcgcatattcgaccacacgacgcctagctgtttccagaatttttcttcgatttatttggtttggtgttgcatcagtcgttgtatctttcctttatgtgagagctttgcaggaagagagtaaaccaaattcaaactcagttgttttcagattgtatttgattgttataggcatctatggtggtatccattttttcataagtttccttatgcggataccagcatgtcatcgtttgaccgaactgtgtgatcagttttctttgattcgctttatcaagtggatgcgtcaggaacagtactatgttggacgtggcatgtatgagaggactactgactttattaaatatatgattttctggcttatcatcttgagtgggaagtttgcatttgcttattctttccagatcaagccactggtgaagccgacaaggacagtcatagccatggataacatagaatattcttggcatgatttcgtatctagaaataaccataatgctgtgacagtggtttgtttatgggctccagtgatagctatgtatctgttagacatttacattttttatactgtcttatctgctgtgtggggattcttgcttggggcaagggatcgtctcggggagattagatcgttggatgctgtccaaaagctatttgaggagttcccagatgcttttatgaagagactccatcctgttagggcttcggcatcctcttctagtgaggttgtggagaagagcaagtttgatgctgctcgtttctctccattttggaatgaaattataaaaaatcttagggaagaggattatttaactaactttgaaatggaattactttttatgcctaaaaatactgggaaactccccttggttcagtggcccctttttctgcttgccagcaagatatttttggctaaagatattgctgctgagagtagagattcacaagatgagctctgggaaaggatttcaagggatgagtatatgaagtatgcagttcaggaatgctattatgccctccgatatatacttacagcaatactggaagctgaaggaaggacgtgggttgagaggatatatgagggcattgaagccagtataacgaagaagactatcagtgatgattttcaactaaacaagctgcagctggttatttcacgtgttactgctctcttaggaattctgaatcaggctgaaaagccggagcatgaaaaaggtgctgttaatgctgttcaagatttatatgatgttgtacgacatgatgtccttgccatttatttgagggaacactctgatcagtggcagagcatattaaaagctaggactgaaggtcgattatttgcaaagttgaattggcctagagatcccgagttgaaagcacaagtgaaaagattgtattctctattaacgatcaaagattcagcatcaaatgttcccaaaaatctcgaggcgagacgtagactggagttcttcacaaattcacttttcatggatatgcccccagcaagacctgtgcaggagatgctgtccttcagtgtttttaccccatactattctgagattgtgctttatagtatgaatgaactgttaaagaagaatgaagatggaatatctattttgttttacctccagaagatatatccagatgagtggaagaattttcttgctaggattggccgtgatgaaaatgcagcggaaacggaactttatgatagtcctagtgacatccttgaacttcgtttttgggcctcttatcgaggacagacactggcaagaactgttcgtggcatgatgtattatagaaaggctcttatgcttcaaacctatttggaaagagaaaatgctagagatacagaggctgcactttctagattggagacaacagatacccaaggttatgagttatctcccgaagctcgtgcacgggcagatcttaagtttacatacgttgtcacatgtcaaatatatggaagacaaaaggaggagcagaagcctgaagctgctgatattgcattgctgatgcaaagaaatgaagcccttcgtgttgctttcattgatgttgttgagacactgaaggatggtaaagtgcacactgagtactattcgaagcttgtgaaagctgatatcaatgggaaagacaaggaaatctatgccataaaattgcctggagatccaaaacttggtgaaggcaaacctgagaatcaaaaccatgcaattgtgtttactcgaggaaatgcagttcagacaattgacatgaatcaggacaactattttgaggaagccttgaaggtgagaaaccttttggaagaatttgaccgtgatcttggcatacgtcctcctactattcttggtgtcagggaacatgtatttacgggaagtgtctcttctttagcttcttttatgtccaaccaagaaagcagctttgtaactcttggtcagcgtgttttagcaactcctttgaaggtccggatgcattatggccatccagatgtttttgatagggtttcccatataacaaggggtggtatcagcaaggcatctcgtattaataaacataagcgaagattttcatgcccggcttcaatttctactttacgccaaggaaatatcactcatcatgagtatattcaggttggcaaaggacgagatgttgggctcaatcagattgctttatttgaagggaaggttgctggtggtaatggtgaacaggttcttagtcgagatgtatacaggcttgggcagctctttgacttcttcagaatgatgtcattctacttcaccactgtgggattctatttttgtaccatgttaaccgtgctgactatatatattttcctttatggaagggcttatttggcactttctggagttggtgaaacaatgcaagagcgagctcggataatggataacgctgctcttgaagctgctctaaatactcagtttctgtttcaaattggtatcttttcagctgtgccaatggttttgggcttcatcttggagcaaggtttcctaagggctattgtcagttttatcacaatgcagttacagctttgtactgttttcttcacattctccctgggtacaagaactcattattttggtcggacaatcctgcatggtggtgcaaggtatcaagctactggtagaggttttgtggtccgccatattaaattttctgagaactacagactgtattctcgcagtcattttgttaaagggctagaagttgtgcttctgttggtggtataccttgcatatgggtataatgatagtgcattgtcgtacattcttctatcaattagcagttggtttatggctctttcatggcttttcgcaccctatttgttcaatccttctggatttgagtggcaaaagattgtggaggacttcagagattggacaaattggctattttacagaggcggaattggtgttaagggagaggaaagctgggaagcctggtgggatgaagaactggcacacattcgcaccatgagaggaagaatattggagactattttaagtctcagatttttcctgttccagtatggcgttgtctacaagctaaatgtgcagggaacaaatacgtcgttgacggtttatggcttttcctgggtcgtacttgccgttcttataatcctcttcaaggtattcaccttcagccagaagatgtcagttaatttccagctgctactgcgtttcatccaaggagtttccttcatgatcgccatagctggtgtagctgttgcagttgcgttaacagacttgtccatccctgacatatttgcttccatcttagcatttgtgcccaccggatggggaatcctctccattgctgcagcttggaaaccattggtgaaaaagacggggttgtggaaatcagtgcgatcaatggcacgattatacgatgctggaatgggaatgattatattcgttccagtagcatttttctcatggttcccgttcgtctcgacattccagacaaggttgatgttcaaccaagctttcagcagaggtttggaaatttcacttatcctcgctggtaacaatcccaacactggcctctgatctttttgattactatatatttccaccatattggtttttaatcacctccctgttcagattaactttagaaattcaacactcaaaatatttgaagtgttcaatttttagttagtttttttttttcaatttaactacttaggatgtaaaaagaaaacatgtttggcattatttttttgtttagtataaaatatggtttcataaaaaaaaaaaaaaaaaaaaa

SEQ ID NO: 4136 - DNA, 585 bp, Gossypium hirsutum
  Clone ID: LIB3583-010-P1-K1-H4
gcggtaccgtgccgtaccgccccggtacgacccacgcgtacggactctggctataatgatagtgcattgtcctacattcttctatcaattagcagttggtttatggctctttcatggcttttcgcaccctatttgttcaatccttctggatttgagtggcaaaagattgtggaggacttcagagattggacaaattggctattttacagaggcggaattggtgttaaaggagaggaaagctgggaagcttggtgggatgaagaaatggcacacattcgcaccatgagaggaagaatatttgagactattttaagtctcagatttttcctgttccagtatggcattgtctacaagctaaatgtgcagggaacaaatacgtcgttgacggtttatggcttttcctgggtcgtacttgccgttcttataatcctcttcaaggtattcaccttcagccagaagatgtcagttaatttccagctgctactgcgtttcatccaaggagtttccttcatgatcgccatagctggtgtagctgttgcagttgcgttaacagacttgtccatccctgacatatttgctttcatc

SEQ ID NO: 4137 - DNA, 342 bp, Gossypium hirsutum
  Clone ID: LIB3493-018-P1-M1-D7
catgaatcaggacaactattttgaggaagccttgaaggtgagaaaccttttggaagaatttgaccgtgatcatggcatacgtcctcctactattcttggtgtcagggaacatgtatttacgggaagtgtctcttctttagcttcttttatgtccaaccaagaaagcagctttgtaactcttggtcagcgtgttttagcaactcctttgaaggtccggatgcattatggccatccagatgttttcgatagggttttccatataataaggggtggtttcagcatggcatcttgtttttttatactaatcttagtaatattttccgtttttcatattacttttct

SEQ ID NO: 4138 - DNA, 648 bp, Gossypium hirsutum
  Clone ID: GOSHI-09MAY01-C11_2
gcttgtctcagtagtttccatgttctttttcgaatgaagcaaaagtaaccccgagaagagtgaaagtggccatggcatcgcatcaggaaagacaggatcttgtcgccagggcatggcagggagagacggttattcccggtggaactggtgggaagagtctcgaagctcaagagcaccttgcagaagggaggagccgtggaggtcagacaaggaaggagcaactggggagagaagggtaccaggagctgggaagcaaaggaggtcagacaagaaaggagcagatagggagtgaggggtaccaggaaatgggacgaaaaggtggactgagtaccatggacaagtcgggaggagagcgtgcagctgaggaaggaatcgacattgacgagtccaaatacagaacttgatgcaataaccccttaagtgcctgctggcactgtgttttgcttaagtcgagagtcttggtagttttgtgcaactctaggttgaccaagtgttaagatcgtatctttttttgtaacccccccccctgtttaggtagttactaatggagtggcatggcatatgagaggttttcagtttgcaaggcgcctctcttccttctggatgctttttgactatggaatgaaatgtgtttttggttgatatgtt

SEQ ID NO: 4139 - DNA, 3128 bp, Gossypium hirsutum
  Clone ID: M83304
tcgacatcgtcgtagagtaggaaaactctcaggcccgagcagctatttcggtggggtaaagatgatgctcctttcggactgatagtggttgttgttattaaacaacacattaataactacaactgctaccgttgacccaagtttgacctttacttcttccgaaacatctactctctccttgagagtcctcttgtgtccacctcgatgtcaacattcatataagaatgaaaggttaaagatatcgggtgcgtggaaatagaaaaaaaatacgttgattacatcagaaatccctttgtttttccttataattatgacctcaatcttatgtatagtatatataaggcatcatttgcaggatattaaaaaagcttgaactcgtgactgcgtaacgaccattaactggcctccggttatattagaacatgtgaccatatcacggccgccgactgggacctccacttagacttcgactcctgatcttgtcaagcacaatcacctcgaaactagatttccccaaaatgggtttctgaagttatagttctatccaccatgacatagggaatgtatgtgttgtgatgtgcgttattacatcccgaaccctcaaaactacctttgaaattcttcagtttcaatcgaaaaccctaaactctattaaaaaaaccccaaagccctaaacctaaaaatattaaaaaccctaaccctaagagagagaaacaaaaagtccgtccaatctctctcaaaaaatgacatatttccctaaattaaagaaaaaaggcttataaggctaatttttttttaaaaaaaaacctagtatatatggctaatttagcttatatttttttgttcatttttaaatatataaaatataaattttaaatatttttaagcaataaatgttaattatttataaaatttaattcaaatttataaattatgttttaaatattaaaatacaatcaacaaaaaattaaatatttaatagtatatatttaaaataaatttcaatagaaaataatatataaaatactttataatggttaaaatcatctcttatttttaaaagagcttttgctttaggaaaaaatatttttacttttatattaaaagcacctctaattctaaaagttctctgtttagtattatttgttactccaaacatatttttgataccaaaaacaaaaatcggtgaaggagggttggcaatgtgtacaaagaccaaagaggctcatataacgggcccattttccggcctacagatctgtattcgatgctgtccgatctagctattcttccggcgggcttttagccataaggtccgtaaccttcaaatggtgtgaagaaggctttcctcaaacactcaacatgttttcgttcccgaaagatctgagaaaccaaataaattatttactagtaagtaatagtactaggtgcttaaatctacgagcattggactcgtgtcaaacgactttgaatccaaaatacatttttgaaggactaagcacctgcgtgtcattgccatatggcttcattgctcctccttcgccgcgtttattcgattacgtgtcctgccttccttgatcggcacccttgctcatccttcataccttgcctttatataaagcaccaactctacgttttgtatgcacaattacgtgaattcacctggtgtaagcttgtctcagtagtttccaagttgtttttacgaaagaagcaaaagtaaccccgagaagagtgaaagtggccatggcatcgcaacaggaaagacaggaacttgacgccagggcaaggcagggagagacggttattcccggtggaactggtggcaagagtctcgaagctcaagagcaccttgcagaaggtgacccgcaccacctgatgtctgatttgttgttttgtattcgttattcaatgcctgcatttatatgatactgacctattagtttggcgctttgatcgaatggtgttttagggaggagccgtggaggtcagacaaggaaggagcaactggggagagaagggtaccaggagctgggaagcaaaggaggtcagacaagaaaggagcagatagggactgaagggtaccaggaaatggggcgaaaaggtggactgagtacgatggacaagtcgggagtagagcgtgcagctgaggaaggaatcgacattgacgagtccaaatacagaacttgatgcaatagccccttaagtgcttgctggcactgtgttttgcgtaagtcgagagtcttggtagttttgtgtaactctaggttgaccaagtgttaagatcgtatctttttctgtaacccccctgcatgtttaggtagttactaatggagtggcatggcatatgagaggttttcagtttgcaaggtgcctctcttctttctgtatgctttttgactatggaatgaaatgtgtttttggttgatatgttattggaatgcgcggagcataaactaatcctgaatgtgaggcaagattctaaaatgcatcctcaatgaggtgggacatatagggtcgatattcgacttaatagtgttacatgagcaacccttttggaacatattaataacaacacacaactaaagctggcctgtcactgttctttttcaacctcgtggggttttcatggttataatagcagtttatttgcaggattttcaagaaggatgactctgggagttgtttgcgtccaagctagtatttcaataggaaaaacatacttgtgatttctatgattaataaccttgttgaaaagtaaataagaacaaaattcgtctgcccccatcgtgtacctctttgtgtgcggtcaactgagattttgccgtttacttctccatcaccagtgattagagctgtggcctttctctggaaacccctctagaaccttcttctagacactccaatgcttttgtgttatgaaatctagctgtcggcgctaatggttttatttgggaggtggaagtttccaatagagaaacattttctatttttcacttcaattccttggacaaattgttggtgattttgatctatttttattcctgcaattcactctcttcaaggaggagcattttcccactatattattatgttgcaattgaaatctcatctatatactaactaagatc

SEQ ID NO: 4140 - DNA, 745 bp, Gossypium hirsutum
  Clone ID: GOSHI-09MAY01-C21_1
ctcttttctttttcaagcagttgtcattgttcttgtcttaggttttatattcaaacttgaaaagaaaaaatcatggcacactttcagaatcaatattctgctcccgaagttacgcaaactgacgcatatggcaacccaactcgccggacagacgagtacggcaacccaatcccgactcaggagactggccgtggaattctagggatcggtggacatcatcacggaggccatcatggactccatcgtactggaagttcctctagctcgagctcatcttcggaagacgaaggaacggggaagaagaagaagggactgaaacagaggctaaaggagaagataccaggtaacaaagagcatcaatctcaggccacctcaactacaaccccagggcagggggctacgtatcaccagcagcaccacgagaagaaaggagtgatggataagatcaaggagaagctccctggtcaccacaacccttgattagctgcctttggtcggctatttcctactagttatataagcgttaattaaataacttgcagcaatgaagactcttgtatctcttaagactatacttaaaaggagatatttgacttccatcgtatctcgaacttctgatttctcatttgccttcagcttacaattcgtttttcatagaacaaaaggtgaataaaaaaggagtaacgatcatatggaatatattatatatgatataatatacatgcaatagcaaggtttgacctgt

SEQ ID NO: 4141 - DNA, 772 bp, Gossypium hirsutum
  Clone ID: GOSHI-09MAY01-C991_1
gtcatttgaagaaaatgatgttacatacaattttgattttaagaagttgtccgattctatggaagatgagattggatctcaaggtaattcaaagaaagctaggagtcttgatgagcttgatcctgagatacagaccattgtattgctaagtgatacttatggagctgaaggtgaacttggtattgtcttgtctgagaaatttactgaacatgatgcctactgtatgtttgaggctctgatgagtggggctcatggttcagttgctatggcagatttcttttctcccattcctgctgctcagtcccagagtggcttgccccctgtcattgaagcctcagctgcattataccatttactgtcaattgttgattcttccctgcatagccatctcgtcgagcttggtgttgaaccccagtattttgcacttcgctggttgcgggttttatttggaccggagttttcacttcaagaatctcttagttgtatgggatgagatctttcacggcagtataatagccctactttgaaaaagaactcttggaaatgatgagaattccagttttaaaatgttcaattcatgccgtggagcattaataactgctatggcagtctctatgatactttatgtgagatcttccctgcttgccactgaaaatgcaacaacttgtcttcagagactcttgaacttgccggagactataaatctgagaaaacttatagcgaaggcgaagccactgcaaattcttgcattggattctaaaatttcaccttt

SEQ ID NO: 4142 - DNA, 1675 bp, Gossypium hirsutum
  Clone ID: GOSHI-09MAY01-C981_1
cccagcgtccgtgaaagacggtctcccctcgcgcccgcggtcgcgtggggttagggttttaagggtaaagcatcctccaacatgcaatacatggatccaactaagaaacgcaagttagatgaaaacggtactgtttcagcgcagtcggaacctgaccctatcaccaaactaaccccacaagatggccgcaaacttattgagcgattcaccgtcgaccaactcctcgacatcctccaagacgccgtttgtcgtcacgtcgacgttctttcagccgttcgatctattgccgatcaagatccgtctcaacggaagctcttcatacgtgggttgggttgggataccacaactgatggccttcgttcactcttttcggtctatggagaacttgaagaagcggttgttatcctcgacaagactaccgggaaatcgaaagggtacggatttgttacgtttaagcacgtagatggtgctttgcttgctcttaaagaacccagtaagaaaatcgacgggagagtcaccgtgacacagctggcggcggcagggaattcggcgacgaatagtaacccggtggatattcatatgaggaagatttatgtagccaatgtaccgtatgatatgccggcggataagttattgggccatttttctcagtatggggaaatagaagaggggcccttggggttcgataagcagacggggaaatcaaggggttttgcacttttcgtttataagacagcagaaggggctcaggcagcgttagcggagcctgtaaagaacattgatgggagacaaatgaattgtaagctggctattgaagggaaaaaagggaagcaaggacaagacgggatgatgcaaagtggcggtggggttccgggaaacgcagagatgggaatgggaggacatggtggaggatatggtgggccgggtggttacggtgggttttcaggtgggatgcaagggccgcctggtcccatgggtcatcctcatcccttgaattcatcaggagttggagtgggcgctttgagtggaaatggcggtgttgctgctgggggttattctggacttggtgggccgtatggtgggtacggtggaccaggttcaactggctatggtggaccaggatcagctggttatggcggaccaggttcaactgtttatggtgggttgactggtgctggtgcagggggtgggttgggtgctgcaagtggagggtcttcattgtatagaatgccgccgagttcagctgggatgccaactggtggttatccagagactgctcattatagcttgtcttcctcggctgctttccctagtcagctccaccaaggggccgggacatcccctgcgccaagagttccacccggtgcaatgtatcccaatgggcccccgttctactgaggtttatgacagcttgttgggcgcagacgctttttgtggttctggtgattgcctgaatgcagactatatatactctggctcgatgaatgcattagctgggctcttacagccacttctcttgatttgctcctttaagatgtttgcttctgagtgctgggtggcaaaccttgtgatctaaactagtttttttgtgttccgttaggaactcttgttccagtggtcccatttagttattagtattttttttaataatacaagtagtgccagttttttgcct

SEQ ID NO: 4143 - DNA, 449 bp, Gossypium hirsutum
  unsure (1)..(449): unsure at all n locations
  Clone ID: LIB3583-053-P1-K6-F10
cggtccggcttcccgggtcgcccagcgtccgcccacgcgtccgcccacgctccgcccagcgtccggggnaatcaggggttttgcacttttcgtttataagacacagaggggctcaggcagcgttagcggagcctgtaaagaacttgatgggagacaaatgaattgtaagctggctatnntgaagggaaaaaagggaagcaaggacaagacgggatgatgcaaagtggcggtggggttccgggaaacgcagagatgggaatgggaggacatggtggaggatatggtgggccgggtggttacggtgggttttcaggtgggatgcaagggccgcctggtcccatgggtcatcctcatcccttgaattcatcaggagttggagtgggcgctttgagtggaaatggcggtgttgctgctgggggttattctggacttggtgggccgtatggtgg

SEQ ID NO: 4144 - DNA, 734 bp, Gossypium hirsutum
  Clone ID: GOSHI-09MAY01-C961_3
tttggtttgcagacagcttcccctttatgggatgcattctacgacgggcgctgatccgttttattggatgcgtgttatccttgcatccaaccgtggaaccgttatggaactcgggattacccccattgttacttccggatcggcgatgcaactcttggctggttcaaagatcatcgaggttgacaacagtgttcgtgaggatcgcgcactcttgtgagtgttttaacattactattttctccattataacttgaagcactatatgtcctccataatctttggttctttgatgtttgctttgcagaaatggggctaaaaagctgacggggatcctaattgctgttggtgaggcagtggcagtacgtcctgtctggtatgtacggaagcgttggtcagctcggtggtggaaacgccatatcttattattatccaacttttgctctgctggaattattgtgatctgcctcgatgaacttcgccaaggggggtatggtttgggctctgggatctcccttttcatagccaccaatatctgtgaaaacataatctggaaagcctttagccctacaacaatcaacagcggtcgtggggctgaattcgaagtgctgtcattgcatgttcatcttttataaccagacagacaaagtcgagcgctcgtgagcttctacgcagatcttcaacgtacaattactcgtacgttgatctctatgtatctactcaggttcggtgttgct

SEQ ID NO: 4145 - DNA, 828 bp, Gossypium hirsutum
  Clone ID: GOSHI-09MAY01-C961_2
cccacgcgtccggaacaactctacctcctggaccccttgttgattttcgatctcctcagatctgctgtggaatccacaccatatgcctccggttcttttcattttagttttccactttatctgaatagtcaatatgggaggagggttcagagtactgcatctggttagaccatttctttcatttctgcctgaagttcagagtggctgacaggaaaatcccttttagagagaaggtcatctgcactgtcgtctccctcttctatcttcctggtgtgcagtcagcttcccctttatggaatacactctacgacgggtgctgatccgttctattggatgcgtgttatccttgcatccaaccgtggaaccgttatggaacttgggattacccccattgtgacttccggtttggtgatgcaactcctggctggctcaaagatcatcgaggttgacaacagagttcttgaggatcgtgcgcttttaaatggggctcataagctattggggatcccaattgctgttggagtagtactgtccgttctttctttagtcttttattactttattatgtcaaattccttatctaattaatatactctttctttttttattatctctctctatgtattttcttatctgtttgatctaggttctttaactttgcgtttttttatttcttcttctaatgtccctttattatctcccttgtcttcaatttcttttttctcttacattactatttctgactctatgtcctttctttccttttcctatcttctcttatatgtatttatttcatcatactgccttatatgtttgttatcttttcgt

SEQ ID NO: 4146 - DNA, 1026 bp, Gossypium hirsutum
  Clone ID: GOSHI-09MAY01-C961_1
tttcagcgtcctccccagtaccgggatatttttctcttctctttgaaaaatccgaaaaatagttttccaaagggaaacttttgctcgtaatattctcagatctgctctcaaatcctcacattttgaatagccaatatgggaggtgggttcagagttcttcatttggttagaccattcctttcgtttctgcctgaagttcagagtgctgataggaaaatcccttttagagagaaggtcatctatactgtgatctccctctttattttcctggtttgcagtcagcttcccctttatggaatacattctacgacgggtgctgatccgttttattggatgcgtgttatccttgcatccaaccgtggaaccgttatggaacttgggattacccccattgttacttccggtttggtgatgcaactcttggctggttcaaagatcattgaggttgacaacagtgttcgtgaggatcgtgcgcttttaaatggggctcaaaagctgttggggatcctaattgctgttggtgaggcagtggcgtacgttctgtctggtatgtacggcagtgttggtcagctcggtgttggaaatgccattcttattattattcaactttgctttgctggaattattgtgatctgcctcgatgaacttctccaaaaggggtatggtttgggctctgggatctcccttttcatagccaccaatatctgtgaaaacataatctggaaagcctttagccctacaacaatcaacagcggtcgtggggctgaattcgaaggtgctgtcattgccatgttccatcttttaataaccaggacggacaaagttcgagcacttcgtgaagctttctaccgacagaatcttccaaacgttacaaatttactcgctacggttttgatcttccttattgttatctacttccaaggtttccgagttgttttgcctgtaagatcgaagaatgctcgtgggcagcaagggtcggatcccattaagctattctacacctccaacatgcccatcatcctgcag

SEQ ID NO: 4147 - DNA, 839 bp, Gossypium hirsutum
  Clone ID: GOSHI-09MAY01-C911_1
tataggccgagttgggccacccgttccttgttgctaccttaagcttgtcaattgggaggaaggtgggtattcaatatccgacaaaccaatgcctcgaggagagattgttgttgggggacatagtgtaactcatggctatttcaacaatcctgagaaaaccgatgaggtttacaaggtcgatgagaggggcaagcgctggttttacaccggggatatcggacaatttcatcctgatggatgtcttgagattatcgataggaaaaaggacattgtcaaacttcaacatggagagtatatatctctcggaaaggttgaggcagcattgacgtcaagcaagtttgtcgacaatttgatggtgcatgctgatcccttccacagctattgtgtggctttaattgttccgtcacgcccacttcttgagacgtgggcagtagaagctggcataaagtaccaagatttcccagaactgtgtggcaaagctgaaactgttagtgaagtccaaaaatcactttcaaaggtggggaaagatgcaaaactagacaaatttgaaatacctgcaaagattaaactgatggcagaaccatggacacctgaatcaggattggtcacagcagcactcaaaataaagagggaacaaataaagtcaaagttcaaagatgatctccaaaagttgtaccagtaatatacccataataaatgcattgatttaaccttggtattttcactgtcatatgctctctttcatcttctttgtaagttttcatgtatgtggagacaaaaaatcaaacagtgttgctccatagatgagttgtattagataattcggaagtttgtctaaa

SEQ ID NO: 4148 - DNA, 677 bp, Gossypium hirsutum
  Clone ID: GOSHI-09MAY01-C931_1
tcttcattgcagaacatgccggcgttcttcatgggggatgcggcgaaccaaggttttctcccagaacatcaatgtcatcatggaaatggaccatacataaacaaacccttacatggtcttatgcaacttccggaccttcaaggcaatactaacagtacggcgcccaattccgccaatcttttcaatttaggcttctttcccagcaacagtggtgcgagcagcataagtaccggcgaaaacggcggagcttcgaattccggatttttaagcggtaatcagtttaacatgggtgatgtgcaggttggttcggggatggcctctctttatagcagtagttcaatgcaacatgagaacatttctccaaacatgtcggcaactgcattgcttcaaaaagctgctcaaatgggttcaactacaagcaacaacacttgctcattgctacggggattggggagttcttcgtctagtgggatcaaatccgacagacaagttttttcccctaacaatttcgagagtggtggcagtctaagatcacagatggagaatgatagcaatcttcaaggactaatgaactctcttgcaaatggcaactcctccattttcggacaagatcatagcaacttcggagggttcaccggaaatgggatgacagtggaacatcatagcaataacgccaa

SEQ ID NO: 4149 - DNA, 670 bp, Gossypium hirsutum
  Clone ID: GOSHI-09MAY01-C881_3
cttactatcatgaccttgtatcttcacctggcttttcttgatcctcgtaagtaataagtacttgcagggtgatttgatcaaagaaggacaagtgataggattcttgaatcaatttggttgtgaactacctattaggtctgatatggctggaacagtcttaaagatcctcttcgaagatggagatgccgttggttacggagatccactctttgcagttttgccatcatttcatggcatcgactatctctttctcctacccatgatacttttgcagagataatgtcacaaagtccttgggtatgcattttgttttctcacatcattttgtggttttacttatggagtgccccgagcacgtgtagttggtgatctgtactcaatgttactagtctattgaattcccaggattaccatagaacaattatataagcatactatagattgaagagaggtttatcaattgtataacctatattcttttgtgtaataagcttttagacttttgttgctttgagttttaaaaaaaaaaaaaaaaaaaaaaaaaaaaaaaaaaaaaaaaaaaaaaaaaaaaaaaaaaaaaaaaaaaaaaaaaaaaaaaaaaaaaaaggggcggccggtttaaagagaccaaatttacttacccggtcttgcaaagaaataattttttttt

SEQ ID NO: 4150 - DNA, 1064 bp, Gossypium hirsutum
  Clone ID: GOSHI-09MAY01-C881_1
tttcgaagcgcgctctctctctctctgtccaatttaacactcttccaccaaacgcttcgataaccaaccctctctgaatttcatttcccttttccccattttgccccttcccttcattgtcgattccccctctctctctctctcttctcttccaatggagtcctccgctgctctccgctcctttcactattctgtaagtgctgtttcacaagcttgttgcacgcttgaaaggcccagtacatttcatatgtcttctagttgctggccaaattcaagaaaatcatgtgttccaggcttgatgtttggagggaagaacaattcttctacaagacgaactgtagttttagcatcctctgcaaagacgcctgaagctacggcaacagccaagtcaaatgttccaccggagagcaccaagaaaggctcattggagaagaaaacttcacggaatgcaacttttccaaatggatttgaggcattgattctggaggtgtgtgatgaaactgaggtcgcggagccgaaaatgaagattggggacttcgaaatgcatctgaagcggaatgttggtgccacaaaagctcccatgtctaacatttcacctacaacagccccatcaatcccaactgaaccaatgaatgaagcagctgctgctaccccacctccatccccacctaaaccctctcctgagaagccttctccatttaaaagctctgcctttgggcagtcatccaagttagctgccttggaggcttctggatctagcaactatgttctagtaccttctcccgttgttggtatattccaaagaggtagtgctgtcgtgggggattgcctacctccttgctgtaaggagggtgatttgatcaaagaaggacaagtgataggattcttgaatcaatttggttttgaactacctgttaagtctgatatagctggaacagtcttaaagatcctcttcgaagatggagacgccgttggttacggagatccactctttgcagtttgccatcatttcatggcatcgactaatctctttcttctacctatgatacttgtgcagagataat

SEQ ID NO: 4151 - DNA, 532 bp, Gossypium hirsutum
  Clone ID: LIB3585-016-P1-K1-A1
ttcatttcctttttccccattttgccccttcccttcattgtcgatttcccccctctttctcttctcttccaatggagtcctccgctgctctccgctcctttcactattctgtaagtgctgtttcaaaagcttgttgcacgcatgaaaggcccggtacatttcatatgtcttctagttgctggccaaattcaagaaaatcatgtgttccaggcttgatgtttggagggaagaacaattcttctacaagacgaactgtagttttagcatcctctgcaaagacgcctgaagctacggcaacagccaagttaaatgttccaccagagagcaccaagaaaggctcattggagaagaaaccttcacggaaagcaacttttccaaatggatttgaggcattgattctggaggtgtgtgatgaaacttaagtctcggagcttaaaatgaaaaatgtgtgactttgaaatgccatcttaagccggaatgtttatttccctaataagcttttcaatttttttataatttatacctataatca

SEQ ID NO: 4152 - DNA, 934 bp, Gossypium hirsutum
  Clone ID: GOSHI-09MAY01-C861_1
gaaccatactgactttaatgatgaggccaaacagctggcatctgaaattccttctgaaagtttctctgtatctgacagtgaaagcaggatccaagacaatttgcttggtgaacatggaggaagcaaggatgctaaagagtctactgaaaagctgtctccatctgaggaccctcagttgtcaaattctatcgattcccagtcattattgtgtgacaagttagatggatctgataaagctgtgccatccttgaattctactactcatgcccagtctagttctttatcgaaggttagtgaaaatccgcccagcgtccgcagtgcttccgggggatcgcgcgaggggggccagcttctagcaaagtgactggtgaaacaccttctgtaaacacccgtggacaacctggtagttctaaaccatcaaattcagattgtgttgctggttcctcagcttctagtggccctggcttatccccaagttcatcaatgggtgcattatcctctgagaagtcaacactgaacccccatgcgaaggagttcaaactcaaccctaatgcaaagagtttcacaccatctcaaacgtctgttaggcccccatcccccgtctccgatggctcattctactatcaaacaccagtgtctcctgtaccacatatgcacatgcctgttaattttgggattggaccctcctttcctgggcaccagcctgttgtattcaatccacaagtggctccaatgcaatcaccgcaagcttattttcatccaactggacctcagtatgggcaaccgatgcttcttgggcaacggcaagtgatgtactaccaaccggacatgcaatacaaaggacgagattattaaccagtagtagctcgctgacagcattcatggagccggcttctgctcaaaaagaataaaaaagaagttcaagtgactgctc

SEQ ID NO: 4153 - DNA, 387 bp, Gossypium hirsutum
  Clone ID: LIB3145-014-Q1-K1-A7
cccacgcgtccgctgaaattccttctgaaagtttctctgtatctgacagtgaaagcaggatccaagacaatttgcttggtgaacatggaggaagcaaggatgctaaagagtctactgaaaagctgtctccatctgaggaccctcagttgtcaaattctatcgattcccagtcattattgtgtgacaagttagatggatctgataaagctgtgccatccttgaattctactactcatgcccagtctagttctttatcgaaggttagtgaaaaaccaagtgcttccggtgatctcgcagaaggtccagcttctagcaaagtgactggtgaaacaccttctgtaaacacccgtggacaacctggtagttctaaaccatcaaattcagatt

SEQ ID NO: 4154 - DNA, 443 bp, Gossypium hirsutum
  Clone ID: GOSHI-09MAY01-C811_2
gccatgtcttgtatcgagatgcaacaggtgctgtcaaacaaactggagatgaaccattcagtacttttatgaagacggtcaaaagattgaacataaggatggattcacgcaatgataccgatggaaggtcatggctcacagggattcgaactgccaaaaacagactagaagggccaaataagagaggtcccttgagcatatttgcatgattcagaacaccagtatttgagaaaaacatggatgatggatcgctctagaagttgcacaacaccatgaaagagtgtttttagttcctcttaggggggatgtctgtaagaagtttcttagtcaaatatttgtgttcgaaaagaagatttatgtcttagaatttgctgaatgtttttatgagtttatgttgatgatggttatgaatccatcaattcaaacttcaactgttaaggatt

SEQ ID NO: 4155 - DNA, 574 bp, Gossypium hirsutum
  Clone ID: LIB3582-049-P1-K1-E5
gtggcagcaggactatcaagccccagaacctggctcagccactggtcattgcaaggtattcttggaatctgaggatgtgggacgaactcttgacctcacagttctcggttcttatgaagagctatacatgaggttggctaacatgtttggaagagaaagatcagagatgttgggccatgtcttgtatcgagatgcaacaggtgctgtcaaacaaactggagatgaaccattcagtacttttatgaagacggtcaaaagattgaacataaggatggattcacgcaatgataccgatggaagataacatgttttcccaggtcatggctcacagggattcgaactgccaaaaacagactagaagggccaaataagagaggtcccttgagcatatttgcatgattcagaacaccagtatttgagaaaaacatggatgatggatcgctctagaagttgcacaacaccatgaaagagtgtttttagttcctcttaggggggatgtctgtaagaagtttcttagtcaaatatttgtgttcgaaaagaagatttatgtcttagaatttgctgaatgtttttt

SEQ ID NO: 4156 - DNA, 758 bp, Gossypium hirsutum
  Clone ID: GOSHI-09MAY01-C821_1
ggtgttctctgaagaagattttgatcatttttctttttgctactcaaacatgaggccgacgatctatctttttggaggcgcaatcacagagtcttgctttgctgacggtggttggggtgctgctctcgccaaccatttctgtcggacgcttgatgtggtgctgagagggtatagtgggtacaatacaaggtgggcgctgaaggtacttgatagggtttttcccacggtgggtcacgacggtgcggctgctgcgccgccagttgcggtaaccgtgttttttggagctaatgatgcttgcctccctgatagatacgctgctttccaacacgtcccacttgatgagtacaagcagaacctacactccatcgtctcttccctcaagaagcggtggccaaaaacactcgtactcctaattacccctcctccgatggaggaagatggacgccgtgagacgagccttatgttgagaacccatcgggtttgcccgagaggacaaatgaagctgccggctcttttgccaaggcatgtgttgaaacagctgaagaatgtgggatcgctgtggtggatctgtggaccaggatgcagcaatatactgactggcgcaaagcttatcttagcgatggtttgcacctcacaaaggaaggcaacaaggttgtatttgaggaagtgatgaaaaagctggaagagagaggtttaagccttgaaaagctaaaagctgatctcccacttattgctgatattgaccatgatgacccact

SEQ ID NO: 4157 - DNA, 548 bp, Gossypium hirsutum
  Clone ID: LIB3582-049-P1-K1-F5
cccacgcgtccgctcagatctcacagtgttctctgaagaagattttgatcatttttctttttgctactcaaacatgaggccgacgatctatctttttggagactcaatcacagagtcttcctttgctgacggtggttggggtgctgctctcgccaaccatttctgtcggacgcttgatgtggtgctgagagggtatagtgggtacaatacaaggtgggcgctgaaggtacttgatagggtttttcccacggtgggtcacgacggtgcggctgctgcgccgccagttgcggtaaccgtgttttttggagctaatgatgcttgcctccctgatagatacgctgctttccaacacgtcccacttgatgagtacaagcagaacctacactccatcgtctcttccctcaaggttcacttatcacatctttatctaacttttttctacacgcaagtaaatatggtagcacattaagcacgttaaactcattgacgatcaattttctactgcgtaaacagtagatgattgtaagaactttagggtcaaaaggcag

SEQ ID NO: 4158 - DNA, 417 bp, Gossypium hirsutum
  Clone ID: GOSHI-09MAY01-C581_5
tcagtgctgaggaggcatggaggcggccggctcaacgacagcataggcaccgggtgggtttcgatgaacatgacggggacgatgactcagcaccaaaagtgcaatgtgcccagcagtaagaaatgtttgcgttcaatgttttgcccctcttattttatagcagcagccaccttagatcactacatatccggaacttgtatgcggttttgtctgcaaccagcacattaaattggtgttttgtctctttattttttatttttgcgttcatctcagcatgttgtggtattttacctcgacatttcaaggatctatctactatgttcagatgctatatttgattattatatataagtatcttggaatgccctcttcaaaaaaacaagctcgcactacattctgagaaagatgtctctttct

SEQ ID NO: 4159 - DNA, 571 bp, Gossypium hirsutum
  Clone ID: GOSHI-09MAY01-C581_2
aattaaatcaaaccctggcgaggtcgttaagcctggtcaatacaaggctatcaatgatgagggtatgccccaccatcagagacctttcatgaagggcaagctagtcatccagttccatgttattttcccagaatctggggtattttcacctggaagcaatgccggaagatcgagagtatattgcccatgaggcctagtaagcatttgacagacatggagcttgatgactgtgaagagactactttgcatgatgtcagtgctgaggaggtaaagaggcggaaggaacgacagcataggcaccgtgaagcttatgatgaagatgacgatgacgatgagtcagcaccaagagtgcaatgtgcccagcagtaagaaatgtttgcgttcaatgttttgcccctcttattttatagcagcagctagcttagataactacatagcccagaacttgtatgcggttttgtctgcaaccagcacattaaattggtgttttgtctctttattttttattgttgcgttcatctcagcatcttgcgttattttatcacagttttcctcgacatttcaaggatct

SEQ ID NO: 4160 - DNA, 1635 bp, Gossypium hirsutum
  Clone ID: GOSHI-09MAY01-C581_1
aaatcccgggggcgcccccgcgtcggagaaacttgaggggaagaatcttgctatcccttgcttttctctcgcaaaaaattctcaaacttgtttttaacgttcgctgaatactatcgctcatttcttccctcagaaccctaatcgataactgaagccatttaatcatgtttgggcgtgttccaaaaaaatctgataacactaagttttacgaagtacttggggttcccaaaagtgcaagtcaggatgaattaaagaaggcttataagaaagctgcaattaagaatcatccggataaaggtggagaccccgagaagtttaaggaactggctcatgcttatgaagtacttagtgacccagagaagagagaaatatatgatcaatatggtgaagatgctcttaaagagggaatgggaggaggcggttcttctcacaacccatttgacatatttgagtcatttttcggtgggggagccttcggaggcggtggtagctcgagaggaagaaggcagaagcgaggtgaagatgtagtgcatgctcttaaagtttctctggaagaattgtacaatgggacgacaaaaaagctctctctttccaggaacgcaatatgcagtaaatgtaaagggaaaggttcaaagagtggagcctcctctagatgctatggttgccagggcacaggaatgaaaattacaacacggcagattggactgggcatgatccaacagatgcagcatgtttgtcctgaatgcagaggctcaggtgagatgatcagtgatcgggatagatgcccacagtgcaaagggaacaaggttactcaggaaaagaaggtgctggaagtacatattgagaaaggaatgagagatggtcagaaaattacatttgagggacaagctgatgaggctccagatacaataactggagacattgtttttgtattggaacaaaagaaacaccccaaatttgataggagatttggggacgaactttatgttgaccacaaactcagtttgacagaggctctatgtgggtttcagtttgccctaactcaccttgatggcaggcagctcttaattaaatcaaaccctggcgaggtcgttaagcctggtcaatacaaggctatcaatgatgagggtatgccccaccatcagagacctttcatgaagggcaagctagtcatccagttccatgttattttcccagaatctggggtattttcacctgagcaatgccggaagatcgagagtatattgcccatgaggcctagtaagcatttgacagacatggagcttgatgactgtgaagagactactttgcatgatgtcagtgctgaggaggtaaagaggcggaaggaacgacagcataggcaccgtgaagcttatgatgaagatgacgatgacgatgagtcagcaccaagagtgcaatgtgcccagcagtaagaaatgtttgcgttcaatgttttgcccctcttattttatagcagcagctagcttagataactacatagcccagaacttgtatgcggttttgtctgcaaccagcacattaaattggtgttttgtctctttatttttaatgtttccttccacccacacctttcctttttttatcccatttttctccacctttctaggattattt

SEQ ID NO: 4161 - DNA, 519 bp, Gossypium hirsutum
  unsure (1)..(519): unsure at all n locations
  Clone ID: LIB3583-054-P1-K1-H12
cacgcgtccgtaaactcgaggggagaactctggcagagattagctttttaatcgcacaatatggcaaacatgaagatcgcgatcgatggatacgatcggtcatttcttccctcagaaccctaatcgataactgaagccatttaatcatgtttgggcgtgttccaaaaaaatctgataacactaagttttacgaagtacttggggttcccaaaagtgcaagtcaggatgaattaaagaaggcttataagaaagctgcaattaagaatcatccggataaaggtggagaccccgagaagtttaaggaactggctcatgcttatgaagtacttagtgacccagagaagagagaaatatatgatcaatatggtgaagatgctcttaaagagggaatgggaggaggcggttcttctcacaacccatttgacatnattgagtcatttttccggtggggagccttcggaggcggtggtagctcgagaggaagaaggcagaagcgaggtgaagatgtagtgcatgctc

SEQ ID NO: 4162 - DNA, 457 bp, Gossypium hirsutum
  Clone ID: uC-gsflmaxxa090b06b1
cagttttaatggcaactacacacgaccacacttgggatggttattattgtctttctaaggggttctcaaacttgtcattacgctcgctgaatactatcgctcatttcttgcctcagaaaccctaatcgataactgaagccattgaatcatgtgtgggcgtgttccaaaaaaatctgataacactaagttttacgaagtacttggggttcctaaaagtgcatgtcaggatgaattaaagaaggcttataagaaagctgcaattaagaatcatccggataaaggtggagaccccgagaagtttaaggaactggctcatgcttatgaagtacttagtgacccagagaagagagaaatatatgatcaatatggtgaagatgctcttaaagagggaatgggaggaggcggttcttctcacaacccatttgacatatttgagtcatttttcggtggtggagcc

SEQ ID NO: 4163 - DNA, 225 bp, Gossypium hirsutum
  Clone ID: LIB3148-011-Q1-K1-D10
atggtcagaaaattacatttgagggactaagcttatgaggctccagatacaataactggagagggtgtttttgtattggaacaaaataaacaccccaaatttgataggagatttggggacgaactttatgttttccacaaaacttaattttgtctagaaggctttatttggtgtttaaaattttctcttatcttttcctttttattttctttcttatttttatat

SEQ ID NO: 4164 - DNA, 784 bp, Gossypium hirsutum
  Clone ID: GOSHI-09MAY01-C551_10
gcatctagctaaagttacagggatgcttgttgagatggatcaaactgagggtgcggatggggttcaactacctgaagctctattagcagacgacgctgaatcattggaggttactagaactgagggtcatctgcaggaacatgatggtgctgccgctgatcaactgactgaattggcatttagtgacaaccttggctattgcgctataactgtatggtagagtttggtacttgaacaccatctgacccaggactttgatgctatagaatcaattgctatgtgagaagctgcggctgactctgtacttctacagagtgttgtggaacgtcaagaccgtctgacacatggctttcatgctttataattaattgctatgtgattgagttatgcatggcatgcatcacacgatatctctgggattgaatcgattgcttctcttttgagtgaataatcttgcagatgcatttagcttacggagatttactatgtttttcattgctttaggaagcagattctatcccctagagagctgtattttgttttggttttggttttttttttaatggaaaggagctgtgattagaaaggttgtattgcatttttgctggagattgtatgcattctctaaacgaatgaaacctattgggcattagagcagacaaaaaaaaaaaaaaaaaaaaaaaaaaaaagaaaaaaaaaaaaaaaaaaaaaaaaaaaaaaaaaaaaaaaaaaaagtaaaaaaaaaataaaaaaagaaaataagtaattgaaataatggaaaatt

SEQ ID NO: 4165 - DNA, 725 bp, Gossypium hirsutum
  Clone ID: GOSHI-09MAY01-C551_7
cccacgcgtccgcccacgcgtccggtcttcgtaaaagtggtgcagggaatatattcatcaagaatttagacaagggaatcgaccaaaaagctttgcatgatacgttttctgcatttggaaacattctctcttgcaagctagccacagattcttccggccagtcaaaaggttacgggtttgtacaatttgacaacgaagaatctgcccaaaaagcaattgagaagttgaatggtatgctattgaatgataagcaagtctatgtgggcccttttgttcgcaagcaagaaagagatacttctactagcaagacaaaatttaacaatgtctacgtaaagaatctctcggaatcaactaccgatgaagacttgaatcaaacttttggtgaatttggtcagatcactagtgctgtggtaatgagggatgctgatgggaaatccaagggctttgggtttatcaacttcgagaatgcagatgatgctgctagagccgttgagtccctcaatggaaagaaatttgatggtaaggagtggtttgtcgggaaagctcaaaaaaaaatctgaaaggggggctgaactgaaacatcgatttgagcagacaatgaaagaggcagcggataaatttcaaggagcgaacttgtatgtcaagaatttggatgatagcataagtgacgaaaagcttaaagagctattctctcaatatggtaccataacatcatgcaaggttat

SEQ ID NO: 4166 - DNA, 716 bp, Gossypium hirsutum
  Clone ID: GOSHI-09MAY01-C551_6
caaaaatctctctttttcttcttcatttttcaacatcaccttctcaagcgccgccgccgcctactcttccgccggcgggaaatatccattcccttttctttcccttccctctcctcccttttattaaaaaaagaagaaaaaaaagtcaccaaaacaaaacaaagtttggttctttaggaaaggtttttttcaaaagcacttgagattttaccatatcatttattatcacaattattttactcgttagggtttgtttgattaataacaagaggagagggaagaaagaagaaaaaaacccaaaaaaaagaaagagaaggaaagagaaaaaagagtttttttggttgggtttttagctgttgttttagggtttacaaagatggcgcatgttcaagttcagggacaaagtgggggcgttaacaatggatctggtggagccaataaccagtttgtaacctcgctatatgttggggatctggatccaagtgtgaccgagactcagctttatgagtactttaaccatattggtcagctgcttacggttcggttatgcaccgatttgtcgacccggaggtcccttggttatggttatgtcaactatggcaatccccaagatgctgcaagggcattggaacttctgaatttcactcctctgaatggaaagcctatccggattatgtattccaacccgcgaccccagtcttcgtaaaagtgggtgc

SEQ ID NO: 4167 - DNA, 488 bp, Gossypium hirsutum
  Clone ID: GOSHI-09MAY01-C551_5
ctctaatacacccactgtaaaaaaaagagagaaatctgatcagacggtgaaaatgggtagccttgaaacgtgagagaacaaccacaggatgggctgccggagatccttcaggagtattgtctccttacacttacactcttaggaacactggtcctgaggatgttttcgttaaggttatgtgctgtggaatctgccacactgatcttcatcaagccaaaaatgatcttggcatgtcaaactacccaatggttcctgggcatgaagtggttggtgaggtgttggaagttgggtcagatgtaagcaagttcagagttggtgatattggtggtgttggttgtcttgttggatgttgcagaaactgccggccgtgcgacttataccttggacctttccggtgttttcaagattctgtccttacaatggatgttatacacttgactgtcaaaactaactcctagtggggtatttggatgtgttcctatgtattt

SEQ ID NO: 4168 - DNA, 1620 bp, Gossypium hirsutum
  Clone ID: GOSHI-09MAY01-C551_4
cccactcgtccgggcaaaaacaaactaaatgttgaggtagcttgatcaggaacctaatctgagcagccaatgaaggtagcatgagataaaggggaaggagcaacacttgaatctgatcgttttcagatgacagcatgagtgatgaaaaacttaaagaagctattctctcaatatgggtccataacgtcatgcaacgctatgcgagatcctcgtgggataagcaaaggatcagggtttgctgcattttcaactccagaagaagcatcaagagctcttgcaggagatgaatggcaaaatggttgtcagcaaacctctctatggtgcaccagctcacacgatggaagataggagagccaggttacaggctcaatggtctcaaatgcgatccagctacaatgtcaccttcagctgctcctcgtatgccaatgtacccacctggtggtccaggtcttgggcagcaaatattttatggtcaagcacctacggcaatgtttccgcagcctggatttgggtatcaacagcagctcatccctggtatgaggcctggtggagctcccatgccaaatttctttgtaccaatggttcaacaaggccaacagggtcagcgtcccggtggcagaagggctggggctggtcagcaaagtcagcaaccagttccattaatgcagcagcagatgctaccgcgagggcgggtctatcgctatccaccagggcgtggtctacctgatgtttcaatgcctaacattgctggaggcatgctttctgttccatatgatatgggtggcatgccaatgcgtgatgcgtcaatttctcagccaattccgataggagccttggcctcagccctagcaaatgctacaccagatcagcagagaacgatgctgggagagaatctttatcccctagttgaacagctggagcctgatgcagcagctaaagttacagggatgcttctggagatggatcagaccgaggttttgcatttgctcgagtcaccagaagctctaaaagcaaaggttgctgaagcaatggaggttcttagaactgtggctcagcagcagcaaactggtggtgctgccgctgatcaactggcttcattgtcattaagtgacaaccttgtctcctgagttttaactgcctgctagagttttctccttgaacaccatcgtagcgtggcctttgtttagattgaatcagttgcttcgtttgaagctggttatgactctatacttctacagagtgttttggaacttcaataccgtctgacacaagactttcatgctttataattaattgctatgtgattgagttatgcatttcatgcatcacacgatatcttcgggatcgaattgattgtttctcttttgagtgaataatcttgcagatgcatttagcttacggagatttactatgtttttcattgctttaggaagcagattctatcccctagagagctgtattttgttttggttttggttttttttttaatggaaaggagctgtgatttgaaaaaaatgaaactgaagagaaagaaccaaaaaaacaaaagaccaaaaatttaaaaaaaaaaaaaaaaaaaaggaaaaaaaaaaaaaaaaaaaaaaaataaaactctttttt

SEQ ID NO: 4169 - DNA, 2600 bp, Gossypium hirsutum
  Clone ID: GOSHI-09MAY01-C551_2
caaaaatctctctttttcttcttcattttccaacatcaccttctcacgcgccgccgccgcctactcttccgccggcgggaaatatccattcccttttctttcccttccctctcctcccttttattaaaaaaaaagaaggaaaaaaggtcacctaaacaaaacaaagtttgcttctttaggaaaggtttttttcaaaagcacttgagattttaccatatcatttactatcacaattattttactcgttagggtttgtttgattaataacaagaggagagggaagaaagaagaaaaaaaccccaaaaaaaagaaagagaaggaaagagaaaaaagagtttttttgggtgggtttttagctgttggtttaggggtttccaagatggcgcatgttcaagttcagggacaaagcgggcgccccgcctccgccccgcgtccgccccgcgtccggtttgtaacctcgctatatgttggggatctggatccaagtgtgaccgagactcagctttatgagtactttaaccatattggtcagctgcttacggttcggttatgcaccgatttgtcgacccggaggtcccttggttacggttatgtcaactatggcaatccccaagatgctgcaagggcattggaacttctgaatttcactcctctgaatggaaagcctatccggattatgtattccaacccgcgaccccagtcttcgtaaaagtggtgcagggaatatattcatcaagaatttagacaagggaatcgaccaaaaagctttgcatgatacgttttctgtatttggaaacattctctcttgcaagctagccacagattcttccggccagtcaaaaggttacgggtttgtacaatttgacaatgaagaatctgcccaaaaagcaattgagaagttgaatggtatgctattgaatgataagcaagtctatgtgggcccctttgttcgcaagcaggaaagagacacttctgccagcaacgctaaatttaacaacgtctatgtaaagaatctctcagaatccacaagtgacggccgcgtgggcccccgcgtccgcgaatttggtcggatcactagtgctgtggtaatgagggatgctgatgggaaatccaagggctttgggtttatcaacttcgagaacgcagatgacgctgctagagccgttgagtccctcaatggaaagaaatttgatgataaggagtggtttgtcgggaaagctcaaaaaaaatctgaaagggaggctgaactgaaacatcgatttgagcagacaatgaaagaggcagcagataaatttcaaggagcaaacttgtatgtcaagaatttggatgatagcataagtgacgaaaagcttaaagagctattctctcaatatggtaccataacatcatgcaaggttatgcgggaccctagtggaataagtaaaggatcagggtttgttgcgttttcaaccccagaagaagcttctagagctcttgcagagatgaatggcaaaatggttgtcaacaaacctctctatgttgcacaagctcaaaggaaggaagataggagagccaggttgcaggctcagttttctcaaatgcgaccacttacaatggcaccttctgttgcaccacgaatgccaatgtacccacctggtggtccaggtcttggacagcaaatattctatggtcaagcacctccgattttcccccctcagcctggatttggatatcagcagcagcttgttccgggtatgaggcctggcagtgctccaatgccaaatttcttcgtaccaatggttcagcaaggccaacagggtcagcgtcccggtgggagaagggctggagctgttcagcaaaatcagcaaccagttccattaatgcagcagcagatgctaccccgagggcgggtctatcgctatccagtggggcgtggtctacctgaagtttcgatgcctaatgttccaggaggcatgctttctgttccatatgatatgggcagcatgccaatgcgtgatgcaccactttctcaaccaattccaattggagctttggcctcagcacttgcaaatgctactccagaacagcaaagaacgatgctgggggagaatctctatccactcgttgagcagctggaacccgatgcagcagccaaagtaacagggatgcttctggagatggaccagacggaggttttacacttgctcgagtcaccagaagctctaaaagccaaagttgcagaagcaatggaggttctgaggactgtagcacagcaacagcagcaagctggtggagctgctgatcagctggcttcattgtctttaaatgacaaccttgtttcatgagttggtagtagtgttggcctttaatgtgctgaaaatgagtttgattggttagaaggatgatagctgggttcttttttattgattcagtactgttttggaacttgaaaaatactgtcactgttatggggttatagttgtgactgaacttggtttttcactgttcatttttatcttttttggatttggaatttttattgtgtgccttttgggtgaaaatttttgcagattcattggcttttttgagattatgattaattttgtttttttttggttttt

SEQ ID NO: 4170 - DNA, 1432 bp, Gossypium hirsutum
  Clone ID: GOSHI-09MAY01-C551_1
cccacgcgtccgcccacgcgtccgcccacgcgtccgcccccgccaagtctcttctctaatacacccactgtaaaaaaaaagagagaaatttgatcagacggtgaaaatgggtggccttgaaactgagagaacaacaacaggatgggctgccagagatccttcaggagtattgtctccttacacttacactcttaggagcactggtcctgaggatgttttcgttaaggttatgtgctgtggaatctgccacaccgatcttcatcaagccaaaaatgatcttggcatgtcaaactacccaatggttcctgggcatgaagtggttggtgaggtgttggaagttgggtcagatgtaagcaagttcagagttggtgatattgttggcgttggttgtattgttgggtgttgcagaaactgccgaccatgcgactcagacaatgaacaatactgtcttaagaagatctggtcgtacaatgatgtttacactgacggaaaacccacccaaggtggctttgctggttccatggtcgttgatcaaaagtttgtggtgaatatcccagaaggaatggcaccagaacaggtggccccgctgttatgtgcaggggtgacagtttacagcccattgaatcactttggtttaatggggagtgggttaaggggaggaatattgggacttggaggtgtagggcacatgggggtgaagatagccaaagcaatggggcatcacgtaacagttataagctcatctgataagaaaaaagtggaggctttggagcatcttggtgctgatgactacttagtcagctccgacgctgaagggatgcaaaaggctgctgattcacttgattatatcatcgacactgtgcctgtttttcacccacttgagccttacctttcattgttgaaactcgacggcaagttaatcttgactggtgttattaacacccctcttcagtttgtttcccccatggtcatgcttgggagaaagtcgattacagggagttttattgggagcatgaaggaaacagaggaaatgcttaacttctgtaaagagaaaaatttgacctcaatgattgaggtggtgaagatggattatatcaacacagcaatggagaggctggagaagaacgatgttcgatacagattcgtcgtggatgttgctggaagcaagcttgatcaatagagccaaattaaatacaaacacaaactctctttaatcaacaaagaaatactacatgtttaaacatatgcctgtttgtcgttgctctgttttctctcttgtgttcaacatgccccctggtaataaactaaaacatatatgtacgagttacttcttcttctgttatttctgttttccttttgaagatggaaatgcataaattatagagcttgttttcttataaattgatgatgaaccaagtcttttttttttttc

SEQ ID NO: 4171 - DNA, 570 bp, Gossypium hirsutum
  Clone ID: LIB3582-013-P1-K1-E8
cccacgcgtccgcccacgcgtccgcccacgcgtccgaaaaaaagagagaaatttgatcagacggtgaaaatgggtggccttgaaactgagagaacaacaacaggatgggctgccagagatccttcaggagtattgtctccttacacttacactcttaggagcactggtcctgaggatgttttcgttaaggttatgtgctgtggaatctgccacaccgatcttcatcaagccaaaaatgatcttggcatgtcaaactacccaatggctcctgggcatgaagtggttggtgaggtgttggaagttgggtcagatgtaagcaagttcagagttggtgatattgttggcgttggttgtattgttgggtgttgcagaaactgccgaccatgcgactcagacaatgaacaatactgtcttaagaagatctggtcgtacaatgatgtttacactgacggaaaacccacccaaagtggctttgctggttccatggtcgttgatcaaaagtttgtggtgaatatcccaaaaagaatggcaccagaacaggtggccccgcttgtatgtgcaggggtgaca

SEQ ID NO: 4172 - DNA, 407 bp, Gossypium hirsutum
  Clone ID: LIB3048-008-Q1-L1-E7
gtggaatctgccacaccgatcttcatcaagccaaaggtgatcttggcatgtcaaactacccaatggttcctgggtactactagaactgttttctttatgtttcctagcctgtttctttatcttcatgttcatgaatcaatgaatttcttttggacatttttggattgtgaatttattactttttccaggcatgaagtggttggtgaggtgttggaagttgggtcagatgtaagcaagttcagagttggtgatattgttggcgttggttgtattgttgggtgttgcagaaactgccgaccatgcgactcagacaatgaacaatactgtcttaagaagatctggtcgtacaatgatgtttacactgacggaaaacccacccaaggtggctttgctggttccatggtcgt

SEQ ID NO: 4173 - DNA, 397 bp, Gossypium hirsutum
  Clone ID: LIB3166-014-P1-K1-C12
ctctaatacacccactgtaaaaaaaagagagaaatctgatcagacggtgaaaatgggtggccttgaaactgagagaacaaccacaggatgggctgccagagatccttcaggagtattgtctccttacacttacactcttaggtattctctaattttgctgttttgttttttaattttgttcaaggttcatttctggttcgtacatggtgatttgctgtaataataatcgtgtttgcaggaacactggtcctgaggatgttttcgttaaggttatgtgctgtggaatctgccacactgatcttcatcaagccaaaaatgatcttggcatgtcaaactacccaatggttcctgggcatgaagtggttggtgaggtgttggaagttgggtcagatgtaag

SEQ ID NO: 4174 - DNA, 350 bp, Gossypium hirsutum
  Clone ID: uC-gsronu33B098a02b1
gaaaattttgacctcaatgattgaggtggtgaagatggatgatatttacacagcaatggagaggctggagaagaacgatgttcgatacagattcgtcgtggatgttgctggaagcaagcttgatcaatagagccaaattaaatacaaacacaaactctctttaatcaacaaagaaatactacatgtttaaacatatgcctgtttgttgttgctctgttttctctcttgtgttcaacatgccttatggtaataaactaaaacatatatgtacgagtgtaaagattacttaaggtactattaattattagataggatgaaaaatatatataaaagagaaatatattaatatg

SEQ ID NO: 4175 - DNA, 490 bp, Gossypium hirsutum
  Clone ID: LIB3830-001-Q1-K6-F1
cggaccggcactcccgggatcgcccagcgtccggtgcttggatctgaacttcaattcgagcagtcgaatgaaagtaggcagcaagagataagtttctaagggagcaaaacattgtatgtgtaagcaatggggatgacagcataagtgatgcaaaaacttgaaagagctatgtctctcaatatggtaccatgacgtcatacaaggttatgcgagatccaagtgggataagtaaaggatcagggtttgttgcattgtcaactacagaagaagcatcaagagctcttgcagagatgaatggcgaaatggtagacagcaaacctctctgtggtgcaccagctcaaaggcaaggaagataggagagccaggagacaggctcaatctagtgaaatgcgaccagttacaatgtaaccttaagggggtcctctaatgccaatgtacccacctgggggtacatgtcttgtgcaggaaatattttatggacaagcaccta

SEQ ID NO: 4176 - DNA, 536 bp, Gossypium hirsutum
  Clone ID: LIB3584-038-P1-K1-D5
tcgcccagcctccgaagttggcctctaacactaacactctaggaacactgttcctgggatgtttacttaagggatgtgctgtggaatctgccacactgatcttcatcaagccaaaaatgatcttggcatgtcaaactacccaatggttcctgggcatgaagtggttggtgaggtgttggaagttgggtcatatgtaagcaggttcagagctgttgatatagggggtgcaaagagggcgcatgtacaagttcagggacaacgtgcatgcgactacaacggatctgagggcgccattaaccagatcgtaacctccctatatgttggcgcttgggatccacgtgtgaccgagacttagctttatgagcactttaaccatattggccagctgcttacgggtcggttatgcaccgatttgtcgacccggaggtcccttggttatggttatgtcaactatggcaatccccaggatgctgcaggggcattggtacttctgaatttcactcctctgagtggaaaggctatccggattatgtttt

SEQ ID NO: 4177 - DNA, 344 bp, Gossypium hirsutum
  Clone ID: LIB3083-060-Q1-L1-F3
catttttggaacttttcacccaagctcaatgacacgggcgaacaatgcgcttatacagcacacccagttaccaacccattccattaataccacacagatgctaccactagggcaggtctatcgctatccaccaaggcgtggtctacctgatgtttcaatgcctaacattgctggaggcatgctttctgttccatatgatatgggtggcatgccaatgcgtgatgcatcaaatttctaacccaattccaatagaacccttgccttaaccctaacaaaatctacacccaatcaacagaaaaccaatcttggaaaaaaactttattctctaattgaacaacttgaac

SEQ ID NO: 4178 - DNA, 597 bp, Gossypium hirsutum
  Clone ID: LIB3825-015-Q1-K6-G9
ctgcttactagtgctggggtgatgagaaaaaccggaatgggaacaatccaaggagctgtgtgggtattgtacaacttttaagtaacgacagatgatcgctgtctagtggcttgtggtagttctcttgaatgcgaatagaaatttgtatgactaaggtagtggtcttgttggtgaaagcgcaaaagaaactgaaaggagcttgatctgaaacttcgatttgagcagtcaatgaaagaggcagcagataagttctaaggagcaaacttgtatgttaagaatttggatgacagcataagtgatgaaaaacttaaagagctattctctcaatatggtatcataacgtcatgcaaggttatgcgagatactagtgggataagcaaaggatcagggtttgttgcattttcaactccagaagaagcatcaagagctgtaagttgataatgctgtccctactcgtgatcttattatcagctaataagctctgctttgctctttttgacagcttgcaaacatgaatggcaaaatggttgtcagcaaacctctctatggtgcactagctcaaaggaaggaacataggagagccaggttacaggctca

SEQ ID NO: 4179 - DNA, 407 bp, Gossypium hirsutum
  Clone ID: LIB3828-018-Q1-N6-D9
tttttttttttttttttttttttttttttttttttttagctaatagtaagcagttgaccaatatggttaaagtactcataaagctgagtctcggtcacacttggatccagatccccaacatatagcgaggttacaaactggttattggctccaccagatccattgttaacgcccccactttgtccctgaacttgaacatgcgccatttttgtaaaccctaaaacaacagctaaaaacccaaccaaaaaaactcttttttctctttccttctctttcttttttttgggtttttttcttctttcttccctctcctcttgttattaatcaaacaaaccctaacgagtaaaataattgggataataaatgatatgggaaaatctcaagtgcttttgaaaaaaacctttcct

SEQ ID NO: 4180 - DNA, 375 bp, Gossypium hirsutum
  Clone ID: LIB3083-060-Q1-L1-F7
tttctttgtaccaatggttcaacaaggccaacagggtcagcgtcccggtggtagaagggctggtgctggtcagcaaaggcagcaaccagttccattaatgcagcatccgatgctaccgctagggcaggtctatcgctatacaccaaggcgtggtctacctgatgtttcaatgcctaacattgctggaggcatgctttctgttacatatgacatgggtggcatgccaatgcgtgatgcattaatttctcaaccaatccccataagagccttggtcataaccctaaccaaagcttcacccgaatatctcaagaccgatcttggagaacatctttaatcttaaatttaacaagtgggcccctattcctcaacttaaat

SEQ ID NO: 4181 - DNA, 784 bp, Gossypium hirsutum
  Clone ID: GOSHI-09MAY01-C561_1
gagaatagagaaatggtggagggaggaaaaacgccacgaggctatggtactgccggatgtgggaacttcatttgcagatagcatctcagaagagatttgtaattctgcagccaagatggctaacaatttagaggtagatgccctttttgtttacacaaagacaggtcacatggcatctctcctgtcacgttgtcgaccagattgccccatctttgcttttacgaccacaacttctgtcaggagacgtctgaacctacaatggggtctcattccgttccgtctcggcttctccgacgatatggaaagcacccttaacaaacccttctcgttactcaaggccaggggaatgatcaaatctggcgacctcgtaattgccgtctcagacatgttgcagtccatccaagtcatgaatgttccctagaaacaacacagtatgatgcaaattatgttcgttttcgaatcctgcttgtagactcacttgtgtattgaactcgctgtatctttcgcaatctattcggctttgattaatgttaggatgaaaatgactaccaccggaaaacagaggagctcggctcagccaatcttgcggtcacagtttcactcaacaaaggtaaatcagttgaatcattttgtgaccccctaaattatttgaaatttcgacttctaatttgagagacataaacgaccttttttctttactatgtattgtgctgtatgaggttcctagaaatgaagaataatgtgtggggtgttttttttttcttctaaaaaaaaaaaacaaaaa

SEQ ID NO: 4182 - DNA, 888 bp, Gossypium hirsutum
  Clone ID: GOSHI-09MAY01-C511_1
caagtttatcagccatgccgccaccaatgctccgccttatctctaccacctccgtgtccaccgtggctggcctcccgccaatccttacgaagcctcccatttcaaatcaaaacctttccatcacccccagtgaagagaatcgacagaaagtgctccgccttatctctcgcagagacgctgcttttctctccttaatctccctctttccttccctactccatacccctcatgcttctgccttctccattggaatttcaggaccaaaggattggcttaaagagcaaaagaggaagtcttcgaaattcctattggcaccaatcgatgcttctcgacaaagccttcgctctgtttatcttttgctcatggacaaggaatcaactatttcgaatactgatttagaggaagtgcaaaagctcttgaaatctgccgctagggattgtgttgtacaggagaggaattcctttgttgcatttcaagccaacaccggagtcgaggtttgcacatttcgtttgattgtgaaaaatgcttcttctttgcttgagaataagaatcctgttaagctggaagctgaagctatgctagatgatcttataagctcatttacctcgcttaatactttggcaaatgaaagtgatatccaagttgcttccagtagacacagggttgcagatgcactgaaggataccataacttcgcttgacaaatttgagcaggcggttaaggactgcctggaagtatgacaatggtggcttggcttcctttagcaactataaatttatggtgagagatggcagatgcttttgtagtttggacttggtggagacttgaagattggaaaagtacataaagcatgttggttgacctttatctttggtggaaaattttggt

SEQ ID NO: 4183 - DNA, 646 bp, Gossypium hirsutum
  Clone ID: GOSHI-09MAY01-C501_1
cccacgcgtccgtgggtttttcttttggtagaaatattattggtttcatcatgcattggcgtgttaattgttcttgctggcgttaattttagctttttgttgtggataaagaatgaagagtagttaggatttttgtcgtctgtttatgccttgcatatgggtcttgcttcttccactcccaaggctgcgcctgacattacagcaagcaaagaaaaaatgaccagtgccaaagataataaggttgaagaggtaaaggaaagtgaagaaatatctaaagcctttgcagcggttgccggagtccgaaaagaagtagacaagctctctgaaagagttgctgcattagaagtggctgtgaacagtgggacgaaggtaaccgatgaggaatttgttgtaccggcggagttgcttatgagagagttgctgaaattggatgggatcgaggctgaaggagaagcgaggttacagcgggaggctgaggtacgtcgcatccagaagtaccacgagatactcgacaaattaaagacaagaaattcggatccttttagcgacaaacacaaagctgtgtcggtgacaacgaattgggagacattcgactcggggatggtaagcttaactgctcctccaactatgtcatcttcaacaaaca

SEQ ID NO: 4184 - DNA, 1923 bp, Gossypium hirsutum
  Clone ID: GOSHI-09MAY01-C531_1
cccggtcgtccacgcgtccggaacgtggctagtgttatgtgttcttacaacaaggttaatggtaagccaacttgcgcggaccctgatcttcttgctggggttattcgaggccaatggaaactaaatgggtatatagtttcagatggtgacttcggtagacgtgttgttcaagaaccagcactataccaagacaccagaggaagcagcagccaaagttattttggcagggttggatctgaactgtgggtcatttcttgggcaacacactgaggctgcagtaaaagcagggcttttgaatgaatcggccattgacaaggccgtgacgaacaacttcgccactttaatgcgactgggattcttcgatggtgatcccagcaagcaaccttacggtaaacttggccccaaagatgtatgtacacgagagcaccaagaattggcccgtgaagctgcaagacaagggattgtgttgctcaaaaacagccccgggtcgttgcctctatctccgactgcaatcaaaaccttagccgtaattggacccaacgccaatgtcacaaaaaccatgatcggaaactatgaaggcattccatgcaaatatacgacgccattgcagggtttaacgacctcggtggcaacaaactacgtgcctggctgcaccaatgtggcttgtggcactgcccaagtagacgatgctaaaaaagtagctgcctcagctgatgcaactgtacttgttatgggcatagatcagagtcaagaaagggaaagctttgacagagttagccttcttttaccaggacaacaaccacttttaataactgaagttgcaaaagctgcaaagggacccgtgattctcgtcataatgtccggtggaggctttgacatatcgtttgcgaaaaacgatgataaaatcacaagcatcctttgggttggttaccccggcgaagccggtggagccgccattgccgatgtgatatttgggtattataatccaagtggaaggctaccaatgacatggtacccacaatcgtatgtcgataaggtcccgatgacaaacatgaacatgagacccgatccttctaatggttacccaggcagaacctacaggttctacacaggggaaaccatttatacatttggagatgggctaagctactccaaaatcacccacgaattagccaaagcacctcgattagtatcaatcccattggaggaagaccatgtttgccgctcatctgaatgtaaatcagttgaagccgtcgaacaaagttgtaaaaacctagcattcgacattcatgtgagagttcaaaacagagggaaatacggcggaagccacacggtgttcttgttttcgagtcccccatcagtgcacaactcgccccaaaagcatttgttgggatttgagaaagtttcattaacagggaaatcagagacattggtgaggtttaaggtggatgtttgtaaggatttgagtgtggttgatgaacttggaagccgaaaagtagcattgggacaacatttgctgcatgtggggagcttgaaacactcattaactgtggggatttgaaaagaaggtttttcaaaatcctctgtgattttgatttatttttatctttttaattatccttttgtgatatttgcccaaggcaagtaagggaatggcaaatagagcctggaataattgcgagagagttatagtgattttctctggtttttaattttttaaccaattgttgaaatttgaacatttcgaaattgcaaaaggacaaaaagaaagcattcacttccttgttgcctgggtgatactcgcgtctccctcgtttggttgtcctgatattcgcctattgtattatttaacgcataactaattatgtgcgcatgcaaaaaataagttttagcttattataaataatgattaaaatttcttct

SEQ ID NO: 4185 - DNA, 625 bp, Gossypium hirsutum
  Clone ID: GOSHI-09MAY01-C481_1
caatgaggtccaaaataatgaagacagaacatcaacctcctctggggatattaactcatgtttgatggtatctgaggttgacttttccttagaagggggtgaaacaactgtggtgcaactaactgttactccaagaatagaaggcattctgaaaattgttggtgtgaaatggaaattgtcaagtgcagtggtgggtttatgtaattttgagtttaaccctgtgaacagagttgtcaggggaagaaggaaacagcattctcctagcagtgacttgaagtttctagtgattaagagtctacccagacttcagggttttattcattctttaccagaaaaaacctatgcgggagacttatggcctcttgtgttggaactaagtaaccaatcaaaatctcctgtcaagaacctaaagatgaagatcagctatcctagatttctatatgctgggaaccgagaggagttgaatgcagactttcctgcatgcttaaaaaagaagatgaatgttgagaaaagcggcaggcatgctaatgttaataaaacattgcagaatttgtttcactttcccgaggacatatccttgcatgatgaaacattattttttatgtgcatctttgttatcacacta

SEQ ID NO: 4186 - DNA, 754 bp, Gossypium hirsutum
  Clone ID: GOSHI-09MAY01-C451_1
cccacgcgtccgcggacgcgtgggcaagttgtcctaagcttacgcggcaaagccgctgacggttcattgtcttttcggccatcacagacggtccacttctacaatataaacagttcccatttcacaatattaattactagacggtagaccagccctgcttgactcctgctaatcaaagccaaaacccttgacctgttgtttccagctcacattccggcgatggatctccgtgaatcgatcactagccaaaccgacgtcgctttgaccctgaccaaaaacgttctccaaactgaagccaaggactcgaacctactgttctcgcccctgtcgatccatgttgtgctcagcttgatcgccgctggtgctaagggtccaaccctcgaccagctcctctctttcctcaagttcaaatccaacgaccagctcagctccttctcctccgagcttgtttccgttgtcttcgcggatggaagtccagccggtggtccccggttgtcatttgctaacggcgtttggtttgaccggtctctccctctcaagccttctttcaaacaggttctggacaacgtctacaaggctgcttctaagctagtcgattttcaaaacaaggcggttcaagcggcgggtgaagtaaatatgtgggcggaggaagagacaatggtcttattaaagaagttcttcctcccggatcagttgatgcttcaaccagacttatatttgctaatgcgctctatttcaaaggagcttggaatgc

SEQ ID NO: 4187 - DNA, 396 bp, Gossypium hirsutum
  Clone ID: LIB3493-002-P1-M1-A4
tcagggcgcataccctcgctcggttgaattttttcattaagacataaagagcactgcacataaattacattgcgtgagcattcgtatgcaccatcttaatgcttggaagtacataaacaggtgcatggctgttattcgctcaaggtgtgaggctagtgcgcgctgtccgtctaaagccttctatgaaacaggttgtagacaacgtctacaacgctgcttgtaaactagttgattttcaaaacacggctgttgaagcgcgccgtgaagtaaatatgtgggcacgagaaagagaccaatggtcttattaaagaagatcttcctccaggatcagctgatgctttaaccagacttatatttgctaatgcactctatttcaaaggagcttggaatgaagca

SEQ ID NO: 4188 - DNA, 682 bp, Gossypium hirsutum
  Clone ID: GOSHI-09MAY01-C441_2
gttctttcaagtttctctggtttttcctggtcaaaaaaggggaaaaagacttcttttttcctagttaatatggcggaagctcctacccagacccaacaacctcgtcctgtagtttacgttgttttccagatcggtggcgttggagccgtcagcgataataaacctgggccggcgccggcttctaaagcttccatagaagcaatgcaaaggatagaagtggaagagagtggcaaagattgttgtatttgtttggaagagtttgaagttgaagaagaagcaagggagatgccatgtaagcatgtgtttcattcgggttgtattgagaagtggttgttgatccatgggttatgcccggtttgtcgcttcatgatgccgcctgagacggctgaaatagaaggtggtgagggtgatggtggccggcgaagaatggagggtggagagatcaatggtttggaattttcacaatcggtttttgcatttgctagcttggctagcatgatgggtatgatgggttcgggtcgggcttcccgtcaacctaattccggtcgagttgatgatgatacgccttcccatcaaaacacagattgcaattgacaccaatttttgttctgagttgtaactaaagaaatattatttgttttaaaccaactaaattggaaataagtaaaaaaaagtatttatt

SEQ ID NO: 4189 - DNA, 692 bp, Gossypium hirsutum
  Clone ID: GOSHI-09MAY01-C441_1
ctttcttcttcttagagattctttaagcttctctgattttcctagtatggcggaagctcctaccccgacccaacagcctcgtcctgtcgtttacgtagttttccagatcggcggcgtaggagtcctcagcgaaaataaacttaggccggcgccagcttccaaagcttccatagaagcaatgccgaggataaaagtgaaagagagtggcaaagattgttgtatttgtttggaagattttgaagttgaagaagaaggaagggagatgccatgtaagcatgtgtttcattcgggttgtattgagaagtggttgttgatccatgggttatgcccggtttgtcgattcttgatgctgcctgagacggctgaaataggaggtggtgagggtaatggtggccggcgaagaattgagggtggggagatcaatggtttggaatttttgcagtcggtttttgcttttgctagcttggctagcatgatgggttcgggtcgggctttccgtcaacctgattcgggtcaagttgatgatgatgtgtattccaattgcaacacggatgatacgccttccaatcaaaacacggatagcaattgacacatacttttctctgaatcgtacctaaagaaatattttttaaccgactaaattgtcaataagtaaaaagaatttattcaataatttatttactgactttctt

SEQ ID NO: 4190 - DNA, 1592 bp, Gossypium hirsutum
  Clone ID: GOSHI-09MAY01-C471_1
tattttgattctcatggaagctttgattgttgggtattttaggttttgtttatttttcttgttatgtctattgttggatgggaactgagagtaagaaagaaactgtgtgaaagaagaacaaaaatggtggagaagttaagacaggacagtggttgttggtttcatgttgtaaactattacaactttgtacaatttggtcttgttttaaacaaggcagtttgagtttcaatcttagttgaatctcttttaacaacaacatccattgaaaatcttttaaagaaaaaaaaaagattgttgatttcatcattaagttcatcatcaaccatgaagagacttggcagctcagattcattgagtgctttgatgtcaatctgcccaacttcagatgaacgtagtccaagaaacaacaatgtttacagtcgagagtttcagtcgatgttagaaggattcgatgaagaaggttgttttgaagaattaacagtcggccatggcgggggtgccaagaagagacgattaagtgtggatcaagtgaaggcattggagaagaattttgaagttgaaaacaaactcgaacccgacagaaaatcgaaactagctcaagaacttgggttgcagccacgacaagttgctgtctggtttcaaaaccgacgtgctagatggaaaacaaagcaattggaaagagattatggagttcttaagaccagttatgaatctcttaagctcaattatagtaacctccgccatgaaaatgaagatcttctcaaacagattagtgagctgaaggcaaaactcatcgagccgccgccgggttcatctttgggtacctcatcggagccggcggaagtgaactgcgagagcttcaacgacggcggcggcaatggatcagttggtggtggtggcgacaccgttttcccggacttgaaagacggatcatcagatagtgattcgagcgctatcttgaatgaagaaaacaacagcggcggagacatggaggggggcagcccaaacaacggggcggcttcttcaccgtcctccatgaataactgcttccagttgttcaaaacaacgtatcaaaccccgcaatttgtgaagatggaagagcatgatttcatcagtagtactgcagatgaagtctgcaatttcttttcagatgaacaagctccaagtcttcaatggtggatctaatctaaatcaaacatatatgtatgtatgcaattatgggattaaagaaacggaatgcaagagaataaggcaaactctccaagaattttgtccgaagaagaagaagagggagagagaaattaatgggttgaagtggaggcggtagaagttgaattcaatacccaataggtggcgagtggccagtgcggcggtgcacgcggtgggcgaatgattaggtcgtaattggaagcttcttttttttttactgttcttctactgtaaatggaaaaatctccaaaatccatcagaggaaaagtaaagcttttttccttctaatggtgaaaaagctgaaaaaaaaaataaagtagatcatcaacatcatttcccttagaaagttgaaattttagggcagacatttacccgtttctccc

SEQ ID NO: 4191 - DNA, 566 bp, Gossypium hirsutum
  Clone ID: LIB3585-068-P1-K1-B9
agaaaatcgaaactagctcaagaacttgggttgcagccacgacaagttgctgtctggtttcaaaaccgacgtgctagatggaaaacaaagcaattggaaagagattatggagttcttaagaccagttatgaatctcttaagctcaattatagtaacctccgccatgaaaatgaagatcttctcaaacaggtaattattaataacaattattcatttatcttagtaagactgggaatctctttgagtttaatttgtaaagcaacgttgaaggtatgaaaatgatgcagattagtgagctgaaggcaaaactcatcgagccgccgccgggttcatctttgggtacctcattggagccggcggaagtgaactgcgagagcttcaacgacggcggcggcaatggatcagttggtggtggtggcgacaccgttttcccggacttgaaagacggatcatcagatagtgattcgagcgctatcttgaatgaagaaaacaacagcggcggagacatggaggggggcagcccaaacaacggggcagcttcttcaccgtcctccatgaataactgc

SEQ ID NO: 4192 - DNA, 476 bp, Gossypium hirsutum
  Clone ID: LIB3585-068-P1-K1-C1
cccacgcgtccgaccacgcgtccgcggacgcgtgggcggacgcgtgggcggacgcgttggttgactcggggatgggggtctggatggagcagacattcatgctaattagataatgaggttatttagaccaggtatgaatttcataatcatgattatagtaaccttcgccatgaaaatgaagatcttcttaaacaggtaattattaataacaattattcatttatcttagtaagactgggaatctctttgagtataatttgtaaagcaaagttgaaggtatgaaaatgattcagattagagagctgaaggcaaaacttatagagccgccgtctggatcatttttgggtacctcattggagctcgcggaagagaactgtgagagcttcaacgacggcggcggaaatggataagttggtggtggtcattataataatattatgaatattatataatattatattatatatattatgaat

SEQ ID NO: 4193 - DNA, 497 bp, Gossypium hirsutum
  Clone ID: GOSHI-09MAY01-C411_1
ctggaggggcgaagccccctcctctgaggtccaaggcgaattgctaacctttttcggcgggaggggggcttcatgattctgttgtctaagggttgaggttaatgttcctttcgttacatatcctcttcttttagattatggaagaaggctctctgccacgcacttggaagtttttggcttttttgtttggtcttaaaatttagagaggaagaaaaacccttgcttcttttgatctctgatgtggaaaacattggcctttcaactgagagcaattaatcgcttcattctttgtctttttttttatcctaagatttttttgtgtttctgatttgggcattctttagttatttcatcttcgatggttttggcttccaaaaagtgctcccttgatagaataaagcatcttgttttgagaaattgatggaaattgggaaatgatgacagcttaattgctggattgcatctgagcaaagctttgaagattttttttttccctt

SEQ ID NO: 4194 - DNA, 474 bp, Gossypium hirsutum
  Clone ID: GOSHI-09MAY01-C401_1
gcgcccacgcgtccgcccacgcgtccgcccacgcgtccgcgacactccgattctatcatcagagatgtggcacgaagctcggagatcagaaaggagggtccacgacatgatggacgcggctcgaaagagagcacaaagacgggccatattccttgccaaaagacgcggcgaccctcaacaatccattcaagtcgtcggctctcgctgccgtatccaccgtgacgatgctctttatcatgccactcaagatcagcaaggctggattccttggaatggaaaacaagatattttaatcgatagattcgatggccgagctcttcttggttttattcgcgagccagggacacgacattttaggaatcaagagaagtctgaagaggaagaagaagttgaagagtttgttaatttcgagcgttatcgggatttaattaagcatcgccctagagggtttaccgacgaggatggttacaacat

SEQ ID NO: 4195 - DNA, 966 bp, Gossypium hirsutum
  Clone ID: GOSHI-09MAY01-C721_1
ccgaaacagatatgggaaaaccagtgatgaagcttcatttgattattggagttttggctgtttccctggtgaatgctgaagatccatacttgtattacacttggactgtcacttatggcactcgttctattcttggagttccccagcaggttatccttatcaataatcagtttcctgggccaaaacttgatgtggtgactaataacaacattatcttgaatctcattaacaagcttgatcagcctttcttgttgacatggaatggcgtaaagcaaaggaaaaactcatggcaggatggagtgttgggaaccaattgccctatccctccaaactcaaactatacctacaagttccaagccaaggatcagattgggtcctacacatatttcccatcaactctaatgcatagagctgctggaggatttggagcactcaatatataccatagaagtgtgatcccttttccttatgcaaatcctgatggagatttcgcggtacttattggtgactggtgcaagaccagccacaaggcactgcagcaaactttggactctggaaaatctcttccctttccccatggagtccttataaatgggcagactaaaaccacctttactggagaacagggcaaaacttacatgttcagaatctcaaatgttggattgtccacctcactgaacttcaggattcagggccattcgatgaagttggttgaggtcgaaggctctcatgtaattcagaacttatatgactctcttgatgtgcatgtgggacaatccgtgaccgtcttagtaaccttgaatcaaccaccaaaggactactacattgttgcatccacaagatttacaaggaccgttctcactgcaacgcggtgttgcactatgcaactcgcaaaccccagtttcttgaccgctaccagctgctcctgcttacaaatatctattggcaatgcagcaggcaagacat

SEQ ID NO: 4196 - DNA, 650 bp, Gossypium hirsutum
  Clone ID: GOSHI-09MAY01-C681_1
agaattgaaacagaggggggaaggaataaaggagtagagatggggctcaaaaacagagaagaagaagataattgttcagtgaatgaagctttgttgtttgccaccatctccatcattggtctgcaagtagatgtacacttgaaagatggctctgtttactctggaatcttccacactgcttctgttgagaaggaatatggtattgttttgaagaaagcaaaattgactaaacagggcagatgtgccaccaatgttgcgaatggcagtgttgtagagacgcttgtaatccttgctggtgatcttgttcaagtttttgcgaagggagtcccacttcctcttgatggctttgctggaaatttagcctgcggtaatggagaacctgctcctgaaattcccccttcttctgccaattcgctgaatgggaccaagaagttcaataagtctaccatggatgaaagaataagtaatacgaaaagaaattcagctcccaacgagaatggatttgttgatggttttatatccatgggtgctggaaaggaagatgaaggtcaaaagttgctagagaaacctatgggaaatggagaaggagttggatatcacacaagagaggagacaaacatcgagcagagagaagatgtttctggtgccac

SEQ ID NO: 4197 - DNA, 588 bp, Gossypium hirsutum
  Clone ID: LIB3828-018-Q1-K6-B5
gaaaagaaagaataaagagtgagatggggctcaaaaacagagaagaagaagataattgttcagtgaatgaagctttgttgtttgccaccatctccatcattggtctgcaagtagatgtacacttgaaagatggctctgtttactctggaatcttccacactgcttctgttgagaaggaatatgtgttgtagagacgcttgtaatccttgctggtgatcttgttcaagtttttgcgaagggagtcccacttcctcttgatggctttgctggaaatttagcctgcggtaatggagaacctgctcctgaaattcccccttcttctgccaattcgctgaatgggaccaagaagttcaataagtctaccatggatgaaagaataagtaatacgaaaagaaattcagctcccaacgagaatggatttgttgatggttttatatccatgggtgctggaaaggaagatgaaggtcaaaagttgctagagaaacctatgggaaatggagaaggagttgaatatcacaaaagagaggagacaaacatcgagcagagagaagatgtttctggtgccactgttgctaggagacaggttgg

SEQ ID NO: 4198 - DNA, 399 bp, Gossypium hirsutum
  Clone ID: LIB3582-046-P1-K1-G8
ataaaggattacagatggggctcaaaaacagagaagaagaagataattgttcagtgaatgaagcgggggtgtttgccaccgggtccatcattcgtctgcaagtacatgtacacttgaaagatggctctgtttactctggaatcttccacactgcttctgttgagaaggaatatgttattgtttttaagaaagcaaactctactcaaccgcccataccaaccaccactcatcctaattgacgaattgtacacaccctgtaactcctcattaatcaccatgttcgaggtgtttacacgcatcttgaccgttacacttaccagctccctagcgacctctcctttcgctttctttccttcctttcttgacacgtccgcttgcttttccccattcaagctatta

SEQ ID NO: 4199 - DNA, 591 bp, Gossypium hirsutum
  Clone ID: LIB3582-046-P1-K1-C9
cggacgcgtgggttgagcctctgccatgaacggagtagctatatcagaatgattgaccatttgcgatgctaagatctccccctcttcattttgtacaagcaagcctgaagccgatctgaaatgttgttggtcataagctacaccaaaatagactgtaacccttgcttcgcaaacatgctgttgacaaattctattggactgatcaaccagagtccacaatagaaaaaccggatctgttcactagtctcctgttcaaagacccaattgtaggacactggcgaaaaatgtggttactgttctcttcatcttgacgacatcgagggcattgtgcatttactaccactttcttttgcttgatgttcacaagggaaggaataaaattctaagaaattctctaaattgtcaatgttacttttgaggggatttataatttccatagttttttatagaaatttttttatttcggtttgtataaagtaattattaggatccacgctagactcctgtaatggtttatagacgcttctgactgagaactcaccggactgttcacctctccatacttgaaagtcttcatattctatctctgcc

SEQ ID NO: 4200 - DNA, 416 bp, Gossypium hirsutum
  Clone ID: LIB3829-023-Q6-N6-G10
ctataaaaaactatggaaattataaatcccctcaaaagtaacattgacaatttagagaatttcttagaattttattccttcccttgtgaacatcaagcaaaagaaagtggtagtaaatgcacaatgccctcgatgtcgtcaagatgaagagaacagtaaccacatttttcgccagtgtcctacaactgttgagacttggaattacttaaatctgtcttaggtactgaataatgatattcagaatacgtgggagtggcttacttgggtctttgaacaggagactagtgaacagatccggtttttctattgtggactctggttgatcagtccaatagaatttgtcaacagcatgtttgcgaagcaagggttacagtctattttggtgtagcttatgaccaacaacatttcagatcggc

SEQ ID NO: 4201 - DNA, 682 bp, Gossypium hirsutum
  Clone ID: GOSHI-09MAY01-C671_3
atgtttgacatttctttatgacggttcgtgagtccccctttaccgtaactgagtgtatacccatggaaagtccaagattaatcgcatgaagacctgcataagcttctgttgcaaaagaagttgaaatatttgaatttaagaccgttttcgtagcaaggattactctcatatgatctagaaccaccaggcctgccatcgatttgaaatcccttcgattaaaggcagcatcaaagtgaatcgtcatcccaaaactcgttttgatttgaatgcccctcgctgctcccctccaggacccatatgccacagcaaatcaatcgaccttgtttgggagtgctctgttggaaaatccaaacaatacagaaagacatgagatatatcttcctccccagatctacatcgaggacaagcagcagtgtcggctatttgtttagatcgcaaattaactagagtaggcatatagttctatgatgctctccaaactataatagtaatctttgaggggagctgtaaattccagagctttttgtagaaattttttaaatcggtttgtaataatcagtcgttaggattcgagctagtgatttgtaatagtttgtaagcacttctgaccgaaaactcaccagaaagctcacccttccacacctgaaaatcaactcctaggagttccgccagaggaatttgc

SEQ ID NO: 4202 - DNA, 1190 bp, Gossypium hirsutum
  Clone ID: GOSHI-09MAY01-C671_2
ctactctatcttccctccgagcgcacataaaggcggtgtaatacctctccttccaggtgtgttttttctccccttcttagcgcttcttctgcaattttgtgagccaagacgttctcggttctattgataaattggaatctgatttcttgaaaaaactcttgactttttttgaatatcactgagtattgctcctataactgacttccctcgcgtccgcgatgtttgacatttctttatgacggttcgtgagtccccctttaccgtaactgagtgtatacccagggaaagtccaagattaatcgcatgaagacctgcataagcttctgctgcaaaagaagttgaaacatttgaatttaagaccgtcttcgtagcaaggattactcccatctgatcctgaaccaccaggcctgccatcgatttgaaatcccttcggttaaaggcagcatcaaagtgaatcgtcatcccagaactcgtttcgctctgaatggccctcgtagccgtacacaaggtactccttttttctgccagaccatcaatctcggccacatacctttgaacttttgatgctatctctcttcctgactcaacttttctttcatgcatgagcttgtttcttgacccccacaggacccatatgccacagcaaagcaatcgaccttgtttgggagtgctcttttgggacatccaagtaagccagccccagaacctctgaaccaaaaagttattaacccaaggaagatctaacattttccaaacttctattactacatgacagtaccgaaagacatgtgataaatcttcttccccagatctacatcgagaacaaacagcagtgtcgactactcgtttagatcgcaaattaactagagtaggcatatagttccatgatgctcttcaaactgtaatagtaatctttgagggtaactgtaaattccagagctttttgtagaaattttttaaatcggtatgtaataataagttgttaggattcgagctagtgctttgtaatagtttgtaggcacttctgaccgaaaatcaactccttggagttccgctagaaggatttgcaaaatcttttgggcagtgtctgctgggaaggtacttagcactagttcagacttccacatattatttgatgcatcaattaaatctgaaactaattggacttcattattgttttcgtgactctt

SEQ ID NO: 4203 - DNA, 918 bp, Gossypium hirsutum
  Clone ID: GOSHI-09MAY01-C671_1
aatttctttcagaaagtcattctcaatctgggagcctactccatcttccatcggaacgcacataaaggcggtgtagtgcctctccttccaggtgtgtttcttctcccttcttagtgcttcttctgcaattttgtgagccgagatgttctcggttctattaataaattggaacatgatttcttgaaaaaactccgactttttttgaatatcactgatgatttctcctataactaacttatcttgcatcgatgtttgacatttctttatgacggttcgtgaatccccctttaccgtaactgagtgtatacccagggaaagtccaagattaatcgcgtgaagacctgcataagcttctgctgcaaaagaagttgaaacatttgaatttaagaccgtcttcgtaacaagaattactcccatctgatcccgaaccaccaggcctgccatcgatttgaaatcccttcggttaaaagcagcatcaaagtgaatcgtcatcccagaactcgtatcgctctgaatggccctcgtagccgtacacaaggacccatatgccacagcaaagcaatcgaccttgtttgggagtgctcttttggaacatccaaacaataccgaaagacatgagataaatcttcctccccagatctacatcgaggacaagcagcagtgtcggctactcgtttagatcgcaaattaactagagtaggcatatagttccatgatgctctccaaactgtaatagtaatctttgaggggagctgtaaattccagagctttttgtagaaattttttaaatcggtttgtaataatcagtcgttaggattcgagctagtgctttgtaatagtttggtggcacttctgaccgaataaatattttttttttttaatcaattaaataaatcaactccttggagttccgctaga

SEQ ID NO: 4204 - DNA, 420 bp, Gossypium hirsutum
  Clone ID: LIB3146-005-Q1-K1-G7
cggacgcgtgggcggacgcgtgggcggacgcgtgggcggacgcgtgggaaagaagttgaaacatttgaatttaagaccgtcttcgtaacaagaattactcccatctgatcctgaaccaccaggcctgccatcgatttgaaatcccttcggttaaaagtagcatcaaagtgaatcgtcatcccagaactcgtatctctctgaatggccctcgtagtcgtacacaaggacccatatgccacagcatagcaatcgaccttttgagagttctcttttggaacatccaagtaagccagccccagaacctctgaaccaaaaagttattaacccaaggaagatctaacattttccaaacttctattactacatgacagttccgaaagacatgtgataaatcttcttccccagatctacatcgagaac

SEQ ID NO: 4205 - DNA, 367 bp, Gossypium hirsutum
  Clone ID: LIB3166-050-P1-K1-A8
ggaacgcacataaaggcggtgtagtgcctctccttccagggaaagtctaagattaatcgcatgaagacctgcataagcttctgctgtaaaagaagttgaaacatttgaatttaagaccgtcttcgtaacaagaattactcccatctgatcctgaaccaccaggcctgccatcgatttgaaatcccttcggttaaaagtagcatcaaagtgaatcgtcatcccagaactcgtatctctctgaatggccctcgtagtcgtacacaaggacccatatgccacagcaaagcaatcgaccttttgagagttctcttttggaacatccaagtaagccagccccagaacctctgaaccaaaaagttattaaccc

SEQ ID NO: 4206 - DNA, 137 bp, Gossypium hirsutum
  Clone ID: LIB3582-046-P1-K1-F5
cccacgcgtccgcggacgcgtgggcaaaagggtaaaagctcgtttgattctgatttccagtacgagaggcgtcaccagaaagctcacgcttccacacctgaaaatcaactcctaggagttccgccagaggaatttgc

SEQ ID NO: 4207 - DNA, 779 bp, Gossypium hirsutum
  Clone ID: GOSHI-09MAY01-C661_1
cccacgcgtccgttggaatggttcggattaagtgtgcagtttgtccagattttggtctttgtgtcgaatgcttttctgttggagctgaaattactcctcacaagtgcaatcatccatacagggttatggacaatttgtctttcccacttatttgtccagactggaatgcggatgaggagatggtgcttcttgaggcgattgaaatgtatggatttgggaattgggctgaagttgcagaacatgttggaaccaagagcaaatcacaatgtattgatcactgtaatgctatatacatgaactctccttgttttcctctcccagacttgtctcatgttatgggaaagagcagggaagagctccttgctatggccaaagggaatggtctagtcaaaaaagagttcaccacacatggtgagcttaccctgaaacaagagtctcctgctggtgcaaaagtcaaatatgaggcaccaagaaaggaagatccagctcatcaatcctcatgtagcttaactggagaaatagggtcccatattgattcaaggagtggtggtaacacattcctagttgctggtaaaaagacctccaacatggcccagattaaagatggcattaaagtagaagaacctcaagcagacaggagcattggtgagaaaaagcctagggtttcactgaggaggaaccgtctatgactgagctgagtggctataatttcaagaggcaggaaattgagattgaatatgataatgatgcggagcaattattggcagatatggaaattt

SEQ ID NO: 4208 - DNA, 710 bp, Gossypium hirsutum
  Clone ID: GOSHI-09MAY01-C191_1
acacctcctcgtcttccgggtattcgttcattacttcctttacctagtggtgatctgttgactgggggcactgacttaagaattcgccgctgggaccatttcagccctgatagaagttactgtatatgtggcccgaattttaagggagttggaaatgatgatttctatgaagcaagatcaagttttggtgcacaagttgtacaggagacaaagagacgacctctaacaacaaagctgacagcaaaagcagttcttgttgctgctgccactgattctgctggatgccaccatgattctgtcctctctttggcttcagtgaaattaaaccagagactcttaatctcaagcagtagagatggggctattaaggtttggaagtgaataacccaaaagttttagtgctttaatatacatattcagttacagaagtagtaaaattgtacatgatatacattcaaattcagatcctaaattctgcagcctaaccacttactttctttggtttgtagttttgtacagtttgtaagcgtgtaggtttatatgggattgttattattattattatcaataccatgccctatttattagtgaaaagagaaaataccataggtcttattcatgtttaacaggaaagaacgtgtatctccagacattttcatttatgtgcaaagttcatttatattaactaaatttgaaccccttgatgtccc

SEQ ID NO: 4209 - DNA, 535 bp, Gossypium hirsutum
  Clone ID: GOSHI-09MAY01-C151_2
ctttctcagtgatcactaatctcctctccgaaaaaaaaatggcctatattctcccgcattccgtacctaccggccaccacagtgctttccgcttgccgccacttttcaaccgtcgtccccaaaccctcctccacctctctcaccacccacaaaaaatcacgcgccgccctctcccgcctaaaatccgagcaagaccctgattgcatcctcgaaatctgccgcgccgcccgcctcaccccatcctcccatatcggccgaatcgctttatccgtcgccatctccaaactctgcgaaggcaatcatttccaatccatcgacactttcctccaagaactccgttcccgtcccgacttacaaaataatcgtttcgcctcccattctttaatcctctacggtcaagccaagatgctaaaccgcgccgtgacggtctttgacgaattctataacgaggggttttgccgttcgacgaaatcattaaacgctttgctcgttgcagggttgatagccaaggatcatgtagaagtgaagagaattt

SEQ ID NO: 4210 - DNA, 886 bp, Gossypium hirsutum
  Clone ID: GOSHI-09MAY01-C151_1
cattcatcaatctcaccctcaacccaatggcattttcaaagctctcccttttcttctcattgctcctcctttcctttctctccctcaactcccttgtctcctgcgacactgatgaggaggataatcttcttaaaggcataaacaattaccgggcttcattgaacttgacaattctgaagaaaaatgacaatgccgagtgcctagctgatgaactagcggatcaatttaagaaccaaccttgcacaaactccaccggtgccaacaccgttccgggcactgaaccgcagtttgccaactacccaaaccttctggccaaatgccatttgaatgtctccaacacaagggatggagcagtaatgcctgcttgtgttcctaacctagttccaaatcttgtactcactaactttacacagtctcagtataatgataacctcaatgacaccaagtatacaggagttgggattggttccgatggagactggatagtagttgttctcactacaggcacacctgaaggaagctattcgccagctactggtgcagccagtgtggcttccaagattggtctaatttatcacgttttattcctcgtgatggcggctttttacttgttataagcaccaagcttctggttacggcattgttattcatttgcagaggataagaaattgaccatactctattacttgatcatatagagaaactatatatatcaccacaatatacgcactttcattagataaaggcagtcctttgtagtttgaaatggttggattggtttgcactacacccctttatatgcttgtcctgctcagtttttcctttgcatcatgttgttattgtatgttgtcttggtactcaagttctgggaatgcttgttcccttt

SEQ ID NO: 4211 - DNA, 404 bp, Gossypium hirsutum
  unsure (1)..(404): unsure at all n locations
  Clone ID: LIB3145-055-Q1-K1-D10
caggagttgggatcggttccgatgtgtagactggatagtagttgttctcactacaggcacacctgaaggaagctattcgccagctactggtgcagctagtgtggcttacaagattggtataatttatcacgttttattcctcgtgatggcggatttttacttgttataagcaccaagcttctggttacagcattgttattcatttgcagaggataagaaattgaccatactctattacttgatcatatagagaaactatatatatcaccacaatatacgcactttcattagatncgnncccgnnccgacttacaaaataatcgtttcgcctcccattctttaatcctctacggtcaagccaagatgctaaaccgcgccgtgacggtctttgacgaattctataa

SEQ ID NO: 4212 - DNA, 662 bp, Gossypium hirsutum
  Clone ID: GOSHI-09MAY01-C141_2
cgcgtccgcttaattctatcaaatacatttttggagacaagcagtttttcagcggcaatgcgttgggcacctattgttggttgggccccatcttttttgttgaaacgatacatcttaacaggaatacatgatggacctcaagaacctttcattgctgattctgtagatttcgttgtttcacaggtcgaaactctctcaagagatgacttagcatccaggttggctttcacagttgataatgcttcagttgggcctcttctactttcagattcattcattactataatggatacaaatgactactcttcaattcctcaagaactcaaagatcagcttggtgacaggtatcccgctgctaggcgagcttatctgaaaacaggcgcggatttcccatttctttcccgcccagatgaagttaacctacatcttcagctgcatcttagacgagttggagtagaagctaagccagatttggttcgaaccatcccaaaagatggctctggtgggagccccggcaaagagaatgatgaaaagaaggatcatgatgaccaaccaaccggcaatgggggcaatcccgagagtacttccaaagaaagccagtcacctccggctcctgaaagtgccccaccccgcggcctatatgatcagctaatcagcagggc

SEQ ID NO: 4213 - DNA, 411 bp, Gossypium hirsutum
  Clone ID: LIB3145-007-Q1-K1-H1
tagaagtctgcattatgtatcatgctcttgtgatctgaggccatatatgacaatcatttcggggggaaactctctcagagagatgacttagcatccaggttggctttcacagttgataatgcttcagttggacctcttctactttcagattcattaattactataatggatacaaatgactactcttcaattcctcaagaactcaaagatcagctcggtgagaggtatcccgctgctaggcgagcttatctgaaaacaggcggggatttcccatttctttcccgcccagatgaagttaacctacatcttcaggtacataacgtgtaatacttaaatacatgacttctctcataatgtttagtactgtcagtatgttcagaagcctgttatttctactggtgtgttaaacat

SEQ ID NO: 4214 - DNA, 836 bp, Gossypium hirsutum
  Clone ID: GOSHI-09MAY01-C171_1
tccacgccgtccgaaaacagtatcttgtctttacagttttttgtctgaaaagaagaaaatggctactgtaggaagaaacgcggcagctcctttgttgttccttaacttgatcatgtatttcattgtgttgggatttgctagttggtgtattaataggtttatcaatggccaaactgctcatccaagtatgggtgggaatggagcaacaggtttctttttaaccttttcaatcttggctgctgtggtgggtatagtatcaaaatttgcaggtggtcatcatattaggtcatggagaagtgatagtttggctgcagctggttcttctgcacttattgcttgggctctaactgcattagcctttgggtttgcttgtaagcatataaatataggaggatggagaggatggaggttgaggatacttgaagcattcataataatccttgcattcactcaacttttgtatgtgttgttgatccatgccggtgtgttcagcagtcggtacggaccagggtatcgagattccgactatgggatgcatgcaccgggggatgaaccagggcacaagaccggcaccgctgtaactggatctagggtctgaaagggactgtagtttaaaactagctaaaatatgtaatttggttttgttgtttgatagcgagtaataatcagctcgttcctttttctaaatttagttaatgtaagtatggttgggggtgatcttttcatcttcctttgatgtatgtgaagatgatacagggatttgcagctgatctggtttgtaatgtttctggtcttttctaatggaacattttctgtggcttttgttttcgttttct

SEQ ID NO: 4215 - DNA, 504 bp, Gossypium hirsutum
  Clone ID: GOSHI-09MAY01-C161_7
gcgcccacgcgtccggcgccaaagctctttttgaattttcttctcaccatctttgattcgtttctcgctgatctgtgggttcaatggtctgtgagaaaccatcccgaacaacagggcaaaaggaggaaagaacagaaccagacgaaagaacgaagcatgacgatgagaagcgtgagctcggcttcaacgaagacggccacgagtatgcccatgtgcttcgtatgctcggcaacggccggcgtgaagcagtgtgcatcgatgagactaaacgcctttgccacatccgcgggaagatgcataagaaggcatggattgctgctggtgatataattcttgtccgccttcgccactatcaagatgacaaggccgatgtgatccttaagtacatgcctggacgaaacaaggctattgcaggcctatggtgagcttacggagaacacccgtctcaatgaacgcattgttgatgaggaagacgacagcggggtggatgactatgtctagttc

SEQ ID NO: 4216 - DNA, 593 bp, Gossypium hirsutum
  Clone ID: GOSHI-09MAY01-C161_6
gtcaatttactataaaacttttgtagactcttcgtttcgaagcccgcgcgtcccctttggtgacgaagaatcagattggttctataagcttctcttatcttcaactcttgactctcaagtgttttactctacgcagcagaagcagaagtcaaaaaggcacaaggctataagaagagaccatgccaaagaacaaggggaagggaggaaagaacagaaagagagggaagaatgaagctgatgatgaaaagcgcgaactcgtgttcaaggaagacggccaagagtatgcccaagtgcttcgaatgctaggcaatggccggtgtgaagccttgtgcatcgatggtactaagcgcctttgccacatccgtgggaagatgcataagaaggtttggattgctgccggtgatataatccttgttgggcttcgcgactatcaggatgataaggctgatgtgatcctcaagtacatgcctgatgaagcgaggctcttaaaagcctatggtgagctcccagagaatacgcgtctcaatgaaggcattgtcgatgaggaggatgaaggaggtgcagatgattatgttgagttcgaagatgaagat

SEQ ID NO: 4217 - DNA, 627 bp, Gossypium hirsutum
  Clone ID: GOSHI-09MAY01-C161_3
actcactataggttaagctgagacgcctcgccggaccgtaccggaacggacgggtcggctcacgcgacgcgtttatgcgtgcgcgggaagatgcataagacggtatggattgctgttggtgatataattcttgtcggccttcgcgactatcaagatgacaaggccgatgtgatccttaagtacatgcctgacgaagcaaggctattgaaggcctatggtgagcttccggagaacacccgtctcaatgaaggcattgttgatggggaagacgaacgcggtgtagatgattatgtcgagttcgaagatgaagatatagatcaaatctaaggtaactatgatggggtcatgcttgaagccttgtgtttaaactgttagaaacagagagatatactggatgctgtggagatatatgactacaggaagtgagatacctgccataagtcataagttagacattctataaatggcgaaggtgacattgttagatgggtctgttgctaacttcattgaaactgaaagtgtgtgtgaattctcacatttaattgtcatggcgacagtgtaagcttattgtctgcaccattattaaagaagagctttttaggttgctcgcacactaggacctacaac

SEQ ID NO: 4218 - DNA, 887 bp, Gossypium hirsutum
  Clone ID: GOSHI-09MAY01-C161_2
tttctcgtcgtgagctgtcctcagctgagggggggggtgggggagtgagcggagagtccggtttcgaattcgcttcttcttcttcttcttctttgcctcttgtcttcacctctttactcagcaccaccagcgcgaaagttctttttgaattttcttttcaccatctttgattcgtttgggggggggggggggcttcaattttctgtgactttagtcttttacgctgcggccagaaagcaagaagaaaccatgccgaagaacaagggaaagggaggaaagaacaggaagagaggaaagaacgaagctgacgatgagaagcgtgagcttgtcttcaaggaagacgggcaagagtatgcccaagtgcttcgtatgctcggcaacggccggtgtgaagccatgtgcatcgatggtactaagcgcctttgccacatccgcgggaagatgcacaagaaggtttggattgctgctggtgatataattcttgtcggccttcgcgactatcaggatgacaaggccgatgtgatccttaagtacatgcccgacgaagcaaggctcttgaaggcctacggtgagcttccggagaacacccgtctcaatgaaggtattgtcgatgaggaagatgaaggaggtgcaatgattacttgagttcgaagacgaaaatttcgataatattaggttttggaattggttttgtttgaattaattggctaaatgttgggagaaaaaattggtggatgccgttttaaagggccggcatttttgtaattctccggttaggttattaaagttggcggaggtgtcgcctattaaatttagttggttccttttcacggaacctggtgcagtttctcaattttcctttggacaaaagtatgaaggttcaacct

SEQ ID NO: 4219 - DNA, 763 bp, Gossypium hirsutum
  Clone ID: GOSHI-09MAY01-C161_1
gtagacaaagaatcaaattcctttctcccaatttctatttatcttcttctccttctctttagtcttttacgctgcggccagaaagcaagaagaaaccatgccgaagaacaagggaaagggaggaaagaacaggaagagaggaaagaatgaagctgacgatgagaagcgtgaacttgtgttcaaggaagacgggcaagagtatgcccaagtgcttcgtatgctaggcaatggccggtgtgaagccatgtgcatagatggtactaagcgcctttgccatatccgaggaaagatgcacaagaaggtttggattgcagctggtgatataattcttgttgggcttcgcgactatcaggatgataaggctgatgtgatccttaagtacatgcccgatgaagcaaggctcttaaaggcatacggtgagcttccagagaacactcgtcttaatgaaggtattgtcgatgaggaagatgaaggaggtgcagatgattacattgagttcgaagacgaagatatcgataaaatatagggttttggaattggttttgtttgaatgatttgcttaaatgttggaagagagatatggtggatgctgtttagaaggctacaatatgtgtgatttctcctgtaaggtatttatatgtgctgaatgtgtcaactattagatatatgttgttacttttactgaaaccttgttccatatctcaaatttacttttgacagaaatgatgaaagtttaagcttattatgggctgtttgatgcaaa

SEQ ID NO: 4220 - DNA, 569 bp, Gossypium hirsutum
  Clone ID: uC-gsronu33b112e02b1
tcccacgcgtccgcccacgcgtccgcccacgcgtccgcccacgcgtccgaggcaatggccggtgtgaagccatgtgcatcgatggtactaagcgcctttgccacatccgtgggaagatgcataagaaggtttggattgctgccggtgatataatccttgttgggcttcgcgactatcaggatgataaggctgatgtgatcctcaagtacatgccagatgaagcaaggctcttaaaagcctatggtgagctcccagagaatacacgtctcaatgaaggcattgtcgatgaggaggatgaaggaggtgcagatgattatgttgagttcgaagatgaagatatagacaagatctagggttttggatttggttatgtttgatacatgtgtttaaatgttagaaagggattgcttgatgttgattggatgctgctaagaagcctgcaaatcctgggatttatcccagatgcataagtttgcatttgtaagagtgaatgttcattctagagtaatgttaattttgctaaactgtgttctatatctcaatttactatgaaagttagcttattctgg

SEQ ID NO: 4221 - DNA, 519 bp, Gossypium hirsutum
  Clone ID: LIB3582-018-P1-K1-B5
cggacgcgtgggctttggtgacgaagaatcagattggttctataagcttctcttatcttcaactctggactctcaagtgtttgagtctacgcagcagaagcagaagtcaaaaaggttttcttttattttctctgttcgtgttttacccttttttttttaaatctctttattttgacgcttatttttacttcaacttgccgataattagttttttatcattctctgtgaaagaataccgtaatttgttcttggtaaaataacttttttttttgctttttcaaaaaaattaacttatagggttatgttataatgattgagattctgtttagtttctttttttttttagtagttttaatttcttgatcatgtaattctgattgctttaactgattaaagcctgactttttccctccttttttgttttctatttattgaaattattatttttatgtatttttagtttgactgtgattatacttttggtcattgaatcataaacataatttttttgctacaatt

SEQ ID NO: 4222 - DNA, 621 bp, Gossypium hirsutum
  Clone ID: GOSHI-09MAY01-C111_9
ccccgcccgtcctaaacgtcttgaggggggggggggggatttacatttacttttccatttactcctttatttctacgttgttgactttttagtaagcgagaatgagagagtgcatttcacttgacatcggtcaggctggtatccaatgctgaaatgcctgctgggagcttcactggctggagcgggggggccagcctcctggccacatgcctagtgacaagactgacgaaggaggtgacaatgcttttaacacctttttcactgaaactggcgctcgaaagcacgtccctcgggctgtctttgctgatcttgagcctactgttattgctgaagcgaggactggtacttaccgccctcttttacaccctgagcgactcatcaacggtaacgaagactctgcccacaacttctaccgtggccactacactattggcaaatagatctttgacttgtgcttggaccgtatcaggaaccttgctgatcactgtaccggtcttcaaggctaccttgtttgcaacgctgctggaggaggcactggatctcggcttgggtacctccttttggagcgttagtgtgttgattatggcaagaaatccacggtgggtttaactgtctacccat

SEQ ID NO: 4223 - DNA, 705 bp, Gossypium hirsutum
  Clone ID: GOSHI-09MAY01-C111_7
taaactagggatccccggctgaagaattcgcacgagctttctttgccctcgcgtccgcccccgcggccggaatgaggcagtgcatttcgattcacatcggtcaggccggtatccaggtcggaaacgcctgctgggagctttactgcctcgagcatggaatccagcctgatggtcagatgccaagtgacaaaactgtcggaggaggtgatgatgcttttaacacctttttcagtgaaactggtgctgggaagcacgtccctcgtgccgtctttgtggatcttgaacccactgttattgatgaagtgagaactggtgcttacccccagctcttccacccagaacaactcatcagcggcaaggaagacgcagctaacaactttgcccgtggtcactacactattggcaaggagattgttgacctctgtttggaccgcatcaggaaacttgctgataactgcactggtcttcaagggttccttgttttcaacgctgttggtggaggtaccgggtccggtcttggggtctctcttttggagcgtttgtctgtcgattatggcaagaaaatcaagtggttcactgctaccatctctcagtctcactctgtgtgacctacacaggtcttcactactctttgagcatgtggtgttctgcagactttaccatgagcgtttgatacgcactcacattacgctgtcagattctctg

SEQ ID NO: 4224 - DNA, 2261 bp, Gossypium hirsutum
  Clone ID: GOSHI-09MAY01-C111_5
cggacccctcgcgtcgagaactatattctctttctaaaaataaaacaaaatattaattaggatatatggcaggtgattcagggaagaaggaagagatgtcaaaggtgaaaatcatcagcacaagtcatgtgaagcctggaaagatgataggaagaaaagaatgtcaattggttacttttgatctcccatatttggcattccattataaccagaagctgttgttttacaagtgtggggagtttgaggagaaggtggaaaaactcaaggatgggctgagagtggttttggaggagttttatcagctagcaggcaagcttggtaaagatgaggatggggttttcagggtggaatacgacgacgatatggacggtgtcgaggtggtggaagccaccgccatggagatcggcatcgaggaactggcggctgaagacggcactgcctctttcaaggacttgataccctacaatggtgttctgaacttggagggccttcacagacctctcttgtctgtgcaggtaaccaagttgaaagacggagtggcaatggggtgcgcattcaaccacgccatccttgatggaacttccacttggcatttcatgagctcatgggcccaaatctgtagcgggtccaactccgtctcagtctcgccgtttctcgagcggaccaaagtccgaaacacccgcgtgaagctggatctctcgctcccacctaaccctgtcaacggtgacgccaaccaaggcccccagctgagggagaaactcttcaggttttctgaagctgccatcgacaagatcaagtcaaaagtcaactctaccccaccatccgactcctctaaaccattctcaactttccaatctctagcttatcacgtttggcaccacgtaaccctagcacgtgaactcaaacctcaagattacacagttttcactctcttcgctgattgtcgtaaaagggttgatccacccatgccggaaagttacttcggaaacctgattcatgccatcttcaccgtcacggcagccgggttattgtcggctaatccaccgcaattcggtgcatcgttggtacaaaaagctatagaagcgcacaacgcgaaggccatcgaagaacgaaacaaggagtgggaagcagcaccgaagatattcgagtacaaggatgctggtgtgaactgcgtggcggtggggagctctcccaggttcaaggtatacgatgtggatttcgggtggggaaaaccggaaggggtgaggagcggatccaacaacaggtttgatgggatggtgtatttgtatcaagggaagagtggtggacggagcattgacgtggagatcgccttggaagctggagcactggagaagctggagaaagataaggagtttgtgttggaagtttagatcaataatcaagaccattgttatcatttgtcttgtctttcgtgattttgatcacaacaaatgttatgtttgttaacatttcttacgctatccccagtttgttactcgaatctactagcttggttatgctgtgctgtcaataacaacactgaacttacgtcttatgttggtaatgctgtcttttactacgattcaaacgtatgtcatgtctgttctagaggagaaataccacattttcttatatacattcacaatcatctatatctatttataaactgctgagaagacgctgacaacaacttcgcccgtggccactacactattggcaaagagatcgttgacttgtgcttggaccgtatcaggaagcttgctgataactgtaccggtcttcaaggtttccttgttttcaacgctgttggtggaggcactggatctggtcttggttccctccttttggagcgtttgtctgttgattatggcaagaaatccaagttgggtttcactgtctacccatcaccccaggcgctctcttgacattgagcgacccacttacaccaatcttaaccgtcttgtctcccaggtgatctcctctttgactgcttcacttaggttcgatggtgccttgaacgtggatgtaacagaattccagaccaacttggtcccttacccaagaatacacttcatgctttcttcatacgctccagtcatctctgctgagaaggcttaccatgagcagctatcagttgctgaaatcaccaatagtgcctttgagccctcatctatgatggccaagtgtgatcctcgccatggcaagtatatggcttgctgtttgatgtacccgtggtgatgtgtgcccaaagatgtcaatgc

SEQ ID NO: 4225 - DNA, 679 bp, Gossypium hirsutum
  Clone ID: GOSHI-09MAY01-C111_4
cggacgcgtgggtttgcttagaaggtgtcttaataaacgccttctttcttcttcttctccctttctttgctttttcgaatttttcttaagcgagaatgagagagtgcatttcgattcacatcggtcaggccggtatccaggtcggaaacgcctgctgggagctttactgcctcgagcatggaatccagcctgatggtcagatgccaagtgacaaaactgtcggaggaggtgatgatgcttttaacacctttttcagtgaaactggtgctgggaagcacgtccctcgtgccgtctttgtggatcttgaacccactgttattgatgaagtgagaactggtgcttaccgccagctcttccacccagaacaactcatcagcggcaaggaagacgcagctaacaactttgcccgtggtcactacactattggcaaggagattgttgacctctgtttggaccgcatcaggaaacttgctgataactgcactggtcttcaagggttccttgttttcaacgctgttggtggaagtaccgggtccggtcttggttctctccttttggagcgtttgtctgtcgattatggcaagaaatccaagttgggtttcactgtctacccatctcctcaggtctccacttctgttgttgagccttacaacagtgttctctcaactcactccctttt

SEQ ID NO: 4226 - DNA, 1224 bp, Gossypium hirsutum
  Clone ID: GOSHI-09MAY01-C111_3
cggccgcgtgggcggacgcgtggcccgccccgccgctgcaattgcagctgagaagcattagatcccccaaatctttggcttatgtctacatattcaccctttaattttcttcacttttcaatttagtccaacatgcttttaaggagcgcatcgatgccgttacttaattcatgggtcccacactcgaaggagccgtcgccggagctcgatttgttgcacctgattggccgaacccgatccgtttcgttcaggattttgtgttcgagctcgacctcgagctcgagctcgatttctgttgggtcgggcgatgactcgagcaggaggatgacgagggcggtgtcggagacggatctgagggagatggtggtccctaagatgagagaagttaagcgaaacaatgggatcttgaatacgatctttgttgaggaagaagaggaggtggagagagaagaagctggatttcagtggcggagaacggcgtcgctcgcggtggaggaagagtgtgaaattggcggggctgatggtggtggtagatcggacagtggtgatgataacgaatggagctcgtgggattcgaataacggaaacgatagtaccgagttgtattatcagaaaatgatcgaggctaatcctggaaattcacttctcctcagcaattacgctagattcttaaaagaggttcgtggggacctcgcggcaccccacgcgtccgagctcgtgaggaccttgctgctcttgagaaggattatgaagaagtcggtgctgagtcaggcgagggtgatgaggaaggtgaagatgagtactaaataagtaatgtttgagtggagggcttgcattttgctacccaatgatttgtttccttttatcgcgtgtttttgcttattctattgcgtgaacttcgactcttctaagctttgttcaagactatatggactgcaatagatttgacgagcagttaaaaaaactttaaaataaaatgatcaatcgtgtttagaacaaatatggaagagttgcaatctcgtataattgttgctgaaaatggcctgaagatcactgacatcagaacctaatgaagatattatttacagtcgatagtattaaaacaaattctgtcttgtcagcctcaaccgtggtgggggggaatgaatacagaatattaggtcagcaaatagtgatggcatgcatttttattaacaagttgcatgcatttgtggaatatgaaac

SEQ ID NO: 4227 - DNA, 817 bp, Gossypium hirsutum
  Clone ID: GOSHI-09MAY01-C111_2
ctcgtctcttggatcgaggaagatgtgggataggcggtggtggaggaaacccacgcgtccgcccacgcggccgtggtagaggaggtgctgatggatccgacggcagtgataacgaatggggttattgggattcgaataacgggaaagacagctccgatacttattatcagaaaatgatccaagctaatcctggaaattcgcttctcctcagcaattacgctagattcttaaaagaggttcgtggggatttagtgagagcagaagaatattgtgggagagcaatcttggcaaatccaaatgatgggaatcttctctccatgtacgctgatttaatctggcaaactcataaagatggtcctagagctgaaacttactttgatcaagccgttaaatctgcccctgacgactgttttgtactagcatcatatgcacgatttctttgggatgctgaggaggaagacgatgaagaggaaaaggctggcgaaaaatttagtaatggatcagatcaaagttttttccatggagctcctcctttggctgctgcttcttaagcctcgtggtgtgaaataacttgtatttaagcttttttggacttttggtaattcccccccttttctttagttatattttgattcgtcttttgagcttttatttaattagattctttgcaattgtagtaaaaagagtgagatattgtagtaaaaagagtgaaatttgtagttatttgagagctccgttttgctcttctcattcttgaatccatgttatgtaaaagtgaaataatcagatatggaaatgtattgttcattggaatctt

SEQ ID NO: 4228 - DNA, 1710 bp, Gossypium hirsutum
  Clone ID: GOSHI-09MAY01-C111_1
gacgcgccccccacgcgcccccccccgcgcccgcaaattgttatctctgaaggtgtcttaataaacgccttcgatttaccttcgatttccatttacttctttattgctacgtttttgaatttttagtaagcgaaaatgagagagtgcatttcagtccacatcggtcaggctggtatccaagtcggaaatgcctgctgggagctttactgccttgaacatggaatccagcctgatggccagatgccaagtgacaagactgtcggaggaggtgatgatgcttttaacacctttttcagtgaaactggtgctggaaagcacgtccctcgtgctgtctttgtggatcttgagcctactgttattgatgaagtgaggactggtacttaccgtcagcttttccaccctgagcaactcatcagcggcaaggaagacgctgccaacaacttcgcccgtggccactacactattggcaaagagatcgttgacttgtgcttggaccgtatcaggaagcttgctgataactgtaccggtcttcaaggtttccttgttttcaacgctgttggtggaggcactggatctggtcttggttccctccttttggagcgtttgtctgttgattatggcaagaaatccaagttgggtttcactgtctacccatcaccccaggtctccacatctgttgttgagccctacaacagtgtcctctcaactcactcccttttggagcacactgatgtggctgttcttcttgacaatgaggctatctatgacatttgcaggcgctctcttgacattgagcgacccacttacaccaatcttaaccgtcttgtctcccaggtgatctcctctttgactgcttcacttaggttcgatggtgccttgaacgtggatgtaacagaattccagaccaacttggtcccttacccaagaatacacttcatgctttcttcatacgctccagtcatctctgctgagaaggcttaccatgagcagctatcagttgctgaaatcaccaatagtgcctttgagccctcatctatgatggccaagtgtgatcctcgccatggcaagtatatggcttgctgtttgatgtaccgtggtgatgttgtgcccaaggatgtcaatgctgctgttgccaccatcaagaccaagagaactattcagttcgttgactggtgcccaactggattcaagtgtggtatcaactaccagccacccactgtcgttcctggtggtgatcttgctaaggtccagagagccgtttgcatgatttccaactcaaccagcgttgctgaggtgttctcccgcattgaccacaagtttgatctcatgtatgccaagcgtgcctttgttcactggtacgtgggtgagggtatggaagaaggagaattctcggaagctcgtgaggaccttgctgcacttgagaaggattatgaagaagtcggtgctgagtcaggcgagggtgatgaggaagatgaagatgagtactaaataagtaatgtttgagtggagggcttgcattttgctacccaatgatttgtttgcttttatcgtgtgtttttgcttattctattgtgtgaacttcgactcttcgaagctttgttcaagactctatatggactgcaatagatttgacgagtagttcggctaaaaaacaagggcgacaacaggcacgagaatttaaattagttgaacccaaaaaaaaaaaaaaaa

SEQ ID NO: 4229 - DNA, 427 bp, Gossypium hirsutum
  Clone ID: uC-gsflmaxxa005e08b1
tcgataaggtgtcttaataaacgccttctttcttcttcttcttattcctttattgctttttagaatttttcttaatcgaaaatgagagagtgcatttcgatccacatcggtcaggccggtatccaggtcggaaacgcttgctgggagctttactgtctcgagcatggaatccagcctgatggtcagatgccaagtgacaaaactgtcggaggaggtgatgatgctcttaacacctttttcagtgaaacctggtgccctgggaagcacctcccttgcgcccgtttcccggatccctgcacccactgttcttgctccttcgcgccctggtccctccccccagcccccctcctctctcctcctcatctctcctcttccatctccccccatcacctttccccttttccccctccctcgtctcctcctcccc

SEQ ID NO: 4230 - DNA, 472 bp, Gossypium hirsutum
  unsure (1)..(472): unsure at all n locations
  Clone ID: LIB3493-022-P1-M1-D9
cgnntccggttatcttcatgaggggggtgtcttcaatagaaccgcccnnntcgatttactggtgcgggtgttccatttacgttctgttagtttcttaccgttttatgaattatttaagtaacggctgaatatgagaaagagtgcnnatttcagttcacaatcggtcagggctggtatccaagtcnggaaatggcctgctgggaggctttactggccttgaacatggnnaatccagcctgatggccacgatgccaagtgacaatgactgtcggaggaggtgatgatgcttttaacacctttttcagtgaaactggtgctggaaagcacgttcctcgtgctgtctttgtggatcttgagcctactgttattgatgaagtgaggactggtacttaccgtcagcttttccaccctgagcaactcatcattggcaaggaagactctgtcaacaacttctcccggggccactacacta

SEQ ID NO: 4231 - DNA, 365 bp, Gossypium hirsutum
  Clone ID: LIB3146-014-Q1-K1-D10
cccacgcgtccgcccacgcgtccgcggacgcgtgggatgatggccaagtgtgatcctcgccatggcaagtatatggcttgctgtttgatgtaccgtggtgatgttgtgcccaaggatgtcaatgctgctgttgccaccatcaagaccaagagaactattcaattcgttgactggtgcccaactggattcaagtgtggtatcaactaccagccaccgactgtcgttcctggtggtgatcttgctaaggtccagagagccgtttgcatgatttccaactcaaccagcgttgctgaggtgttctcccgcattgaccacaagtttgatctcatgtatgccaagcgtgcctttgttcaactgtacgtggg

SEQ ID NO: 4232 - DNA, 305 bp, Gossypium hirsutum
  unsure (1)..(305): unsure at all n locations
  Clone ID: LIB3197-013-P1-M1-D9
gatgagagaagagggtgaagattgagtacctannaataagtaatagtttagagtaggagagagcttgcatttttagctatcccaaatagatttagtttccttttattcgtgtagtttttgcttattctattgtagtgaacttcgacttcttctaagcntttgttcaatgactatatnggactgcaatagatttgacgagtagttcggcttaagttctagtgttccattgctgaaaagaaaaaaaaaattattatattaaaaatatttttttaaaaaaatatttaataaaaaaaaaatttatatta

SEQ ID NO: 4233 - DNA, 487 bp, Gossypium hirsutum
  unsure (1)..(487): unsure at all n locations
  Clone ID: LIB3147-013-Q1-K1-E1
ccgtccggggtcggtgcttaataaacgcctttcgantttacttttcggtgttcctatttactatactttatattctgacgtattgcgcgaaattcttatgtaaggccgaagaactgaccagacagtgctattttacagttgcacaatcgcgtcatggcttggtattccaaagtcgcgataatgctctagcatggagagcatttacctgctcgtttgaacantaggaatcacagccgtggatgcgccacgatgccgcaagngacattgacatgtctggagtgaggtgatcgattgcttttaacacgctttttcagtgacaactggtgctcggaaagcaacgtccctcgtgctcgtctttgtggatcttcgagcctactgttattgatgaagagaggactggtacttaccgtcagcttttccacgctgagcaactcatcagcggcaaggaagacgctgccaacaacttcgtgcgtggccactacactat

SEQ ID NO: 4234 - DNA, 442 bp, Gossypium hirsutum
  Clone ID: LIB3585-013-P1-K1-F3
acgaggacgattggccggacccttgggcggacccttggttgacatggaccaaccaggttacacgaatcttaaccgtttggtctcccaggtgatctcccctttgactgctccactcaggtacgacggtgcctggaacgtggatgtaccagaattccagaccaactgggggctttacccaagaatacactacatgctgacttcatacgctccacttatgtgtgctgagaaggcttaccatgagcagatatcagtcgctgaaagtaccaatagtgcctttgagccctcatctatgatggccaagtgtgagcctcgacatggcatgtatatggcttgctgaccgatgtaccgtggtgatgttgtgcctgaagatgtcaatgctgcatgtgccaccatcaagaccaagagaactatgtagttcgtggactggtgcccaactgggttc

SEQ ID NO: 4235 - DNA, 352 bp, Gossypium hirsutum
  Clone ID: LIB3149-063-Q1-K1-E4
gctgcgcctaccatcaaacctattatacctatattatatgtagactgctgcccagccgtattaacgtgtggtattggctatgatgcacgaactgcttgtactggtggtgcaattagtaaggatcatagaggcggtcgcttcataaccaaccgctccaactaatgtatggtgttgtacgacatcgaccacatgtttgatctcatgtatgccaagcgtgcctttgttcactggtacgtgggtgagggtatggaagaaggaaaattctcggaagctcgtgaggaccttgctgcacttgaaaaggattatgaaggggccggcgctgagtcaggccaaggtgattacgaaggtgaag

SEQ ID NO: 4236 - DNA, 617 bp, Gossypium hirsutum
  unsure (1)..(617): unsure at all n locations
  Clone ID: AI725677.1
ctttgagaactatatcctctttctaaaaataaaacaaaatattaattaggatatatggcaggtgattcagggaagaaggaagagatgtcaaaggtgaaaatcatcagcacaagtcatgtgaagcctggaaagatgataggaagaaaagaatgtcaattggttacttttgatctcccatatttggcattccattataaccagaagctgttgttttacaagtgtggggagtttgaggagaaggtggaaaaactcaaggatgggctgagagtggttttggaggagttttatcagctagcaggcaagcttggtaaagatgaggatggggttttcagggtggaatacnacgacaatatggacggtgtcgaggtggtggaagccaccgccatggagatcggcatcgaggaactggcggctgaagacggcactgcctctttcaaggacttgataccctacaatggtgttctgaacttggagggccttcacagacctctcttgtctgtgcaggtaaccaagttgaaagacggagtggcaatgggattttttgatgaaaaattaattcttttanngnngngggcgggtggggtgctgtggggcggnttcgtccgttttcgttttct

SEQ ID NO: 4237 - DNA, 491 bp, Gossypium hirsutum
  Clone ID: uC-gsflmaxxa090h08b1
acttatgctcgtggcctcgagaaccatttacttgatggtgggtccatatttaaaatttttagtgagctaaaacgagagagcgcatatccagtccacatctgtcatgctggtattcaagtcaggaatgcctgctggggactatactgccttgaacatggaatccagcctgatggccagatgccaagtgacaagactgtcggaggaggtgatgatgcttttaacacctttttcagtgaaactggtgctggaaagcacgaccctcgagctgtctttgtggatcttgagcctactgttattgctcaagtgaggactggtacttaccgtcagcttttccaccctgagcaactcatcagcggcaaggcagacactgccaacaacttcactcgtagccactacactattggcacagagatcgttgactagcgcttggaccgtatcaagaagctagctgataactgtaccgggctttaaggtttccttgtttcaacgct

SEQ ID NO: 4238 - DNA, 287 bp, Gossypium hirsutum
  Clone ID: uC-gsronu33B057f11b1
tcttttatgcgagggtgatgaggaaggtgaagatgagtgctaaataagtaatgtttgagtgtagggctcgcattttgctacccaatgatttgtttccttttatcgtgtgtttttgcttattctattgtgtgaacttcgactcttctaagctttgttcaagactatatggactgcaatagatttgacgagtagttcggctctctaaaatataaaaaaaaatctttattaaaaattatttttcaataacctactataaataatcaatatttggctctctttttaatttg

SEQ ID NO: 4239 - DNA, 281 bp, Gossypium hirsutum
  Clone ID: uC-gsronu33B127c06b1
gttccgcccttttttttttttttttttttttttttgaaatttgaaatcaaacggcgtcgctcgcggtggaggaagagtgtgaaattggcggggctgatggtggtggtagatcggacagtggtgatgataaccaatggagctcgtgggattcgaataacggaaacgattgtaccgagttgttttattagaaaatgatcgaggttaatcctggaaaattacttcttcttagcaattacccttgatttcttaaaagaggttcgtggggatttcgtgaaagcctt

SEQ ID NO: 4240 - DNA, 237 bp, Gossypium hirsutum
  Clone ID: LIB3189-031-P1-K1-A8
gctaataaacgcgtggtctattagtcatctccctttctatgctttctcgaatatttcttaagcgggaatgagagagtgcatttcgattcacatcggtcaggccggtattcaggtcggaaacgcctgctgggagctttactgcctcgagcatggaatccagcctgatggtcagatgccaagtgacaaaactgtcggaggaggtgatgattctttttacacctttttcagagaaactgg

SEQ ID NO: 4241 - DNA, 606 bp, Gossypium hirsutum
  Clone ID: GOSHI-09MAY01-C101_4
tcgtccacgcgttcgtccacgcgttcggccacgcgtccgcaacaatgaatatggaaatgacataaacaaggacttgaaggctgatcctaaggatgagttccttgcactactaaggtccacagtgaagtgcttggtctatccggaaaagtattttgagaaggttcttcgcctagcaatcaatagacgcggcccggatgaaggagctcttactagagttgtttgcactagggctgaggtggatctaaagatcatagcagatgagtaccagcgaaggaacagtgtcccactgactcgtgccattgtcaaggacactcatggagactatgaaaaattgctgctggtacttgcaggacatgtggagaattgaatctgatatcttgagacaatttcctggtgaataaatgtttatgaccaaactataatggtctagtgtggttattgatgttttcctgattttctttgtcatttttttagtttttcttattctttttctttttagtcttttctttattcccttttatctatttttttttctctttctatatttttctcttttattattatttcattatcttttattttttattatttattttatatcctttc

SEQ ID NO: 4242 - DNA, 1184 bp, Gossypium hirsutum
  Clone ID: GOSHI-09MAY01-C101_1
cctgtccacccacgcgtccgcccacgcgtttctatacagattcagaaagaaataaaggaagaagaagcaatggccactcttacagtgcccacgacagttccttcggtgtctgaagattgtgaacagctaagaaaagccttttcaggatggggaactaatgagggcttaatcatagatatattgggtcacagaaatgccgagcaacgaaacttgattcgaaaaacctacgctgaaacctatggagaggatctcctcaaggcactagacaaggagctctcgaatgactttgagaggctggttttgctttgggctcttgatcctgctgaacgtgatgcccttttggctaatgaagccaccaaaaggtggacttcaagcaatcaggtccttatggaaatagcttgcacaaggtctgccaaccaactgcttcacgcaaggcaggcttatcatgctcgttataagaagtcgcttgaagaggatgttgctcatcacacgactggcgacttccgtaagctcctcctacctctagtgagttcatacagatatgagggagaggaggtgaacatgaatctggcgaaaacagaggcgaagttgcttcatgagaaaatttcagacaaagcttacagtgatgacgatgtcataagggttttggctacaagaagcaaggcacagatcaatgcaactctgaatcactacaaaaatgaatatggaaatgacataaacaaggacttgaaggctgatcctaaggatgagttccttgcactactaaggtccacagtgaagtgcttggtctatccggaaaagtattttgagaaggttcttcgcctagcaatcaatagacgaggaacggatgaaggagctcttactagagttgtttgcactagggctgaggttgatctaaagatcatagcagatgagtaccagcgaaggaacagtgtcccactgactcgtgccattgtcaaggacactcatggagactatgaaaaattgctgctggtacttgcaggacatgtggagaattgaatctgatatcttgagacaatttcctggtgaataaatgtttatgaccaaactataatggtctagtgtggttacgaggttttcctgtttttctatgtattaatgcgagttatatgctatccaagaattcgaagtctacttaaaaccaaaaaaaaaaaaaaaagaaa

SEQ ID NO: 4243 - DNA, 304 bp, Gossypium hirsutum
  Clone ID: LIB3145-043-Q1-K1-E2
ctaatcactaaatatctcacatctacttctacttctcgcaaataataccatcatcaccgtggcctcacatggtaaggcgggctattacatgactctcggcaggcttatcatgctccttataagaagacacttgaagaggacattgctcatcacaccactggagacttccataagctcctcctacctctaatgagttcatacagatatgagggagaggaggtgaacatgactctggcaaaaacagaggcgaagttgcttcatgagaaaatttcaaacaaagcttacagtgattactatgtcataa

SEQ ID NO: 4244 - DNA, 397 bp, Gossypium hirsutum
  Clone ID: LIB3048-036-Q1-L1-D2
ccgagttcttatcagaggctggttttgctttgggctcttgggcctgctgaacgtgatgcccttttggctaatgaagccaccaaaaggtggacttcaagcaatcaggtccttatggaaatagcttgcacaaggtctgccaaccaactgcttcacgcaaggcaggcttatcatgctcgttataagaagtcgcttgaagaggatgttgctcatcacacgactggcgacttccgtaaggtatattagatggatgcttaagttatctgtaaaaactaaactaggtattgcttattatgttagcgagtcaatgaagttttattatttgctttctgttctgaatagccctgcttatttatgtgtctttattcctttcagctcctcctacctctagtgagttcat

SEQ ID NO: 4245 - DNA, 618 bp, Gossypium hirsutum
  Clone ID: LIB3543-065-Q6-K6-A7
aaaaaaaaagtagaagaagcagggcgcggtcttacagtgcccacgacagttccttcagtgtctgaagattgtgaacaactaagaaaagccttttcaggatggggaactaatgagggcttaatcatagatatattgggtcacagaaatgcggagcaacgaaacttgattcgaaaaacctacgctgaaacctatggagaggatctcctcaaggcactagacaaggaactctcgaatgactttgagaggctggttctgctttgggctcttgatcctgctgaacgtgatgcccttttggctaatgaagccaccaaaaggtggacttcaagcaatcaagtccttatcatgctcgttataagaagtcgcttgaagaggacgttgctcatcacacgactggggacttccataagctcctcctacctctagtgagttcatacagatatgagggagaggaggtgaacatgactctggcaaaaacagaggcgaagttgcttcatgagaaaatttcaaacaaagcttacagtgatgacgatgtcataagggttttggctacaagaagcaaggcacagatcaatgcaactctgaatcactacaaaaatgaatatgggaaatgacataaac

SEQ ID NO: 4246 - DNA, 363 bp, Gossypium hirsutum
  Clone ID: LIB3166-023-P1-K1-B6
cccacgcgtacggatacccttgaatattcagccaaagctcatgaagctgagaagctccagttccacgctctgacgtgtcctcaatacactgtgagaggctggatgaactggagcccttgcacgtgctgcacgtgatgccctctacaacactgaagcctccaaatggtgaacttcaggcaatcaggtccttatggaattagcttgcacaaggcctgccaaccaactgcttcacgcatggcaggcttatcatgctcgttataagaagtcgctttgagaggacgttgctcatcacacgactggcgactatcgtacagctcctctacctctagtgagttcatacacatatgatggagaggaggtgaa

SEQ ID NO: 4247 - DNA, 1440 bp, Gossypium hirsutum
  Clone ID: GOSHI-09MAY01-C121_1
aaaccattagagaaacaacttactactttgatgctatcatggaaggaggaggcagtgatgatcatcaccaccaccaccacagccaccaccatcaccaccaacaaccactccaccatcatcatcatcaccaccaccgccctactttcccattccaattactagagaagaaagaagaagataaccaaccttgttcctcctcttcttcccttcctttcccttccctaccggtttcatcttcctcggccgatcaacacacctcgactcgttccatttcaacccaccagatctcgccggaaacttccaagactccaccgcctaaacgtacttcgactaaagaccgacacaccaaggtagatggacgtggtcgtaggatccgtatgccggctctttgtgcagctagggtttttcagcttactcgcgagttgggtcataaatacaatggtgaaacgatcgagtggttgctacaacaagctgagccggcggtgatcgccgctacggggactggtaccatccctgcaaacttcacttccctcaatatctcactccgtagctccggttcaagcatgtcggttccttctcagcttcgttcctcgggttttagctctaacttttctatgcaacaacgtagaagcttgttccccggaatcgggctcgaaacgacgccgacgccgacgacgttccttaacttccaatctagtagtacttcgttgggaatatcggaagaagccgaagaaagtagtttaggaaggaaacgaagacccgaacaagatttatcttcacaacatcatcagaatggggagttacttgttgcaatcaagcaccggtacaattccggcgagtcaccacgctcaagttccggctaacttttggatggtaactaattctaataatcaagctatgagtggtggtgaccctatatggacatttccttcagttaataacagtggtttgtataggggaactatgtctagtgggttgcatttcatgaactttccaacaccaatggccttgttaccaggccaacaattgggttcaagcagtaccggtgcccatggaggcggcggcggacgtggcactggtggaactactgcgcatacgtgaggggcatttaaattatgttaccctggattgagtccttattagacaagactccgggtggcaccggcgtttccggaatctcaagtgaggggctcacattcacaccacggtggtggaggtggcgcgatgaatgacgtgatttacaaaccaatagtgtcatgcgatcgtagagatgatgatgatgatcatcgaacaaagcatcatctttgctttcttttgatcacttgtgtagtttgatgtgtacacacgtgaggtttgattgctccttttaatttttttttccaaaaaaacatgaattgagtttttattataccaaaaaaaaaaaaaaaaaaaaaaaaaaaa

SEQ ID NO: 4248 - DNA, 684 bp, Gossypium hirsutum
  unsure (1)..(684): unsure at all n locations
  Clone ID: AW186726.1
cgccgctacggggaatggtaccatccctgcaaacttcacttccctcaatatctcactccgtagctccggttcaagcatgtcggttccttctcagcttcgttcctcgggttttagctctaacttttctatgcaacaacgtaaaagcttgttccccggaatcggatttgaaacgacgccgacgccgacgacgttccttaacttccaatctagtagtacttcgttgggaatatcggaagaagctgaagaaagtagtttaggaaggaaacgaagacccgaacaagatttatcttcacaacatcatcaaatggggagttacttgttgcaatcaagcaccggtacaattccggcgagtcaccacggtcaagttccggctaacttttggatggtaactaattctaataatcaagttatgagtggtggtgaccctatatggacatttccttcagttaataacagtggtttgtatangggaactatgtctattgggttgcatctcatgaacttcccancaccaatgggcttgttaacaagcccacaattgggttcaagcattaacggtgccaagggaggcggcggcggagttggattggttgaattaatggataaatgaagggcattttatattttattgaattaaacctcttagaacataacccggggggcccggcgtttccgaattaatgc

SEQ ID NO: 4249 - DNA, 2332 bp, Gossypium hirsutum
  Clone ID: GOSHI-09MAY01-C381_1
cgggtcgacccggcggcccacccccccccccacgcctccgctttttaaaatgtctgccaaatcaaagctttctacacttattttaaccctgtctcttgtgtttctctatgccggctgcttagcctttgctaagcaagaccctgagctaaaacaatgcacccaccaatgcagagtccagcaacaatacgatgaaaaacaaaaggaagagtgtgtgaggacatgtgaagagtaccaccgtgagaaaaaggatagagagtcccttaaagaagttgggcaagaccctgatgtcgaatttcaccctggcgacggattgagtgagtgccagagccggtgcgcgggactagcaggagaggtgcggcagctgtgcctcttccggtgccaacagaaatggcggagagattatgcgagccggtgggaggaagaaggcaagaaacagagtaaagaagacgcagaagacgaaggagaagaggaaaagcacaatccttacgtatttgaagataaacatttctctactgcaatcaagacagggaaaggaagagttgatcttctcaccaaattcacacacaactcggatattcttcgtggcattgagaattatcgactggccctccttgttgccagtccaaagtcattcgtagtcccaaatcatttcgatgctaacgccatatttgttgtcactcaaggacgtggaacactcacgctgatccatgaagataagagagagagctttaacattgaaactggagacatcatctatgttcgtgctgggactcctctatatttgatcaacagagatgacgacgagaaactgtttatcgtcaagttattgcaacccatcaatcaaccagatcattacgaggtattttatggtgctggtggtgcaaaaccagaatcattctacgaaacatttagcactgaaatccttgaagctgctctcaagacttcaagagataagttggagaagtttttcgataaacaaggcaaaggacccttcctcgaagcttccaaagaacaaatcgaggccatgagtagccatgaggaaggcagcaaaggcggtggtttgtggccatttggaagtgagtcaaaatcagagagtgcattcaacctcttcagaaagcgtcagccttcacattgtaacagatatggtcagctctttgaagttgaagaagaagaattcaagggccttaaagacttcgatctcagggtctcctatgtcaacatcaccaagggatgtatgtcagccccattctacaactcaagggcaataaagatagccattgttgtgaaaggtgaaggatactttgaaatggtatcacctcctgtttcccccaagtccagtcaggaggattcagcaggaagaaagagtgggtctcgttatcaaaagataagctcacgtttgagatccgacacggtgttcgttgttccagcagggcatcctttcgttacagttgcttcaagaaacaataatctagagattctatgctttgaggtcaacatagaaaacaacgttaggtaccttcttgcaggggaggggaattatgttcagcaattcgagaaggaagcaaaggaactggcattcaagagcaaggaagaagaggtggataggatctttggtaaccaagatgaggagttctttttccctggaccaaggcaacaaagaggccgatattatgaatgaagattgggagttgtggggtttaagctttgaggggttatgtgtgtgtgttaagatgaggagctccatggctgagagcttagccgagtagtttctgtaaatgccgaagttgtgaatgttgtgaaatgggaaaaaactgatgcgagaacgatgtaattagagatgtttgtaagtttttgaggtaagatgaaacccgaataagaagaagcctcctcctcctagctaatatgtaaattatctttggttttacgtgtttgggcccatgtttaaataaaaactccagccttccaacgagcccagttcttctaagctgattttaaataaatactgcactgcactgcatacgggccaagaatgtccggttcaatttaacttagattctcaccgtaaggtccaccgtaaggtccatagaaacccaaatagacatcacatcacatcaaataggaacatggattcaatcgatgatgtagactgcccctctcaacaaccagatgttagccaatgaaaaaaattactccctcagatgtgattggagtaggactatcgtaagaccccaagaagaccaggcgtctcgtcggttgcctgctcacatttctgaaaagatgccctttccctttcttcataagccgagcgaaagtcccggatgccgcctaaaac

SEQ ID NO: 4250 - DNA, 640 bp, Gossypium hirsutum
  Clone ID: LIB3582-058-P1-K1-H4
ccccgcgtccgcccagcgtccgcccacgcgtccgcccacgcgtccgccccgcgtccggccgtggaacactcacgctgatccatgaagataagagagagagctttaacattgaaactggagacatcatctatgttcgtgctgggactcctctatatttgatcaacagagatgacgacgagaaactgtttatcgtcaagttattgcaacccatcaatcaaccagatcattacgaggtattttatggtgctggtggtgcaaaaccagaatcattctacgaaacatttagcactgaaatccttgaagctgctctcaagacttcaagagataagttggagaagtttttcgataaacaaggcaaaggacccttcctcgaagcttccaaagaacaaatcgaggccatgagtagccatgaggaaggcagcaaaggcggtggtttgtggccatttggaagtgagtcaaaatcagagagtgcattcaacctcttcagaaagcgtcagccttcacattgtaacagatatggtcagctctttgaagttgaagaagaagaattcaagggccttaaagacttcgatctcagggtctcctatgtcaacatcaccaagggatgtatgtcagccccattctacaactcaagggcaat

SEQ ID NO: 4251 - DNA, 359 bp, Gossypium hirsutum
  Clone ID: LIB3582-003-P1-K1-G6
cccacgcgtccgcccacgcgttcgcccacgcgtccgcccacgcgtccggtttttttttttttttttttttggcgttggaaggctggagtttttatttaaacatgggcccaaacacgtaaaaccaaagataatttacatattagctaggaggaggaggcttcttcttattcgggtttcatcttacctcaaaaacttacaaacatctctaattacatcgttctcgcatcagttttttcccatttcacaacattcacaacttcggcatttacagaaactactcggctaagctctcagccatggagctcctcatcttaacacacacacataacccctcaaagcttaaaccccacaactcccaa

SEQ ID NO: 4252 - DNA, 554 bp, Gossypium hirsutum
  unsure (1)..(554): unsure at all n locations
  Clone ID: LIB3582-024-P1-K1-F12
cccacgcgtccggttggctaactatttgcaggttggcactaggtactgcacaagaaaaattaaagcttttgctataataaactggatctacgaaagaagagttgaagatggtggcttgtatttttcaggtatttgatgcaattggaaattgcttgagtgccggtattaaagctgagagccacagcaacacagggctcagttcaaagtatgatagtggtgatgggaaagatgttagcagtgaaagcagcaacagcaaagtttcatcattttcagcacctttgacacctcggagtgagggtgagattttgcagtcccccaatttgaaaagtttcagctttgctgatctcaaaatggccacaaggaattttcgtcccgatagcgtgcttggagaaggcggtttcggctacgtgtttaaggggtgggtcgatgaaaattcctttactgctaccaagcctggatctggcattgntattgctgtcaaaaggcttaaccaggatgggttccaaggtcacaaggaatggttggcagaaatgaattatctgggacagctttat

SEQ ID NO: 4253 - DNA, 469 bp, Gossypium hirsutum
  Clone ID: LIB3829-029-Q6-K6-E12
cccagcgtccgttcttctttaatatataaccatcatcgccattggctaactattcgcaggttgccactaggtactgcacaggaaaaataaagcttttgctataataaactggatctacgaaagaagagtgaagaggcggcttgtctttttcaggtattggatgcaatggcgaaatcgctcgactgccggcattaaagctgaaagccacagcaacacaggtatttcacttataccacattatgctataatttatctgctaattgctatgcactttgaaattttgaggattccaagtataatgctttttattactagcctctggtttatggagagctctatcttcattagtaactgaacatacatcctaacaatttgtgggagatgaccataatgaacttacagacatgggttattctcaatcaatgaatgcgtgaagggttatacatgcaacgaaacatgggtcaactca

SEQ ID NO: 4254 - DNA, 539 bp, Gossypium hirsutum
  Clone ID: GOSHI-09MAY01-C361_7
ccaaaagtgaaagctcaagtttcagaagttaaaggagttatgatggaaaccattgagaaggttctggcccgtggtgagagaattgagcttctggtggatagaacagaaaatcttcgttctcaggcacaagattttcggcagcagggaacccagatgaggagaaagatgtggttacagaacatgaaggtaaagcttatagttctcggaatcttggtcgctttgatcctcatcattgtactgtctgtttgtcacggcttcaaatgttcatgaattgcatgtccgctctacattccatcggcaactcccagatcagaattattgcaatcacaagtaatgtctaatgcttcttctagttagatttcttttctttttttgtgaaattacatgtgggtcatgtataaccatatcagaagactgcatttagaatataagtttgtgtttctggatcccaaaaaaaaaaaaaaaataaataattaataaataataaaaataaatttttaaatattatttttttttttattatataattaattttattt

SEQ ID NO: 4255 - DNA, 1044 bp, Gossypium hirsutum
  Clone ID: GOSHI-09MAY01-C361_3
cttttccaaaaacctccgatacttcctctctccctttcctccgattccatatctctctctctttctgctagggtttgggagttagtgaagaaggggttgttatttcatggggcaacaatcgttgatctacgccttcgtggcacgaggcaccgtggtcttagccgactatacggagttcaaccggaaacttcaccggcatagcttctcagtgtctccagaaacttccttcttcaaacaacaagttcacttacaactgcgatggccatacctttaactatctcgtcgataacggcttcacttattgtgtggttgctattgaatccgttggcagacaggttcctatggcatttcttgagagaattaaagaggatttcaccaagagatatggcggaggaaaagctgcagctgcccctgcaaacagcctgagcaaggagtttgggccaaaattaaaggagcatatgcagtattgcattgatcatcctgaggagatcagtaagattgccaaagtgaaagctcaagtttcagaagttaaaggagttatgatggaaaacattgagaaggttctggaccgtggtgagagaattgagcttctggtggatagaacggaaaatcttcgctctcaggcacaagatttcaggcagcagggaacccggatgaggagaaagatgtgggtgcggaacatgaaggtgaagctgagagttttcggaatcctgatcgcattgattctcattatcgtgctgtccatttgcggtggcttccattgttgaagaagaatacgctcatctgctcggctatggactctatttcctcttcatggatcagaggtattgttgcagtcgcacaactgtattgaggctcgtctgcctatacatttcttgattacacgttcttttttattttctggtgtagcctaaatcacaagactgtgtgctgtatattacagtttggattcttttgattgcattaagttcattgatgtgtggaaattcattatccgtctttttgaaactggattttgatatataaaaattgataattataatt

SEQ ID NO: 4256 - DNA, 995 bp, Gossypium hirsutum
  Clone ID: GOSHI-09MAY01-C361_2
aagcgaaaaggggaaaggaaacaactctccttccttccgacgataaaaacccttccccttcctcttgctcttcatttcaattcattcttccttagtcaaaggactgtgatggggcaacaatcgctgatctacgccttcgtggcacgaggcaccgtcgttttagccgactacaccgagttctccggcaacttcacctccattgcttctcagtgcctccagaaacttcctgcttccaacaacaagttcacttacaactgcgacggccatacctttaactatctcgttgataacggctttacttactgtgtggttgctgttgaatctgctgggcgacaggtgccaattgcctttcttgagagaattaaggaggattttaccaagagatatggtggaggaaaagctgcagctgctcctgcaaacagcctgagcaaggagtttgggccaaagttgaaggagcatatgcagtattgcattgatcatccagaggaggttagtaagattgccaaagtgaaagctcaagtttcagaagtcaaaggagttatgatggaaaacattgagaaggttctggaccgtggtgaaaaaattgagcttttggtggataaatcagaaaatcttcgctcccaggcacaagatttcaggcagcaggggacccagatgaggagaaagatgtggttacagaacatgaaaataaagctgatcgtgctcgggattctgatcgccttgattctcatcatcgtactgtctgtctgtcatggcttcaactgttgatgaatcactcagttgctatattctattcatttgcccactcattgatcggtgttgtagctgtcaccagtaatattgatgctcctcatagttagtagttacagttttctttaattccacgtccttttctgctgtagcctaatatcagaagactctctgcatatatactgagattcgaactatggaaattgaattttgaaatatataaaaatatcaaataaggtactttc

SEQ ID NO: 4257 - DNA, 793 bp, Gossypium hirsutum
  Clone ID: GOSHI-09MAY01-C361_1
atcggttctacacttaatcccacgcctcccggttaccttagcttctcatctaagcgaataagacgaaggagagtctccttcctttccatttctttttccttttccaaaaacctccgatacttcctctctccctttcctccgattccatatctctctctctttctgctagggtttgggagttagtgaagaaggggttgttatttcatggggcaacaatcgttgatctacgccttcgtggcacgaggcaccgtggtcttagccgactatacggagttcaccggaaacttcaccggcatagcttctcagtgtctccagaaacttccttcttcaaacaacaagttcacttacaactgcgatggccatacctttaactatctcgtcgataacggcttcacttattgtgtggttgctattgaatccgttggcagacaggttcctatggcatttcttgagagaattaaagaggatttcaccaagagatatggcggaggaaaagctgcatctgcccctgcaaacagcctgagcaaggagtttgggccaaaattaaaggagcatatgcagtattgcattgatcatcctgaggagatcagtaagattgcaagtgaagctcatattataattaatgagtttgttgaaacatttgaaggtacatacctgttataaattgtctctcgtggtatactattactttatctcataccatcttctatctagtaccatatgggcattatggtacatatcattatatcatgataccgtcttgactcattctatataatatagctaagttata

SEQ ID NO: 4258 - DNA, 555 bp, Gossypium hirsutum
  Clone ID: uC-gsronu33B005b12b1
ccctctcgtccgcccacgcgtccgaaggggaaaggaaacaactctccttccttccgacgataaaaacccttccccttcctcttgctcttcatttcaattcaatcttcctgagtcaaaggactgcgatggggcagcaatcgctgatctacgccttcgtggcacgaggcaccgtcgttttagccgactacactgagttctccggcaacttcacctccattgcttctcagtgcctccagaaacttcctgctttcaacaacaagttcacttacaactgcgacggccatacctttaactatcttgttgataacggctctacttactgtgtggctgctgttgaatccccttcgcgacaggtgcccaattgcctttcttgtgagaatcacggagggctttcccccgagtctttgtcgaggtctcagttttccttttctttcctccatctatcattttttcccttatccccatttcattctttcttttctcccattcactctcccccattgttctcttttttatatattaactctcttgtccatctcttctccttcctttttt

SEQ ID NO: 4259 - DNA, 567 bp, Gossypium hirsutum
  Clone ID: LIB3829-007-Q6-K6-F6
cggccgcgtgggtttcaccaatataatggtggaggaaaactgcagctgcccctgcaaacagcctgagcaaggagtttgggccaaaattaaaggagcatatgcagtattgcattgatcatcctgaggagatcagtaagattgccaaagtgaaagctcaagtttcagaagttaaaggagttatgatggaaaacattgagaagttaaccaatttttttcaggttctggaccgtggtgagagaattgagcttctggtggatagaacagaaaatcttcgctctcaggcacaagatttccggcagcagggaacccagatgaggagaaagatgtggttacagaacatgaaggtaaagcttatagttctcggaatcttggtcgctttgatcctcatcattgtactgtctgtttgtcacggcttcaaatgttcatgaattgtatgtgcgctctacattccatcggcaactccaagatcagaattattgcaatcacaagtaatgtctaatgctctttctagttagatttccttggttcttttttttttttttggaaatcacatgtgggttatgtata

SEQ ID NO: 4260 - DNA, 452 bp, Gossypium hirsutum
  Clone ID: LIB3585-009-P1-K1-H5
cccacgcgtccgcccacgcgtccgcccacgcgttcgggccgccccggaaatttgaaaaaaaagatctcaaggaaactcaactctcctccttcctttctttttcttctctttcagcaataaaatcctgtccatttctttctctctgttacccttcgcaaagcaaagaacctcaaatcctcttctatcgtcctttgtttacagagatttgtatttgtttctatctgatagggttaaggagttagtgtgatggggcaacaatcgctgatttacgccttcgtggcgcgaggcaccatggttttagccgactacaccgaattcaccggcaacttcactggcatagcttcttaatgccttcagaaacttcctgcttccaacaacaagttcacttacaactgcgatggccatacctttaactatttcgtcgtttacgggtacacttactgcgtgggtgc

SEQ ID NO: 4261 - DNA, 475 bp, Gossypium hirsutum
  Clone ID: LIB3828-008-Q1-N6-H4
gatccagaaacacaaacttatattctaaatgcagtcttctgatatggttatacataacccacatgtgatttccaaaaaaaaaaaaaagaaccaaggaaatctaactagaaagagcattagacattacttgggattgcaataattctgatcttggagttgccgatggaatgtagagcgcacatacaattcatgaacatttgaagccgggacaaacagacagtacaatgatgaggatcaaagcgaccaagattccgagaactataagctttaccttcatgttctgtaaccacatctttctcctcatctgggttccctgctgccggaaatcttgtgcctgagagcgaagattttctgttctatccaccagaagctcaattctctcaccacggtccagaaccttctcaatgttttccatcataactcctttaacttctgaaacttgagctttcactttggcaatcttactgatctcctc

SEQ ID NO: 4262 - DNA, 232 bp, Gossypium hirsutum
  Clone ID: LIB3584-018-P1-K1-H9
cccacgcgtccgtgggtcatgtataaccatatcagaagactgcatttagaatataagtttgtgtttctggatccttttgatagtagtaagtttgttgacgtgtggaaatatgattaagcatctttggaaaattaatcttgattaagttcctataatcaagcctttggattttctataacgtttctgataatatatttcatattatgtatacaatattttattgtctgtcttc

SEQ ID NO: 4263 - DNA, 629 bp, Gossypium hirsutum
  Clone ID: GOSHI-09MAY01-C311_1
gtcaaaattaaatcccatccgccatgaattcccttctccttctccttgtcaaaaccctcacttttttcaactcctaaaagcctaaaccgtgcaaaaaagaaccaaacccatttcttaatcggatccaaaaccccatgtacttatcggagaaaccccgttccatagatttgtacaaggaggaaggtcctgctaccgcccgtgacatgatcattgacgtcactaccaatggagatttgccacctcaccaccaccaccaccctcctcctcaccagcagcaaatgatcttaggtgaaagcagctgcgaagacccagaagtcaaagcccccaagaaacgagccgagacctgggttcaagacgaaactcgaagccttatcgcctttcgaagggaaatggatggccttttcaatacttcgaaatccaacaagcacttgtgggagcagatatcggctaagatgagagacatagggttcgatcgggccccaactatgtgtacagacaaatggaggaacttgttgaaggagtttaaaaaagctaagcatcaagatagagggagtgggtctgctaagatgtcttactataaggaaattgaagagattttaagggagagaacgaagaatgcttataagagt

SEQ ID NO: 4264 - DNA, 649 bp, Gossypium hirsutum
  Clone ID: GOSHI-09MAY01-C301_1
gtttcctacattttctttgatttttcgcagtttaggttacagtgatgaagccgttgctgttatgttttgcttttgctgtgatcgtcggcatcggaaatgcggcggcgatggacaccggagggcttagcagagacagttttccgaagggatttgtgttcggaactgcaacttcagcttatcaagttgaagggatggctaataaaggcggccgaggaccttgcatttgggatgtttatgttaaacaaccaggccatattgctaataatgatactgctgacgttgctgttgaccagtaccaccattacaaggaagatgtagatttgttggcaaatttcaattttgattcttatcggttctcaatttcatggtcaaggatctttccagagggtgttggaagagtaaattgggagggagttgattattacaacaggttgatcaattacttggttaagaaaggtattactccgtatgggaacttgtaccattatgatctccctcaagctcttcagagaagtacaatgggttcttgaaccgtcaaattgtggaaaattatgctgattatgcaaagttttgtttcaaaacattgggggataaagtcaaaaactggtttacattcaatgaacccagaatcggggttgtttttggtttt

SEQ ID NO: 4265 - DNA, 2079 bp, Gossypium hirsutum
  Clone ID: GOSHI-09MAY01-C291_1
ccggttcgccccggcgttcggaaggattcaaactccctcgacccatttcattttggtacttgaatcactgtgaatgatggctagacctagacggtgacctttggcagtggtcgaaattttcactggagtcaaaatctggaaagcttttatcttcccggcagagaaagcaaagagaatttgggaagctcatttggattccatcagcattggctgcttactcactctaattttgccccaagtctccaaatttgatgtgctgactggttgaatcggctaacccaaccggaagccgatatgtcctcaactctgctagaggtgactcgggctgctcacgaagatgtggaacggcttgagcggctcatagtgaaggacttgcaaaatgatccacctaccacaaaagacggattgtatcaaagccaccgcgtccgcaataatatcgacaccatcatctccaccacggagaagctagttgaaatatacgacgataaagacaatgctaggaaagacgaaatcgctgctcttggaggtcaaacggctactggagttaatgtctttagtgctttttatgatagattgaaggagattcgtgagtaccacagaaagcacccggctgctcgtcttgtcaatgctaatgaagaggatgaggctttacttaaggaagaaccagttattgagttcagtggcgaggaagcctttggtcggtacctggacctgcacgaattgttcaatcagtacattaattctaaatttggatccaaaattgaatactcagcttacctcgacgtcttttcacagccgcacaatatcccttggaaattgaagtcaacacggcaattcagggagtacatggagaatttgctggagtatcttatttacttctttcagaggactgaaccactgcaagatcttgacagaatcttttccaaggttgaggctgagtttgaggagcagtgggctaatggccgggtacaaggatgggaaaagcaagggcaagaaaatgaagatgatcctgcgcaacataccatgattgatcttgattattacagtacagttgaagagcttatggaagtgggtccagaaaagttaaaggaggctttggcatcattaggactaaaaactggtggtactgtccagcagcgtgcagagaggcttttcctaaccaagcacactcctctggaaaagctggacaaaaagcattttgcaaaaggctcactcggacctcgacaaaatgggtctactgcagtttcacaagacattaacagtctgaaacatattgcattgatggaggccaagatgaagaaactcgctgatttactgagtaagacaattgaacaaacaaaagaaaatgtggtaaagaagcaagcattgacatatgaggaaatggaacaagaacgtgaggaggaagagacacaagttgacacggaaagtgatgatgaagatcaacagatctataatcctcttaaattgccaatgggttgggatggcaagcctataccttactggctttacaaacttcatggtcttggtcaggagtttaagtgcgagatttgtgggaactacagctactggggccgtcgggctttcgagagggcatttcaaagaaatggcggcatcaacatggcatgcgatgccttggtatccctaacactaagaacttcaatgaaataaccaatattcaggaagcacaagaactgtgggagaagataagagaacggcaaggagtgaacaagtggcgtccagatcttgaagaagaatacgaagataaagagggcaacatttataacaagaagacgtataccgatctgcagcggcaaggactgatttaaagacgcttccgttaagaaacggagtgttttgtgtttgacatggtgcgtatcgctgctatggtttccttggtcatcatgtatgtatgattaatgcttttgtgggaagcctgaggggtagaagttggaatagtttaattgtctcaatttggagctgaactaaactcaaatactagttagttcaaagtgagttaaaacctggaagtttcatttgcccaagaccttgtgaatacgaaagctgagccattgacgcctt

SEQ ID NO: 4266 - DNA, 647 bp, Gossypium hirsutum
  Clone ID: uC-gsronu33B038f02b1
cccacttttccgattagtggaggccaagatgaagaaactctgtgatttactgagtaagacaattgaacaaacaaaagaaaatgtagtaaagaagcaagcgttgacatatgaggaaatggaacaagaacgggaggaggaagagacacaagttgacactgaaagtgatgatgaagatcaacagatctataatcctcttaaattgccaatgggttgggatgggaagcctatcccttactggctttacaaacttcatggtcttggtcaggagtttaagtgcgagatttgtgggaactacagctactggggtcgtcgggccttcgagaggcatttcaaagaatggcggcatcaacatggcatgcgatgccttggtatccctaacactaagaacttcaatgaaataaccaatattcaggaagcacaagaactgtgggagaagataagagaacggcaaggagtgaatttagacgagaatcccaagaaaataggtgggctttaacttcagccgattttctttgtattagagaaagaacaatgaattttcttctatttttaattaattttccttctttttttttgatattatgccctttacattgaaaaatggtagtttatttttaatgaacctgttttgttgtttttgagcaacc

SEQ ID NO: 4267 - DNA, 371 bp, Gossypium hirsutum
  Clone ID: GOSHI-09MAY01-C281_24
cccactcgtccgggagtatcggtcctcaaagttcattttacccgtccggcgatttatcgtggaaatatagctccgagagacgtcgttcgaagagaggtagaggagtttaggacgcgcgatggctggctcgtggagagcacgcggctctttggtggttctagcgatagttctgctcggatgtctctttgcaatctcaattgcaaaggaggaagccacgaaattggggacagtcattgggattgatcttggtacaacttattcttgtgttggtgttcacaagaatggtcatgtcgaaatcatagcccatgaccaaggtaaccgctgtacgccctctttggtggctttcactgacagtgagaagctgattggtg

SEQ ID NO: 4268 - DNA, 417 bp, Gossypium hirsutum
  Clone ID: GOSHI-09MAY01-C281_23
agacagagagacatcaacattagaccttaatagaaagatgttagattctcgttccgacagtcaagaagtagagaaaaatgcattatcaaaagatgagaagaagaatgcagcaggccggtactatccgtaaaaacggctacatcgtcatcaaaggccgtccttgcaaggttgtcgaagtttccacttccaagactgggaagcacggacatgctaagtgtcactttgttgggatcgacatcttcactgctaagaagctggaagatatcgttccttcttcccacaattgtgatgtgccgcacgtcaaccgtactgattaccaattgatcgacatttctgaggatggaatttgtgagcttgctgactgagagcggagacactaaggatgatctgaggctccaactgatgaaaacttgttga

SEQ ID NO: 4269 - DNA, 554 bp, Gossypium hirsutum
  Clone ID: GOSHI-09MAY01-C281_19
ttttacgcgttcgcccacgcgtccgcccacgcgtccggaaagttgaaaccgtagtgaaagaggcacttgagtggcttgatgacaaccagagtaccgagaaggaagactacgaggagaagctcaaggaggtagaggcagtatgcaacccaatcatcacagctgtgtaccaaagatctggtggagccccaggtggtggatcaactgaagaagatgatgattctcatgatgaactttaaaaaactggtaatgccattttgattgctgaaacaagcaaagcaaagcaaagggtgagaaggatgagagcataggtaggtgagatgaggatatactggaattgttctccatggtagaagttaaaaaagggagaagtatatccccctttggtcggatgttatttttgggtgaatgaatacgttttaacggatattttttttgttgttttaaaaaaaaatatatattataaaaatatatattattatttaacttttaattttatttatatttatatcttttatttttttttctttttttttttatatatttatttatttatt

SEQ ID NO: 4270 - DNA, 367 bp, Gossypium hirsutum
  Clone ID: GOSHI-09MAY01-C281_18
cagaaacataactcggatcctttctggcgttgaccctgtttactgaacaatttaacttgtggggatggcaccgtcagcaatagcaggtgcgccggcagcattctcaggaggagcaaatgaggcagcaccggcaccatctcccggcagctcaggctctcaagttgtttctgcttcaatggcagctcctatcttacgcttcataattatgttaacctctatgtactaagctatcctctcctgttgattcacttccccttttgtattgacgatgagggtcggagtaggtggcattgattttgtgacctttggaccatccttgtgcgcatattagattatatttttgtctgaaaaaaaaaaataccatggg

SEQ ID NO: 4271 - DNA, 766 bp, Gossypium hirsutum
  Clone ID: GOSHI-09MAY01-C281_15
ggacacagagctcttgggaagcttaggagggaagctgagcgtgccaagagagctctcagcagccagcaccaggtccgtgtggagattgaatcactttttgacggtgttgatttctccgagccactgaccagagctcgctttgaggaattgaacaatgacctgttcagaaagaccatgggacctgtgaagaaggcgatggaagatgctggtttgcagaagagccaaattgatgagatcgttcttgttggtggaagcactagaattccaaaataggacacatgcattctaccattggaaccgcaatgatgatgggaaaaaagtggcaactgactcgtttgtattacacaatcagtactggtcaagcaatctgagacgaagaaaactgaagaagcatcatttgagtagcgtgcttaagagtattgcttcttattgagaagatgaactttcgactagagtatttcatctctggtacagatttggttgattaaatttcagtaagaagatgaaaatgccaaaattaatcaaatcaagtaagcaaagatgctaaggagttttggcattttcttctttttcttcgaaatcatgcttcaaaatgaactctttaaatggctcataaattgtatgctgtagctagaattatcactgttcatgaattaggtggatttacttcgattctaaatctctcttttcttttttggctacacccacagttcgggttaaaataaacaggtctgtgtaaagcttgctgtttgataatttctgaatc

SEQ ID NO: 4272 - DNA, 538 bp, Gossypium hirsutum
  Clone ID: GOSHI-09MAY01-C281_14
ttgtttaatttgcggaggaggacaagaagctgaaggaaaagattgatgctcgcaacagcctggagacttatgtttacaacatgaaaaaccagattagcgacaaggacaagcttgctgacaagcttgaatccgacgagaaggagaaagttgaaacggccgtgaaagaagccctcgagtggctagatgacaaccagaatgccgaaaaggaagattttgaggagaagctcaaggaagttgaggctgtttgcaaccctatcatcacagctgtatatcaaagatccggcggaggtcctggcggtgctgcgtcaaatgaagaagaggatgattcacatgatgaactctaaaacaaaaatcttcgatggctactgccgctgaaaagtgattgagtttattagagttaggtgtaatgaggatactgggctaatttttgtagaagttctaaaagggagaaaaatattcccgctttcttcgcttgtttttttttttgcttggtgaatgtatacattttgaaggattagaaaaatggtaatacattttc

SEQ ID NO: 4273 - DNA, 766 bp, Gossypium hirsutum
  Clone ID: GOSHI-09MAY01-C281_11
ccgggtcgacccagcgtttctcccgcgtccgccccgcgtccgggcacccaaagacccctttgaaacccggaatgtcggacgaggagcatcatttcgagtccaaggccgacgccggcgcttccaaaacctaccctcagcaggccggcaccatccgcaagaacggttacatcgtcataaaaaatcgcccctgcagggggggggatgtttccacctccaagaccgggaagcatggtcatgcgaagtgtcactttgttggaatcgatatcttcactgccaagaagctcgaagatattgttccttcttcccacaattgtgatgttccgcatgtcaatcgtactgactaccagttgattgacatttctgaggatggatttgtgagtttgctgactgagagtggagacactaaggatgatctgaggctcccaactgatgagaacttattgaaacagatcaaggatggttttgctgagggaaaagacctggttgtgtctgtgatgtctgcaatgggggaggagcagatctgtgctctgaaggacattggtcctaagtaatttgagattttattttcagacttttattgcaattttagattataactttttattttttttaagaactttaatagctttgtgtcttggaatttgggtttttttttattttttttattttaatatatctggatacgagaaaaacaccattgctgttatcttattgttgtgatatcactctctctttttctacttcaaggttttgttcttgggttttc

SEQ ID NO: 4274 - DNA, 867 bp, Gossypium hirsutum
  Clone ID: GOSHI-09MAY01-C281_10
ctctcgcgtccgcccacgcgtacgcccacgcgtgcgctcaaatcgaagttacatttgaggttgcggcatggggggtccgagccgtccggcccgtccgcaaaggcacaggtaaatcagagaagatcacaatcaccaacgacaagggtcgtttgagccaggaggagattgagagaatggttcgtgaggccgaagaatttgcggaggaggacaagaaggtgaaggaaaagattgatgctcgcaacagcctggagacctatatctacaacatgaaaaaccagattaatgataaggataagctcgctgacaagcttgaatccgatgagaaggagaaagttgaaaccgcagtgaaagaggcacttgagtggcttgatgacaaccagagtgccgagaaggaagactacgaggagaagctcaaggaggtagaggcagtatgcaacccaatcatcacagctgtgtaccaaagatctggtggagccccaggtggtggatcaactgaagaagatgatgattctcatgatgaactttaaaaaactggtaatgacattttgattgctgaaacaagcaaagcaaagcaaagggtgagaaggatgagagcataggtaggtgagatgaagatatacaggaatttttctccatggtagaagttaaaaaagggagaattatatccccctttgttcggatgttatttttgggtgaatgaatacgttttaacggatattattttttttgttttcatgactctctcccctggaacttgtgatctcttttatctatgattgaatctggttctcttgatccaagaaagaaaaattcagtaaatgtccatggtagaaaatgttagtatttcaatttattacgactgctata

SEQ ID NO: 4275 - DNA, 954 bp, Gossypium hirsutum
  Clone ID: GOSHI-09MAY01-C281_9
agcttttagaaaacgcagcatatttttctaatcaccttccttcaaatcaatcattattggaaatcaacggctactcttcactcaccggactcactggataacaacgaataaaaattgaaaaccctaagatttcttaaagattaccccaatttctatttatataatacgcccacgccttcctcatctgcgccgcccccaattttctcccttactaacaacaaaaaccctgaaatgtcggacgacgatcatcatttcgaatccaaggctgatgccggcgcctccaaaacctatcctcagcaagccggtactatccgtaagaacggctatatcgtcattaaaggccgtccctgcaaggttgtggaagtttccacctccaagacggggaagcacggtcatgctaagtgtcacttcgttgggatcgatatcttcactggcaagaagttggaagatattgttccctcctcccataactgtgatgttccgcatgtcaatcgtactgactaccaattgattgacatttctgaggatggatttgtgagcttgctgactgatagtggtgatactaaggacgatctcaggctcccaactgatgagaacttgttgaaacagatcaaggatgggtttggtgagggaaaagacctggtggtgtctgttatgtcggccatgggggaggagcagatctgtgctctcaaggacattggtccgaaatagtttgaggtttggtgattctaagtatgttattacaaatcttaaatggaattatttttataagtggcttttaatatcttgcctttccaagacttggggtagggtataaatgttgtttgaatgggtttgttttgtttggtttggatgcctaaagataaaaaggaaaaaaaaaacacctttactagttccttgttgggccatggttaactgattttatcttttcaaggcctttcttcttctttgttg

SEQ ID NO: 4276 - DNA, 831 bp, Gossypium hirsutum
  Clone ID: GOSHI-09MAY01-C281_8
cggccgcgtctttgtgcaaaaccagaaagtaaaaagaacagagctttgatatcctaagctaatgtcggacgaggagcaccatttcgagtccaaggccgacgccggcgcctccaaaacctatcctcagcaggccggtactatccgtaaaaacggctacatcgtcatcaaaggccgtccttgcaaggttgtcgaagtttccacttccaagactgggaagcacggacatgctaagtgtcactttgttgggatcgacatcttcactgctaagaagctggaagatatcgttccttcttcccacaattgtgatgtgccgcacgtcaaccgtactgattaccaattgatcgacatttctgaggatggatttgtgagcttgctgactgacagcggagacactaaggatgatctgaggctcccaactgatgaaaacttgttgaaacagatcaaggacggtttcgctgaggggaaagaccttgtggtgtctgttatgtcggcaatgggggaggaacagatttgtgcactcaaggacattggtccaaaatagtaagagacttttatttgcagcctgtttattgcgattttaaatggaaagatttttgttaaaaagcgtttatagtttgtgcctgatataaatggtgttggattgtttatcatgtttggtacggataccaaaaaaaaaaaaaaccaccagaaatagttgtttgttgtgctatgttaaaactgttcctcttcgggttaagaaaccgtcacgttattatattgatatttataaaaataaaatataaataaactcgacacacttggctctttgttttcaaaaaaaaaaaacaaaaa

SEQ ID NO: 4277 - DNA, 689 bp, Gossypium hirsutum
  Clone ID: GOSHI-09MAY01-C281_7
cccccacgcgtccgccactccgcccatcgtcgcttttgcaaagaaccaaaaaacatcttgaaacccggaaatgtcggacgaggagcatcatttcgagtccaaggccgacgccggcgcttccaaaacctaccctcagcaggccggcaccatccgcaagaacggttacatcgtcataaaaaatcgcccctgcaaggttgttgaagtttccacctccaagactgggaagcatggtcatgctaagtgtcactttgttggaatcgatatcttcactgccaagaagctcgaagatattgttccttcttcccacaattgtgatgttccgcatgtcaatcgtactgactaccagttgattgacatttctgaggacggatttgtgagtttgctgactgacagtggagacaccaaggatgatctgaggcttccaactgatgacaacttgttgaaacagataaaggacggttttgctgaggggaaagacctagttgtgtctgtaatgtcggcaatgggtgaagaacagatctgtgctctcaaggacattggtccaaagtaggctttgagatataaatggaaatggttcttataagagcttattaatgactttgcactgtccaagatattggacaagtataaaatgctcaatttccatggctgttctattattattattaggaacctttctctgctcccaa

SEQ ID NO: 4278 - DNA, 824 bp, Gossypium hirsutum
  Clone ID: GOSHI-09MAY01-C281_6
cttttcatttcttccacaaatctcccatttttcttcttctccctaagacgcttcgccccataacccatctaacaatggtagcctcaaaattctgttttgctttgtctcttgctattctttcaatctgggccgttgatgctgcccaacaccatgctctggcgccctctccttcttcccccgtggactgctcctctctgattctcaacatggcggattgtttgtcctttgtgtcgagcgggagcaagacgtcgaagccggaaggaacctgttgttctggcttgaaaactgtgttgaaagctggaccccaatgcttgtgtgaggcttttaagagcagtgcttctctgggtgtcactttgaatgtcaccaaggccatgactttgcctgctgcttgcaaagtctctgctccttctgccactcaatgtgcattgtctctcagtcctactggtgcaccaggtatggcaccgtcagcaatagcaggtgcgccggcagcattctcaggaggagcaaatgaggcagcaccggcaccatctcccggcagctcaggctctcaagttgtttctgcttcaatgggatctcttatcttaggcttcataattatgttaacctctatgtactaggctaccctctcgtgttgatttacttccccttttgtattgatgatgaaggtggagtaggtggcattgattttgtgagctttggaccatccttgtgagcatattagattatatattagtctgatatttgcaactcgtattctatactaatataccataatgtatgtcgaatttttctatgcttaaatttatgtatggaagtttttgatc

SEQ ID NO: 4279 - DNA, 1321 bp, Gossypium hirsutum
  Clone ID: GOSHI-09MAY01-C281_5
caaagcccaagtgtcatttgaaaatcactcgtcctggtattaacggtacagcgtttcgattttcatagagaaacctcgaaacttctacgtagtgagaggaaagtttgagtacgtgcgatggctcgctcgtggagagcaagcggctctttggtggctctagctatagtcttgtccggatgcttctttgcaatctcaattgccaaggaggaagccgcgaaattgggaacagtcatcggaattgatcttggtacaacttattcttgtgttggtgtgtacaaaaacggtcatgttgaaattatagccaatgaccaaggtaaccgtattactccatcgtgggtggctttcactgacagcgagaggctcatcggtgaggctgcaaagaatcaggcagctgttaacgctgaaagaaccatctttgacgtcaagagacttattggaagaaagttcgatgataaggaggtccagaaggacatgaaacttgttccgtataagattgtgaacaaggatggcaaagccttatattcaagtaaagattaaggatggagagaccaaggtcttcagtcctgaggagatcagtgctatggttctgactaagatgaagcgacacacgctgaagctttcctcgggaagaaaatcaaggacgcggtggtcactgttcctgcgtacttcaatgatgcccagagacaagccaccaaggatgctggcgttattgctgggctcaatgtggccagaattatcaatgaaccaactgcagctgccattgcctatggtttggacaagaagggtggtgagaaaaacattcttgtctttgaccttggtggtggaacatttgatgtcagtatcttgacaattgacaatggtgtattcgaggttctttccacaaatggagacactcatttgggaggtgaggattttgaccataggattatggactacttcattaaattgattaagaaaaagcatggaaaggacatcagcaaggacaacagaggctcttgggaagcttaggagggaagctgagcgtgccaagagagctctcagcagccagcaccaggtccgtgtggagattgaatcactttttgacggtgtcgatttctccgagccactgaccagggctcgctttgaggagttgaacaatgatctgttcagaaagaccatgggacctgtgaagaaagcaatggaagatgctggtttggagaagcgacaaattgatgagattgttctggtaggtggaagccctagaaattccaagttcaacagctcctcaggactacttcgtgggaaagagcccaacaggtgttacccggtgaacattgcttat

SEQ ID NO: 4280 - DNA, 794 bp, Gossypium hirsutum
  Clone ID: GOSHI-09MAY01-C281_4
cggacgcgtgggcggacgcgtgcgcgccattttgttctgcaacattcgaaaaaaagaaaaagtttgaaacccggaaatgtcggacgaggaacaccattttgaatccaaggccgacgccggtgcctccaaaacctacccacaacaggccggaaccattcgtaagaatggttacatcgtcataaaaaaccgtccctgcaaggttgttgaagtttcgacctccaagactgggaagcatggtcatgctaagtgtcactttgttggaattgacatcttcaccgccaagaagctggaagatattgttccctcttcccacaactgtgatgttccacatgttaatcgtactgactaccagttgatcgacatttctgaggatggatttgtgagtttgctgaccgaaagtggagacactaaggatgatctgaggctcccaactgatgagaacctgttgaaacagatcaaggatggttttgctgaggggaaagacctggttgtgtctgttatgtctgcaatgggggaagagcagatctgtgctctcaaagacattggtcctaagtagtttcaaatttaagtagtttcaaattcatttattgcaaatcttagatggaaccataaaagactttggtagttctaaatgcggttttgatgttttatttgggtttggatagaaaaaagagaataacaatataactagtttcttgttgtgctatggattactgttttgcttttccttttcaataatttttattatctcgtctttatttttgtgttggtaaaaaaaaaaaaaaaaaaaataa

SEQ ID NO: 4281 - DNA, 2096 bp, Gossypium hirsutum
  Clone ID: GOSHI-09MAY01-C281_3
gcctgggtggtgggacgttcgatgtcagtatcttgacaattgacaatggtgttttcgaggttctgcccccacgcggacgccactcgcgtccgcggacgcgtgaggattttgaccagagggttatggactacttcattaaactgatcaagaaaaagcatggaaaggacatcagcaaggacaacagaggctcttgggaagcttaggagggaagctgagcgtgccaagagagctctcagcagccagcaccaggtccgtgtggagattgaatcactttttgacggtgttgatttctctgagccactgaccagggctcgctttgaggggttgaacaatgatcctgttcagaaagaccatgggacctgtgaagaaggcgatggaagatgctggtttgcagaagcgccaaattgatgagatcgttcttgtaggtggaagcactagaattcccaaggttcaacagctcctcaaggactactttgatggaaaggagcccaacaagggtgttaacccggatgaagcagttgcttatggtgctgcagtacaaggaggcatcttgagtggagagggtggtgatgaaaccaaagatattcttctccttgatgtggctcctcttacccttggtatcgagactgttggtggggtaatgaccaagttgattcctagaaacaccgttatcccaaccaagaagtcacaagttttcaccacttatcaggaccagcagactaccgtctccattcaggtctttgaaggtgaaaggagtctcacaaaggattgtaggttgttgggaaaattcgatcttactggaattcctccagccccaaggggaacccctcaaatcgaagtcacatttgaggttgatgcaaatggtatcttaaacgtcaaggccgaagacaagggcactggtaaatctgagaagatcactatcaccaacgacaagggtcgtctgagccaggaggagattgagagaatggttcgtgaggccgaagaattcgcagaggaggacaagaaggtgaaggaaaggattgatgctcgcaacagcctggagacctatatctacaacatgaaaaaccagattaatgataaggataagctcgctgacaagcttgaatccgatgagaaggagaaagttgaaaccgcagtgaaagaggcacttgagtggcttgatgacaaccagagtgccgagaaggaagactacgaggagaagctcaaggaggtagaggcagtatgcaacccaatcatcacagctgtgtaccaaagatctggtggagcccgatgcaggtggtgagaaaaataacaaggaagacaaggaacaaaaggaagatccgaaaggcagctgatccaaatcatccacaaggtgaatgtagcaatcgccgtggcagaagcagcaccaacctgagtgattcttggaaggaggtatctgaagagggacgactggcttttcaagccctcttctccagagaggtacttccacaaagcttctctcctccacatgatggaaagaacaaggggcagcaaaaggaaaatgtaggtgcagacaagcaaaatccagtcgagaaagacagagagacatcaacattagaccttaatagaaagatgttagattctcgttccgacagtcaagaagtagagaaaaatgcattatcaaaagatgagaagaacaatgcagaagacggcctgctgaggattggactaggacatgcgaaacttaaggccagccgaactggatttaaaccttacaaaaggtgttctgtggaagccaaggaaaatagagtgatgaacaccggcagtcaaggtgaagagagaggtcccaagagggtacgcttagaaggggaagcttcgacttgacttttacgctattgcatgcaattaacaaatgcgatgtttgtttgttccatgcaatccctaattttttttccccatatctcatttccttttcatatgttgatcttaaagacgagcattacattgcagctcacgagaccctttcgtgtaggtggtgttgtactatctaatatctacattgacttaatcgtctttatagacttttttgaattaaaaactcctctgagatagaagcatgaaagtaagtactgaatctt

SEQ ID NO: 4282 - DNA, 931 bp, Gossypium hirsutum
  Clone ID: GOSHI-09MAY01-C281_2
gcaaaagcaaatactgaagtgaaagttatttgctgacactgagcctcaagaaccaaataaaacaaagaatggaaaacaggtcgaccgatcttcatgtggttccaatacaccttcttctagcgacgtggacttccatgtgtccgaaaataacatggaagacacggaacaaaaggaagattcgaaggcagctgatgcaaatcatccacaagttgaatgtagcaatcgccggggcagaagcagtaccaacctgagtgattcttggaaggtggtatctgaagggggccgactggcttttcaagctctcttctccagagaagtactaccacaaagcttttctgcctcctcatgacagaaagaataaggagaagcaaaagggaagtgtaggtgcagatgagcaaaatccagatcagaataatggagagacatcaattttacacttctccagcgaggcatgccaatcttgttctgaccatcaaggagtcgagaaaaaagtgttgtcaaaagctaagaacattgtggacgagagcttgctgacgattgggctaggacatgaaaagcttaaggcccgtcaaacaggatttaaaccttacaaaaggtgttctgtggaggccaaggaaagcagagtgatgaacacaggcagtcaaggtgaagagaaagatcccaagaggatacgcttggaaggggaagcactgacttgaattacactattgcatccaatcaacaaaggaaaattctgtttgctgcttgtgttctctaattttccccgtgtctgatttactatcatgtttaattttaagacttgcagctcacgagaccttatgtcaaagtgtgtgtactatatgtctatattggcttaatcactttcctggacaatgcagttgtaggtaaaaactcctttgaaatagacttggagctgtagctttttgtattg

SEQ ID NO: 4283 - DNA, 1028 bp, Gossypium hirsutum
  Clone ID: GOSHI-09MAY01-C281_1
cccagcgtccgctccacactccttcaagcagtgaggtagagacagatgcgttagaaaaaccatgaaaaagacaaggaagattcaaaaggagctgaccccaatcatccacaagttgaatgtaaccgtcgtagtagtagaagcaatagcaacctgagtgattcttggaaggaggtatctgaagaggggcggctagcttttcaagccctcttctcccgggaggtactcccacaaagcttttctcctccacatgacggcaagagcaaggggcagcaaaaggaaaatataggtgaagacaagcaaaatccagctgaggaagacgaagaaatatcaactttagatctcaacagcaatacatggggttcttgttctgatcatcaagaaactgtgaaaaatgcattatcaagagacaagaacagtacagaagagggcctgctgactattggattaggacattcaaaactaaaagctggccgaactggatttaaaccttacaaaaggtgttctgtggaagccaaagaaaacagagtgatgaacactggcagtcaaggtgaagagaaatgtcccaagagggtacgcttggaaggggaaccttcaacttgacttttacacaattgcatacaattaacaaaggcaaagtttgtttgttgaatgcaatctctaatgttcttcccccatatcttatttccttttcatatgttgatcttaaaagacttttattcgattgcagctcacgagacttttcgtgtaggtggggtggggtactatctaatatctacattgacttattcgctttcctggacctttttatgcttgctactgcagttttttttttttttttctttttttttctcctctctttccccctcccttcttttttctttttttttcttttcttcttccctcttttttttcttttttttttttttttttcttctttttttcttttttttttttttcttttttttttttcttctttctctctcttctttttcttcccttttttctttttttctctttttttttttttt

SEQ ID NO: 4284 - DNA, 569 bp, Gossypium hirsutum
  unsure (1)..(569): unsure at all n locations
  Clone ID: AI726397.1
acgaaaaaaagaaaaagtttgaaacccggaaatgtcggacgaggaacaccattttgaatccaaggccgacgccggtgcctccaaaacctacccacaacaggccggaaccattcgtaagaatggttacatcgtcataaaaaaccgtccctgcaaggttgttgaagtttcgacctccaagactgggaagcatggtcatgctaagtgtcactttgttggaattgacatcttcaccgccaagaagctggaagatattgttccctcttcccacaactgtgatgttccacatgttaatcgtactgactaccagttgatcgacatttctgaggatggatttgtgagtttgctgaccgaaagtggagacactaaggatgatctgaggctcccaactgatgagaacctgttgaaacagatcaaggatggttttgctgaagggaaagactggttgtgtctgttatgtctgcaatgggggaagagcaaatctgtgctctcaaggacattggtcccaaatantttcaaatccatttattgcaaatcttaaatggaaccataaaagactttggtagtactat

SEQ ID NO: 4285 - DNA, 649 bp, Gossypium hirsutum
  Clone ID: AI055724.1
agaaggtctagctggaagatttttagatccccaaccagagtattctgcattccgagaagctagttatggtcattcgacactggagatccaaaataggacacatgcattctaccattggaaccgcaatgatgatgggaaaaaagtggcaactgactcgtttgtattacacaatcagtactggtcaagcaatctgagacgaagaaaactgaagaagcatcatttgagtagcgtgcttaagagtattgcttcttattgagaagatgaactttcgactagagtatttcatctctggtacagatttgggtgattaaatttcagttagaaaatgaaaatgcccaaattatttaatttagttagcccagatgcctagggggtttgggatttctttttttttctgaaactggtttaaaagggacctttaaggggcaaaaagggttcgtgacctaaattacccggtaaaaattgggggttacctcaattaaatcctcttttttttgggtaaaaaaaaaaacttgtcgtcatttatcctgtcgctctgcgtagcactaaaattttatggtgggtctctttaaaaaaataatttgtggggggcccgcccattcccttaggggggtttaaatgcgggggttaaaatgtgtgggaaaccccc

SEQ ID NO: 4286 - DNA, 534 bp, Gossypium hirsutum
  Clone ID: uC-gsflmaxxa076g03b1
tttgatgcctccactgtttcctctcccaacaatggtggcatcaaacttctctcttgctttgacactcgctgccattatatctgtctgggtggccgctgatgccgcccaccaccaccacacggcgtcggctccttccccttcctcttcctcttcctccgtggactgctcctccctcatcttgaacatggccgactgtttgtccttcgtatctagcgggagtgaagtgttgaagcctgaaggaacttgttgttctggcttgaaaactgtgctgaaaaccgacgctgagtgcttgtgtgaggcttataagagcagtgcttctctgggtgctactctgaatgtcaccaaggccatgactttgcctgctctttgcaaagtctctgctccttctaccactaactgcgcaatatctctcacacccgctggtgcaccaggaatgcaaccatcaacatcggccagtgcgcccacagcatctgccagaaggagcaaatgaagtagcccctgcgccagctcctgctaggtcaggctccccattgc

SEQ ID NO: 4287 - DNA, 463 bp, Gossypium hirsutum
  unsure (1)..(463): unsure at all n locations
  Clone ID: LIB3147-027-Q1-K1-E8
aaaaaagaaaaagtttgaaacccggaaatgtcggacgaggaacaccattttgaatccaaggccgacgccggtgcctccaaaacctacccacaacaggccggaaccattcgtaagaatggttacatcgtcataaaaaaccgtccctgcaaggttgttgaagtttcgacctccaagactggaaagcagcagtcaagtgggtggaatccaaaaaccaaacagaaacaagcaactcaaggatctaaaattaaagggatcatctctcagattcccactaaaatcaagtatttttggcaaggagaaaacaagcaaaccataggagaggattggcacggtaaagtatactgtagatgaacagacacacaaaaagaaaaagatttaatttaagatgcatgatgattttgaggttttgattntgttaaatccgtgttggaataaaattttcatagaaatattcatgggattc

SEQ ID NO: 4288 - DNA, 554 bp, Gossypium hirsutum
  Clone ID: AI728850.1
gtagcttttagaaaacgcagcatatttttctaatcaccttccttcaaatcaatcattattggaaatcaacggctactcttcactcaccggactcactggataacaactaataaaaattgaaaaccctaagatttcttaaagattaccccaatttctataaatataatacgcccacgccttcctcatctgcgccgcccccaattttctcccttactaacaacaaaaaccctgaaatgtccgacgacgatcatcatttcgaatccaaggctgatgctggcgcctcatcttactcatcctcagcatgctggttctatccctattaccggctactttctctttacatgcgttctctgtattgttgtggaactttcctctctaataaggggaatcacggtcatgctaattgtcttttccttgggatctatatcttcattggcaagaatttggaacatattgtcccctcctcccataactgtgatgtcccttatgtcaatcgtactggactacaattgatcgattttcttacgatggatttgtgatcttgcttgatgatc

SEQ ID NO: 4289 - DNA, 501 bp, Gossypium hirsutum
  unsure (1)..(501): unsure at all n locations
  Clone ID: uC-gsflmaxxa043h08b1
ttttgcctccactgtttcctctcccaacaatggtggcatcaaacttctctcttgctttgacactcgctgccattatatctgtctgggtggccgctgatgcgcgccaccaccaccacacggcgtgggctacttccccttcctcttcctcttcctcccgggactgctccctcctcatcttgaacatggccgactgtttgtcccttcgtatccagccggaagtgaagtgttgaaaccctgaacggaatttgtttgntcttgctttgaaacctgtgcttgaaaaccgacgctgagtgcttgtgtgaggcttataagagcagtgcttctctgggtgtaactctgaatgtcaccaaggccatgactttgcctgctctatgcaaagtctctgctccttttaccactaactgcgcaatatctctcacacctgctggtgcaccaggtctgttctgataaatctaatccttatcttttctttgaagtatttcaatgtcatcaaatcttttg

SEQ ID NO: 4290 - DNA, 385 bp, Gossypium hirsutum
  Clone ID: LIB3135-018-Q1-K1-B3
gtacacgcttaaatgtagctcgaccaccatgattctatgtccgatgctgatgcccgggcgtccgaataccttttctggctaggccgtgtctcatcctgcctgaacagctatatcgtgggtaagagacgtgcctgaaaggtttgtgtatgcttctcctccgatacgggcgagcacggacgtgcttagtgtcacttcgtggggagcgatatcttaactggaagtaaggcggagatattgttccctcctcccataactgtgatgttccgcatgtcaatcgtactgactaccaattgattgacatttctgaggatggatttgtgagtttgctgactgaaagtggtgacgctgaggacgatctgaggctccccactgatgagaacttgtt

SEQ ID NO: 4291 - DNA, 421 bp, Gossypium hirsutum
  Clone ID: LIB3148-011-Q1-K1-D2
cccacgcgtccgcccacgcgttcgccacatgttaatcgtactgactaccagttgatcgacatgtctgaggatggatttgtgagttggctgacctaaagtggagacactaaggatgttctgaggttctttacttgatgtgatctttttgaaacatatcaaggattttttaattttttgggatttgtttattgtttttattatttgaatttattttttgatttgcatccatttttactgttgtcattaaggtttttatattttcaaatacgtttatatttttttgttttttttcttatttttgtttatatttcctgtttttattcatatattaaattttatccattttaattttaacatacaaattcttttattgttaataaatatatatttttattttattttttttatattttttgtttta

SEQ ID NO: 4292 - DNA, 319 bp, Gossypium hirsutum
  Clone ID: LIB3828-027-Q6-K6-G11
cggccgcgtgggcggccgcgtgggcggacgcgtgggcggacgcgtgggcaaagatctggtggagccccagtggtggatcaactgaagaagatgatgattctcatgatgaactttaaaaaactggtaatgacattttgattgctgaaacaagcaaacaaacaaaggtgagaaggatgagagcataggtaggtgagatgaagatatacaggaatttttctccatggtagaagttaaaaaagggagaattatatccccctttgttcggatgttatttttgggtgaatgaatacgttttaacggatattattttttttgtttt

SEQ ID NO: 4293 - DNA, 262 bp, Gossypium hirsutum
  Clone ID: LIB3135-041-Q1-K1-B1
gcgctcccaacaatggtggcatcaaacttctctcttgctttgacactcgctgccattatatctgtctgggtggccgctgatgccgcccaccaccaccacacggcgtcggctccttccccttcctcttcctcttcctccgtggactgctcctccctcatcttgaaacagatcaaggatgggtttggtgagggaaaagacctggtggtgtctgttatgtcggccatgggggaggagcagatctgtgctctcaaggacattggtc

SEQ ID NO: 4294 - DNA, 688 bp, Gossypium hirsutum
  Clone ID: GOSHI-09MAY01-C251_1
aacaaaacccactctggccttcaaacaaaaaagagagcacccacaaataccagctaaaaacagcttccttctcattgtaaaagacgatgcagatgtgagaggaaaacccaagtgctttgaaaccagtcatggagattcagagaaccttctccagtacaaagcaaactatgacagtctttgattcgtctgcatccagctcctccaatccctttccacaaaccgcattactgaagccggaactccatcaaccccaaacccagatctttggcttctttgcccttccgctgccatggtatgggctgcatcatttatagaacgaagaataaaaagctttttgataactgtcaaagaatccccttctacgaccaggcaccagaaacccatcattcgcgtgaacagtaacgacttttcacatgcccgtgcttcagcaatgaatgcatcgaacgcatcagcaacatcctctatcagataagtttcggctcctctaatttcacctctagaatctctcgctaaaactgctattatagaagttctagaatctctttgaaaggtagccgtcaaaatttaatcttgatgaaacccaaaactggaggcctccaatacccttttatcagaaaaccatcagaaccaccgaggttctctttgcaaagatttactttctaaacataaccacgaatgaacccaagca

SEQ ID NO: 4295 - DNA, 481 bp, Gossypium hirsutum
  Clone ID: uC-gsflmaxxa097g05b1
ttttgattcgccggcatccagctcctcgagggggtttccttaaaccgggtgcgggaagccaaaactccatgaaccccaaacccagatctttggtttcttggcctttccactgccagggtataggctgtatcattaacagaccgaggaataaaacgctgtgtgatcactgacaaagaatccttttctacgaccagacaccggaaacccatcattcgcgcgcacagttataaccttacacaggcccttgcttcagcaatgaacgcatgagccacatcctgtatcagataagtgtgggctcctataatatcacctataaaatctctggctaaaactgctattgtagaagttctagaatctgtttgaaaggtagcatcaaaattaatggtgatgaaacccaaaactggaggcctacaatccccttttatcagaaaaccatcagagccaccgaagttctctttgcaaagatttacttcctaaacat

SEQ ID NO: 4296 - DNA, 552 bp, Gossypium hirsutum
  Clone ID: GOSHI-09MAY01-C241_4
aggccttcagccacatagaatttgtgtttgaaactaaagtcagtacttgtttggattggctttccttggaatttgaagatgttgcagtgatgaattcagccacggtgaaagacttgaagctcgcaatcgagaagaaagtgattgagttagagcaatccaagatggggcatcgacacatttcatggaggcacgtttgggctaatttctgcctagcacaccacaatgagaagctctttaatgatggcgctgcacttcaggattttggtgttcgaaataattctcaggtacattttttaccttatgttgtctcaaaaggttctgggagacattctaagaggagaaaacaccgtttcttccttggcctgagcaagctttcatgatgacatgccatcattcgggcatccctgttttctgatccaactcattccacaaattcacaatgttccatagcaaagtaaatgtggtacaagtacattggtttctagttgacattttaaataaattttaaagctcttgtaatactaaatttttaataaattagctttatcatcc

SEQ ID NO: 4297 - DNA, 749 bp, Gossypium hirsutum
  Clone ID: GOSHI-09MAY01-C241_2
gttttcttttcctcttcaggtcactgcccccaatctgtaacagctgttccctatcgcccggtcccccccggcgtacctttgccttctccactccaacaccctacggccacctccattgtcgttcacgagtcaggcagtcaccaacggtccaccatcatcgttcaccagtcaggtagtcaccatcggtccaccagtcaatcgctttcaatgaagcataccggcaaccagtaccctttctgcttggttttgggcgactagcatctgcatagtgtaagaatggagtcaggggcgaaggaggaagggaaagtgctgggatacaacagcaaaaaggtgaagaaagtggcgatactttcaacactggccgcactccttgatgatccaattctcgccgatgtccctaagaaacccagtttgtccgatgttgataccctaatcaaccttgaactggggagtgccatgtgtatctctatcttcaaattagatggaacctccttcgatgttgcagtgatgaattcagccacagtgaaagacttgaagctcgcaatcaagaagaaagtgatcgagttagagcaatccaagatgggtcatcgacacatttcatggaggcacgtttgggctaatttctgcctatcacaccacattgggaagctccttgatgatgacgcttcacttcacgattttggcgttcgaaataattatcaggttcattttttaccttatggtggctcaaaaggttctgggagacattc

SEQ ID NO: 4298 - DNA, 564 bp, Gossypium hirsutum
  Clone ID: AW187143.1
aatttctagcggctaatttctaaatccctaaccctaacaaaataactttgccttctccactccaacaccctacggccaccaccattgctaaatcttccttatgttcttgataatgcataagacttcagggatactcctgcttcattgcctcgaaaaggtaaagagttttctatttaccttctcccactcagttttgttgcattgtccctttatacagtacttggcggcttttagttaatcttcattgtgatgcagtcaaacctagagtatacatgattctaggaagaccttttgcttctcgtgtttaatatggtgctgatgctctctcatatagcttaataggatagataattgatcatttgctttcaatcaaggtagaacataaaatgcgcctaatgtcttgagcagctgtgcatatcatacataatgctataaatttgcctcatataggttgattgagctaaatcctttaaaatttcttaaggtcacatcgattttcctgttggttccttggggtttggcgtttgaaggttgggggtttggggtttctgggttcggggtttt

SEQ ID NO: 4299 - DNA, 633 bp, Gossypium hirsutum
  unsure (1)..(633): unsure at all n locations
  Clone ID: LIB3583-052-P1-K6-A11
tttactggggagtgccatgtgtatctctgtggctggggggggatggaacctccttcgatgttgcggtgatgaattcagccacggtngaaanacttgaagctcgcaatcaagaagaagtggtcgagttagagcaatccaagatgggtcatcgacacatttcatggtttatcatcttgtttatgctcttaagccaccctcacattaatcggtggcattttgatgtattagagagaaaaaaaaacttcagagcaattacgtttactataaagttctgtttttgaagattaatttttatttttgtggttataggaggtacgtttgggctaatttctgcctagcacaccacaatgagaagctccttgatgatggcgctgcacttcagggttttggtgttcgaaataattctctggttttgtatttggccccttcacttttctggaaatggtgttttttcttttttagatcattcttttctcatttcctgcttatgatcccaccctggagccttaacatccattgaccttgcaaatatcaacttaaataggattcatatgctaatgaattatgggaatccatcatcccgagtaggtttttataaatatcgttaagaggaatcttaacttaaaatgatct

SEQ ID NO: 4300 - DNA, 646 bp, Gossypium hirsutum
  unsure (1)..(646): unsure at all n locations
  Clone ID: LIB3543-010-Q1-K6-E6
gnattcagccacggtgaaagaattgaagctcgcaatcaagaagaagtgatcgagttagagcaatccaagatgggtcatcgacacatttcatggtttatcatcttgtttttgctcttagaccaccctcacattttttttggccagaaccacccttacattaatcgctggcattttaatgtattcgagagaaaaaaaaaaacagagcaattacgtttactataaagttctgtttttgaagattaattttttttcttttaatgtttactttgtttgtggttataggaggcacgtttgggctaatttttgcctagcacaccacaatgggaagctccttgatgatgacgctgcacttcacgattttggtgttagaaataattctcaggtacattttttaccttatgttgtctcaaaaggttctgggagacattttaagaggagaaaacaccgtttcttccatggcctgaacaagctttcatgatgacatgcaatcattcgggcatccctgttttctgatccaactcattccacaaattcacaatgttccatagcaaagtaaatgtggtacaagtacattgatttctagttgacattttaaataaattttaaagctcttataatactaaaattttaataaattagctntatc

SEQ ID NO: 4301 - DNA, 555 bp, Gossypium hirsutum
  Clone ID: LIB3583-048-P1-K1-E12
gaaaatatttgcttaactaaatttagaggagcggtgttataagctttttaccctttaagtcctaaaatggaggttaatattttagatctttttgatatctttttccccaatttccccaatttgaattatgggaccaagaaaagttctaacttagtttgactaaaaatgaaaagaagctgttgtgaaggggaaaaggggttggtgatggcgccgcacttcaggattttggggttcgaaataattctcaggtgttgtatttggcctcttcacttttctggaaaagttttttttttttttttgttatgatcattctttgcttgtttcctgcttatgatctcaccttggagccttaacatcaattgacctggcaaatatcaacttaaacaagattcatatgctaatgaattatgggaatccatcatcccggagtaggtttttataaatattgttaagaggaatctcaacttaaaattgatctagaaatttggctctcatttactattactggggctataatgtctagcagctggcggcatgtaaattataaacatgaag

SEQ ID NO: 4302 - DNA, 570 bp, Gossypium hirsutum
  Clone ID: GOSHI-09MAY01-C211_8
tgcttatttttagggttcattttttcttcttttaataacctaaatttcatttctccatcccaaaaatccttggatcaggtccgagcttgtggttgttaggcctctttgatcaactaagtttcatgtctgatctcgacgtccaaattcccactgcctttgatccctttgccgatgcaaatgctgaggactcaggtgcgggtgcaaaggactatgtgcacattcgtgttcagcaacggaacggtaggaaaagcctgacaactgtccaggggttgaagaaagaattcagctacaacaagattctcaaagacctcaagaaggagttttgctgcaatggcaccgtggtccaggaccctgaattaggccaggttattcaacttcaaggtgaccagcgtaagaacgtctccaccttccttgttcaggctggcattgtgaagaaggaaaacatcaaaatccatggtttctaagttgcagcaagcttaaagttttctgctaatctgtgtgccttgtttcgaacctggatatactacccggtcaggatatactataataatatctatgccgttatatcat

SEQ ID NO: 4303 - DNA, 768 bp, Gossypium hirsutum
  Clone ID: GOSHI-09MAY01-C211_7
aaaaaacctacaccgccatccctcgtaacgcacagcgactgttcccagactttatccgaggaatttcttttgtcatttcgttgataatccgaacttcaattctttaaaaaggctttggattcttggataaggcctctttgataaacaaagtttcatgtctgatctcgacgtccaggttcctactgcctttgatccctttgctgatgcaaatgctgaggactcgggtgctggtgcaaaggagtatgttcatatccgtgttcaacaaaggaacggtaggaaaagcctgacgactgtccaagggttgaagaaagaattcagttacaacaagatacttaaagacctcaagaaggagttttgctgcaatggcactgtggtccaggtccctgaattagggccggtgattcgtcttcgaggtcaccagcgtaagaatggctcccccttccttggtcaggcgggctttgggaagaaggacagcctcccaagcctcggtttttaagcgtggtgcggtgaaaccagtcaagtcctttctgattagggccgcccacgcggccggttggttgtcaaagtatccatgttgtgctacatgggctttccggttcagtggttgattatgatatgtttggaagtttgttgggctatgttccttatgttagtcctgttcatatgtgttcaaatattcggtggtttggtgcttgaaaaaaaaagaaaaaaaaaaaaaaaattaaaaaaaaaaaaaaataataaaaaaaaaataaataatagaaaaac

SEQ ID NO: 4304 - DNA, 654 bp, Gossypium hirsutum
  Clone ID: GOSHI-09MAY01-C211_6
gctttatccgatctttagggttttcttcttatttatcttcttgaattctctcaagaaagccctaaatacctcggatcaggtctcagcttgtggttgttaagcctatttgatcaactaagtttcatgtctgatctcgacgtccagattcctactgcctttgatccctttgctgatgcaaatgctgaggactcaggtgctggtgcaaaggagtatgtgcacattcgtattcagcaacgcaacggtaggaaaagcttgacgactgtccaagggttgaagaaagaattcagctacaacaagatactcaaagacctcaagaaggagttttgctgcaatggtactgtcgtccaggaccctgaattagggcaggttattcaactgcaaggtgaccagcgcaagaatgtgtcaaccttccttgttcaggctggcattgtgaagaaggaaaacatcaaaatccatggtttctaaattgcatctgcttatggttttctgctaagtcacccgtgcctcgtgtcgaagcaggaaacacaacttgattacaacttgattagagtataatctatatagtgctatggcttctttatgttggtttgataaaaaacaaaaagcactcttatatattgtgtttttcaggcaataggatgctgtattggtgga

SEQ ID NO: 4305 - DNA, 600 bp, Gossypium hirsutum
  Clone ID: GOSHI-09MAY01-C211_5
cccacgcgtccggggttttcttcttatttatcttcttgaattctctcaagaaagccctaaatacctcggatccggtctcagcttgtggttggttaggcctctttgatcaaactaaggttcatgtctgatctcgacgtccagattcctactgcctttgatccctttgctgatgcaaatgctgaggactcaggtgcgggtgcaaaggagtatgtgcacattcgtattcagcaacgcaacggtcgcaaaagcctgacgactgtccaggggttgaagaaagaattcagctacaacaagatactcaaagacctcaagaaggagttttgctgcaatggtactgtcgttggaaccggtcccaaacccactcccggtcagaccgtcaccgttcactgtactggatacgggaaaaatggagatttgtctgagaaattctggagcacaaaggatccagggcagcaacctttctctttccaaattggcaagggctctgttataaaaagatgggatgaaggtgtgatgggaatgcaagtggcaaaagttgctcgtcttcggtgctccccaaactattgctatggtgctggtgggtttcctgcatggggaata

SEQ ID NO: 4306 - DNA, 682 bp, Gossypium hirsutum
  Clone ID: GOSHI-09MAY01-C211_4
gcaccttaagtcgagtctgggttattggctttttgcaaacaaataatgcttgttttcgaattagcctatggttttgattttataatgattatatgcatgtagtttcaattttccttttgaggggtttctaaggcttttgtttgttcttttcaatctattgatgaagtttttttgaaaatctttgtattggttgccctaaatcttaatagaatttgccattaactattctgaggcttggtggtataattatatgaagccaaatctggtgtgggtatcgtgttacctgtttaggtctcagcttgtggttgttaagcctatttgatcaactaagtttcatgtctgatctcgacgtccagattcctactgcctttgatccctttgctgatgcaaatgctgaggactcaggtgccggtgcaaaggagtatgtgcacattcgtattcagcaacgcaacggtaggaaaagcttgacgactgtccaagggttgaagaaagaattcagctacaacaagatactcaaagacctcaagaaggagttttgctgcaatggtactgtggtccaggaccctgaattagggcaggttattcaactccaaggtgaccagcgcaagaatgtctcaaccttccttgttcaggtaattgttagtgctttctaatgaacatctaatccattctagtgtttgag

SEQ ID NO: 4307 - DNA, 619 bp, Gossypium hirsutum
  Clone ID: GOSHI-09MAY01-C211_2
cccacgcaaaccctaagaaaatcctgttagatcgtcattcaaacctgaaaaatgggagtagagaagcaagtcatcaggcctggaaccggtcccaaacccactcccggtcagaccgtcaccgttcactgtactggatacgggaaaaatggagatttgtctgagaaattctggagcacaaaggatccagggcagcaacctttctctttccaaattggcaagggctctgttataaaaggatgggatgaaggtgtgatgggaatgcaagtggcagaagttgctcgtcttcggtgctccccagactatgcttatggtgctggtgggtttcctgcatggggaatacagccaaactcggttctcgaattcgagattgaagtcctaagcttgaagtgagtagcatgcagttggtgactgtcgagaaataatatgtagcccgaataactcacctgcgatgaacatatatagatattatggggtagcatgtatgaatattaaatgagtatcaatatgagtcatcttattcatgtatgacagctcttcagtggtggactttttcttctaataatatgagatgctccgcagcagtttctccaggtcaaacagaaccgaaaaaaaacttagg

SEQ ID NO: 4308 - DNA, 915 bp, Gossypium hirsutum
  Clone ID: GOSHI-09MAY01-C211_1
cccacgcgtccgcccacgcctcccccaacgaaaccattaaactccaccaccccctcagactctatctggtttttagggcttttctaacttttctgattattttttgataatccggagttcaatcatctaaaagaagccctaaaatccttgaatcaggtctgagcttgtggtttgttaggcctctttgatcaaactaagtttcatgtctgatcttgacgttcaaattcctactgcctttgatccctttgctgatgcaaatgctgaggactcaggtgcgggtgcaaaggagtatgtgcatattcgtattcagcaaaggaatggtcgcaaaagcctgacaactgtccaggggttgaagaaagaattcagctataacaagatacttaaagacctgaagaaggagttttgctgcaatgggaccgtggtccaggaccctgaattaggacaggtgattcaacttcaaggtgaccagcgtaagaatgtatcaaccttccttgttcaggctggcatagtgaagaaggaaaacatcaaaatccacggtttctaagcctgcgcggtggaagcaggaaatactatctatctgattaggacatatcttatgttggttggatgacaaagtatgcatgttgtgttacatgtgctttccagttcagtggatgattatgatatgtttggaagtttgtttggctatgttgattatattagacctttatatgtgttgaaatattctgtggtttggtgcttattttggcaattagtatgggtgaagaaaaatgagatatagtaatcagagaagtaatttgccgagctggatgtctacagtcacaagcttgatactgggatttagcacctttttttttagccttttatgggactaggaaaaaatgataaaagattgggtttttcaattggacaccc

SEQ ID NO: 4309 - DNA, 608 bp, Gossypium hirsutum
  unsure (1)..(608): unsure at all n locations
  Clone ID: uC-gsronu33B130b06b1
ttttataaagcctgacaagctggtccacggngggttgatagtaaaagatattntncagctagtatacaaagtatgacttataatgagccgtgatagaatggaagttattgactgtcaatgggcaccgtgtgtccaaggacacctagaatgtagcgacacggttgatttgatacttccacggctgacgcaagcgtaacgatatgtgatccaacacttaacatcggtcagtgctgttattacgggcagaaggaaaacattaaaattcactgttcttactgccaccaggtggaagcaggaaatactatctgattaggacatatgttacgttggttggatgacaaagtatgcatgttgtgtaacatgtgctttgagttcagtggatgattatgatatgtgggaagttttgtttggctatgttgcttatgatagacctctatatgtggtggaatattctggggtttggtgcttattttggcaattagtatgggtggagaaacatgtgatataagaattagagatggtattagccgagctgtatctctacaatcacaagcttgatactggttggattgactagtgaaatgataaaagattggccttgatgatat

SEQ ID NO: 4310 - DNA, 472 bp, Gossypium hirsutum
  Clone ID: uC-gsronu33B106a08b2
gtttgttaggcctctttgatcaaactaagtttcatgtctgatcttgacgttcaaattcctactgcctttggtatgatttgatcttaacttccaaatatttacctttgttcttgttaataacgtgtgtatttgttgtgttagatccctttgctgatgcatatgctgaggactcaggtgcgggtgcaaaggagtatgtgcatattcgtattcagcaaaggaatggtcgcaaaagcctgacaactgtccaggggttgaagaaagaattcagctataacaagatacttaaagacctgaagaaggagttttgctgcaatgggaccgtggtccaggaccctgaattaggacaggtgtgtcccgtaaccccttaccttacctgtatctgttattggaacccaattgtttagtctgttattttgcggtatgtatttaggtgattcaacttcaaggtgaccagcgtaagaatgtatcaacc

SEQ ID NO: 4311 - DNA, 408 bp, Gossypium hirsutum
  Clone ID: LIB3048-035-Q1-L1-D12
gaaataattaaactccaccaccccctcagactctatctggtttttagggcttttctaacttttctgattattttttgataatccagagttcaatcatctaaaagaagccctaaaatctttgaatcaggtctgagcttgtggtttgttaggcctctttgatcaaactaagtttcatgtctgatcttgacgttcaaattcctactgccttcggtatgatttcatcttaacttccaaatatttacctttgtccttgatctgccgcctgtccttgttaataacgtgtgtatttgttgtgttagatccctttgctgatgcaaatgctgaggactcaggtgcgggtgcaaaagagtatgtgcatattcgtattcagcagaggaatggtcgcaaaagcctgacaactgtccaggg

SEQ ID NO: 4312 - DNA, 357 bp, Gossypium hirsutum
  Clone ID: LIB3166-057-P1-K1-C6
aaaaattattcttattcttgataattatatgctatataaagtcgaatctgatggggtttggcttaagatattcgggttattgctaggcctctttgatcgttcatgttttgctttggttgccaaatggttttttggctgcctgattagtgtttcttcgattttacgtgaatgaattcttattcttgatgataatatgttacataaagtcaaattcgatgtcgcttttgcttaacatgtttgggctgttttcaggcctctttgataaacaaagtttcatgtctgatctcgacgtccaggttcctactgcctttgatccctttgctgatgcaaatgctgaggactcgggtgctggtgcaa

SEQ ID NO: 4313 - DNA, 577 bp, Gossypium hirsutum
  Clone ID: GOSHI-09MAY01-C221_2
cccacgcgtccgcctacgcgtccgcttccttctctgaccagttttgggtcaccgcggtaaaggcctcagctcatattgctttcatcgattttcctctgcattttccatcactttctcgggaaaaaaaaagaaagtttcagaagaaatgtactcgggtattcggtcgttatcgttagatggatgtgtgggggattatcaagggtcgcttgatggaaccaacttgcccggtgatgcttgtttggtcctaacaaccgaccccaagcctcgactccgatggacggctgagctccatgaacgttttgtcgatgctgttactcaactcggcggccctgacaaagcaacccctaagactattatgagaacaatgggagtaaaaggccttaccctctatcacttgaaatcacatcttcagaaataccgactagggaaacaatctgccaaggaatcaactgataactctaaggatgcttcctcaattgcagaaagacaggacactggctcatctaccacagcatcttcgagaatgattgcgcaagacgtgaatgatggttaccaggttactgaagctcttcgagtg

SEQ ID NO: 4314 - DNA, 1017 bp, Gossypium hirsutum
  Clone ID: GOSHI-09MAY01-C221_1
taaaaacatcatacatgcttctctgtttgtaacttggagtgatactatgtgaaccaacctagttgattaacaatggcattttaagactcgaccttcatgcccccttctgtcatgtcttgtatgaactggcattttgttgttataaagttatgaatcttgacctaacgtagttcgtttgtcttgaaatgcattgcagaagcaacccctaagcctattatgagaacaatgggagtaaaaggccttaccctctatcacttgaaatcacatcttcagaaataccgactagggaaacaatctgccaaggaatcaactgataactctaaggatgcttcctcaattgcagaaagacaggacactggctcatctaccacagcatcttcgagaatggttgcgcaagacgtgaatgatggttaccaggttactgaagctcttcgagtgcagatggaagttcaacgaaaactacatgaacagttggaggtacaacgtcgtcttcaactccggattgaagcacaaggcaaatacctacagtcaatactcgagaaagcttgtacagcactgaatgatgaggctgctgcttctactggtctagaagcagccagagaagaactttccgaattggctatcaaggtttctaacgattgtcaagggatgatccctctcgataacataaaattgccttccttgtctgaattcactgcagctctagagaacaaaactgcttccaatatgccaacccgaattggtgactgctccatcgaaagcttcttgacttccagcagaagccctttgtcacaaacgggtgtcgggtcacaggccgttacaatgaaaagcccaaggctcccatttggtatcggtgactctttttcccttgggtggcataaggccagaaatagagtgggtaatgcctaatattagttgagttgtaagacatttccatcttagaaatggtaccttctcttattattttccttttgtttactctctttctagttaatctaaaatgtagttttttttttc

SEQ ID NO: 4315 - DNA, 671 bp, Gossypium hirsutum
  Clone ID: GOSHI-09MAY01-C38892_1
caaacattatcaggccaaagcgctttccgatatggttattgttgtccaatcagagccgtcatcctgggaaagccatctgcagtgtaatggaaaatcccttttgtgggatttgaggagacccatcaagcctgctttggctgctgtttctgaacatctggctggttggcttccccttcagcttgtctacagtcatgctcatggaactgcaattgaggattggatatggtccgtgggatgcaatcctttctccattacttctcaaggttggcagatatcaaaatttcaatcagatacaattgctcggagctacatcatctcaactcttgaagagtcgataaaactggtcaattcagccatgcaccttctactttgggagcgtacaactgagaaaacctttaaacacttccaatctcaggagcgtgagctagtgaacaagtataattatgttgtcagcttatggagaagaatttcaactattgctggtgaattgagatacacagatgccatgaaactgctatataccttagaggacgcaaccaaagggtttgttgatcaagtgaatgcaaccatagcccttcttcatccgattcattgcacgaaagacaggaaagtgcaagtagagttcgacgcatcaacaatacctgctttcttgattgtttaggtattctcta

SEQ ID NO: 4316 - DNA, 529 bp, Gossypium hirsutum
  Clone ID: GOSHI-09MAY01-C38842_1
cgttccttgtccgttacggagtcaaagtcaactcattggaagcggaggcaacttggtcagacgcgcgactcaggtgtatccgaattcttggaccgccatattggtctccttggacaaccaaggtatgtggaatgtgcgatctacgttatgggacaggcaatatctcggacaacaattctacctcagagtctggaatccggttcgcagccttgctaacgaatacgacattccctctaatgtcctactctgcggccaagccgtcgggcgtcacccgtagttcgattaaaccattgaaaaccaactttttctagggtcatgagagtttgactggcggagaaaaatagatgatagaaaagagaatggatcgaaatcattgctctttcatttgtgtatctttagaagcattagataaattatgcattcattggatatttggattactatattagctccaagagcctgaattatatgttacgaaaagaactgaggctctataaattctaaaccatataaagatctagcatttggg

SEQ ID NO: 4317 - DNA, 412 bp, Gossypium hirsutum
  Clone ID: LIB3148-032-Q1-K1-G4
gtcgtgctgcaacgctagatacgtctgttatggcaacatctctccatgatttcatcgaagttgtctttcagaacaatgaaaacaccatgcaagcttggcatcttgatggttacgatttttgggtcgttgggtttggctcggggcaatggacacctgacaagagaaagagctacaatctagtcgatgctcttactagacacactactcaggtgtatccgaattcttggaccgccatattggtctccttggacaaccaaagtatgtggaatgtgcgatctacgttatgggacaggcaatatctcggacaacaattctacctcagagtctggaatccggttcgcagccttgctaacgaatacgacattccctctaatgtcctactctgcggccaagccgtcgggcgtcacccgta

SEQ ID NO: 4318 - DNA, 389 bp, Gossypium hirsutum
  unsure (1)..(389): unsure at all n locations
  Clone ID: LIB3147-001-Q1-K2-D9
gaatggtgtctcctatataaatcccgatacccctttgaagcttgctgattattttaacatccccggaggttttagcacgaattccctcagtgaacttccttcaggtcgtgctgcaacgctagctacgtctgttatggcaacatctctccatgatttcatcgaagttgtctttcaagacaatgaaaacaccatgcaagcttggcatcttgatggttacgatttttgggtccgttggtgaagttcatgctctgnttgtttgtacaattggttcctttgctggacaaggtactaatcattattattacaatatacacaggtttggctcggngcaatggacacctgacaaggagaagagctaccatctagtcgatgctcttactagacacact

SEQ ID NO: 4319 - DNA, 738 bp, Gossypium hirsutum
  Clone ID: GOSHI-09MAY01-C38472_1
gatccaaattccaaacccaccttgcttcaaattttaacacaatctaaaacaagattgattggaccatatataggccattgggcattccaacaaagaaaatgaccgcctgctagatcttttctttcttcggctcatttggtcactgcctttaactcccaagagttccgattcttgaacccgtaagcaggattgctcggcacaatcgaggtccgatcaggtctctgatcatacatatcagatccgagacaaactatatatataattgaaaaaggaaatgcagttctttgggggttcagagatcagtccatcaccgccggtgccgacggcgacgggtaacaacgcccacatgatgtacgtattcaatcgaaacggtgtgtgcttgctttacagggagtggaaccgccctctccatactctcaaccctcaacaagatcacaagctcatgtttggtctccttttctctctcaaatccctaactgccaaaatggatcccactaatgctgagaagggaaatctagggattcctcagttgcctggtcaagggtgtgcctttcacacttccgtactaatacttacaagcttaccttcatggaaactccgtcggggattaagttcattttggtaactaatcctaggactggtgatcttcgtgaaacactcaagtatatttataacctgtatgttgagtatgttgccaagaacccactctatactcctgggactcttatcaggtgtgat

SEQ ID NO: 4320 - DNA, 429 bp, Gossypium hirsutum
  Clone ID: LIB3145-055-Q1-K1-E6
cccacgcgtccgcccacgcgtccgcccacgcgttcgcccacgcgtccgcccacgcgttcggccaaaatggatcccactaacgctgagaagggaaatctagggattcctcagttgcctggtcaagggtgttcctttcatagcttccgtactaatacttacaagcttagtttcatggaaactccgtcggggattaagttcattttggtaactaatcctaggactggtgatcttcgtgaaacactcaagtatatttataacctgtatgttgagtatgttgccaagaacccactctatactcctgggactcttatcaggtgtgagttgtttaatacagcacttgaccaatacgtgaggagcatcgcatagtatctaaaattaatgccttctgtctagtctctggtacctacttttatatgcaatttcatgtga

SEQ ID NO: 4321 - DNA, 503 bp, Gossypium hirsutum
  Clone ID: GOSHI-09MAY01-C38402_1
cccacgcgtccgcccacgcgtccgtggaattctatgatcttcctcgtccttctattttagaggaaatttctactggtgtcccgacaagattgcctgaaggagtgaaatttgaaatgcgtacattaccagtgaggtgggtaaatgccatttcaatattgttcaagggagattgctctctgggccagtcttgaatcctcaatggtgaaggtattgtactctagatgtctgttcttgattatcttcaagttttatcttctgtaattcgagaagaaacaaaagagattcacaaagtttagaaagtgtctcgccaccaaggaaatgtttagcatttagccaccaaagccaaatgctaaacatttccttggtggggagatgctcctaagttctgtgaacttttggggttcgcttcggactacaagagacaaaaacccggggataatcgataatagacttctgagtataatacctccaccgttgaggtctgaaaccggcctaaagagcaa

SEQ ID NO: 4322 - DNA, 867 bp, Gossypium hirsutum
  Clone ID: GOSHI-09MAY01-C38432_1
ggaaagctaagggaagctcggttgaaagagagataaatcaggggagcctgaagagtcagtgcacttgaatgatactcagtttactagattggatgagcttttgacccaaacccagatgtactcagagtttttgcttgaaaagaggaggacataacatttagtgtacctaagcctgaagctgctcagacaaagagaggtcgaggttcaaaaagaagagctgctaaccagtacaacaataggaaggtcaagagggcagttgcagcaatgcttacaagatctaaagagggagagactgagaacgctgaagatgaaaacttgactgaggaggaaaaaaatgagaaggagcagggagaacttgtaccattgttgactggtggaaaattgaagtcttatcagcttaaaggtgtgaaatggttgatctccttatggcaaaatgggctaaatgggatccttgcagatctccgccctcgcggtcggacaattcaaacgattgcttttcttgcacatttgaaaggaaatgggatggatgggccttatttgattattgctcctttgtcgactctttctaattggatgaatgagattgcaaggtttacgccctcaattaatgccattatttatcatggaactcagaaagaaagggatgagattcgtaggaatcacatgcctaaagtaattggccccagttttccaatagttgttacttcttatgagatggcaatgagtgatgcaaagaaatttttgaggcattatgagtggaaatatgttgtggttgatgaggggcacagattgaaaaacttccaatgcaaattagtgaaagaattgaaacacttacgtgctggggcataagctctcttaactggaaca

SEQ ID NO: 4323 - DNA, 466 bp, Gossypium hirsutum
  Clone ID: GOSHI-09MAY01-C38762_1
cttcggggaccccttggaccgaaggggcctatctggtcttaaaaccagtgtcccaaaaaggaggcccttgactactttgaacattgaaaagcacccaatgaattggccaccattagggacaaaggttagccggatggaatccaaaaatcaggaagaatttaggcatgatgtatggcagatttgcctacaacgctcatatctacaatgatggtcgtaatcctggtattccctctcttgccgatcagctttttggagctttgtgactacttgctacatgagtattctgataacctttggctgaagctgaaagcaggtataggggaagcttaatcggataacacatttaaaatcattcatcatctgaaagccaaaattccctcacagtagaactgctgcttctctgggttctaggggtttccaggctttgaaccatggtaatagagctttgcatatgtatagtcgaaac

SEQ ID NO: 4324 - DNA, 708 bp, Gossypium hirsutum
  Clone ID: GOSHI-09MAY01-C38682_1
atctccccgaggtttacattgttagttggaatgaccacttttttgtcctaaagggggacgcgagaagcttactatattattgacacgttaggagagaggctttatgagggatgcaatcaagcatacatcttgaaatttgaccgcaatactgtaattcacaagctaccaaatgtagctcaatcatcaggtgataagtcaacgggtgatcaacaggtcaatgggaaggagggttgtgttgcaggggctgtagtaaccaaacctgagaaatcaatcaagagtgaggacagtgaggaggttgtttgccagggtaagaagtcctgcaaggaatacataaagagcttcttggctgctatacctattagggagttgcaggcggatatcaagaagggtctaatggcatcaacaccactgcatcaccgactacagattgagttccactatactgagttctcgcaaccactacgcgagacttctgcttctccaatgactacatccgtgccactttcagtcgaagttccattaactgaaattgctgcatagggacttgtgtaaattctaggaaaagtatgattactcttaacttggttttttcttttactttttgtatcttatgacgtgaatgcggtttaacagaacggaaccctattgagctttttttgatcgttttggcaatgttgtgtttcatctaattgactggaaatataacat

SEQ ID NO: 4325 - DNA, 290 bp, Gossypium hirsutum
  Clone ID: LIB3145-058-Q1-K1-B8
gtcctaaaggttgacccataagcttactatattattgacacgttttgagagaggccttatgaaggatgcaatcaaacattcattgtggaaattgaccggaattactttattcacaaggttaccaatggtagctaatgctgtggttgttattgaaccggttgatcaacaggtcattgggaaggagggttgtgttcaaggggctgtattaaccaagcctgagaaatcaatcaagactgaggacagtgaggaggttgtttgccagggtaataagtcctgcaaggaatacataa

SEQ ID NO: 4326 - DNA, 661 bp, Gossypium hirsutum
  Clone ID: GOSHI-09MAY01-C38652_1
tgttcacgcgtccggtagagtcaaacagtacctccgaggctacttttggtcggatctttcaggcgtttaagaactcagagcaccaaaagcaagccaaaccaacgctgttcgtccggcacagtcgaaccctggtttcgcttctgctgccctccggactttaatcctcttacatcgaaacagaaatcccaagcgataaataagacagaaaagaagaagaagaagagataggaagagagggagataaaggaaggcatgggagatctattcatatggcttatttctttcttcatcctcattgcccttcttgttctcattgtttatcagctcatgtgcttggctgatttagagtttgattacatcaatccttacgactcttcatcacggataaacaaagtggtcctgccggaatttatcctccaaggaattttatgtgtattctatctattaacgggacattgggtcatggcgctcttatgtggtccatatttatactacaatgtgagactttacacacagaaaaagcacctggtagacgttacagagatatttaacatgcttcccaggaagaagaagcagcgcctttttaagcttggctatcttgtccttctcctctttttctccttattctggatgatctggtctacattaaaagatatggaca

SEQ ID NO: 4327 - DNA, 845 bp, Gossypium hirsutum
  Clone ID: GOSHI-09MAY01-C38182_2
cccacgcgtccgcttaaataccagaaaacaatttctctctttcctttttctttttttttaatttcgatttttctggggatttttgaatctgggtatttctgaaaatggggaaaaaccaagcctacaaggctatgcaaagagccaggcttggctcttcctctgctggccctgaagagatcgaggatggcatgagtggcatgctgctcgtttggccagtcttaaaacttctcatacagttacgcgggttgagtgctgcaagaagcacaaggggggggccttgagaaaaggggaactagaagcagatacggatcgaatgatgcgagaatatagagctcagttagatgctgaaagggcaagcaagcttgcacatggtagaaaccactccagtagtaaatctagccataaaaaggatcgaaaggacaggggggcaaagaaacgcagcagcaaaaaaagaaagcgttcaagacggaggtcttctgagtcaagctcctcgagttcatcctcagaatcttcgagtagtgatgatgaagagagagaatcaagaagatccaagtccaagtctagaagagagaagaaaaagaagcacaaatcaagaaataagaactcaagcaccgagaatgaagaaggtgaaggtccagtcccactgtcaagattttttgggagtgtgaagagttaaaatggtatgttagaagatactaaatttatcataatactgaattcctgcagtagaaaaatgattgttctcccatattttccgaatggattgatggcctgtaatgattgttaattcctttttttcctgcttcatttctactttgtagtcgccattgatggattgtattcat

SEQ ID NO: 4328 - DNA, 639 bp, Gossypium hirsutum
  Clone ID: GOSHI-09MAY01-C38182_1
ccggaacgaaaaaaaacaaagaaagaaaaacttgagattcctctccctctttcacccaaacctctcttttcgctgaataccattccctatattctttcttacttcaatacccgcgcgtcccccttaatttcttaaataccagaaaacaatttctctctttcctttttctttttttttttaatttcgatttttctggggatttttgaatctgggtatttctgaaaatggggaaaaaccaagcctacaaggctatgcaaagagccaggcttggctcttcctctgctggccctgaagagatcgaggatggcatggtggatggttcttttcattcaccagagtggcatgctgctcgtttggccagtcttaaaacttctcatacagttacgtgggaagagttccggaagaaacaaaaagaagatgcattgagaaaaggggaactagaacagatacggttcgaatgatgcgagaatatagagctcattagatgctgaaagacaagcaagctgcacatggtagaaacactcagtagtaatctagcataaaaggatcgaagacaagatcaagaacgcgcagcaaaaagaagcgtcaaacgaggctttgagcagctctcagtcatctagatctcgagatgtgagaggg

SEQ ID NO: 4329 - DNA, 1482 bp, Gossypium hirsutum
  Clone ID: GOSHI-09MAY01-C38162_1
cccacgcgtccgcccacgcgtccgctaactctgatttgtcatatcctgatgatgatgaggattgtgatgactatgctgatgatgtttctgattatggtgacaatgatgattttccctcgcgtgcggattatgcaattatgctttcccattttgataatgtggatcttcctcctggggtagaggcttcaattccttggctgaaaggctctgctccacttggaaatctacctcctgccctgggtgtctcactctcaacaaccccatgtctggctgaaagcaagaaagcgacaacatcaaatttggctgatagcgaactgaagtcggtttctaccaatacttcaatggtcttaagagagtcagggtctgatcggaaagaaggaaatgaagaaaatggagtcgtgcaaaattctctcagtttcaaacattttgatattgtggatgatttctcagatcatcattacagcaatttgaattcatcaggagagcaaccaaaggagtgggcaaagcaaatacaagaggagtggaagattctggaaaaggacttaccagaaactatatatgtgagagtttatgaagcaaggatggatcttttaagggctgttattataggacctactggtactccataccatgatggcctttttgtttttgattgtttcttccctccaaaatatcccaaagagccaccgatggtttattattattctggtggcctccggttaaatccaaatttatacaactgcggtaaagtgtgtctaagccttttgggcacctggcatgggcatcagaatgagatgtgggttccggggcaatcgaccatgctacaagtattggtttccatacaagctcttattctgaatgctagacctttctttaatgaacctgggtatgaaacttcgtatgttggggctgaaggtgacaggaggtccaggaagtacaatgaggaagtatttattctatcattaaagacaatgatttacacactaagaagaccgccaaagcattttgaggactttgttactggtcattttcgcaaccgtgcacaagacatccttgtggcatgtcaagcatataaagagggtgctatagtaggctctgttgcggttaaagatggtgttccggatgctaacaaaattgtaaagggtagctctgaggaatttaaaggaacgattccaaagatgatcaatgcggtggctaaagaatttgtgaaaaacgggtcaacgaactgtgagcagtttcagagttgcagaagctgattacggttaagaagagttggttagatctaaagtgtaggatgggatgtgttaagccattatagaagctaatgtagtgccgtttagtatgaatgatttggtgaacgcaattttggtgaacttggttacattattactacttcttacggtatatataatctcgggattccccggtagattttattatatatatatagtggaacggctctggttgactgaaaaaaaacac

SEQ ID NO: 4330 - DNA, 451 bp, Gossypium hirsutum
  Clone ID: GOSHI-09MAY01-C38012_1
cggacgcgtggggtcagagtcttgttcttgccctactatttgccctcttgtttgggtcaatcgagataatcttcctatcgtcgtcttttataagaatctctaaaggcggatgggttcctcttattctctctgtgatcttcatgctcatcatgttcgtctggcattatggttctaggaaaaagtatttatatgatttgcacaacaaagtacccatgaaacaaatcctgacactgggtcctagtctcggaattgtccgagtcccagggataggccttattttcaccgcgttggttagcggagttccggccacatttacccgttttttaaccaatctaccgacattttatcaagtggctgtctttgtctgtgagaagactgttcttgtaccatatgtccctcaaaaagaacggtacctcataggtcgtattggtcccaaatctttccgaatgta

SEQ ID NO: 4331 - DNA, 965 bp, Gossypium hirsutum
  Clone ID: GOSHI-09MAY01-C38382_1
cccacgcgtccggtgaggagacctagtgactataatccgtcgcttgctgcaacacttggtccaagccagcccaatccgaatctaaatctagctgctgtgggtctaactccaggttctgctggcgggcttgagggccccgaccgcatatttgttggtgggcttccatattacttcacagaagcacagattagggagttattggagtcttttgggcctcttcgaggttttgatctagtaaaagatagagaaaccgggaactctaaaggctatgcattttgtgtttatcaagacctgtcagttacagatattgcttgtgctgctctaaatggaattaaaatgggtgataaaacgctcactgttaggcgagcaaaccagggtgctacccagcctaaacccgagcaagagagtatactccagcatgcacagcagcagattgctttgcagaggctaattttgcaaccacaaggtgtgccgacaaaggttgtgtgtttgactcaagcacttaatgttgatgatctcagagatgatgatgagtacgaggacattgtggaagatatgagacaagagggtggaaaatatggtgcattggtgaatattgtcatcccacgcccaaatccgaatggagaacctgccccaggtgtcgggaaggtatttctggaatactcggatgttgaaggttccaaaaaggctcaagctgcaatgaatggtcggaaattcggcggaaatcaagttattgccgtttactatccagaaaacaagttcgcacaaggggaatatgacggctaatgtagagataaaatcatcatagcattgtgcttgtactgattctatgtttatgtctgatcattatctggttccttaggaattttgtagtggcaacctgttgtcgaacttcggaatttgacagtggaacatatcatgtcataatacgttagaactagtttagatgaatgtgttgtttaatg

SEQ ID NO: 4332 - DNA, 573 bp, Gossypium hirsutum
  Clone ID: GOSHI-09MAY01-C38332_1
gcaagcaagtgcaaaagaaagtttactaagtcaaaccagtgatagtggtgcaagtactgttgtcgacaatgctgaaggtgattgtgatgagctaagaacagaggaatctcatcatctaaacccaagtattaagattgtatcagtttgtaatacttttagtaagagcgacgccgaccggattcgagagatctttaagaggaggagatgtgatagggctgcaaatttgaagcgaacgaaagttagagatgacgaggtagacagtgaagcctggatagagagagaactggagatgggaatagaactggaatctgccacttcccggaagcgagggagggtgcactgaggttttgaagttgggagaagtagttcgttgataccctctaatcacatatcttctttctacttaatgcatcaaagcgacccttccatggtctcatttatggcatttcaagaaagactgaattctatttctctcttagaacaactataattattgccttgttgtagactgtatacaagtgtagaataattgtaacattttttttcgagagatattttatttgtattttggat

SEQ ID NO: 4333 - DNA, 513 bp, Gossypium hirsutum
  Clone ID: GOSHI-09MAY01-C39992_1
gcagtgtgaaaatcgaaattttgtctctgtgcttacaccagatcactaggtttcatgaagacattcagtttgagctccattcatcatgtacttaatatttcaaactagaagttggaaagatgtgaaatataagggctgattgtctttgcattcccgatgatttggatccctcaagcacattgaattttgggatggaacatatacaagttatttggttagctttcaaattatgactttagttgcttaagttttagcatattctttctgaggcatttggtcctaaaataaaaaaattcttgtgccatagtgagtgtagaaataatttgagaatttattgacgattccccaattcagtgcattttatgttgtttttaggcactatttttgggtcccttcttgaggcctcgactcttctggttggtttttttggggattctctgtttttagtctcttcatatggaacttgtactgtaaacgtatttctacataaaacgcatacggttgttcaatcac

SEQ ID NO: 4334 - DNA, 1194 bp, Gossypium hirsutum
  Clone ID: GOSHI-09MAY01-C39892_1
gatatcagtggcgagcaacatcttgacataaaacatgatataattaagaaaagaatcagtactaacggtgatgtgatagaatccaagccagatggtataggagcaccaaagattgagaaacctctgcagagacatggtggcaggcttgaacaaaatgagacatattgtgggtcgtgctttggtgcagagcagtcagatgatgactgttgtaactcctgcgaagaggttcgtgacgcatatcgtcgaaaagggtgggcaatgactaatgcagacttgattgaccagtgcaaaagagaaggctttttcgaaaggataaaagagcaggagggtgaaggatgcaatgttcacggatctcttgaagttaatagggttgctggaaattttcattttgcacctggcaaaacttttcatcagtcgaacattttctttgatgacttgatgtctgtccataaggacagttacaatataagtcacagaatcaataggttagcttttggtgaatacttccccggtgtggtaaatcctcttgatgggggacattggacccatgaaacctcaaatgggatgtaccagtacttcatcaaggttgtacccacaatatatactgacattagaggccgcactgttaaatcgaatcagtattccgtgacggagcatttcaaggatttggagtacattagccctaattctcaacctggagttttcttctactatgacttttctccgatcaaggtcacttttaaggaggagcatagttcatttttgcacttcatcaccaatatctgtgctgtaatcggaggtatcttcacagtcgcagggataattgacacgttcgtataccatggtcaaagaaggatgaagaaaaagatggaaatcggaaaattcagataattttgtctgcacatttattccgacacaaccttggttttcgacacgatagtttttcttggctttcaacacgatagttttcttttccaatggttcggatgctaaatagttggtgctttcatagggatccatccatgctgctgttttattccgaagagtgtatgacattgggccttcaaatcattgctgaaattgtctggtttgccccatatattagagtcttaaaaagaatataatttatctatgcacttgtaatttgtaattgatttttcttgttttaattcttattaacaccaagcagtttct

SEQ ID NO: 4335 - DNA, 430 bp, Gossypium hirsutum
  Clone ID: GOSHI-09MAY01-C39852_2
tggtgcgaaaaacccgcggcgacccacgcgtccgtccacgcgttcgttcacgcgttttgtttgtaagaggccaaataaaaacaatagggccctttcttatacacacagcgcgggtcctgagtaggaaagctgtaaatttctaattctctgtctaatgctgtgtacttccctacttatttgcggggtcatcatgatgctgatgctgtaagttttggcgtgtatatttttttaaattcaatttgcttagatatgtcggctcaggtctgactctctgctgcatataggttgctctgtatatgaaagactatggtggtggttttgaattctgtaatcggtctgaggacaagatatatgatgattcgggtgatggcaccaatggtgctggagcaaatccacacaacatggaactgtcacaagagaatacctttac

SEQ ID NO: 4336 - DNA, 705 bp, Gossypium hirsutum
  Clone ID: GOSHI-09MAY01-C39852_1
gcgttcgctttaatttctttgacgggcagtttatttcatctttcgcaaactataaactgatacgaccattaatattcatttcttttattaattctctgggtttcaggtaaagatcatactatatatatatggatatattggccagaaagtttgtactttctttgtaagcaaactctgaacttggattattttacctgaacatcaataagcagacagaatggttggaacttaaatattcggatttttatgtcttatgatctttcatgtcctttttcttatgattcttagattgtacattcgttcaaggaatacatggaggattttaatgaattggaatgaaataaagataagcgcaattgtagaaatatcataatgttgtttcaaaattgtttgatcgattccacttgtttgtaagaggccaaataaaaacaataaatattagacaaatacacacacaaaagtcccgagtaggaaagctgtaaatttctaattctctgtctaatgctgtgtacttccctacttatttgcggggtcatcatgatgctgatcctgttggtccgggcgtgtatgtctttggtgttgcttttggcttagattccgctcagatctgattctcttctgcatataggttgctctgtatatgaaagactatggtggtggttttgaattccttaatcggtctgaagacaagatatatgattattc

SEQ ID NO: 4337 - DNA, 831 bp, Gossypium hirsutum
  Clone ID: GOSHI-09MAY01-C39802_1
cccggggtcgtacccacgccgtccgcttcatgccgttacatagtccctttcccattttccgactgggaatccgacgaatcggggacaccttccgacgacccacaacggtaagtcctcccttccttcccctcctcgttttttgttttgttttgagaacaaaggaaaataataaataaaaacagtaaaaaaagaacagaggaaaaaaaagaaccaaaatccgtcaccttcaaaaaaaactttgttctctcttgtattttcttttttaaattttcaatacaaaaaaatttgctaacccccctttttacagattcgatttcccttttatctagcccccctaaatcttttttacaacttgctaccccccctattttgcttgctgctcgtggttctttttattgcaggtacatgcgtgtatgggaattgctgcgacgtggggtatgcacggcgctggaggttgctgagacgtgtgatgttgttgcgagggaagaacgtgggcagttccggcgctgggcgatggtggcgtcaaggctctctgctggttaggctagggatttgggttaatgacttggccttgtaatgggtttgggccttaagcttatttggggggttgtaatgggtttgggccttaggcgtagttgggcccggacaataattgggtattacatatggcattgagatatagtgttaaaagaattatgcgttcatgaataaaacgtcaaatgatttggtattgggctatgcacttaagacatgaaaatgcaaattgatttagttgatagttgagtcacataatgattgtattgacactatgtttctattgattattgattt

SEQ ID NO: 4338 - DNA, 435 bp, Gossypium hirsutum
  unsure (1)..(435): unsure at all n locations
  Clone ID: LIB3147-017-Q1-K1-A6
ctttgctgtttcagaccctcccctttgtcgttcaagtcctttcccatttccgactggggtccgacgaatcggggacgccgtccgacgacccacaacggtaagtcctcccttccttcccctcctcgttttttgttttgttttgagaaacaaaaggaaaataaaataaaataaaaacagtaaaaaaagaacagaggaaaaaaaagaaccaaaatccgtcaccttcaaaaaaaactttgttctctcttgtattttcttttttaaattttcaatacaaaaaaatttgctaacccccctttttacagattcgatttcccttttatctagcccccctaaatcttttttacaacttgctaccccccctattttgcttgctgctcgtggntcttttattgcaggtacatgcgtgtatgggaattgctgcgacgtggggtatgc

SEQ ID NO: 4339 - DNA, 815 bp, Gossypium hirsutum
  Clone ID: GOSHI-09MAY01-C39822_1
gcaacacatggtgcagacaacattagaaatgatattagtgcattagctcaaagatatgttgtgattgatcgcgatgaggattgtggggtctgtaggcgtaaaattttggccattggcggggattacagaatggctagcgggtatacagctgtaggatcaatggctcctttctatgtctttccatgtggacatgctttccactcccactgcctgattgctcacgtgacccgttgcaccaatgaatctcaagcggaatatattctggatttgcagaagcaactaactttacttggtagcgaagttcgaagggaatcaaatggcggtttgacaaacgaagccattactagcgtcagccctgccgataagctccgatcacaattagatgatgcagtggccagtgaatgcccattttgtggcgagttaatgattcgtgaaatctctttgcctttcatcatgccggaggaagcccagcaggttgcttcatgggagattaaaccgcaaaacctcggaaaccaaagaagcttttctttgcctgtatgattggattatgtatgtccaacgatacattcctgtccatctgcaacgagcccatgctacggctattcatagagttttgtgagtgttctctctctattttcttttaccttcctgcatcatttgagtttcgacgaatggttgcttattcatgcaatttatccatatttctgggtttcttcgtttgcatttcttcccatggcccctttttttgggcgagaaggtgatcagtcaatgtttgttactttgatatggaccatgaaatttgagtgtttcgtgct

SEQ ID NO: 4340 - DNA, 479 bp, Gossypium hirsutum
  Clone ID: GOSHI-09MAY01-C39512_1
gggaaaggcctttctgatctccaaatcgagttcaataaaagacatgctgcaaccggaatggtcgcgcagatgactctggcgaggctcaaggagatgtggagaataatacacggggtaatgtggatgcctgataagaacagattgccaagaattgttcttgtctgctgcttgttgcacaatattcttattgatatggaggacgaggttttcagatgatatgtcattatcccatcaccacgatactggctatcgtcaacaaaattgggaatattggggcccggccgccttgttcatgagagataaactctctctctacataaatggaaagttgctatcttgaaacaatcctttggcttgtccctccgcattggattcttgatttctacactcagaaaaactgattgtccgacatagttgtaatgcatgtaacagttatgtagcttgatcacgaacgaaatgagtaccgtggtattagtttc

SEQ ID NO: 4341 - DNA, 570 bp, Gossypium hirsutum
  Clone ID: GOSHI-09MAY01-C39532_1
catggtattccttggtctgtgaagggtcaacagattaagtctggaacttgttcacttgaaggcagtcaagagagtaatgagatgctagaattggagccgaaagacgagaattctgtcattgagttgttcaatattatgcagtttacacatgtgcgtccagcttttaatgtgtatcttcctaacagctagtttagaaagtcttctccaggtgatccgagttttgttctatacataagtaggtgcagtccaccatccagagtagaaattgaggcccttgaaagaaagcatggtgccatcccttttaagttctgtcatgtagaaaacgggcgtgtcagtttcttctccttcgctaagactgagcttcccgtcttacctcaaggcctttttatatccgttggctccgatgataccgcaaaaggattaagaagattttaatctgtcggctgaaacatttcttgaagttcctagatttgggtatgttaaaaagggtgtacttagatcttgagaatgtgttgtctgtgtacttcctgctggcaggtattcttctatcatattttctaatttacattt

SEQ ID NO: 4342 - DNA, 1242 bp, Gossypium hirsutum
  Clone ID: GOSHI-09MAY01-C39402_1
cttatgaggtcttgaaattgctcgaatcccgtttttgttaaatttttttcatctaattctcagttttcttttctatttatttttctcgagttctttttttgggataaattatcatggggactgaaattttacggcctcaggattgtttgattgaacagatccgtgtttcttcgacggcttgttctcgtcggagatatggaaatggtagctttaatcctacctataattataataatagtaatagcaataacagcaacgggaacgttagatttaccaggaaaccggtccagaggaagcgagtcgggtcggagcagcgggtttcgaagagatctggctccgtcgatgacttgaaggcggtggcgaacaatttcaagatggagaaggttacgattttgaggcgtggagagtcgttggattcgaagatcaagagcaacagcggcggtggaaaggaagacgggttggttgtcacgggtacggatcggttaggtccagatccagaaatggtttcgaaacagatcagatttgtggatatcaagtctccggtgacaggaaaatccgacgtgtacgctggatcggctttcgctgcctctccggaaccgagttctcttcctttgccttctttctcgaagaagaagcatgttccgatcgatgattcggccactagagatctcaggcgtatactccgacttgatatctgagatctgaatatgttcacccgagtagatatattcggatccagaataagatcgtttcgtctctatttagaactctccggtagtttcaagatccgattacctccgtaatattttttaaaaaacggagggcagatttgaaaatgggagataacattaggggcgattagggaaatattccatgttgatgttgttatgggtagtacggagctaaaaatctgtgttttaattatggggatgattatgaaaataaaggcaaagcagggggttgatataaaaatattaggggaatattaggtatgagggctttgaaatgttttctactctgttgtgaaaagtaaaaagaaactaaaaagctgtgctttaatttatggggatgattatgaaaagaagggacaatccctggggttgatatataatattagggggaattttaggtgtggggttgagtttttaaatgtcgagctatgaaatgttttctgctctgttgtgaaaaaagaaagtttgtaagagatttgcaatctgatcccttgttgcaaagttaaaaacc

SEQ ID NO: 4343 - DNA, 610 bp, Gossypium hirsutum
  Clone ID: GOSHI-09MAY01-C39782_1
gtaagaaatttgcgttgccatcactgcgctggccctctttccaaagagatggaaacaagtggatggactgttgctccacttgttagggatagtttttctatgattggctctgctgttgggggcactacaagcgcattttatgggttcaaccatgtgatgccaatagtcaggaggtatgtaaaggggcccatgtgggtgcatttccttgttggtgcaccacctgtgatagtattctcctctgcttgtgcaggggtggcaggtggtgctgttccagccctagctcaactagcttcttcgtcataccatgctgcattctcgtcttcttcttcattgcctccatcttcacaggatgataagatgcacaagtctaggaccaactccactttataattatacaaatatatatagaatctctttccacatgttttgcatttcttctataagagcctactgccttgaaattttgtaatcttggaggacacttttttgtgtttgtaaattgtaatataggtttatgttgatgtttaattcttttcttttcctgttataagtattttttatgttatatgataaaagggtttttttgcactttttcttttactattatgtt

SEQ ID NO: 4344 - DNA, 540 bp, Gossypium hirsutum
  Clone ID: GOSHI-09MAY01-C39742_1
cccacgcgtccgcccacgcgtccgcccacgcgtccgagggttcacatttccatccagacggtgatttatttgtcccaaatgaaaggaaagatataatcacctcaactgcttgttggacagcaatggttggcttgcttgcatatttgtcgtttacaatgggaccaatgccattgcttaaactctacggcatcccttatgcaatatttgtgatgtggttggatttggtgacatacctacatcaccatggtcatgacgagaagcttccatggtatcgaggaaaggagtggagttacctgagaggagggcttacgacgcttgatcgggattatggatggattaacaacatccaccacgatattggaactcatgttatacatcatctcttccctcaaatcccacattatcacttgattgaagctaccgaagcagcgaagccagtgctcgggaaatactacagggagccaaagaaatccgggcctttaccattttatttacttgggatactcataaaaagcatgagaaaggatcattatgtgagtg

SEQ ID NO: 4345 - DNA, 822 bp, Gossypium hirsutum
  Clone ID: GOSHI-09MAY01-C39772_1
gttccctaggggaatgtttggtgaagatatattcggctcgtttaggggtggtgctggtgagggttctaccactatgcctcgaaaaggtgcccctattgatcggccattgccttgtagcttggaagatttgtataaagggactaccaagaagatgaagatttctagggatgttatcgatggtagcgggagacctactacagtggaagaaattcttaccattgatattaagccggggtggaaaaaaggcacaaaaataacttttcccgagaagggaaatgagcaacgaggggttattccctccgaccttgtcttcatcattgatgagaagcctcacagtgtgttcaagagagacggcaatgatcttatcgtaactcagaagatatctctggtggaagctctaactggttatacagcacagctgacaacacttgatggacggaatctgactgtccctatcaacaacatcatcagtccaacatatgaagaagttgtaaaaggggaaggaatgcctattcctaaagatccttcaaagaaaggaaatttgagaatcaaattcaacatcaagttccctaccaagcttacagcagagcagaaaaccggtattaagcggttaatcggatctccctaagaattggtggtaccccttgtttgctaattgctacaatcagccaacttgtgtaagttaacatttttccttttcttttatgtttctgttttatatgttttatttttttttcttggaaatgagaaattcaagtgttgctgaactgggatgggctgaataacaattacctaggggagttcatgaattactttctatat

SEQ ID NO: 4346 - DNA, 663 bp, Gossypium hirsutum
  Clone ID: GOSHI-09MAY01-C39702_1
ctgggcttgaatcttccactgagaagccagttggtaaagctaaaggctcaagtcttaatgctaagagatcaacattttggggaagaagtaacgctagaaagacaccatcaatggaatctgttgattcttcgggtgaagaagagcttgctatacagaggcttgagatcacaaagaatgatctacaacatcgtatcgcaaaagaggctagaggaaatgcaattttgcaagctagcttggaaaggagaaaacaagctctacatgaacgtcgtttggcacttgaacaagatgtctctagattacaagagcagctacaagctgaaagggatcttagagcggctctagaagttggattaagcatgtcatctggacaattttctagttcccatggaatggattccaagacaagggccgagcttgaggaaattgctcttgccgaagctgatgtggctagattgaagcagaaagttgctgaactccatcatcaactgaatcagcaacggcaacaccattacggttctctctctgatgcatgtgaccgttatcagcatgtccaaaatcataactctcaacagaggtttctccacaagattttgacacaacccttgcttattgtaatcctgagaggaacaaaaacaaaggagagtttgttaggccacactggac

SEQ ID NO: 4347 - DNA, 828 bp, Gossypium hirsutum
  Clone ID: GOSHI-09MAY01-C39692_1
cccacgcgtccggttggtttgattcaagatcagaatgtaaatgttcactacaatggtgcttctcttttggggaaggcaaatattgctactgcaccgaggaaaggtggtattggtggaaggaaaccgcttggtgatttgtcaaattcggttaacccgaccctgaaccagacatcgaaaaaggagaattctaaaattctttcattcactgagaaagagaccagtgtctcaaaacttgcacatgattcaagcaagaagaagagtgtctctaaagcttcagagaaagtgcaagttggtggtcggaaagctctctctgtcatttcaaactcgggtaaaccacgcttgaaggagacatcaaagaagaatcaaacttcaaagttaaccattttggcagagaatccaagtgaacccgaagatattgcgaaggaaggatttctgcacaatcacgatgaatgtatcaaagctcagaaaaaagctataagcacgaatgaatttttgcggatactccgattagaagatttctccaaacctgcatctgcaaagggaattcgtatgccaaatgaaatgcccatgagtccttcaaggtacttggaagctaaagagatgagtgagctactgatggaagattggtcacctccgaagtgtaagttgtcaaagaaactcaactcagctccacctagtccggagccactggatcatatgccgtgggatgatcctgaattggtttccgggtttgtgttgattggatcaccatgatgctgaaaccattggattcaatttcttacctggtagcatattaaaaaatggtttggtagcaacttatgttgtatt

SEQ ID NO: 4348 - DNA, 655 bp, Gossypium hirsutum
  Clone ID: GOSHI-09MAY01-C39142_1
gtcaaaccctttggaaacgaggttgccgaacgcaccggatatggaaatctattctctgtatggagttggcctaccaactgaacgagcatatgtgtacaagttatcacctcatgccgagtgtagcattccgtttaagatcgatacatctgccgatgatgaagatacctgcctgagagacggtgtgtattccgtggacggggacgagacagtacctgttttaagtgcaggtttcatgtgcgctaaaggctggcgtggtaaaacccgatttaatccctccggaattcgaacatacattagggaatacaatcatttgcctccggccaacctattggaaggccgtggcacccttagcggtgcccatgtagatatcatgggaaactttgcattgatcgaagatgttataaggattgctgctggggcttccggtgaagaactaggaggggatcaagtttattcaaagatctttaactggtccgagaatatcaacttgcaactggacgaggagattccggtacatttgtccagttgatcggatgaaacagctttgtattgcttggtgtttctcgaacaaatgatgaacataatgatcaaatattatatggaattggagaagtgattgtttgataatgtttacaccagggattgattactggtt

SEQ ID NO: 4349 - DNA, 689 bp, Gossypium hirsutum
  Clone ID: GOSHI-09MAY01-C39052_1
cccacgcgtccggcagtcgcaagaactgctgtatcgtcggctctgctcttcatgccgggggccccccctttttaacttcgatttagacgaagcaaatcaggatgtcgacggcgcgcctatgttgatgcactggaggagaacgtgcgttgtgcgggggcgacgtagcctgattcgtctgcggcggaggcgtgcgagggagccttgctgacgtgcggcgctggggcaaaaggctaggttttttcggatgtgtgctgttagggctagctgtagaacccttcgatcaacaaagatgactggagatgcaagtgaggaagctgttcccgagatcaaatatgttaggacttcaaattcagctgaagatcacagcggttgggttttatcaaagcaggagtagcaagcggcaacttcggcttccggaccgagcagaaaaggccctggtctttagtacaaatctctctcattctgatttatggtgctcatttctttccttttggccttctggcttggaatattcaggactctagtattggtacatatggtatataagttgagtttctagctggcatgtgtacagtttaaccatgtagtctggtaaacatgtcatcttgaacatggttgttacattattatattatacatcttgcagtttataaaataattctgcacgaactttctcgtggagtaacatg

SEQ ID NO: 4350 - DNA, 769 bp, Gossypium hirsutum
  unsure (1)..(769): unsure at all n locations
  Clone ID: AI055174.1
tataaatactaatactgcattgattgaaacaaactgatgaagttaattttaacttcttttcttattattgattcttgttttcatgtcaggtgagtctccctcttcttctgcctctgatgttgataatttaaaccatccaacagcggcagacaaggttgcttttccaaaggtgttaactctccccaggttgttggaaatcatgttatttctgctcgaaaccgtcctaactttgtgcggttgctcaattttgcgcaagatataaatcatgcaatggaagcttcaaggaaatcccgaactacttttttggctgccagttcaaattcaaaaggggctgaatgtggaaagtctatatcttctgtgaagaaggctcttgattntaacttctagacgtaaanggagtgcttcatttggtacgtgtggcaatggaagccattagccattaaggaaaaagggaaaaaaatgaaaatcttgttgggtaggatgngntntatactanaaggaaatctcattatgatgctttatcatttggatgatctcatgaggagaaaaagatggatggccactcttctgtgcatcctaaaactatatcaaactggctaatcctgttatgatcatctgggctattgcataaacataaatctggattcatgattatgactcactgttcctgctgaanncagtgtaatctttcagaggttgacatggtctacaattttcaaatgtggactggtattcaaaactgggaacttttttagtgacctcccctgat

SEQ ID NO: 4351 - DNA, 319 bp, Gossypium hirsutum
  Clone ID: LIB3147-008-Q1-K1-F9
gggagtgcttcatttggtacgtgtggcaatggaagccattagccattaaggagaagggaaaaaaagaaaaaagaaaaagaaaatccggttggtaaggatggttttatactaggaggaaatctcattatgatactttatcatttggtatgatctcatagaggagaaaaagatgggatggccagctcttcctgctgtaatccttaaaacttatattcaaaaactggcttaagttcctgctgtatgacacatactgtgcatatgtacaataaaacataaatctgggattttcaatgtatatatgagcttcaactgcttcctg

SEQ ID NO: 4352 - DNA, 319 bp, Gossypium hirsutum
  Clone ID: LIB3147-008-Q1-K1-F10
catagatagtactttttgaagtgttgtgatactttatttctggcttaaatgttgacgtggttaagagttggtgagcaaagtcatatggatttaattgcggatatatactaaagaggaaatctcattatgatactttatcatttggtatgatctcatagaggagaaaaagatgggatggccagctcttcctgctgtaatccttaaaacttatattcaaaaactggcttaagttcctgctgtatgacacatactgtgcatatgtacaataaaacataaatctgggattttcaatgtatatatgagcttcaactgcttcctg

SEQ ID NO: 4353 - DNA, 946 bp, Gossypium hirsutum
  Clone ID: GOSHI-09MAY01-C39362_1
gggaacctgactggatgggaggacaagtgcctagactcgaacgattcggttcttatcacttccttaattggtggtattattggtcactattcttgctgcaacggtgacacttggtcatcggagatcggagttcttagtgatgaccagccacggcttatcacaacttttaagtctgttcgaaggggcaccaatggaggtgtgacaaaaacaggacttttagcagctttggcagcagggagtgtcattggtttaacattttttctggttggatttctcactacaagatgttcaaatgaaatgggcatgaagcagctgttggtaatacccctttctgcagtggctgggcttttaggaagtatcatagattctctgttgggagcaacccttcaattcagtgggttctgctctgtccgaaataaggttgttggaaaacctggaccaacagtgaagaggatttcaggtcttaactttcttgacaacaatgcggtgaacctcgtctcgatactactgaccacactgctgacttcatttgcctgtgcgtacattttctgattccttaattctcttcagacagtttagacagtgtactgttttgataaagttgaaaaaaatctcagaaaaggatccagttcccataaaaaacttcgtatgtgatgtgaatcaacataaggggaaacggtttaccatttgtgcctggaaataaagattaccatgttgctcgactggctaggttagaataaattcagaggcgagttgttcttatcttggaatgatcttttgcaacttctttttgtgctatgcttctcaatgttttaatttctcaatacaacccaattttaagggaaaacagagagaaacattacataacaacgaaatgctttgatcataaaggctacactacccaatatcttttccttcaatgaacatgtgaaagtatattattatg

SEQ ID NO: 4354 - DNA, 553 bp, Gossypium hirsutum
  Clone ID: GOSHI-09MAY01-C39332_1
aatgatcccttccttggaaaaagagttgaagagggcaacttttctactgtcctattaaaagatgagtttcttgagaatgctcgtctatttatcttcgagacatactgcagaattcatcagcgcattgatatgggggtgctttttgagaaactgaatttaaattacgaggagggtgagagatggattgtgaatctcatccgaaactctaaacttgatgcaaagattgattcaaagactggaaccgttattatggagcctaatcgaccgaatgtttacgagcagctgatcgaccacactaaggcccttcaagggcggacctacaagctagtcggccagcttctcgagcacgcacaagcacagcctgcacgttaagttggacggacgaggaagctcttttgaatttatatgcaattttgagctatttgctgattggttatttctttcagacaagtttaacagtgattttagtttttgagtaggaacaagactgaaaaatcattatctggtcactcaattattaatttaataaattaatatttaatattttagtctt

SEQ ID NO: 4355 - DNA, 883 bp, Gossypium hirsutum
  Clone ID: GOSHI-09MAY01-C39292_1
cagagggttggatcagatgctgcttcaccagccagagatgctaatactcaagcaattgcagatgctgctggctccccctctggttcacttgaagtgcgtgatgcagctcttaatgaacttgtaatggaagaatgggctgccacaaggatacaaacagctttccgtgggtttctggctagaagagcactccgagccttaaaaggattggtcagactgcaggccctggtgaggggtcatgctgtaagaaaacaagctgcaatgacccttcgctgcatgcaagctttggtgagagttcaggctcgcgtaagagcaaggcgtgtgcggctggcattagaaagtcaaactgcccaacagaaacttcagcaacaacttgcagatgaggctcgcgttaaagaaatagaggaagggtggtgcgatagtataggatccgttgaagaaatccaagccaagttactgaagaggcaggacgctgcagctaaacgtgagagagccatggcatatgctctggctcatcagtggcaagcaggatcaagacagcagtcagtgcctgctggatttgaaccagataaaagcagctggggttggaactggttggagagatggatggctgtacgtccatgggagaatcggttccttgacattaatcttcgagatggagtaaagatacgcgaggatagtcctgctgagggaaagaatgatgccagttctcagataaaacctgctatcgggaaaccagctgcatcaagtcttcatgctaacctttcaaataaaaaaacaggtccatcccactttgatgggagcgattccccacctggtaagtctgcatgtgtgcttgaagcagtgaatgcgccatcttccaagccaaaatccaaaccaaatcgtg

SEQ ID NO: 4356 - DNA, 690 bp, Gossypium hirsutum
  Clone ID: GOSHI-09MAY01-C34982_1
gttttggattacaacctgatgaggaatctttgaaggatcatcataaaagtcttggcaaacagtatcgtgatatgaggattctcattgatcagagagtgttttcttgggacgaaacacggcagatgcttacagcccgtgatgatgtttgggaggcttataccaaggaatacccagacgttgtctcatacaggcacaaacgtaagccaaattataatgatttatgcttgatctatggaaattcaactgataggaaggacaggcgatcaggtcgaaatgctcactgcaatggatatggtcagattttctattgccaatattatttgcacttgcattagctctataactggaactatactgaaaaatggttattaagaaagcttcgacgatagcaattgtatatcagcttttcttagcatgtaaaaattgttcactttcacttccatttcaactgttaatggccttgtgaattatccttccttctttgatcctccatgtatgaactattaatggagttccccaatttttgttctcaaaaaaaaaaaaaaaaaaaaaaaaaaaaaaaaaaaaaaaaaaaaaaaaaaaaaaaaaaaaaaaaaaaaaaaatatatacgccaaaaaaaaaaatagataaaggttttagaagataattatggcggggggggggcacgttaaaaagggtaaatggatttt

SEQ ID NO: 4357 - DNA, 467 bp, Gossypium hirsutum
  Clone ID: GOSHI-09MAY01-C34912_5
cccactcgtccgctcgagttccacaatttggaatcgtagcttgtctctccaatcctatcaaggtcctgtttgcatccaactagtggtttccaggacctaggctttgatagttaaaataaaaaccactatgggttttgctggttataagttaataagttggtttttgttgtcatttttcgccctaatcccaacactgagagctcacatcgctgaatatgatgagtattggaaagcacgagaattggaagccattgagaacctgaacaaggtttatcaccccaatccggaggaggtggtccggcattacaatgaccactctgtcaataccatgcttgagtatcataacaccagaagggtgttgaatggaaagaaaaacggtccctgtgagattacttaccccgtgattgttggcggcaatgtaccctacctggctaaagaacaggaacaggctggccgactgtgccccc

SEQ ID NO: 4358 - DNA, 973 bp, Gossypium hirsutum
  Clone ID: GOSHI-09MAY01-C34912_3
catttggcttgaccatctttctctttatgattcctctgatggtcttatcgatgttattcagggttccactgccattaccatttcaaactgccatttcactgaccacaacgaggtgctgctatttggagcaagcgacacctacgctgccgacgagaagatgcagatcactgttgctttgaaccgcttcggtaaaggattggtggacaggatgcctaggtgtcgattaggtttttttcatgtcgtcaacaatgactacactcattggttcatgtatgccattggcggtagtagccaccctacaattatcagccagggcaataggtatattgcgtcaagcatctatgtaactaagcaagcgaccagtaggggctacttatcaccggaacagtggaagaattggaactgggtatcacagggtgaccacttcatgaacggtgcctattttactacatccggtgatcctaatgccagcaagctattcgatgctgacaaaataatgtctttccaacccggtcgattggtccccagactcacaaggtatgccggaacactccactgcagaattggtcgcccttgttaaaaacattattttgatatgcatacatcctctctttttggtatgtacaacattttgatacccatgcattgtacatttgggatttattgggaatgattatcaggaaatgttattatttgattccaccctaaaaaaaaaaaaaaaaaaaaaaaaaaaaaaaaaaaaaaaaaaaaaaaaaaaaaaaaaaaaaaaaaaaaaaaaaaaaaaaaaaaaaaaaagggcggggcgttttaagaaggaaccaaaccttacattcgcggtggctggcaactgcaatagctttttttttgggaaaccgtaacttaaattcactgcgccgggcttttacaacgccaaggcctggaaaaaaccaaggcgcttaccaaactaaatgcgcttggcagaacatcccttttt

SEQ ID NO: 4359 - DNA, 725 bp, Gossypium hirsutum
  Clone ID: GOSHI-09MAY01-C34912_2
tttgacgcgtgggttcatctagttggcgtggcttttttctcctatcaaggtcctgtctgcaaccaacctgttgtttgcaggatttgggctttgattacaccttttccaattttgctttataaaagaaaaaaaaaaaaaaaccacgatggctgctcatagttatagcttgtttcttttttccttgtcttttgttgtcttaatcccaacccttcaagctcacattgctgaatatgacgattattggaaggcacggaaattggaagccattgagaacctgaacaaggcttatcaccccaatcctgaggagatggtccaccattacaatgaccaatttgccaaaaccatgattaagcttaataacaccagaagggtgttgaagggaacgaaagaaaatggtccatgtgaaataaccaaccccgttgatagctgctggcggtgtgatcctaactgggaaaaaaacaggaagaggctggccgattgtgcccctggatttgctcgtggtactaccggtggaaaggagggtgagttttacgtggtcactgacccttctgatgatattcttaaccccaaacctggaactctgcgtcatgctgtcatccaaagaagaccactttggatcactttcaaaagatccatgatcatcaccctggaacaggagctcattattacaagcaacaagaccattgatgctaggggcgccaatgtgcagattgctaagggtgctg

SEQ ID NO: 4360 - DNA, 1673 bp, Gossypium hirsutum
  Clone ID: GOSHI-09MAY01-C34912_1
cggcgctcgggtttttggtgccgtagcttgtctctcctgtcctattagggtcctgtttgcatccaaccagttgtttccaagagctaggctttgatacttaaaataagaaccactatgggtatttctagttatagtttctttctgtttttatttgttgccataatcccaaccctagaagctcatatcgctgagtatgacgagtactggacggcacgagaattggaagccattgagaacctggacaaggcctatcactccaacccggaggaggtggtccgccattacaatgaccacttctttaggaccatgctcgagttttatatcaccaaaagggtgttggcagaatcaaaaaagggtccctgtgaggttaccaaccacgttgacagttgctggcgatgtgatcctgactgggaaaagaataggaagaagttggccaactgtgcccctggatttgctcgaggtactaccggtggaaaggatggtgagttttacgtggtcactgaccctattgataatgctgctgaccccaagcctggaactctgcgtcatgctgtcacccaaactggaccactttggatcactttcaaagggtccatgaccatcaagctgcaacaggagctcattgttacaagtgataagaccattgatgcgaggggagccaatgtggaaatttgtaatggtgctggtatcactatccaatttgtgaagaatatcattatccatggccttcaaatccatcacattattcccgccaagggtggcaagatcaaggatggtgaaaaccaccatgggttacggggtgacagcgacggagacggggtgtctattttcggatcaaccaacgtttggcttgaccatcttgcccttcaccattgcgccgatggccttatcgatgtcgttcaaggatcaactgccgttaccgtttctaactgccacttcactgaccataacgatgtgatgttgtttggagcaagcgactcttacagtgccgacgagaagatgcaggtcactgttgctttgaaccacttcggtaaaggattggtagagaggatgcctaggtgccgatttggttttattcatgtcgtcaacaatgactacaatcactggttcctgtatgccattggcggcaccagcaaccctacaattatcagccagggaaataggtattcagcgccaggctttggggctaaagaggtgacctgtaggggcctcttaaagccgggacagtggaagaattggaattgggtatcacaaggtgaccacttcgagaacggtgccttttttacaccatcaggtaatccaagtgccagcaagcaatttggcgccgacaaaatgatgcctttcaaacctggtcaaatggtccccgagctcacaaagtatgccggaccactaagctgcacaatcggccgtccttgctaaaaatgctatttttatatgcatttgtcctcccttttttacgtacaatatttgatacccaagcatagtacatttggtatcttttctgaatgattgtcagtaaattttcttttatgcgatcccaccctattctcttcttctctcctagtaatagataatcacatttttttcgcacgcgtgactatggaaatcataaatttagaacataaatgtttgtttgaaaataacatataatgaataatgaaatgtgtggtttg

SEQ ID NO: 4361 - DNA, 697 bp, Gossypium hirsutum
  unsure (1)..(697): unsure at all n locations
  Clone ID: LIB3828-005-Q1-K6-G11
gccgatggccttatcgatgtcgttcaaggatcaactgccgttaccgtttctaactgccacttcagtgaccnnnnnnnnnnnnnnnnnnnnnnnnnnnnnnnnnnnnnnnnnnnnnnnnnnnnnnnnnnnnnnnnnnnnnnnnnnnnnnnnnnnnnnnnnnnnnnnnnnnnnnnnnnnnnnnnnnnnnnnnnnnnnnnnnnnnnnnnnnnnnnnnnnnnnnnnnnnnnnnnnnnnnnnnnnnngngnnnnnnnnnnnnnnnccataacgatgtgatgttgtttggagcaagcgactcttacagtgccgacaagaagatgcaggtcactgttgctttgaaccacttcggtaaaggattggtagagaggatgcctaggtgccgatttggttttattcatgtcgtcaacaatgactacaatcattggttcctgtatgccattggcggcaccagcaaccctacaattatcagccaggggaaataggtattcagcgccaggctttggggctaaagaggtgacctgtaggggcctcttaaagccgggacagtggaagaattggaattgggtatcacaaggtgnaccacttcgagaacggtgccttttttacaccatcaggtaatccaagtgccagcaagcaatttggcgccgacaaaatgattcctttncaaacctggnntcaaatggtccccgnagctcacaa

SEQ ID NO: 4362 - DNA, 427 bp, Gossypium hirsutum
  Clone ID: LIB3145-007-Q1-K1-H7
cccacgcgtccgcaacatttggctcgaccatctttcccttcaccattgcgtcgatggtcgtatcgatgtcattcaaggttccactgccgttaccagttctaattgccacttcactgaccacaacgatgtgatgttgttcggagcaagcgactcatatagtgccgacgagaagatgcaggtcactgttgctttgaaccacttcggtaaaggattggtagagaggatgcctaggtgccgatttggttttattcatgtcgtcaacaatgactacaatcactggttcctgtatgccattggcggcaccagccaccctacattatcagccagggcaacaggtactccacgccaggtaccttcacagctaaggaggttacctgtaggggcctcttaaaaccggcacagtggaagaattggaactgggtatcat

SEQ ID NO: 4363 - DNA, 411 bp, Gossypium hirsutum
  Clone ID: LIB3145-038-Q1-K1-E12
ttccactttttggtgtcgtagcttgtttttcctaccctatcagggtcttgtgttgatcatacaagggggtggaagagctaggcattgatagttaaaataacaaccactatgggtatttctagttacagttatagtttctttctcttgttatttgttgtcgtaatcccaaacctagaagctcacattgctgaatatgatgagtactggaaggcacgagaattggaagccattgagaacctcgacaaggcctatcaccccaacccggaggaggtggttcgccattacaatgaccatttctctaggaccatgctcgagttttatattaccaaaagggtgttagcggaatcaaaaaatggtccctgtgaggttaccaaccccgttgatagttgctggcgatgtgatcctaattgg

SEQ ID NO: 4364 - DNA, 431 bp, Gossypium hirsutum
  Clone ID: uC-gsflmaxxa029f01b1
cggacgcttgggctcgagttccacaatttggaatcgtagctgggctgttctatcctatcaagggcctgtttgtatccaactagttgtttccaggacctaggcttcgatagttaaaataaaaaccaccatgggtattgctggctatagttatagttggtttttgttgtcaattttcgccctaattccaacactaagagctcacatcgctgaatatgacgagtattggaaagcacgagaattggaagccattgaaaacctgaacaaggcttatcaccccaatccagaggaggtggtccggaattacaatgacccctttttcaggaccatgcttgagtataatagcaccagaagggcgttgaaagggaaaaaaaaagggtcccttggagattacccaaccccgttaatagttggtggccatggtgaacctaact

SEQ ID NO: 4365 - DNA, 381 bp, Gossypium hirsutum
  Clone ID: LIB3145-008-Q1-K1-A1
cccacgcgtccgcactttttggtgtcgtagcttgtctctcctatcctattagggtcctatgggcatgcaaccagttgtttccaagagttaggctttcatagttaaaataacaactgctatgggtatttctagttatagttatagtttttttatattgttctatgttgtggtaatcccaaccctagaagctcacatcactgaatatgatgagtattggaaggcacgagaattggaagctgttgagaacctggacaaggcctatcaccctaacccagaagaggtggtccgccattacagtgaccacttctctagaaccatgctcgagttttatatcaccaaaagagtgctagcggaatcaaaaaatggtccctgtgaggttac

SEQ ID NO: 4366 - DNA, 661 bp, Gossypium hirsutum
  Clone ID: GOSHI-09MAY01-C34902_1
attttagaccacgccaacattccccacctccaatctctccaagttttgttttcattctcgggtgtatatttgctccattccatctcgttttctatttgtaatttcataaccaagctttccaagtctgttcaatatgaaggcaagtcattggcttaacagcttcatcgtactgttagtcctcatcctgacgatggacttccgccatggaatttattatgctcgggctgatgctggcggcaccggtttcgttcaaacaacagcaactaagtttgtcataaatgggaggcctttctacttgaatggctggcgagtgcatattggatgatgatgttcgcgtctgacaatcctacgaggagcaaggttactgacgcatttcgagaagcctccaagtatggcatgaacataccatgaacttggccgtttaacgatggcgattacaagcctcttcagaattcccctggctcttacaatgaaaacttcttcaaggcactggactttgttgtaacgaagctaacaagtatggaattcatttgattctgagttaggcaaataacttcataaaattcggaggaaaaagataaatacctttaaatgggcaaagcaacgaggacggaacctggaccaaaaattatgatttttttcccgaactctgtgggcaaaa

SEQ ID NO: 4367 - DNA, 562 bp, Gossypium hirsutum
  Clone ID: GOSHI-09MAY01-C34922_1
gttggttatgaagttaaaaattcggatgcaaaggctggtgacagtaatgatgttactttggacaaggccatcccagaatgcaattcaagtgactttgaagagggtgatcatgttacgagaacagatgttgaggacacaacttttgcagtgaaagaggatgtcctgaagaaacaatggagttgaggaacgacttctatgggcaagatgcagccattgcagttcgtaaggacctagcgaatcccgatgaatcgaacatctttaccaacacggagatgagtttgttttggcgggttgaagatgaagttgaaaattcagatgtgaaggctggtgagagtaacgatgttcctttggacaaagccatctcagaatgcaatgcaagcgactttaaagagggtaatcatgttgaggacgcaaatttctcagttgttaaggatggtcctgaagataatgaagcaacattggagtttaggaaagacatcttggtggaaggtgcagcagtggcagataaatctccccttccaaagacttcagaaatcagaagagctgtggacggtgaagaagc

SEQ ID NO: 4368 - DNA, 707 bp, Gossypium hirsutum
  Clone ID: GOSHI-09MAY01-C34842_2
tcaagcaggagttacattggagatatcccgattagatgcttggttttcaagcaaagatggttccttggaagggcctgcaacgtatattgtgcagggcctctgtcgtaggtgttgtattccagaagtcattctccgatgcatgcaggtttctgtttcacttatggagtctggtaatccttttgaaagccatgaccagttgattgagctagtctcgagttcggagacagggttcatcaatctcttcagtcagcaacaattgcaggaatttttattgttcgagagggaatattccatatgcaaaatggagcttcatgaggaagccttcctcttgattttagccagctggggatgaaattcgggttagatgtcattgtactttatgcggcaggaaatcaacagcgtcaaaaaggtttgagatctccctcccatccttcaccacagtttttacttattaaggggaaaaacagaattaaatgttgtaaattagattaacatgaaatggtattttgcctggattagctggatcttcattacttgataatttgaggttctaaacacacttaaactcgatttttttttccgtgtatttgagaaatctttgaatatcatcgtaccaatgtctggatatgcaatgaagagtcgacataacgagtaaaaaaaaaaaaaaagggcggcccgcctttttttttttttttaatagaaattta

SEQ ID NO: 4369 - DNA, 630 bp, Gossypium hirsutum
  Clone ID: GOSHI-09MAY01-C34842_1
aaatttctttctctttggtcagtattgtagatcattaagatggagaagaaaggttttgttagattgatgctactttttctgggtttttcttatcttcttctttcctgtgctgctgttcccactactagaagcctcaaatcaaacaaggaactcccttcttctgtccaagatttacttgctcaggatgtaatggaattgagtgatggagaggaagtgataacggaaggtgacagattcaatggggaaaggatgttaatggaaagcactgattatccagggacaggtgcaaacaagaaccatgatcccaaaactccagggagagcttaaaaaacattaagacccataacctatttgttttatgtatagcttaagacatgacaggataaaaggcaagtctttgaatctgggtttcctccaatatttcgctagaatttcctctcttttaaggtttgttgcttggatagtgggaaaactatgatggaaggtttggactgtactttacagtttacagacaaaacctggtgggtattgttcataaaattagataatgttaaaaagatgtctttttaagttactatgtaagggtcggtgatattttcattgataaataaaattattaattagtttatt

SEQ ID NO: 4370 - DNA, 301 bp, Gossypium hirsutum
  Clone ID: LIB3148-017-Q1-K1-G5
ctttctctttggtcagtattgtagatcattaagatggagaagaaaggttttgtcagattgatgctactttttctgggtttttcttatcttcttctttcctgtgctgctgttcccagtactagaagcctcaaatcaaacaaggaactcccttcttctgtccaagatttacttgctcaggatgtaatggaattgagttatggagaattaaatgttgtaaattagattaacatgaaatggtattttgcctggattagctggatcttcattacttgataatttgaggttctaaacacacttaaac

SEQ ID NO: 4371 - DNA, 402 bp, Gossypium hirsutum
  Clone ID: GOSHI-09MAY01-C34822_1
tgcaaatgtaatgttgttccagcagcagaaaagtgtacctgttaaaaccgatctcttcggtggcggtgaactcaccggttatgcaaccaaccaggtacctgatagtgatatggttggtgaagatggagcctccgatgatgatgatgatgatgaggttgaaggtagtagctcagatgaagcatagacattttgttttggaaaaagatggaaggctcgatttttggtagttagggcttgctcattgtaactggaatatgtttttcttttcccttcttaatatgataaacatttgaccaagttaaattaaatttatgttttttcgttgtaattcgagaaaagaaaatttcttaatattttattatgagcaattttgttttaaaaaaaaaaaattacataaatata

SEQ ID NO: 4372 - DNA, 673 bp, Gossypium hirsutum
  Clone ID: GOSHI-09MAY01-C34762_1
cccacgcgtccgcccacgcgtccgccctcccggcccgtataaaccctaaaatttcaaatttcccttctcgcgttctagggttctctttctcttcgccaagatggcggattctcctcgtaaaaggaattctcagtctccctccccatggagagaacagtcaaggtcacgatccagatctagacctaggtctaggtctaggtcaagatcccgctcctggtcgaggccaaggcataggtccaggtcacatagtcgcggcaggtcaaggtcaagaagtcgaggcagggttgacgctggaaatcctggcaacacactttatgtgaccggtctatctcaaagggtcactgagagggaccttgaagagcatttctccaaggaggggaaggtggcatcgtgtttcctggttgttgaacctcgtactcgcatatctcgtggttttgcttttgttactatggacagtgttgaggatgccagccgctgcgtcacgtatctcatcccatcaattttagaaggtcgatacataaccgtggagaggtcgcgtatgaaacggcctaggactccgacaccgggccattaccttggactaaaaaataccacaaactatggtcgtggtgaacgtggcaggttacgtggtggtggtcgtgattactacgggtatcatccatctccaagggct

SEQ ID NO: 4373 - DNA, 508 bp, Gossypium hirsutum
  Clone ID: uC-gsflnu33B136h11b1
ttatgtattctcagtctccctccccatggagagaacagtcaaggtcacgatccagatctagacctaggtctaggtctaggtcaagatcccgctcctggtcgaggccaaggcataggtccaggtcacatagtcgcggcaggtcaaggtcaagaagtcgaggcagggttgacgctggaaatcctggcaacacactttatgtgaccggtctatctcaaagggtcactgagagggaccttgaagagcatttctccaaggaggggaaggtggcatcgtgtttcctggttgttgaacctcgtactcgcatatctcgtggttttgcttttgttactatggacagtgttgaggatgcgagccgctgcatcaagtatctcaaccaatcaattttagaaggtcgatttataaccgtggagagggtaatccgattctatccttgttgcttagacttcatagatttgggcgtttatcatccttaacctggaggttttctggctatattcagaacagtatt

SEQ ID NO: 4374 - DNA, 497 bp, Gossypium hirsutum
  Clone ID: GOSHI-09MAY01-C34702_1
ctccccttttctccagccgaactaagccaaacccctttggccatggccccatcgcaacctacaaccgaccgagttactaccccgtgattcctcctccactttcgacttcaacgaggcaaggaagaatcaatggcggattcacgaggtaaggcttcatttttctcttttcttttatttttagatgcaaagaatgaaaaagaaaatcagagggagcagatcaagagagaaaaaacgtaataaaccctagagattcaaaacaggaaatcaccttgctctgttttttttttgctttctattgcttctgtatgcctccagaagactttacaatcgcaaaacgaaaggctttatagccgagtgttccaaaaaagaataaaaataaattacaattttttctttttctctttggtttcgtgttgctgctggtggtttttggttcttcgcaagtaccgggtgcgttggaatcttacggaggctgtgctggcgcttggcgtgaggcg

SEQ ID NO: 4375 - DNA, 630 bp, Gossypium hirsutum
  unsure (1)..(630): unsure at all n locations
  Clone ID: AI727952.1
aacgtttgtggcagatagaagggttgggtttaaaaagcctatttccatgatctttaagaattcacatcatggttattgtctccatcggctaatagagggattaaaaggggatttcaacggctcatgtagtgaagaagttcttcaagtgattatcacacatttctatgatgctgctcgtgcaactacacttgatggattcagacaatcaattgagaacatcagaaatatttcaccagaggcttgtgaatggatcttgcaaagtggacctgaacactggtcaaatgcactttttcaaggttcacgatatggatatttttcatcaaatgttgcagagacattttatagttgggtgactgaacttcctattacatctattgctaagttgattgagaccatctgctgtaagatgatgaagttgatgaatactcagaagtcagattcatgtctgtggttgacaaaattaactccagctgtggagttcaaattagaacaacatattcttaaagctaacatgcttcaagtgccagtgtcacttggtagcacttttgaagtatgtgacagtttgggtgcaataaatgtattgaacattgatctctgggactgtanctgcanggaatggcaactgaaacg

SEQ ID NO: 4376 - DNA, 239 bp, Gossypium hirsutum
  unsure (1)..(239): unsure at all n locations
  Clone ID: LIB3145-005-Q1-K1-D11
ccttacactgggtttgcactggcaaggtacgattgcgattttttataggggggggcggggacattttatanttnnntaactgaacttccaattacatctattgctaanttgattgagaccatctgctgtaagatgatggagttgatgattactcagaagtcagattcatgtctggggttgacaaaattaactccagctgtggggttcaaattagaacaacatattctttaagctaacat

SEQ ID NO: 4377 - DNA, 1041 bp, Gossypium hirsutum
  Clone ID: GOSHI-09MAY01-C34602_1
gcccacgcgtccgcccacgcgtccgggcacccctgccccctcgcgcccgcactgaacagaacaggcgaaaaattgctggttggaccataatgttattatgtgtaggggcatttggccttacctttgcagcttcaaatgtgtggattccgagtcttattcggttaacatgttgcggagttggtggtgttcttcttctgtctggtttgattgtgctcacctgtatagatcaagatgatgcaaggcataatttcggccataccggaggtttcatatgcccttttgttccacttctaccaattgtctgcattctcatcaatgtctacctgctcatcaatttgggggctgcaacatgggctagggtatcggtgtggcttttgataggggtggttgtatatgtgttctatggtcgatcccacagctctctgctggatgcagtctatgtgcctgcagctcatgcggatgaaatttatcgatcctcgggtgactcgttggcttaattccaccatgaatgcaggaaacaatgtggaatatatgtcggaaccaatggttggtggtctttggtatttgcagaagaatctcaacgttgaatgtttgtaatttttagttatttttatatatcccattttcccctccgccctcgcgtccgaagttgttgtggcagccatggcagatgtgaccttaaatcactccctagcttgtatatagcatatatgtatcctgaggttgggaaaactcatttaaaaatgtaaattaaatatggattttcgtctcttttcactctctcaagaagtgaagggatgaaaaaaaaaaaaaaaaaaaaaaaaaaaaaaaaaaaaaaaaaaaaaaaaaaaaaaaaaaaaaaaaaaaaaaaaaaaaaaaaaaaaaaaaaaaaaaaaaaaaaaaaaaaaaaagggggggccccttttaggggtcccaggtttcttaccccggcttgccaaggaaaaactttttttttggggcccccaaattaaattcaccggcccggttttccaaccttggaaacgggaaaaccccggggtt

SEQ ID NO: 4378 - DNA, 229 bp, Gossypium hirsutum
  unsure (1)..(229): unsure at all n locations
  Clone ID: uC-gsronu33B098f07b1
gcaatgtcataatttcggccataccggaggtttcatatgcccttttgttccacttctaccaattgtttgcattctcatcaatgtctacctgctcatcaatttgggggctgcaacatgggctagggtatcggtgtggcttttgataggggtggttgnctctgagtnctagctgcgactacacgaaagatgctgtgctgcatggtataatcccgctcatcatgggcattaa

SEQ ID NO: 4379 - DNA, 482 bp, Gossypium hirsutum
  Clone ID: uC-gsflnu33B056g11b1
ggacaaggtaatgatatttgttttaacaaagatgattcatcccatccactctcctccctaaacttccagcaattaacgacactttttgggaacattttcttacaggaagtccactcactggggacacagatgagatatactcgagttccctcgaaaatggtgcatacggtggataggaagcagttttaagggaggagagtggatgggatgaatcatctttgctgacaaataggccttctttacatcacattagcaggaaggggtgatgtcgtacaagctgtatacgcaaatacttgattggttttcttgctttaatgaggtaaaacttggtaccgcctgtgttcctgcttagtatgtgatcggtttatctatggttttagaaggcttaatattatattcaaaatttggattggtctcatgttgcgatgagtttattctagaattatgggatgacaaggcattgatatttggttaaacaaaaa

SEQ ID NO: 4380 - DNA, 341 bp, Gossypium hirsutum
  Clone ID: LIB3135-014-Q1-K1-D2
cggacgcgtgggctcgaaaatggtgcatacggtggataggaagcagttttaagggaggagagtggatgggatgaatcatctttgctgacaaataggccttctttacatcacattagcaggaaggggtgatgtcgtacaagttgtatacgcaaatacttgtttgtttttcttgcttttatgaggtaaaacttggtaccgctgtgttcctgctcaatatgtgaccggtttatttatggtttagaaaggttaatattattttcaaatttggttttgtttctaaaaaaaaaataaaaaataattattaatagggggggccgttttaaagattcaaagtttacttc

SEQ ID NO: 4381 - DNA, 620 bp, Gossypium hirsutum
  Clone ID: GOSHI-09MAY01-C34102_1
atacgccatagatgaactggtggaccccagattggaagatcgctattccgaacatgaggtatattgcatgcttcatgctgcatcattatgcgtaaggcgagatcctcattctaggccgcgcatgtcacaggtgctccgcatactggaaggtgatgtgctcatgaacaccaattacacgtcgccagggtatgatgttggtaaccgtagtggccggttctgggcagagcaacaacggagctacagtggaccgctcacgagtgattcattagatgagttcagtggaaagctctccctcgacggagcaaggccaagaaacaaggaggacttcatgcgaagatcatttgtagaaggctcatttaccaggtttacttgcgcccatggtgcgctatattctgttttgtattgttttccttcattgccaggttagattctgcttctgtatggtaagtaggagcattggaagcaaggtttcaattagggtttttgtaattctttttggaatggccagtttcaaaagctatggtgaatgtgcctctgctaattaaatcaatcaatcagctttgagagatttggttctttccctctgctttagtactaatggagcaatttatttatttgat

SEQ ID NO: 4382 - DNA, 731 bp, Gossypium hirsutum
  Clone ID: GOSHI-09MAY01-C34042_2
atttttattataaaattatttatttatagtgttatttttttttttttattatgagaaaattgctcatagcatcataaagaatcacatccattctctgttaagttcagagttctaagtttggaactacatcttatgcaaattcccctaatttccaacatgtaataacaccacatgattagtcagcgtcaaagcagctaagtcatttaaaaattatgatggacaatctatattgttcaaagcttcactgcttcattttaaaagaggtggataggataagaggggttgaaagaagccatataacttacaacttcaaacttgcacttgcatgagtaaacaagcattttacgaacaccaacacaccgcaatcgcaacatatcttttgagatatcatagcctagccctcaaagtcagctgccctatctgcaaggtgcaattagctaatgaaaaacaacttggtgatcattatggctccaaacatccaaaggaaaaccctcctgctgtgtcaagttgattgctttcttcccagtaacccccccccccccaaatttcttttcctgtgtgattctagatattgtatgttaaccgtctttttaaaaaaaattttaaaccaatgaaaatgactcttttatctatttgcctttgcctttcgctttcagtcatgtcgtgtgtagaagtgtcccctagcatgaccctaaagcagttgcctcggcgaacgctgggtcgacccggaa

SEQ ID NO: 4383 - DNA, 488 bp, Gossypium hirsutum
  Clone ID: GOSHI-09MAY01-C34042_1
gcgtaattgccgaaggagggagcgaggaaagagaggccgcgaggaaaacaaaagatcgaagcgcagaggcgaaacgctgagaagaatcaaaagccaaagggttctcagctggaggccagagctgtagccctcaaagtcagctgccctatctgcaaggtgcaattagcaaatgaaaaacaacttggtgatcattatggctctaaacatccaaaggaaaaccctcctgctgtgtcaagttgattgctttcttcgcatgtaaaagaaggaaaagaacaaattatcttttcctgtgtgattctagatattatatgttaaccgtctttaaaaaaaaaataatttaaaccaatgaaaatgactcttttatctatttgcctttgccttttgctttcagtcatgtcgtgtgtagaaatgtgaacactagaatgataataaagcagtttgcctgccgcccgggatataaatattttatgaattcacaaggggataca

SEQ ID NO: 4384 - DNA, 407 bp, Gossypium hirsutum
  unsure (1)..(407): unsure at all n locations
  Clone ID: uC-gsronu33B138b04b1
tttcccacgcgtccgaaatgacactataagccatttaactgaacatgttcttgagctcgagaggcagcaaatcttggaggactaggctatgatatctcaaaagatatgttgcgattgcggtgtgttggtgttcgtaaaatgcttgtttactcatgcaagtgcaagtttgaagttgtaagttatatggcttctttcaacccctcttatcctatccacctcttttaaaatgaagcagtgaagctttgaacaatatagattgtccatcataatttttaaatgacttagctgctttgacgctaactaatcatctggtgttattacatgttggaaattaggggaatttgcataagatgtagttccaaacttagaactctgaacttaacagagaatggatgtgattctntctg

SEQ ID NO: 4385 - DNA, 327 bp, Gossypium hirsutum
  unsure (1)..(327): unsure at all n locations
  Clone ID: LIB3147-037-Q1-K1-B12
gttctcagctggaggccagagctgtttccctcaaagtcagctgccctatctgcaagattttgtagaccaggagccctaatgggtaggaaagagatctgcaagtgcaattagctaatgaaaaacaacttggtgatcattatggctccaaacatccaaaggaaaaccctcctgctgtgtcaagttgattgctttcttcccatgtaaaagaaggaaaagaacaaattatcttttcctgtgtgattctagatattgtatgttaaccgtctttttaaaaaaaattttaaaccgntgtagaacttataaaaaaaaaaaaatgactttttaaag

SEQ ID NO: 4386 - DNA, 507 bp, Gossypium hirsutum
  Clone ID: GOSHI-09MAY01-C34372_1
gtttttgtttcttctgtctgagttttgagctcaaactttgagaccaaaaacatgtggagaagaaagaagaagaagaagaagaacactgcaaccattagtaaccatccctcttctgcttactcctcggagaggatttgaaagggggcttaaaaggcaagtcatttgaggcacagggaaggccatgcctttctttctatttttactttattgtgtctttatcttcatttctgcatctttgttttcaatcagagttcagatcaaaatgagcataaaacacatgaagaaagtccaaatttgtagcagattaattggttgttccaagctgttttatgttttttcccctcaaagtttgttgaacaaaaatggttggttatacgtctgctatttcatctgaataattagtgcttcattgcttgaatttctttcagctgacaaaatgggtgggtttgaaatgtttcacattatgaataaattgttcttcatccaaataaaaaaacaagggcggcc

SEQ ID NO: 4387 - DNA, 338 bp, Gossypium hirsutum
  Clone ID: uC-gsflnu33B035h04b1
ccacgcgtcctctcgtacgggcgcgcggccagcccgaaatatctactgctactgtattgagagtctacctgcatgactggatctttgttattaacccttgttcttatcacctacgagcataggccacaggaagaatgtccatcccccgttgcacaattgaaagggcagtcacaggctgcgatacgtgtgccaccatcaatgtttgatgttcccagatgattgagtatacactggctccatcatccgaataattagtgcttcattgcttgaatttctttcagctgacaaaatgggtgggtttgaaatgtttcagattatgaataaatctgctcttcatc

SEQ ID NO: 4388 - DNA, 546 bp, Gossypium hirsutum
  Clone ID: GOSHI-09MAY01-C34302_1
ggaatttcaactcgggatgcagctttgtccttcgagttaggtatgcgagcactcgatttagctgtcggtagagccatgaacgtgtcaaatgataatttccaaaatgaaggagagtcatgcccttgtagtccatatgataagggtgtattgctggccagagggcatctcgtcattaaccttctggagagcgaagatacaaaagaattgagccagatttgcaaaccactcttcaaaaaatcaacatggttaaggcccaaggctacaagatcctcattcagagagatttatttaatttgtcaagatttaaagtctcagtaaggttcagaatctttacggtggcggcaactatttgttaccccaatgacctcccggatatgaatgtcgaatatgggtatgtttaatttcttttaatgtatttggaggatcatatctctatactcatatccaaaaaacatatcgaacccagaatatgaaatgctcttgagaaaaaaaaaaataaagataaaaaaaaaataaaaaaaggatagattattaatatcataaaaa

SEQ ID NO: 4389 - DNA, 700 bp, Gossypium hirsutum
  Clone ID: GOSHI-09MAY01-C34332_1
agaatatctcgacttcatctcattccacaaagttgccaatggcatcgattggcgccgccgcaagagcagttctccgatcaagttctgctcgcaacgctgcggctcggctcgccccacaatctaaagctgcaccatcgcagtttcgtgtctcctccaggattcctctttccaactgcatttgcaggtgtccagttgaagcgagtttctgcttggaatcgatgctgccgtatcactcggcgactgcttcggctttgatgacttcgatgctcaccatttctcgccaaagctatgtttggctctcggaagggctgtaatatccgcttaatgtatgacaattccagctgagaggatattcttgttaccttgttccgactacaactgcaaccccacctggtcacgggactttaatctgttgtttgttccataaaatatatattttgagaaaaatgattgtgttttggatgaattagcatagtgttatttaataatttcaatgccagttttcatttagaggctaatctctgccaaattaagtaaaatcaccaccttgcaagcccaagtgtcaatggcatgaacatgtagatgatcaaaggagaacaaaagaaacaaattccttctctattatacatgtcaaactcaaacaagaatgcatcttgttggtgtttattgtttttattctgttaaaaatctgatcagcctt

SEQ ID NO: 4390 - DNA, 472 bp, Gossypium hirsutum
  Clone ID: GOSHI-09MAY01-C34242_1
ataccctcccaaagcacttgcattgctggctgctgtggctgcattgtgtgttcaatatgaagctgattttcgacctaatatgagcattgtagtgaaagctcttcagcctcttttgaatccaactcgtccagcaacaacatcccgtgcctacggtgaaaggtgacatcgtgatgatgagccaattagtggctggaaactgaatcaagacctgttgaagtcgaaaaacctgcctgtcattatgatttgttttgtaaataggtagctttgcttgtattccacccttaaaccccacaagttgaattactagagctgccagataaagagtagctgtagaatgtagagaatatttcatataattcatttgcgcagtctgtctgttttttacattgggtgtttccctgaattccaaagaatgagattgtgacattagagaggaaaagacaatggaaatagatgaaaatagtatagtttg

SEQ ID NO: 4391 - DNA, 736 bp, Gossypium hirsutum
  Clone ID: GOSHI-09MAY01-C34222_1
tccacgcgtccgcccacgcgtccgagagaggtctggcgatggcgacgacggtggtgaagagcgcgttgcaggcgatccgtgagaggggtctccgcagtttcttaagggagctcaaggatgatggcttcacgaaatgcttcttcgatggaaaccttctgcaaaccaaaatccacaatataggggcaacagttgtgggtgttgataaattcggcaataagtattatgagaaactcggagacacacaagctggaagacacaggtgggttgaatatgcgaaaaaggatcgttatgatgcttctcaggtaccaccagaatggcatggttggcttcacttcataactgaccataccggtgatgagcttttgatgctaaaacccaagaggtacggggtggagcacaaggagaacttatctggtaaggggaatgagtttatctaccattctaaaggacatgcacttaatccgggtcagagagactggacaaggtaccaatcatggcaaccaaccaaggctgagtagtaatcttttgactttgcaagctgtgggacggatgtttgacttttgtttttgatgaataaatatgggttgtattcgtctcaaaggatagcttttgggcatattttttaaatacaagaaactgcaaactatcaacttgatatttggatgttgccaaataagtttgaaatcatcatctgatattgttcaaaatttcaatctacattttgatgctttaattt

SEQ ID NO: 4392 - DNA, 344 bp, Gossypium hirsutum
  Clone ID: LIB3135-018-Q1-K1-B8
caagcaataaacaccatctctattaatgtatgtaacaagatgtcaccgtctctaatttatgtttattaccgatgcataccatttatggcatttataggaagacacaggtgggttgaatatgcgaaaaaggatcgttatgatgcttctcaggtaccaccagaatggcatggttggcttcacttcataactgaccataccggtgatgagcttttgatgctaaaacccaagaggtacggggtggagcacaaggagaacttatctggtaaggggaatgagtttatctaccattctaaaggacatgcacttaatccgggtcagagagactggacaaggtaccaatcatg

SEQ ID NO: 4393 - DNA, 729 bp, Gossypium hirsutum
  Clone ID: GOSHI-09MAY01-C35982_1
ggaagctcctgctgccatggcccgggacatgatcatcgaggtcaccaccaatggggggtgtccggatcatctccaccactaccatcctcactctctccaacaacagcagcaaatgatcttgggcgaaagcagcggctatgacccataagtcaaagcccccaagaaacgagccgagatctgggtcctagacgaaacccgtagccttatcggtttccgaaaggaaatggacggccgcttcaatacttttaaatcgaacaagcacctttgggagaagatatcatctatgatgaggaagaaaggattcgatcgatccccaactatgtgttcggacaagtggaggaacttgttgaaggagtttaagaaagctaagcatccagatagagggagcgggtcagtcaagatgtgttactataagcaatttgaagagatattaagggagaggacaaagaagtcttataagtctccaacttctcctcccaagcttgattcctttatgcatttctctgataagggtttatgtactacttttgacttcttttttgcccttttcattttgcatttaaaaagtctgaacttttattgatgatttgctgttactatggttgatggggcattctctttaaatcctttatttgtatttaaccatccgtttttgagttatatacccttcctgattttccctttctgttctaaaaaaaaaaaaaaagggcggccctcgcgatctagaac

SEQ ID NO: 4394 - DNA, 1300 bp, Gossypium hirsutum
  Clone ID: GOSHI-09MAY01-C35952_1
ccccgcgtccgcggccgcgtgggtttttctcctcgctcgcgggggtttcaatgacaagaagatcatactctcttattgctctcacctttctcaccatttcctttccatgtttagaaaatgccaatggttgttgcaatgtatacaaaggtaagtgggtgtatgacagctcctatcctctctacgattcatcagcctgtccattcatccacaaggagtttaattgcctcaagtatggccgccctgatcatctttaccttaaatatcgatggcaaccaagcaagtgtaatttgccaaggtttgatgggacgcatttgttgaggagattaaagggcaagaagataatgtttattggggactccataagtataaaccaatggcaatctctgttatgcatgcttcacgctgcagtgcctgctacatctggtataatcacacgagacttgcataatcacactgtttccactgttactttcaagcattataaggtatccgtgatgctatttcgttcgttgtacttagtagacgttgataaggaaacaattggcagagttctgaaattgaattctgtaaggaatggaaatctatggaaagaaattgatgttttgatattcaacacttggcattggtggcaccgtagaggactgaagcaacaatgggattatgtgcaatttgatgggaagattcgtaaggacattgatcgcacggttgcttttcgtacagctttgagaacatgggctaaatgggttgattcagatgtggataccaataggactaaagttatatttcaaggaatttccccttctcactacaatggcatagattggaatgagccaggagtaaggaattgttcaaggcagacgacaccattcaagggatcgatttatccaactggtttgcctctggcagagtacgtagttaaagaggtcataaggaacatcaagaagcctgttcatttgcttgatattacaatgctctctcaattacgaaaagatgcacatcctagcacttacaatgacttcaacggcatggattgcacccactggtgcgtggccggcctccccgatacatggaatctacttctgtatgcagccctcatcaaatagcagagaaatttggttcaggcactagccacccaacatatatgtggtctccttaaattatttattttgcttactcaaaaaagatcataagattatatattgaaaatataataaatttgttttacttctgtttgcagttctcaattatgcatgtgatgtaattcaattatttatggcattggtttgtttcttccttgctt

SEQ ID NO: 4395 - DNA, 353 bp, Gossypium hirsutum
  unsure (1)..(353): unsure at all n locations
  Clone ID: LIB3828-022-Q1-K6-A1
tagcagnanaatttggttcaggcactagccacccaacatatatgtggtctccttaaattatttattttgcttactcaaaaaagatcataagattatatattgaaaatataataaatttgttttacttctgtttgcagttctcaaaaaaaaaaaaaaaaaaaaaaaaaaaaaaaaaaaaaaaaaaaaaaaaaaaaaaaaaaaaaaaaaaaaaaaacaaagaggacccaacacatagaaacacaagacataacatcttctatcgtgccaacacaaagtacaactaaattggccggcacttaaacaacgtgaaagagcggggaaaactgagaacgtcccggaacgtaaaacacctt

SEQ ID NO: 4396 - DNA, 858 bp, Gossypium hirsutum
  Clone ID: GOSHI-09MAY01-C35842_1
tgctcaaattattttgcctggaaacccaattcaaaggcaacggaaaattagggttttactaccaaaattctttatttatttttcttttcaattttcctcaggtgatttctcttttggggttttccccctttctatttttcgtttttcccagattgcttttattgcttattggtatatatatttttctgtgttttgcgtcaatttttaattatgtttgtcgtgaattaggtaacaaacgtttaaattcttgttgttttaactcaatttagaaagttccttctccggccgagaatttgaattagatttgttcattattcttcccccccccccaattttagctacaattcattaaatgctaggataattcaggtttagactttaatttccttgaaggaattgtttgatttctctttagaactaaaaccttctcttttagtcaaaagaacccttttaagaatcagagaaattttttgttttttaattatggtaactctattgatgtattatttgctatcataatatgctgtttaatttacttgggttctcttggttaacagagagtaaaattatgataagaccatgttgaatcactgctgttaactttattgattacggcaaactgcgacatgaatcacttggcacttaactgtgttccagacaacgcttcatttttcccatggacttaaccagagaatggaacatctcttttgaagacggataacttgaaaaaaccttgccaatcatgtcttctaaaactgatgacttaggctcattcataagtcaatgttggcatttatgcttctccaaaatgtcctgtatgttttatgttaatatcttgtattcactattttgttagta

SEQ ID NO: 4397 - DNA, 954 bp, Gossypium hirsutum
  Clone ID: GOSHI-09MAY01-C35582_1
tccttctacttttctttactttcctctcatttctcttcttccccctccattctcaatctggttctcatctccagtcaatcctttgtttccattgccaatatatgtgcaagggcatttgcagatcttagtacatgtttgaatatgaaacttctaggtctgtttagtttctgttgaatatcgtatatatatgctctaatatgtgaacgatcttgactttttattgcacatttattgattattgtgagggagtctccttctattacaaccttcggccattcctgttccactcctactaggaccgctttcctacacgcgattgcttcagctgcaaatgcggaagttaccccgtgatggatctctgagcaggaaagtaagacaaccccttcttcgtttctgacaacaatccctgaggcagattggtggtgatttgaatcatacgcaccatcaaaattaatttttacgaactctctagatagcccaaagtccacaacaaaagaggcggctctggtataaagtaagctgatcaaagattcaggatattcgcgaaaatatggtcgattgtttcaactctttctccacatcgaaggcagcttgtactactgacaagctttcggtgctgcatattaaccctcgtcggcaaatagttccatgaaattctctatactgtaaccttgattttatttggtagatttaggagccagagttttttttgtaaaaattcctgtagtcagtttgtaaagcgtaagctctaggaatttcatcaaaagtttgtaatagtttataggtactgcggaccggaaactagcctctccaggtaaggaaatcatcatgaggtttgcgtgctaaaggtatccggattttttccagcatctttcctctgaaaaggtattgtttataagttctcttttcccatgttctctcattactgtcgatcaactcactaaccttgacatc

SEQ ID NO: 4398 - DNA, 662 bp, Gossypium hirsutum
  Clone ID: GOSHI-09MAY01-C35562_1
gccatattcaagctctttaacatttttttttccttttctgggtgaatcaagttctttaaccatcagtgaccgtagcagcatactaaaatatgggtcgtggtctgggatccaacaccatgtctccggtaatggcacgattgctgttgttgagtatctgcataggaatattggcgaaggcggcatcagcccaagtgaatcccccaaatgcgttggcctcaaaactggggggctattgcggcaagagtaccatgtcctgctccatgaaatgcggttatctcggctgccttgcaggctgtgtgacatctccctcgataggatgcggctataagtgctttttcgaaaacaccagttgccaatttggctgcaccccctttgatattcgaggccaatcagcccgtgttaagacctagagggatatatatatatgtgagcgcgcgcgttgtttgtttattattaagtgtttgttattattattacaaaacaaaaaacatgatgatacacaatgaataatgtcttcgaaataaataaacaagtaaacttatacaatgccactggattagtgtgttatgttgttaatgattaacatgtaagaagagcattcaaccatttaggttgatttgatttaaaattataaaaataaaataagttgattgtatctgaat

SEQ ID NO: 4399 - DNA, 1088 bp, Gossypium hirsutum
  Clone ID: GOSHI-09MAY01-C35502_1
gcgcgctttagtatatcttttctctctcctgtgtcgcgcgtcgtcaaaaatcccacgcgtccgggagatatagagtagcagcaatttgccatttctttgttgctaaaacgatacaatacatggacttgtggatggatgatcccctcaccgggaagcgcttcagctcgactgacgatgatgaagaagttctacagcaatgggatccaggatctttaatgtactccggttgggcagaaaatccatctggaatcagcaatgagattttcctaagccaggctaatggaagcacggtccaagcctctcaatccccaaacacttccaatgctcctgttttgagaaaatgccattctactttatctcaagctgaacgagctcagaggaaaaggatgaccgatcaggcatatcgaggaagagttaagttacacaaagagcaaatgaaatcaaatttggagacccttactggagaaaacgaatcactaaagaaagagaatcaatccttaaaagcggctaatgcttccatgaaccaaaccttgacggatcaagcaaaagagattgatcagttgaggagtgatcttttgcagctgaagaacgaccatgagaagcaaaatattcttttggaaacactttcagggcttctatctgatccattgaagctcgaaaatgagaaactgaaggaagaaaatgcgatgttaaggaagtatgccaatcttaatagtcgcataccgcagattttggaggagaatgcaaagctaaaaattgaaaataaggtactcaaggttcagaatgatgctttatgtggaaagattattgctgacaatgacaggaaggttgagcaagaaccataagctgaaatactttttgatgatatgcctgcattgatttatccatggaggtggtctggccatcacgatgttattcacttcgggttctacttaattccttcatcagttatggtctttgaattttatgttgtattcgtcttttgttttcttctttttttgtacatatactgaatcctctttcatagtatgtatgtatgtatctatgagcaggcctctttctatctatatgacctcaatgttctaatt

SEQ ID NO: 4400 - DNA, 422 bp, Gossypium hirsutum
  Clone ID: GOSHI-09MAY01-C35482_1
aatggaggttcacaatccgtttccctgtgttttggcctacagcctgcttaccgccttggcggctttctggccgtggcggacaattataagatcttgcaatcaaaatatgaaggttcatggaggaaaatgtggcttttaagacctcgggtacgaactgatggtctctacctaagtccgaatacttatattcgcgctgcacttgcacagtggaacatcacaaatccagctcacattgtctgctactctcgttactcgagatttttcccttctggcagatttctatacaacaattcctctcataaaaataaaggatgcagcactagttcatgaattttcgtgcatccaaagcagactgtgtttttggtggccattacactttgtccgataacaaggttgaagctgccgtcttgtaccctggcatg

SEQ ID NO: 4401 - DNA, 564 bp, Gossypium hirsutum
  Clone ID: GOSHI-09MAY01-C35442_1
aattttcctctagcatgggcaagctacagtacataccgagcgaacagcgcaaagaagcattaagggatgttgatacaggagagaaaatcgccgagttaatccccgagtttctaaagaatttcaaggagggttcattagaaagcaagggttggccaacctttctctctgcctatacaatctcaaaagtagctatgaatgcctatacaaggattttggccaagaagcatccaaatttctgcatcaactgtgtttgccctggttttgtcaaaccagatataaataccaatgccggtcattcaacccccgaagaaggtgcagcgattccagtcaagttagccctttggccgaacggtggtgccccttccggcctctttttcgttcagggtgaacctgtaccatttgaatgaaactaaaaaaaaaagaaacaataaaatcccatcaaagtggtcgggaacttagttcacaattctctcttcatcatcgattacaataacaatgttacaacatggttcaacggatagggtataatgtttcccgtgggaaagttctacaatattttatgag

SEQ ID NO: 4402 - DNA, 520 bp, Gossypium hirsutum
  unsure (1)..(520): unsure at all n locations
  Clone ID: LIB3828-032-Q6-K6-D8
aatattttctctagcatgggcaagctggggtacaggccgaaaaaacagcgcaaagaagcattaagggatgctgatacaggagagaaaatcgacgagttaatcaccgagtttctaaagaatttcaaggagggttcattagaaagcaagggttggccaacctttctctttgcctatacaatgggggaagtagctatgaatgcctatacaaggattttggccaanaagcatccaaatttctgcatcaactgtgtttgccctggttttgtcaaaacagatataaataacaatgccggtcattcaacccccgaagaaggtgcagcgattccagtcaagttagcactttggccgaacggtggtgccccttccggcctctttttcgttcagggtgaacctgtaccatttgaatgaaactaaaaaaaaaagaaacaataaaatcccatcaaagtggtcgggaacttagttcacannnnaaaaaaaaaaaaaaaaaaaataaaaaaaaaaaaaaaaaaaaagggcggcc

SEQ ID NO: 4403 - DNA, 400 bp, Gossypium hirsutum
  Clone ID: LIB3145-014-Q1-K1-F7
gaatgcctatacaaggattttggccaagaagcatccaaatttctgcatcaactgtgtttgccctggttttgtcaaaacagatataaataacaatgccgggcattcaacccccgaagaaggtgctgcgattccagtcaagttagcactttggccgaacggtggtgccccttccggcctatttttcgttcacggtgaacctgtaccatttgaatgaaactaaaaaaaaaagaaacaatataatcccatcaaagtggtcggcaacttagctcacaattctctcttcatcatcgattacaataacaatgtgtcaacatggttcttcggactatccattcaagcacggtagaacaagtattaggtgcttcacaatttttccaggttcattcctttaaaaagaaat

SEQ ID NO: 4404 - DNA, 247 bp, Gossypium hirsutum
  unsure (1)..(247): unsure at all n locations
  Clone ID: LIB3145-024-Q1-K1-H3
ggaattangggccgacccacgcgtacgcccacgcatccttacctactatggtggagatcctgtaccatttgaatgaaactaaaaaaaagtgatgctttaaaatcccatcaaagtggtcggtaacttagttcacaattctctcttcatcatcgattacaataacaatgttacaacatggttcatcggtttgggtatattgtatcccgtttgaaatgtctacatttttttttgtgttgctttatttgtt

SEQ ID NO: 4405 - DNA, 456 bp, Gossypium hirsutum
  Clone ID: GOSHI-09MAY01-C35472_1
cggaatccggtcgaccacgcctccgccaagccgtccgccagccttccgtggaatttggttttattggcagtaatcttaatgtttacaactcatacagagatggtggcggaggcaaggggacctatcatttcgtttagatgccatagaagtgaagactgtggaagtgtctgcgccaaatgccccacctgcacttgcctctttcacctttgtacttgccctaccgaccctccatggccattatcataatctcatttacttctcagcaataaatcactctgatcctttgtctttgcaacaagctttcagatcttataataataacaactcatgggcattgtttctgttcttctggtattattattatttttttaaattttccttttaccctacatatttcttattttctgtttaatcagtgttgagaatggcagacagcatggaggtcatgaaacaatt

SEQ ID NO: 4406 - DNA, 436 bp, Gossypium hirsutum
  Clone ID: LIB3145-015-Q1-K1-A6
gaatttggttatatttgcagtaatcttaatgtttacaactcgttagtttctaactcagtgttgtgcctgaaccttaactcatatgtttgtttaatatgataaaagtagatgtgtggttgcagatacagagatggtggcggaggcaaggggacctatcatttcgtttagatgccatagaagtgaagactgtggaagtgtctgcgccaaatgccccacctgcacttgcctctttcacctttgtacttgccctaccgaccctccatggccattatcataatctcatttacttctcagcaataaatcactctgatcctttgtctttgcaacaagctttcagatcttataataataacaactcatgggcattggttctggtctttttctttttcttcttttaaattttcttttaccctacatgtttcttattttctggtta

SEQ ID NO: 4407 - DNA, 404 bp, Gossypium hirsutum
  Clone ID: GOSHI-09MAY01-C35402_1
gaagcagctaactatgttgcagacggacaccgttctatttttcggtcaaaatcatacctccctgggctaagagacttaacaagccagcgttgggctgctgacatgggccaaagaccttcattcttggatattctcaagaggctggaaaagatcaaggaaaatgtaccttcagatcatccttggaatatattcagcacatgacattggaagattccatgaaactaatacggagggtatacatcccctttcctccgcccacatcccgcttggccattcctgcagatggtattgtgaatgcactcacttagtagctttgtgatgatagatttttttcttgaccggatttcgtctatttgttgcggaattcaaccatgaactagtgtgtctttatttcgactattact

SEQ ID NO: 4408 - DNA, 892 bp, Gossypium hirsutum
  Clone ID: GOSHI-09MAY01-C35432_1
cccggttcgacccagctttcggtcatacttggttctatcaggacttcttggtgctctttcatggagtttgatggccacctttgttgacagcaagtatggtgctgcatgctgcatacttcttggatctttttctgttgccttctcggatgttgttgtagattccatggttgtggagagggctcgtggggagtcacaaagcgtgtcgggttctcttcagtctctatgctggggatcttcagcttttggtggaattgggagttcctattttagtggctctctggtggatgcttatggtgtaaggtgcggtggtggtgtcactgcattgttaccactgatcacatctgctgttgctgtccttgtaaaagaacagcgcgttattggccaagcaagggggccaaatgttcctttgggaaattctagctttcttaaaagctcaaaagaaaacattattcagttgtggactgctgtcagacagcccaacgtatttcttcccacagtttttattttcttgtggcaggcaacaccacagtcggactctgccatgtttttctttaccacaaataaacttggtttcaccccagaatttctaggacgtgtcaaacttgttacttcagttgcatcgctggctggagttggactgtataatggatttttaaaaaatgttcctttgcggaagatttttcttgccacaacagtcactggtacagttcttggaatgactcaggtctttcttgtcacgggattgaaccgacagtttggaataagtgatgagtgggttgcaattggggatttcttgattattacagtccttagtcaggcttctttcatgcctgttcttgaacttgctgcaaaactatgtcccgaaagaatggaagcaacactttttgcaacc

SEQ ID NO: 4409 - DNA, 1170 bp, Gossypium hirsutum
  Clone ID: GOSHI-09MAY01-C35422_2
gactagttctagacgcggttagtaaggcagatctcactgctgaaaacctcaggaatgtgtcagaggatctttctgcagctaagaaaattagcgtggattcagctattttgccgtcagatgtccaaaaaggcattgatgatatcgataggaagataaactcttcggcttcaactctttcacatcaaacggctgataataaagagaaaattcaacatggcttagacagaatgagattggctctcatcattcttgctgctgtgatgctctttttggcatttctcggattcttattctccattcttggattgcagtgcctggtttacacgctagtcatccttggctggattcttgttactggtacatttattttatgcggagtatttcacctccttcacaatgttgctggagatgcatgtgttcccacgcgtcggtgggtccagaatcccactgcccataccgcattggatgacattcttccctgtgtggacaatgcaacagcccaagagaccttgtcacgatccaagaatgtcactcatcaacttgtaaatgtcgtgaatggtgtcatcaataatgttttcaaccgaaatttcccaccagcattggcaccattatattttaatcaatctggtccattggtgccagttctctgcaatccatttcattcgaatcttacaaacagagactgtgcatttggtgaagttactttgcataatgccacagaggtttggaagaagtatatatgtgaaggtttcgggctctggagtatgttctacacctgggcggttaacccttcaattttacactcagatgtcggcagcagtgaatgtgagttatggtttgtatcgctatggtccgttcttggttaacttgcaagactgcacatttgtacgggatgcgttcacggatatcagtcatgattattgtcccgatctgcggcactatagtcaatggatctacatcggattagtaattgtatcggctgctgtgatgctgtcattgatcttctgggtaatctatgcaagagagagaaggcaccgtgtgtacactaagcagtatgatggtagatccgaaggccaatacaaaggtcgataagttgttaaatttggtcatatatacattacaaattttgtacaatatgttttctatctgtaggctaattaattagtattt

SEQ ID NO: 4410 - DNA, 864 bp, Gossypium hirsutum
  Clone ID: GOSHI-09MAY01-C35422_1
ccttctcgtccgctccattcttggattgcagtttctggtctacattctggtgatcttcccacgcgtccgcccacgcgtccgatttattttatgtggtgtatttaatctcctccacaatgttgcaggagatgcatgtgttgccatggaccagtgggtccagaatcccactgcacatactgcgctagatgacattctgccatgtgtggacaatgcaacggcccaagagaccttgttacaaaccaagaatgtcactcaccaacttgtaactgtcgtgaatggcatcatcaatactgttgccaaccgtaatttcccaccacaattggcacctttatattacaatcaatccggtccattggtgcctgttctctgcaatccattccattcaaatctctcggagcgtatgtgtgcatctggtgaagttagcttgtacaattcttctgaggtttggaagaaatatacctgtaacatatctacaccttccgggatttgtactacacctgggcggctgacccctcaattctatagtcagatgtcagctgcggtgaatattagttatggtctatatcgctacggtccattcctggttaatttgcaagactgcactttcgtgcgcgatacattcacagatatcagtcatgatcattgcccaggtctgcgccgctatagtcaatggatctacatcggattagtaattgtatctgcagctgtgatgctgtcattgatgttttgggtgatttatgcaagagagagaaggcatcgcgtttatactaaacagcacgatgctagagtggaaggcgtaaacaagtcactagaacgttacaaaccgcacttgtttatttccgagtaactttcgttgcattactt

SEQ ID NO: 4411 - DNA, 740 bp, Gossypium hirsutum
  Clone ID: GOSHI-09MAY01-C35762_1
cccacgcgtccgcatacccaaaaaccaatctaaaatggcttcctctaagcttagaagctccttttccttcctaaatcttctcctgtcatccttgaacttcatcctctttatcctctctgcagcctctcttgctcccattatcctcctcaaaatgccaccaacttcactgggtgtagccttcctcatggtctcctccatctcccttctttcctccttcctgggcttctactctcagctcacccacttctgcttcataacccatgtttcactcctcatcgcctccttgatcggccaagttttaagcgtactatcattgtttacaagagagaaagctagtctctcgatgctgaaatctccgcgggacattaaagagggaaaggtgctggtgagattggaatgtgggattttgatggcggtgttggtgatgcaattgatggtgttagcggtgagctgcacggtccatcactgttgggtgaaggaatatgaggggttagaagctgagagagaggcgactgcgaagaaaaggagcaggaggttagcgagggtgcaagaggaattcatggcgaatgcggccaggattgcggagattaaagccaacgagttgtatgagaagacgaagagcaagtaccgtcagtgggtgaaaactgatttttatggctaaggcatgaggaaaacaacctacttgtgggtttctttgtggggtcactgctgtggtggccattggatttgtctcactttta

SEQ ID NO: 4412 - DNA, 659 bp, Gossypium hirsutum
  Clone ID: GOSHI-09MAY01-C35652_1
cttcactcctcctaaacatgctatgcttctgctgcaatggggatgagacactgttgtgaacaatcgttttgagtaccagtaattcccccctcagatcccgagccaccagacctgttgctgatctgttgtttctgctgtcaaacgctgcatcaaagaagatcgtgactctcggtatgtcctcctggaatttgtgatttcttctcattgtactggtattcgtcattgctcgtactccttcatattctgccatgtgcccctgtatattttgtgctaaaattcttcctgttgtcttttccctttcatgcacaaacttatttctggagaaccatattaaccataaggcgtaacaaaaaagtcggctttgatcatcagttcctcccttgaatacccaggacaatctcggaagatatggagactattttctgtccaagaacagcatcggggacatctatcatttgttgcaactcttctatacctaagattagctagattaggaatgaaatcccaggaaattcgccagatagtgattgcaatttttggggatagttttaggctccataattttctgtaaaattccttagtttcagaccccagattagcatcttgtaatagtttataggcgctgcatactgaatatttaccggataattccccctccc

SEQ ID NO: 4413 - DNA, 420 bp, Gossypium hirsutum
  Clone ID: LIB3146-021-Q1-K1-D10
tggctattcaactcttctctcgtcagatcccgagccaccagacctgttgctgatctgttgtttctgctgtcaaacgctgcatcaaagaagatcgtgactctcgaaccatattaaccataaggcgtaacaaaaaagtcggctttgatcatcagttcctcccttgaatacccaggacaatctcggaagatatggagactattttctgtccaagaacagcatcggggacatctatcatttgttgcaactcttctatacctaagattagctagattaggaatgaaatcccaagaaattcgccagatagtgattgcaatttttggggatagttttaggctccataattttctgtaaaattccttagtttcagaccccaaattagcatcttgtaatagtttataggcgctgcatactgaatattta

SEQ ID NO: 4414 - DNA, 400 bp, Gossypium hirsutum
  Clone ID: GOSHI-09MAY01-C35152_1
attcaacatatgggacccttgaagtctatgaaatatgggtcactaattaaggcaatttacaaattcacaatggtgcagcaaaactacggcaaatgagaggctgcaattgaagatcattttcctggacaagttgagccataaactatatatagaataagttttactgtttcaagtttggtcagcattaacttaaacatgatccatatacaacataaatagctgataattttcttgatgctggaaagcattttctccagaggtatttatttgtagaatcatcagtgtttgttaattatagtagaacttttattattgtggcccaatctggtgattatatgtatggaaaaactgtgaacttgagaaagatcaagtggaaatcaaatgaaaccttcattcatgg

SEQ ID NO: 4415 - DNA, 652 bp, Gossypium hirsutum
  Clone ID: GOSHI-09MAY01-C35142_1
caacttggtggcaaagaagcgaacgctagggaacctactaaagaaactgatctttccacagctccgaaggctcaccccataagttctgatcccagaagaatttcgattgatattgaacaagcacagagcctaatgcgtaaactggactctgaaaaaggaatcaatgaaaatattcttagtggacctgacaaccaaataactagagataaatctcatggtaattcgactggccctgtgattattgtacgtggcttgacttctgtgaaaggcttggaaggtgttgagcttctggatactcttataacttacttgtggcgtgtccatggcttggattattatggactgattgaaacgggcgaagccaacggacgttgggcatgtgtgagaagagggaaagggttctgatgtgactatcaatggatctgagggggagaaaaaccttgacacacactggcaagagaggttgaagggtcaagatcctttagaattaatgacggctaaggagaaactagatgctgctgctgttgaagctttggatccttttgtccggaaaatcagggatgaaaagtatggttggaagtatggttgtggtgccaagggttgcacaaagctctttcatgctgcagagttcgtgcacaagcatcttaaactc

SEQ ID NO: 4416 - DNA, 424 bp, Gossypium hirsutum
  Clone ID: GOSHI-09MAY01-C35162_1
tgcttttccattttttacttactggagtatttctggctacatgttgttggttcttgacaaatgcttaccttcgggaagaggctccaaatagtcatgttgttgaacaacgggttgaatggctgtatgcatttgatgtgcactgcaattctttcttcccgatgtttgtaatgctttacgtaatacattattttgtgtcaccgcttctggtagcccatggttttatacctgaacttctgtccaatctgctgttcatggtggcagcttcttaactttcactaccttacctttttaggttatgacgtacctccctttttggagagaaccacctttttcctctacccaattgggggcattattggtctatcccctatcttgattttaagtggcttcaatccttcaagatattttatgaatatgtatttta

SEQ ID NO: 4417 - DNA, 474 bp, Gossypium hirsutum
  Clone ID: GOSHI-09MAY01-C35112_1
caccccccagaaaatccattccaaccccgcaaggttttccgccgccgctgtttaacaccgtaatcggcaccattcaagcctttctcaagctcaaactaagccatgcattctctattttctaaatatacaaagaaaatcaccaaaaacagttctcaccacagacaaagcaaactagaataactctataataccttggctccgtcaccgaacaccgccttcgcctgccgtccaatcagccaccggttttgactcgcggcttgtcctcgactttgatggcttccccactatccggattttgactagtgctttggttttcaaagatcggtaaaggatggctcctccttttaattgcttctccggttctttctttcactgaggtaaacaaaccctagactggtcgaatcagctaagccaaccgcaagccgagatgtcgtcgactctactcgaggtgactcgggctgctcatgaagatgt

SEQ ID NO: 4418 - DNA, 415 bp, Gossypium hirsutum
  Clone ID: LIB3146-043-Q1-K1-E8
aacaaaccgtcagccgtcgcagtggatagatatgtcctttatgggacgaggacgagggcggggaaggggatttggtgggcgtggctttggtgggtacgtaccgccagaaccctttgtgcttttccctgatattgaacttcctgatgtaaaaacttggcctgaaaaaaaaatcttaatcgtttggaattcaagggtgcttaactattggaaaggctttccttactatcttgaagaacatgtttcaaagaaaagcccgaggatggatattgaaagattttctgactgggggaagccaaagaacacctcaaaacgtgatagccttaaccaggttctacaactccaatctcataattttcctaaagaattgattggagattcaaagagagcgcagcgaagtgccaaaagaatgcgatgg

SEQ ID NO: 4419 - DNA, 387 bp, Gossypium hirsutum
  Clone ID: LIB3145-010-Q1-K1-G5
tgaagagaaaaccttagtcgtttggaattcaaggttgctaaactattggaaagcctctccgtactatcttgaagaacatgtttcaaagaaaagccagagtatggatattgaaagattttctgactgggggaagccaaagaacacctcaaaacgggatagccttaaccaggttctacaactccaatctcataattttcctaaagaattgattggaggtttgcaactgaaaccacttatggaaatatttacctgattgtaatgatatatttttatatattgtacttgagagctttcatctttccctttgctggtttggttacaatcgaacattggaatttcagattcaaagagagcgcagcgaagtgccaaaagaatgcgatggaatct

SEQ ID NO: 4420 - DNA, 640 bp, Gossypium hirsutum
  Clone ID: GOSHI-09MAY01-C35042_1
gttacaagacatgaaggacgtgatagtttattgatcaaaaaaagtctaggaagtttattaagatatctgacattaatataaaactaagtaaatgggaatccttaattataccttgtctatcaggtattggcataacggggattaggctattctcaagcccggctttcgttatactatataattaagaatataaagctaaaatatgttatcgctctccacctcatcaatttaccgtaacttcctcataatgctactaaacttgcgatcaatcctataaccgctgcaacgcctacccttaaccacactactctagaagaagctgaaggcgtaggctcttcagcgtcatcgtcgtcgtcggaatcgggctcaggaggcgatttcgacctggacttcgccttcgccttcccgggagattcagccggcgattctgatggtgaaggggactccgcttcatcttcatcctcctcttcctccgatggaccaggggaactgggggacttcttgggagcagcggccgggggcttggaagaacccgggggtggaggaagagcaaggatggcatcgccgaagccaggagctacaatgggtgtgctaatgtgaagcacagataagttgaaaggctgggagatgacagacccca

SEQ ID NO: 4421 - DNA, 650 bp, Gossypium hirsutum
  unsure (1)..(650): unsure at all n locations
  Clone ID: LIB3825-032-Q6-K6-E1
cggncgcgtgggcggacgcgtgggcggacgcgtgggtgtgtttatatttttgttttataattatatattttgatatgttaatataaattagcatctgatatattgtgagtattaaattttaattccacaagtggaattaaaacgttatcagatgttttatttttataatactgattttctttttatactacaatctaataacttatatcacattatgcaaaagacactctaatagcccttcttttagatcattgagtccctttcagctgttccatcccctgaacttgcattaaggttgtacctgcaatgtgctgaggtaatcttgagacttgacttaaaccaactctgcataacagtcattggttaaatagtgaattgaaccctgaaaattattttagatgataacaaattttattgaacttcaagagatgccatttttctaattgatagttgggaaaaggcatactgagataaataatgttgctcacgagggtgcaaggtttctgatggaacaggtgcttacaagaataaatagctttatttgtgacattcttagggctgttaccaatgttccattaatttattatgttgattccaagcattagggatcaataattttattttaagatgatgcgaagagtgtgctatca

SEQ ID NO: 4422 - DNA, 334 bp, Gossypium hirsutum
  Clone ID: LIB3145-013-Q1-K1-H6
tcgcccacgcgtccgcccacgcgttcgatgggatataatgggagaagaagcatcgaggactggaaataaaatttttcagctcttcactcacgtttcttttttacttgaacttgtacacacgcacatatcaccttatgcaaaagacactctcattggccttattttaaatcattgaaacgctttcagctgttccatcccctgaacttgcattaaggttgtacctgcaatgtgctgaggtaatcttgagtcttgacttaaaccaactctgcatcacacacataggttcaatagagagttgtaccctgaaaattattttaaatgataacaaatttta

SEQ ID NO: 4423 - DNA, 728 bp, Gossypium hirsutum
  Clone ID: GOSHI-09MAY01-C35352_3
tggagttacagtaaaaaattgcaccatgactaatacttccaatggtgttagaatcaaaacttggccaggaagaatcgaaagttaaactaagcaacattagtttcaaaaacattcacggcacttctgcgcgtccagaagctgtcaagattatttgtagtgctactttgccttgtgaaaatgtagaacttgcagacattgagcgttcgcatagtggaccgactggacctgcggtctcacggggttcgaatgtgaagcctaaagttagtggcaaacaaaatccagctgcatgttctgcccctatcccagcaaaacctaccccgaccgcttaatcaatagcagaggtataattttttttgatgacgttgtaactcttataattatagggatggggcaaataaattttgttttttttatattctatgttataaagaatatttttcatgaaaaaaaaaaaaaaaaaaaaaaaaaaaaaaaaaaaaaaaaaaaaaaaaaaaaaaaaaaaaaataaaaatttaaaaaaaataaaaaaaaaaaaaaaatggatgtctgtgtaaaagttaattaaaaaaaaaaaagggggcgccccttttgggggccccttttttccgtccccgttctggcgccttctttgttttttgctcggggccccccgtctttcctcttcccgcccccggtgttttttcccctcgcgggggttggggaaaaacccctggcgtttcccccctttt

SEQ ID NO: 4424 - DNA, 871 bp, Gossypium hirsutum
  Clone ID: GOSHI-09MAY01-C35352_2
attcaatttaattttgtttcatccatgttaatactcgtacttctgtccatatcatccgttgaaggtcaaggaggaggaggtggtggtgttattgatgttgttgcaaagtttggtgcaaaggcagacgagaaaacagatttgagtaagccattgttggatgcttggaaagaagcatgtgcctggacatctccgtcaaaaattgtgattcctaaagggatatattttttaagtacagataccttagatggtccttgcaaggctcctattgagcttcaagttcaaggcactgtgaaggttccggcagactctggtgctttcaagaagcctaaatggatttctttcaatagaattgaaaatttcaaattgtctggcggaggagttttcgacggccagggacccactgcttataaaatggaaggttgcaaaggtcatgattattgtggttcacttcctattatgggattcaccttgggagatcagatggggtcaatgttcttaactcagagataaaaactggtgatgattgtgtttcaattggggatggttccaaaaatttggttatcaatggagtaacttgtggaccacgacatggtatcagtattggcagtctcggattgtttaaaaatgaagaaccagttgatggagttacagtaaaaaattgcaccatgactaatacttccaatggtgttagaatcaaaacttggccaggtgctgaacctggcatttttcgaacattcactttgaggatattaccgtgaccaatgtcagttctcctattataattgatcagaaatattgcccatggaacaaatgcaaaataaatgtatgtacatatttatcaaaatcgtaagagagaaaaaagagttaaccg

SEQ ID NO: 4425 - DNA, 1475 bp, Gossypium hirsutum
  Clone ID: GOSHI-09MAY01-C35352_1
gtgaataaaacataaagttggctattcaatttaattttgtttcatccatgttaatactagtacttctgtccatatcatccgttgaaggtcaaggaggaggaggtggtggtgttattgatgttgttgcaaagtttggtgcaaaggcagacgagaaaacagatttgagtaagccattattggatgcttggaaagaagcatgtgcctcgacatctccgtcaaaaattgtgattcctaaagggatatattttttaagtacagctaccttagatggtccttgcaaggctcctattgagcttcaagttcaaggcactgtgaaggctccggcagaccctggtgctttcaaggagcctaaatggattgctttcaatagaattgaaaatttcaaattgtctggcggaggagttttcgacggccagggaaccactgcttataaaagggaaggttgcaaaggtcatgattattgtggttcacttcctattaacctaagatttgattttttaaccaacgcaatgatacaagatataactaccaaagacagcaagcagttccaggctaatgttctaggatgcaaaaacattactttcgaacatttcaccgtatctgcacctgacgaaagcccaaacacagatgggattcacattgggagatcggatggggtcaatgttcttaactcggagataaaaactggtgatgattgtgtttcaattggggacggttccaaaaatttggttatcaatggagtaacttgtggaccaggacatggtatcagtattggtagtctcggattgtttaaaaatgaagaaccagttgatggagttacagtaaaaaattgcaccatgactaatacttccaatggtgttagaatcaaaacttggccaggtgctgaacctggcacttgttcgaacattcactttgaggatattaccgtgaccaatgtcagttctcctattataattgatcagaaatattgcccatggaacaaatgcaaaataaatgaagaatcgaaagttaaactaagcaacattagtttcaaaaacattcacggcacttctgcgcgtccagaagctgtcaagattatttgtagtgctactttgccttgtgaaaatgtagaacttgcagacattgaaattacgcatagtggaccgactggacctgcagtatcacaatgttcgaatgtgaagcctaaagttagtggcaaacaaaatccagctgcatgttctgcccctatcccagcaaaacctaccccgaccgcttaatcaatagcagaggtataattttttttgatgacgttgtaactcttataattatatttatttcgcaaataaattttgttttttttttattctatgttataaagaatatttttcataaacttaattatttttaaaaatacacttcaacggaaaaccttgttgaaaaaactggaaccctttttgaatttggttgaagaaaaacaaaaaaaaaaaatcccgccg

SEQ ID NO: 4426 - DNA, 1058 bp, Gossypium hirsutum
  Clone ID: GOSHI-09MAY01-C35332_1
tgggacctagcatcatgccaaattgatatgctttcactattaccaactttacaagtcattccatcatgcaagactttcctcgttgcctaaatactcctccaggtatacgaagggtaatttcctaactctgcttacatgaagtctgtgcttggataatatttagcctttaaagtctttgctaataatgaatctagatactccaataaacgccagcttcgttttaggctgttttacccaaataaccccaaaaaatattatatttacaaaaataacctaagtttaaaaacaatcactaaaataatctaaaattaacagtatccactctttttttgcaccaatgattggctaatcattgtgttggacttaaaaacattatttttttgggttctggcctgtcaatggtcggaactcatgtatttttttaaaaaaattgtgtaatactgaaatacggatgtacgaaaaagaaaaaaacaaaaaaaaatttttggtgctggcctgtcaatggccggcacccagtacacagtacaaaaaaaaattaatttttttttcgtgtcagaatcagataaaaaaatacgaaaaaaataaaaaaaaaatttgggtgctggcctgtcaatggccggcacccagtacacagtacaaagaatttttttttttttttttcgtgtcagaatcagatagattttttttcgtgtcaatggccggcaacatccgacacgatccggatcgtcatcctcataccacccagacttccaacccgaagcacatacgcccaccactgaggatatttttccatcggcacctccggtcacgcaatactaattaagtcccgattatggtgaatataattattccacgttttttactacaccggaagtgacacaggactctggaccgagccattatcaaacgcctcagcaagatgcacggcatcgccgatggaggcaaccggatcgttacacgccagcgccgggcacgtccccaggatcgcgacaattttaaattttttatgttaatttgtactttcttataatttattatgtaaatatctttttattttt

SEQ ID NO: 4427 - DNA, 558 bp, Gossypium hirsutum
  Clone ID: GOSHI-09MAY01-C35272_1
gcccacgcgtcgagaaaaccctcaacaccgtaaagctagcgtctcccggaatccaaaaaccaaagtttctttagcaggctaagcaatgattcaggattggaatgactggtttgacaattacggtttgattggtgttactgatctcaggtactggggccatgctgatctatatatttagcacatgatgaagaatactgattagtctttgaacagcattttattttccaacatacaggattcttacccattttgtaacattaagaaataggaaggtaagatgtgcaaactttttagaaattcaattgtcttttttagatcataacaaggagctgagacagaatatgtgtaccatattattctgaactagggtagggttcaattcttttggattaccaactctctcagctcatatatatacctttttttttttttgcttttataaagaggaaaatatcccaaatctcaaccccctttagaaaactttgtacccgtatgcaacggtgcctggttctgaatgaataatttcgtccaccacctttgaatgaatagataattcat

SEQ ID NO: 4428 - DNA, 393 bp, Gossypium hirsutum
  Clone ID: LIB3145-012-Q1-K1-E2
gaagaatgtttcttggccgggacaaaagatggaagtcttcttgtgtattctatagaaaaccctcaacaccgtatagctagcgtctcccggaatccaaaaaccaaagtttctttagcaggctaagcaatgattcaggattggaatgactggtttgacaattacggattgattggcggtactgatctcaggaagcatttgaaaagcctatccattccatttccaggtactggggccatactgatctatatatttagcacatgaagaatactgattagtctttcaacagcgttttattatccaacatacaggattcttacctattttgtaacatttaagatatagggaaggttaagatgtgcaaaacttttttaagaaattcaatttgcctatttt

SEQ ID NO: 4429 - DNA, 1449 bp, Gossypium hirsutum
  Clone ID: GOSHI-09MAY01-C36932_1
tccgtcatcttctaatcctgttctcaggctgatgggaaagaacttaatggtggttaacccgcgcgtccgcaaatctgtgccacttggtcaggcccagtcatttgcccagagtgatcatcctactcctaagtttccaactccttctggaatctctcctagcaatatggggaatcaagctgggatgccattccatcacgcaatgtctcagagttcggtaatctttgatcagcatccaaaagatttggtggggcaatcttttgatgtccaatttacaaatggctatagaaaccatgcaaatcttggaacaccaccacaatttccagctgggatgttttttgatgagcgtgtggaccgtggtttgacaacctccatggagttctacaaatatgaatgtgactataatttgccagctcaactgaacagactgaagaacaagccaggtccagcagcaacatatgatatggagaaagttgcaactctagacggccgacttaggaatggtgattctgctgtttccagtaaacaagtaattatcattgatgatgagcctgaaagtgaaacaacaaagtttgccgacattgccaaacatttcgaaggctcgagggaaagcccgctaatacctgctggcatttcaatgccattagttcctaatcatagcataaggcgcaggaatccattttctcgttatcattctgaaggagctttagtaggtgacccaaacatggtacaaaataagaacttcaatgcaatcccttcgggtcgaggcaatactgttcctgttagatgggattgctcttcacaaggttctggggtgccgcagcgggcttctcttatggctgtatcaccctcgaggggccatctcagacctgcagtttcttattctccgagtttgtcttagcagctttgcggggtatgggaattgttagatggactgtgctgtgcatcagcgggttccatatcaaaacttgtactgtatcttgagcgtctccttgactacatactgacacaaattatggggcttcaaaatgatttgcaaaagctaaaataattggtgttgggagttaatagattcggtgcaagtttagcaattgagatctgagtttgtatttattttttatttcacaaacttttttgtagtttttgaggcttctgcttagacaattagaaatttaccccaaagactagataatgtataagctatccttgaaataaagcctgataaaaagtgttactattgccattttaaaaaaaaaaaaaaaaaaaaaaaaaaaaaaaaaaaaaaaaaaaaaaaaaaaaaaaaaaaaaaaaaaaaaaaaaaaaaaaaaaaaaaaaaaaaaaaaaaaaaaaaaaaggggcggccgttggggggggcggcttttaaaagaaccaaatttaactacccggggtttggaaaaaaaaaattttttttttggggcccccaaatttaat

SEQ ID NO: 4430 - DNA, 640 bp, Gossypium hirsutum
  unsure (1)..(640): unsure at all n locations
  Clone ID: AI054577.1
ggaagacaaatctgtgccacttggtcaggcccagtcatttgcccagagtgatcatcctactcctaagtttccaactccttctggaatctctcctagcaatatggggaatcaagctgggatgccattccatcacgcaatgtctcagagttcgttaatctttgatcagcatccaaaaatttggtggggcaatcttttgatgtccaatttacaaatggctatagaaaccatgcaaatcttggaacaccaccacaatttactggggattgttttttgagagccgtgganncggtggtttgacaacctcatgggagttctacaattggaatgtgactataatttgccagctcaactgaacagactgaagaacagccaggtccagcagcaaatatgatatganaaaagntgcaactctagacggncgactagaatggtgatcttgctgtttccagtaacaagtaattactntgatgatgactgnaaagtgaacaccaaagttgccgacattgcaaacattcgaggctcgagggaagcccgctatacctgctgcatttaatgcattagttctaatctacataggcacaggatccgttctcgtatcattccaagacttttcagtgaaccaccttgtcaaatagacttn

SEQ ID NO: 4431 - DNA, 659 bp, Gossypium hirsutum
  Clone ID: GOSHI-09MAY01-C36862_1
ggcaaagctgcggtgaatttgatgaagttgacactgtttaggcaatattacattgtggtgatcggctatatttactttactcgagttgtggtctatgctttggtgacgattacatcatataaatatctttggaccagtatgggggccggggaagtggccactctcgcattttatgtgtttactgggtataaattcaaaccagagccacataacccgtattttgttattgatgatgaggaggaagaggctgctgcagaacagttgaagctagaagatgagtttgaactgtgaaagcattcatagagaaacaaaattatatatatatatatatggagaacgattgaagaaactggtgcaggggatcaaccgggaagttgagtagaagatcatcaaaattggtaacaatgttaataaagtactgtgctaatccttttttttttttaatgccattttcctcttcggaagttgatagggtaacattgaaactttcattcacatttgtgaatttgatagccatctgtaactacaaagacaaaaatttatgccttcttatttagttccttgtttgcagtttctactttgtatggagagctgctaatgctggttttaagtggtatgtatatttgtaataaatttccaaatgaaatacgcatttaagg

SEQ ID NO: 4432 - DNA, 752 bp, Gossypium hirsutum
  Clone ID: GOSHI-09MAY01-C36412_1
tgcctacaacgctgccaccttttttagtccaaatttccatgaggaacaacatgattgaaggcacaatccctccaagtcttaaatatttgaaccttctgcaagtattagacctgagtcacaacaaactcaccggctcagtcccttatttcctctttaaccacccatctcttcaacaactcactctcgcattcaactcctttgattctttacaagctccctctaatctaggcacccaaagtgagcttattgctgttgacttgagcaataacgagctacaaggctggttacctcctttcttgccattaatgccaaacctgtcagctttatccatggaaaacaacaagttttcgggtatgatccctatccaatacgcattgagagccgctctgcctgcctccggaattgccccgtttgcaagactgttgcttggggggaactacttgttcggaccaattccagggccattgctggtactcaaaccagacactgcaaatgtcagccttgctgacaactgcttgatcaggtgcccatcgcgtttctttttctgccaaggtgctgaccagaaatctttaatggaatgcaagagttttggttctgtaatcccttgaatcatgttatttcagcaatgtttttagttgcaacatccatgtgtctttcttgtctaaaattctttctctattggtcttagtttgggcttgttagttttcagtttgttagtgggaaatctaaaaagaaatcttttgttttcacat

SEQ ID NO: 4433 - DNA, 550 bp, Gossypium hirsutum
  Clone ID: GOSHI-09MAY01-C36422_1
cttttggaagaatatgctatagatgaattggtggacccaagattggaggattgctattccgagcatgaagtctattgtatgctccatgccgcatcattatgcataaggcaggatcctcattctaggcctcgcatgtcacaggtgctacgcatattggaaggtgacatgcttatggactcgaattactcattgccaagatacgacattgggaaccccagtggccgggtttgtgcagaccaaaaatattacagtggatccctggaaaatgaggcattagaagagttcaatgggaagctctaccttgacgggctaaggtcaggaaccaggaggacttcgtgcgcagatcatctgtaaaaagcctacagggggttctttacacgcatggtacgcatatcaatctatcaatctatacatataattttgtgtagtagtagtattggaagcaaggggtaactgggttcttgtaattcttttgtggaaatgctgatctccaaagctatggtgaaatattatatgcttttctaattaaaccaatgaagccccgcttgag

SEQ ID NO: 4434 - DNA, 431 bp, Gossypium hirsutum
  Clone ID: GOSHI-09MAY01-C36742_1
ctaaccctaatcttagccttggcctttgcctctgctgcagccaatccacagccgtttaacttctccttttcttcaaccctcgcctccgcctggtttctcccatcttcttctcctctctttgaatatcaaggttttgcagattgttccactgttcttttcctaaatgagcggcaggagttatactccatctccgcccagaggctacggccggagaggacggggccctagccccagaggcccctaccgcggtcgcgctcgagatcttcctaccagccttttggttcgcaacctccgccatgactgcaggccagaagaccttcgcaggccattccaaagatttggccctcttaaagatatatatctgcccaaggattattatactggggaacctcgggggtgtgcctttgcccaatatgttgatcctgctgatg

SEQ ID NO: 4435 - DNA, 826 bp, Gossypium hirsutum
  Clone ID: GOSHI-09MAY01-C36762_1
cttacgcttccgcccacgcgtccgcggacgcgtgggtcaaattaaagctcatccttggttcaatgacgttgtatgggataaactctatgagatggaggcagcatttaaacctgaagtgaatggggaattagatactcaaaattttatgaagtttgatgaattggatgctccagcaccagcaagaactagctcgggaccttcacggaagatgcttttaacacccaaagatttaaattttgttggttatacatacaagaactttgatgcggtcaaagggctacgccatacttttgatttcaagaatccatcaatggaacagcaatcccatggttctatatatggtgattcaggggtaggttattctactaagcgatccgctgaggaaacagagatgcaaatgcttgcatcggcaggtgatcccatgttgccataaagtaactgaagggaaaacttgttacagtgatatatggatatttctgcttgttttaaagtaggcaatcctccaagatcttcagttcttgtgcagtggctgccatctgatttatggaaccactttgttaagtgtacagaagtatttaaagaaaaatctaaaaacccagttcctagttgactggtagaacaagctgagacccttttttttcagccaaataggctgtgtattagaagttagatcagggttctgaacttgctgatgcactggcactggctgcccaggttggctttagtaaaatttgccttctctagtggcagtttctggtcaaaatttttaagtgatatcaaactcctgagaaactctattaagccattttgggaacagtgattcccc

SEQ ID NO: 4436 - DNA, 412 bp, Gossypium hirsutum
  Clone ID: GOSHI-09MAY01-C36092_1
cccacgcgtccgtgggagtctcaaacatgaaaacatggttaatttgtttggctctaattggcatagtgctgatggaagaggtgatccaaattgatgcagcaatgacaatccaccatccagaggtctccggtcttgtttcctaccgtcgccttctccaagaagctgttaatccttggaatcgtggctgctcaagactcactaggtgtcgaagttaatgtatattttgataatatgtgacggtatctttcgtttataaatgtagaaacctctgcatattaaggcaacacgattaatactttttatctctttcttttacctaacttggttcgccttaaccatgatctatgatctagctttgccttgtcatgatcccaaaggttttgtgtctttgctcgatcctagatctagtaac

SEQ ID NO: 4437 - DNA, 572 bp, Gossypium hirsutum
  unsure (1)..(572): unsure at all n locations
  Clone ID: LIB3543-033-Q1-K1-E5
cgnaaaactaaataaatgatcaaattgagcggacgtcggatttgagtatttctgatcagtgacaagtgataagtagtagcttcagctacacttatctgatcagtgacaagtggcaagtgataagtgatagcttcagctacacttatctgatcagtgacaagtgacaagtgataagtggtagcttcagctacacttatctgatcagtgacaagtggcaagtgataagtggtagctttgctacacttatctgatcagggacaagtgataagtgatcatacataagaccatagttatactatggcaaagtggaagtgaagtagtcaattttccgtaaccattccctaattttaattgaggatggtaagtgacaaataggcccaaaagaattatagtaaaaagataagtagtagtgagtttataccaaaggactcaccagtgattgtggttgataggtaaacttagtaatggtgtataatgtataagtgtatgaatgtttggtaagatttatgttttatgcctatgaacttactaagtttctataagcttacttgagtgtatttaatgtctcttat

SEQ ID NO: 4438 - DNA, 431 bp, Gossypium hirsutum
  unsure (1)..(431): unsure at all n locations
  Clone ID: LIB3145-026-Q1-K1-D5
cccacgcgtccggtgacaagtggaaagttataagtaatagcttcggctatacttatctgatcaagtgacaaagtgataagtgatagcttcggctacacttatctgatcaagtgacaagtgaaaagtgataagtgatagcttcggctatacttatctgatcaagaaacaaagtgataagtggctacacttatctgatcaagaaacaaagtgataggtggctacacttatctgatcagggacaagtgataagtgatcatacgtaagaccatagttatactatggcaaagtgaaagtgaagtactcaattttccgtgaccgttccctaatttgattaaggatggtaagtgacaaatgggcccaaaagaattaaagtaaatggataagtggtagtgtatttatatcangacgatgttgttattcaaactaaagtg

SEQ ID NO: 4439 - DNA, 460 bp, Gossypium hirsutum
  Clone ID: GOSHI-09MAY01-C36382_3
tttactctcactaacctttattcttcaataccatggacatgaagaagatctcatgcgccgtcattgtcgccgccgcctctatgagcgcggtcctggctgctggcgcttctccagctccatctccagcttcagctccagctgcagctgcagcttcagcttcagcatctggcccaggcccagattccagcatcgcaatctcaacaatgcctgttattgagtccttggttggagccacacttgtttctttctttgcctactttttacagtaagccacagcaaaaaatggatgaaaccatgaagtattgaagaatcaaaaaaagaaatggtggattaataaatgtaaaaatactacttggggtgctttctttctttttgttcattgttgaagatggctttcttcactttacttgtttgtacgtttatgatatatgtttgaattccaagtgatactttgcactcc

SEQ ID NO: 4440 - DNA, 535 bp, Gossypium hirsutum
  Clone ID: GOSHI-09MAY01-C36382_2
aaagcaaaataaaaacacaataaattttgtttttttcatcacatcaggtctctttactctcactaacctttattcttcaataccatggacatgaagaagatctcatgcgccgtcattgtcgccgccgcctctatgagcgaggtcctggctgctggcgccgctccagctccatctccagcttcagctccagctgcagctgcagcttcagcttcagcttcagcatctgccccaggcccagattccagcgtcgcaatctcaacaatgcctgttattgagtccttggttggagctacactcgtttctttctttgcctactttttacagtaagccacagcaaaaaaatggatgaaaccatgaagtattgaagaatcaaaaaaagaaatggtggattaataaatgtaaaaatattacttggcgttcattccattgaagatgctttctttcttttttttcattggtgaagatggctttcttcactttacttgtttgtacgtttatgatacatgtttgaattccaagtgatagtttgcactac

SEQ ID NO: 4441 - DNA, 583 bp, Gossypium hirsutum
  Clone ID: GOSHI-09MAY01-C36382_1
cccacgcgtccggaacaataacatataaacatataaagaaaacaaaattaataaattttgttttccgtctcgcagcaggtctctcgactctcactaagcctattcttcaataccatggacatgaagaagatctcctgcgccgtcattgtcgccgccgcctctatgagcgcggtcctggctgctggctccgctccagctccagctccagcttcagctccaggtgcagcttcagcttcagcttcagcagctgccccaggcccagactccaacgtcgcaatctcaacaatgcctgttcttgggtccttggttggagccacccttgtttctttctttgcctactatttgcagtaagccagcaagaatatacgaaaccatgaagtgttgaagaatcaaaaatggtggattaataaatgtaaaatattactcggggttcaatccattttacttgcttttcttcccctttttttggttcatcacttcatttgtacgttcataaaaaaaagtttgaattccatgtgatactttgcacttgaaaaaaaaaaaagttatatattttaaaaaaaaataaagaaaataacaacga

SEQ ID NO: 4442 - DNA, 888 bp, Gossypium hirsutum
  Clone ID: GOSHI-09MAY01-C36352_1
gcctgacggttgttttcgaacttttgtttgggctttgcgtagtttttcttctttctacttttaacgagctctggacagttcatcgccatttggcaatcggaaattgttacttacctataaaatttaaaaagcagtttgaaatttggtgagagaaatcataaccaaaaatggattcatcgaaattgggttcagtccctgaagaagagcagcatcgagaagagagtaacaagccggttgtttctgcctttgcctcgcttcccgatcgccgtccaactaagagttctgagaaatactcacctttagattggtccggcttttttgatggagaggaagatgtctgcataccagactcaaatgatgtctttcatttatatatggcaggaacagaaggaccagttgttttttgtctacatgggggcggctactctgggctctcatttgctctgtcggctagtaaaattaaagagaaagctagagtggttgccatggaccttagagggcatggaaagtcatccacagaaaatgatcttgatctatctattgagactatgtgcaatgatgtttttgctgttttgaaggctttgtatggagattctccacctgcgattgtgcttgctggccacagcatgggaggctcagttgctgtacacattgctgcaaagaaaacattgcgtagtttagctggtttggtggttgtggatgttgtagagggaacagcgatggcatcattagttcacatgcagaaaatcctctctggcaggatgcagcatttttcaagtttgagaaagcgattgaatggagtgttagaggaggttctttaagaaatattgactctgctcgcgtatccattcctaccactttaaagtacgatgattcaaagaattgtta

SEQ ID NO: 4443 - DNA, 1009 bp, Gossypium hirsutum
  Clone ID: GOSHI-09MAY01-C36312_2
gaaaagtaaaaaacacacagagacgtaagggtcccccgatggagatccggaccaaccggcggtgcccttggtggcgacgatctatccccgtcgtctcccgcggcggtcatatcgcggtggactttcgaggtatcgcggcgataccagcacctcctggacaaaacggttccgcacgttctcaaccgttggatcggatgtcttgcggtggtgttgatctacgccgtacgcgtgtacttcgtgcaggggttttacatcgtcacctacggcctcggcatctacttgctgaatttgctgatggggttcctttcccctcaagtggaccccgagatggaggatggtccctcgcttcccgtcagtggatccgatgagtttcgccctttcgttcgtcgactccccgaattcaaattctggtactcgatcacaaaggccttttgcattgctttcgtgatgacattcttcagtgtgtttgatgtgcctgtcttttggccaatactccttttctattggataatgttattcatcctgactatgaggaaacagatactgcacatgatcaagtacaaatacgtccctttctcattcgggaaacagcgatacgacagcaagaaggcatctccaacagaaaacacaaaccttcccagggattaagttcctcaggtgcatctgggaaagtttagcctagataagaaaaccaaagttaccagacaaagaacactttgtattgatggaacatgcaacatttgccgtcgcctgtaacttctgcccggaacatgtgttttttactttctgataatactcaatcacgtagtgcagtctggtttatattaaaaattttagatgtggatggtactgtttattcttaaacaaatgtcccctatttattaactcataacattcacgttgttatttagattaaagaagattgtgagatcttatgtcaaccctgttattatgatttcattagctgtttactttggaatgaatgacaaaaaatccagccttgcaactt

SEQ ID NO: 4444 - DNA, 882 bp, Gossypium hirsutum
  Clone ID: GOSHI-09MAY01-C36312_1
tcttgtttcaggggaaaaaaactgaaaggaacaaacttgtttcggcgaaaaggaaaacgaagaggctttgtatttatttctttattgttagttaggccccccgatggagaccggaccaaccggcggtggcctaggtggtgacgatctatcccaatcgtatcctgcgaccgctatatcgcggtggagcttcgaggtgtcgcggcggtaccagcacgttctggacaagactgtcccgcacattctgtaccgttggatagcatgtctggtgctggtgctgatctacgccgtacgcgtctactttgtgcagggtttctacatcatcacctacggcctcggcatctacttgctgaatctcctgatggggttcctttctcctcaagtggaccccgagatgcaggatggcccctcgctccccacccgcggatccgatgagtttcgccctttcgttcgccgactccccgagttcaaattctggtactctattacaaaggccttctgcattgcttttgtgatgacgttcttcagtgtgtttgatgtgcctgtcttttggcctatactccttttctactggctaatgttattcattctaaccatgaagagacagatattgcacatgatcaagttacaaatatgtgcctttctctttgggtaaacaccgatttgatggccagaaggcgccctccgcagattgtgtcccccctcctccgggggattaaaattaaattcgtcagctgaattcccacaggatttgctggtagtacaagttgtccaaaaggatcatcaatccacattacatatttgttaattttctccagattttgactgggttagctttcagatgtattggagaagtttagcttagagaaaccaaagttattatgg

SEQ ID NO: 4445 - DNA, 585 bp, Gossypium hirsutum
  unsure (1)..(585): unsure at all n locations
  Clone ID: LIB3543-031-Q1-K6-G6
aaagnaaaaaaaacacagccccgtggggggggggggggtggnaaaccggaccaaccggcggtgcccttggtggcgacgatctatccccgtcgtctcccgcggcggtcatatcgcggtggactttcgaggtatcgcggcgataccagcacctcctggacaaaacggttccgcacgttctgaaccgttggtttttatgtcttgcggtggtgttgatctacgccgtacgcgtgtacttcgtgcaggggttttacatcgtcacctacggcctcggcatctacttgctgaatttgctgatggggttcctttcccctcaagtggaccccgagatggaggatggtccctcgcttcccgtcagtggatccgatgagtttcgccctttcgttcgtcgactccccgaattcaaattctggtactcgatcacaaaggccttttgcattgctttcgtgatgacattcttcagtgtgtttgatgtgcctgtcttttggccaatactccttttctattggataatgttattcatcctgactatgaggaaacagatactgcacatgatcaagtacaaatacgtccctttctcattcggga

SEQ ID NO: 4446 - DNA, 626 bp, Gossypium hirsutum
  Clone ID: GOSHI-09MAY01-C36302_1
cccacgcgtccgcccacgcgtccgcccacgcgtccgcccacgcgtccgcccacgcgtaacacccaattgaccaccatgtttaaattaatcaacatcctaaccatccttgtgctacttacatttagttcggaaattgcagatgccgcacctccgtgccaggaggttatcgtgtcgattaccccttgcttgagcttcataaaaggccaacccgatccggcaccaggatgttgttcgggtgctaaagggcttgctaagcaagctaacaccaaactagataggcaaggaatatgcgagtgccttaaaggtgtattgccaaaaataggaccatatgaccctaaaagattccctcttattgcccagaaatgtggtatcaatactttaattcctccaatttctgccactactgattgcaccaaggtgtgaagagtgaagtggggggaatgtgaaaatgaagagcatgccaaatgaataaaaaaatgggcagaacttttcataaattgatctgtaatcaaccccttgtattgcacttaagttatgattaattaaataataattacaattaaatttaatctaactgaaattttttctgttctgttctgtccgttagaaaaaaaaaaaaagggcgg

SEQ ID NO: 4447 - DNA, 451 bp, Gossypium hirsutum
  Clone ID: uC-gsflmaxxa119c07b1
ataaaacacccaattgaccaccatgttcaaattaggtcaacattctaaccatccttgtgctatttacattaattctattatatcgtagattccgttacctccgtgccaggaggttatcgtgtcgattaccccttgcttgagcttcataaaaggcttatccttatactctatttgtttgttgttcgggcgctaatgggcttgctaagcaagctaacaccaaactagataggcaaggaatatgcgagtgccttaaaggtgtattgccaaaaataggaccatatgaccctaaaagattccctcttattgcccagaaatgtggtatcaatactttaattcctccaatttctgccactactgattgcaccaaggtgtgaagagtgaagtggggggaatgtgaaaatgaagagcatgccaaatgaataaaaaaatgggcagaaactttcataattga

SEQ ID NO: 4448 - DNA, 881 bp, Gossypium hirsutum
  Clone ID: GOSHI-09MAY01-C36332_1
cccacgcgtccgcccacgcgtccgcccacgcgtccggttcttcaaaactgatacctctacttcccttgctttcctcttatgtatttcttcttcatttcctcttcaatctagttcctttctccattcgatctggttttgtttctcagcatattctgggcctttatttctacgtataactcttccttcctttttagcgattctgttgccactgtatcgcgagagcgtttctcgattttggtgtatacttgaatatgacactcctagatctatttagtttctacttaatatcgtgaatatatgttccaatacatgatcgatcttgactctctgacaaacatttctttattattgtgagggaatcaccttctatgatgatctttggccattcttgttctactcctatttggacagcttttcgacatacaattacttcagcagcaaaggtggacggtacatcgtggtgaacctctgagtaggcaccatcaaaattaattttgaagaactcgctaggtggctgagttcatcttttttattcctcttgtcgcactggctttgccttttcaagaccattaagttcaacaagatatcccaaaggccatagcagaagagtctattctggcacacattaaactgaccagaggcccagggcatattctgtcggttgtttcattcctttctccgcactggggacagtctttgttactgatcagttttcggtgttgtatattaaccttcgtaggcaaatagttctatgcaattctctatactgtaatatttattttggtcagtaaatttagtcgccatagttttttgtaaaaatccccgtatttggtttgtaaagcgtaagctctatgaaattaatcaaagatttgtaatagttt

SEQ ID NO: 4449 - DNA, 507 bp, Gossypium hirsutum
  Clone ID: GOSHI-09MAY01-C36322_1
gtgggtgttcctttccagaaggaggctttcctggatgtaaaaacaattggagaagaattgctcccacaatcagtggctgataagattgaaactatgcttctagatctaaaggtcccatcagaatttcacaaaagatcatttgaatgctcagttgactctatccgggctatcgcagctagtcatctttggcagcttgtggctgcgcgtgctgacttggatggccacttaaaaagctctaaaggactattttcttttggccaagggagactttttccagtgcttccttgaggagagccggcagttaatgcgcctaccgcctcgccagtcaactgctgaagctgatcttatggttccatttcagctggcagccataaagaccattggggaggaagacaagcactcgtctagagtatctttgcagatgccttcatttgggatcacagtgaaatcctctcaaagagatataccgaagacaaaagcatacactgatggaagttcagagacctc

SEQ ID NO: 4450 - DNA, 403 bp, Gossypium hirsutum
  Clone ID: GOSHI-09MAY01-C36242_1
ctaagccagctcctgttatagaaaccttttgttctgatgaactggtttcaccttatgtggggctggatggagttgtaactttagttgactcgaagcatgctatgaagcatttgaatgaagttaaaccaagatttgttgtgaatgaggcagttgaacaggttgcttatgctgaccgtataatcatgaacaggatagagttggtctctgagggtgacttggagaaactgactgataaaatcaagcatattaatagcatggctcaaatcaagagagcgaattttggagtcgttgacttggactttgttttgggagttggtggatatgatcttgacagtattgattcttgcagttaaagtagatgattctcacggtggtaaccatcaccttgacacacatggacacc

SEQ ID NO: 4451 - DNA, 720 bp, Gossypium hirsutum
  Clone ID: GOSHI-09MAY01-C36262_1
tggattccctgctaaggcaattgagggttggtggcgcatatgtttctgggcatctgttgctcctggtgctatacttgctctttttatggagttttctgtagagagtccccattggctttttaagagaggaagagctgctgatgctgaagctgagtttgagaaacttttgggaggaccatatgtcaagagtgcaatggctgaattgtcaaagtcagacagaggggatgaggcagatacattcaagttctcagagctactttatggccatcatcgtaaagttgttttcattgggtctaccctttttgctttacaacagctctctggtataaatgctgttttctatttctcgtcaactgtctttgaaactgctggcgtaccttcagagtctgcaaacatgtgtgtgggaattgccaatttgttaggatcatttgttgcaatgattttgatggatagactgggaaggaaggtacttctcattggaagcttttcaggcatggtagtggcaatgtttcttcagataacttcagctacttccttagtctcaagaggcagtggagtttatctctctgttggaggcatgcttttgtttgtcttgaccttcgctattggagctggaccagtccctagtatcctactatcagaaatgtttcctggtcgggttagggcaaatgcagtgtcagtttgcatggctttccattggattgtaaatttctttgtggg

SEQ ID NO: 4452 - DNA, 876 bp, Gossypium hirsutum
  Clone ID: GOSHI-09MAY01-C36222_1
gctgatatgaatgcattttataattttgtcaagaaatcgattcatactgatgttaccaaagcacaaatgatggataagattagaaggttaaagaagaaattcgaaaacaatgctggtaagggtaaaaagggcgaggatcgaactttctctaaagcccatgagcagaatgcttttgagttgtcgaaaatgatttggggcaaagaagggattagtggaaaagttgagtcttcagctgctaagtcgaatgggaaagccaaggggaataacaaggcagtggttgcattgaaagcagagttttcttcacccgataagaaaacatacgatgcagtgccaatagaggccgataaggtggtgtctaagagttctcgtagtttgtttgataagagatttggtgtctctgacatggaagaggcagttgtaaagctcgggttggatatggttgatggtgaaaagaaggcagctttggaggcgaaatggaggaaattgcaaattgagcacttggagctgtttgtggagcgaagtgaattggtcactgagcaagctaacttggtgctggaatattacaagtctgaagacaaatacagtgctagtataataagtaatgatatttttatatgcattttaaagaaatgttcaaacttttgtgcttattagataagtaagctgcctatatgttgccaatcatggggggtatctgtagctcaaaatattggtaactttgggataatatttatctcttgcatagagagtaacttatggagctgcttctttgtttgttggtcgcttatatgcgttataggtcgctattaagcatattttgttatgtttggaattgcttaatccttttattttattttctttgtctctaatttgttt

SEQ ID NO: 4453 - DNA, 631 bp, Gossypium hirsutum
  Clone ID: GOSHI-09MAY01-C37992_2
gacccacgcgtccgcgattgcaccacctaaccgactaaagaaaggagtcccatcagttgactccaaccatgtgaggaatgagaatgctgttttcaagaagcaagcagcagtctctaaaaatgcagctgatgatcattcgcagctgttaggaatgcagaaacaacaatcaaatggcatttcttttggtgtggtcagtagtctctcaaatgtaaaaatattgagcaaatctaaagaccctacagaaattaatagagccaattttgagagaacaagtgttgaaagcaaggcctctgctcatggaaggtctaattcgaattttgttggaaaacaggacagggcaactggggcagcattaacttctagaagatagcttgtgcatttacctcaattgtgagttgtcttgtttgttttgatgaactgatactagtttgttattatagcatatttgatttcatggatgtttataatatcatcgctcaaccaaaacaagttttcaagagatttatcgatctcattttgttccagcaggatacaccgaatctcgatgttgagtggtggatcatgcattaagctgatttcaataattttgggatatgaatttataggttgattggatcttttgatcttgggc

SEQ ID NO: 4454 - DNA, 601 bp, Gossypium hirsutum
  Clone ID: GOSHI-09MAY01-C37992_1
cccggtcgacccagcgttcgggtgattatattcggctacgggggggagcacaggagaaatagcagccacagctgctgttgctaaagttgctgcagctgccgcagcctcatctcctcactccacatttttgccttctgttgctgttactccgattgcaccacctaaccgactaaagaaaggagtcccatcagttgactccaaccatgtgaggaatgagaatgctgttttcaagaagcaagcagcagtctctaaaaatgctgctgatgatcattcgcagctgttaggaatgcagaagcaacaaccgaatggcatttcttttggtgtggccggtagtctctcaaatgtaaaaatattgagcaaatctaaaggccctacagaaattaatggagccaattttgagagaacaagtgttgaaagcaaggcctctgctcatggaaggtctaattcgaattttgttggaaaacaggacagggcaactggggcagcattaacttctagaagatagcttgtgcatttacctcaattgatacagcgaatctcaatgttgagtcgtggatcatgcattaagctgattgcaataattttgggatatgattttata

SEQ ID NO: 4455 - DNA, 265 bp, Gossypium hirsutum
  Clone ID: LIB3147-052-Q1-K1-C9
ctcatggaaggtctaattcgaattttgttggaaaacaggacagggcaactggggcatcgttaacttctagaagatagcttgtgcatttacctcaattgtgagttgtcttgtttgttttgatgaactgatactagtttgttattatagcatatttgatttcatggatgtttataatatcatcgctcaaccaaaaaaaaaaataaaaatataaaaaaaaaaaatataaaaaaaagattaacgatgtatttgttctttataatattca

SEQ ID NO: 4456 - DNA, 387 bp, Gossypium hirsutum
  Clone ID: GOSHI-09MAY01-C37912_1
ggaaaaactgattccttgagcttcatatgagctacaaggcactgcaaaacatcctgcactgttccttggtacctcttgcaaaaaaccagataagccattcatcagtattttgcaccagataggtataccccaagagagtttaaggcttgaccatatttctgactgtaggacactgtcgaaaaacatgatagctgtgctcttctccaacaccacaacgggggcacatggtattgttagccaccctcttgcaacatagattaaccattatagagatgaaattccagtagatccgccaaaccagtattgtaattttgttggtagttgtatgtcccatagttttttaaagaaagctttagtttcggtttgtaataagtaactagtaggatc

SEQ ID NO: 4457 - DNA, 666 bp, Gossypium hirsutum
  Clone ID: GOSHI-09MAY01-C37572_1
caaagaagcaaacgcaaaacaaacaatggctgatttgtttataggcgtttcacagtcgtctcttcttcatcttcaaccaaagcttgcaagttttcaaaggcttaccggtggcccaagatttgccgtagctagcaaccgtcagcttcatttcagacggttgactgtaactggggtcgtatcttctgattccaaagcacccacgactgttaccagcactgtgggttctgaaaaaggaggaatcgacatcgaagtagacacaggaaacggcggaggagataaatttgacgacagaagcggcggcggaggagacggtggggataacagcggcggcggaggcgatagtgagagtaaaggagaaggggagttttcggacgacggtggtaagaaaaagatggctttgtctatgtctcagaagttgacccttggatatgctgcacttgttggagtgggtggtgttatgggctatgtgaagagtcgcagccagaaatcacttgcggcaggaggattgtcagctgcggtgctctattatgtttatactcagcttcccacaaatccagtttttgcctcatccgttgggcttggtatatctgctgcacttttgggagtgatgggttcccgtttcaagaggtcgggaaaagtctttcccgggggggttgtatcactcgt

SEQ ID NO: 4458 - DNA, 285 bp, Gossypium hirsutum
  Clone ID: GOSHI-09MAY01-C37452_1
agagaattggtgcaccaaaaaaaaaagcaaattaaattaagttagacatgtgatagcaaaggctgagtttttttttggctttcagcttttctatcatttgaccattaaactgatttttgagaagggaagatattacttgtatttgattgcagagacattagctttattgtttttgagaaccgaagatattactaatggatcttcgattttagctcacgtgtttaagctttacgtattaagttttcttatagttatgaacagttgagtaatttcaataaacaaaaa

SEQ ID NO: 4459 - DNA, 711 bp, Gossypium hirsutum
  Clone ID: GOSHI-09MAY01-C37682_1
cccacgcgtccgttcattttaagctttaaattccaagaagacaagccatggatggcacaattaaccatcgtggcttgtttatctttggctaccaaggttgaggaaactcaagtgccacttcttttagacctccaagtatgtgtctaatgcaaacaacattgtagtccaagttgtgtttctgaacttgttatcgacttattaaagttgggttttagtgatttatttatttttctttacgtggaggaagcaaggtatgtgtttgattcaaagaccatacaaagaatggagcttttggtgttgtcaaccctgcattggaggatgaatcctgtgacaccaatatctttctttgatcatattacaaggaggcttgggctgaggacccatttgcattgggatttccttcgtaggtgtgagcatttgcttctcttcctcataactgattcaaggttcgtgacttacactccttctatcttagctgctgcaacaatgctgcatgttataaaagaggttgaaccatgccattatcctgaatatcagaaacagcttattgctgtactcaaggcatgtgaggataaagtaaatgcctgttacaagctcatctcagagttattggaaagccagtacaaaggaaaccaaggccacaaaaggaagtataaatcaataccaagcagccctaatggtgtcattgatgcatcatttggctgtgatagc

SEQ ID NO: 4460 - DNA, 615 bp, Gossypium hirsutum
  Clone ID: GOSHI-09MAY01-C37642_1
tcccggtcgacccagcgtttggccttggacaaaaaagctgatgaaacttgttcaaactggctgaagagcacaagagagataaagagaaacttcgcagagaaatcacttaagctagaaaagcaacttgatactagacaaggattagaacttgagatacagcgtttgagaggggctttacaagtgatggagcacatgaatggtgatggggattctgacacaaagaataggatgggggtaattcaagatgaactgagggagaaggaagaagaactggaagacttggaagatcttaatcaagctcttatcatcaaggaacgcaaaagcaatgatgagttgcaagatgcccgaaaagagctaatcactgcatttaaagatgtttccaccagagctcatattggtgtcaagaaaatgggagaagtggacattagacccttcttagttgctgccaaaagaaaatactcagctaaagaagctgatgtgaaatcagcagagctatgttcactgtggcaagactatcttagagatcctagctggcatccttttaaaatcctcaaagacaaggaaggaaattgcaaggaaatacttgatgaggaagatgaaaaattggtcgaactc

SEQ ID NO: 4461 - DNA, 848 bp, Gossypium hirsutum
  Clone ID: GOSHI-09MAY01-C37162_1
cccagcgtccggcatttcatttcatccctaaacatctaaatttaagccacaagctttgaggttttgaccttttgttgggtcattagctttgattagtgggaaaagttccttgtatgtgcagtgagaacaaaggctaaagaaaatggaagtgggtcagatgcagagaagattggtggactacacaaaatccttgtttatggagggtttcttggatgctcagtttttgcagcttcaacagcttcaagatgagagcaacccagattttgttgttgaagttgtgtctcttttctttgatgattcagagaaacttcttaatgatctcaccatggctttagatcagccaaatgtagatttcaaaaaagttgatgctcatgttcatcaattgaagggtagcagttccagcattggtgcacagagagttaaaaatgcttgcattgcttttcgtagcttctgcgaggagcagaacatcgatgcgacactgagatgtcttcaacaagtgaaacaagagtattaccttgtgaagaacaagcttgaaactatgctcaggttagagcagcaaatcgtggcggctggtgggtcgattcccatgattgaactgggtttttgaagaccataaacatgaaggggggaaaagcatgattttgggggtggtttatacaataggaacatatggtgtttaaggtttctcttttttatttaatcttaccagtgagtttgtggttgtttgatgttcatgaaagaagagatttcatactagtttcactccccataacttctaaaaggaccctttctgttgataaatttcctcttaaataatactgtttcttccatgaatgttaactattgtt

SEQ ID NO: 4462 - DNA, 614 bp, Gossypium hirsutum
  unsure (1)..(614): unsure at all n locations
  Clone ID: AI729617.1
gtttggtttttccttacttttgtactcttttttttttttgttttttttttgttgggagaagggtttcttggatgctcagtttttgcagcttcaacagcttcaagatgagagcaacccagattttgttgttgaagttgtgtctcttttctttgatgattcagagaaacttcttaatgatctcaccatggctttagatcagccaaatgtagatttcaaaaaagttgatgctcatgttcatcaattgaagggtagcagttccagcattggtgcacagagagttaaaaatgcttgcattgcttttcgtagcttctgcgaggagcagaacatcgatgcgacactgagatgtcttcaacaagtgaaacaagagtattaccttgtgaagaacaagcttgaaactatgctcaggttaaagcancaaatcgtggcggctggtgggtcnattcccatgattgaactgggtttttgaagaccataaacatgaaggggggaaaagcatgattttgggggtggtttatacaataggaacatatggtgtttaaggtttctcttttttatttaatcttaccattgagtttgtggttgtttgatgttcatgaaagaagagatttcatact

SEQ ID NO: 4463 - DNA, 487 bp, Gossypium hirsutum
  Clone ID: LIB3147-024-Q1-K1-H12
gggccgacccacccgtccgcccacgcgtccgtcaccatggttttagatcttccaagtgtagatttcaaaaaagttgatgctgatgttcatcaattgaagggtagcagttccagcattggtgcacagagagttaaaaatgcttgcattgcttttcgtagcttctgcgaggagcagaacatcgatgcgacactgagatgtcttcaacaagtgaaacaagagtattaccttgtgaagaacaagcttgaaactatgctcaggttagagcagcaaatcgtggcggctggtgggtcgattccgatgattgaactgggtttttgaggaccataaacatgaaagggggaaagaatgattttgggggtggtttatacaataagaacatatggtgtttaagggttctcttttttatttaatcttaccagtgagtttgtgggtggttgatgttcatgaaagaagagatttcatactaatttcactccaaataacttct

SEQ ID NO: 4464 - DNA, 687 bp, Gossypium hirsutum
  Clone ID: GOSHI-09MAY01-C37342_1
attgagaggatcaaggacatggatatgttgaaagatggaaaaggctctgaatgcagtgactctactttggtggatgcaaagctcaatacggactatgatcaaggaaaagtaaatggaaacacaaatcagtcggatgcagtccatcaagaaccaggcatgaacagaaattcaaattgtgaaaatgaagactacaataatctttctgttagccaaagcatgtttgatcaatatgacaatgataagcctaaggcaaatgtgcgcagggccttgtcaaaaggccagtttcctgtgatagaaaatttgtcggatacccttgatgctgcttggactggcgaaatttggcgaggacctgtattatctaaaaaaaattcattttcacttcctgatttttgtgctgtaaatttgcaaggcgattttgaacaaaagattgtgccaaaggttgttcgttctgcttctcctgcattgttcagtataggttctgaaaatatggaagactttgtaagctggttaaaaatgcctttcttaagtttctaccgttcatacaacaaagactttctaggaagtgcttcaaagcttgatacattcagtgcatatgatcggttcaatgtttcatcgtttagagagttggaactgccagatggggctaggctgcttctgccggtgggtattaatgacactgttattcca

SEQ ID NO: 4465 - DNA, 525 bp, Gossypium hirsutum
  Clone ID: GOSHI-09MAY01-C37262_2
gtgtatcgtatcctctttttttcttcaaatatggatatacaattctgaagaagtactcttttactgtggctactatctttaccggcatggcagctgctactctgtggggccatactttgaccatgaacttcatcctaggaatttcaactgtgttcatctcaatgcaccagttcttttcgccgctttccaaagtcaaagaagaacaagagaatggaatgctcgaaccggtagattataaggaaaaccacaggtccaaggaatctttcattaatatagcagcaggagcacatgaagaggctagtcatcgtgttggatccgacgagagacaaccacttcttccaacttaaagttttagggaggagggaatttgttttggtagggacccaggtattgttggatagtgacagagataaaccagttttcgctcgagacgtttattggaattgaaagaaatttgtgaaatgagaaacccttaaagtgtagtcatttgttataattttcgtcatgggtctgaatggatgcttg

SEQ ID NO: 4466 - DNA, 725 bp, Gossypium hirsutum
  Clone ID: GOSHI-09MAY01-C37262_1
tgtaagctcgtgccttcacgtcacaaccggcgcttacatctactcattgatctttgcagctgctccatctttggcttctgtctacaatgagtatgctcttaagagtcagtatgagacaagcatttatctccagaacttatttttatatggttatggtgctatacttaactttctggcattaactggggacaactgttgtcaaaggtcctagtagctttgatatcctacaaggacattccaaaagccaccatgtttcttatatgttacaatgcagcacagggaattttatcctcttttttcttcaaatacgcagatacaattctgaagaagtactcttcaactgttgctactatctttaccggcatagcatctgctactctgtttggccatactttgaccatgaacttcatcctaggaatttcaattgtgttcatctcaatgcaccagttcttttcgccgctttccaaagtcaaagaagaacaagagaatggaatgctagaaccggtagattataaggaaaaccacaggtccaaggaatctttcattaatatagcagcaggagcacatgaagaggctagtcatcgtgttggatccgacgagagacaaccacttcttccaacttaaagttttagggaggagggaatttgttttggtacggacccagaaatacggatgcatggtgagaaggaacatagagttccatcttgtaacatgtttcaagctga

SEQ ID NO: 4467 - DNA, 838 bp, Gossypium hirsutum
  Clone ID: GOSHI-09MAY01-C30922_1
aagtagcttactactgcattatttttctcattctgcttttgctagctagctagcctgcttccatggcaccctcaattgttcttgtttcatggatggttttaggccttgtaatggcaacttcaactattcaagttgaagctgccagggcattttttgtattcggtgattccctggttgacaatggcaacaacaacttcctagcaaccactgctcgagctgattcccctccttacggcatcgatactcccaggcgtcgtgccagcggtcgcttctcaaatggcaaaaacattcctgattttatcagtgatgcacttggttcagagccaacattgccctacttgagtccagaactcaagggagataggctacttgttggggccaactttgcgtcagctggcattggaatcctcaatgacaccggagtccaatttataaacatcatcagaatgtacaagcaattaaaatactttcaacaataccagaccgaggttggctgatcttgtcggattcgaggaagcacagcggattgtaaacgatgcacttgtgctcatcactgtcggcggcaacgatttcgtgaacaactactatttggttccattctctcctagatctcgccagtttagtctaccagattatgttcgatatctcatctctgagtacaggaaacttctaatgaggctatatgatctaggagctcggaaggttctggtgactgggaccggaccaatgggttgtgttccagcagaattagccatgaggagcccaagtggtcagtgtgtcactgagctgcaacgagctgcaaccttgtataatccacacatgggtcaaatgataaatg

SEQ ID NO: 4468 - DNA, 190 bp, Gossypium hirsutum
  Clone ID: LIB3120-046-P1-K1-E1
gcgacaggctacttgttggggccaactttgcgtcagctggcattggaatcctcaatggcgccggcgtccaatttataaacatcatcagaatgtacaagcaattaaaatactttcaacaatacccggcccgggtgggttgccctcgtgggttccgaggaaccccaggggttcgtaaccgtggccctggggc

SEQ ID NO: 4469 - DNA, 635 bp, Gossypium hirsutum
  Clone ID: GOSHI-09MAY01-C30812_1
ctaatttctggagttttagccccgattagaaagggtccagaaaaactttctagttatgaatcgggtatagaaccaatgggcgatgcttggttacaatttcgaatccgttattatatgtttgctctagtttttgttgtttttgatgttgaaacggtttttctttatccatgggcaatgagtttcgatgtattgggggtacccgtattcatagaacctttcattttcgtgcttatcctaattgttggtttagtttatgcatggcgaaaaggagcattggaatggtcttagttcctgaatattcagataataaaaagaaagaaaaaagtcaaaataataataacattgagtatgaattccatcgaatttcccttacttgatcgaacaacccaaaattcagttatttcaactacattaaatgatctttcaaattggtcaagactctccagtttatggccgcttctttatggtaccagttgttgctttattgaatttgcttcattaataggctcacgcttcgactttgatcgttatgggctggtaccaagatcgagtcctagacaggcagacctaattttaacagctggaacagtaacaatgaaaatggcgccctctttagtgagattatatgaacaaat

SEQ ID NO: 4470 - DNA, 403 bp, Gossypium hirsutum
  Clone ID: LIB3120-007-Q1-K1-C1
tgatgatatgacggaagctgatgcagtgattggtgctgctgatggtggctcgcatcaagctccattagctaggaaagagtctagcaagaagaagaagcctcttaaggttgccatggaagccatgataagagggttacaaaagtttgtagaggatgagtctgaagaagagactgcttccaaggaggaatgcaatcataatgtagctgcatggcacaatgttcctcacccggaggagagattaaaattttggcctgatcctgatatagaactgaatctggccaaagatactggcattagcatctttcggatgggaatagactggaatccaatcatgccacaggatccagttaatgggattaaggatgctgttaattttgcagcattggagcgatataaatggatc

SEQ ID NO: 4471 - DNA, 339 bp, Gossypium hirsutum
  Clone ID: LIB3120-007-Q1-K1-C2
tgatggtggctcgtatcaagctccattggctaggaaagagtctagcatgaagaaaaagcatctaattgttgctatgggaagtatagattagaggcgttacaaaagtatgtagaggatgagtatgaagaatagactgatttcaaggaagaatgcaatcataatgtagctgtatggcacaatgttcctcacccggaggagagattaaaatattggtctgatcctgatatagaaatgaatctggccaaagatactggcattagcataattcttatgaaaatagacatggatcaagatatgcctaagtagtcatattaatgggattaaagatgctgataattt

SEQ ID NO: 4472 - DNA, 425 bp, Gossypium hirsutum
  Clone ID: LIB3120-010-Q1-K1-E5
cttccctttcttattactattcttcttctcttcaaccttgatccatttatgctactctgtgtttttcttttccttcatttggtgttgaggaacgttatatagttaggagaaagaaagtattgagaagccaaaagagaggggaaaaaatgtcaatggacttgacatctgaacgtgtttggtatgttcactgcaacttctgcaacaccattttagcggttagtgttccatgcaacagtgcgttcaacatcgtgactgttagatgtgggcattgtgccaatctgctgtctgtaaatatgggaacttcacttcaaacagttcccagtcaagatgctcagaaacagcagataacgattgatgaagatcattcaaataaggaatgttggtcgtctttcaaatgcaacaaggtttctgcaatttgattctac

SEQ ID NO: 4473 - DNA, 317 bp, Gossypium hirsutum
  Clone ID: LIB3145-052-Q1-K1-C10
cccacgcgtccgccatcttcccttccttataactatcctcctcctctccaccctggacccattaagcgcccccttccttttccttttccttaattgggggggagggaccgtttttttgttggggaaagaaagttttgagaagccaaaagagaggggaaaaaatgtcaatggacttgacatctgaacgtgtttggtatgttcacttgaacttctgcaacaccattttagcggttagtgttccatgcaacagtgcgttcaacatcgtgactgttagatgtgggcattgtgccaatctgctgtctgttaatattggaact

SEQ ID NO: 4474 - DNA, 558 bp, Gossypium hirsutum
  Clone ID: GOSHI-09MAY01-C30142_1
tcgtttcaacaacaaaaaaaaaaagaacatggctaagaagaagcatgttttgaaggaagacgatgaacatgatgggtccaacactaaaaaacaagtttgtcgagctgatttccctccccactttgtcttcggtgtttctacctcttcctatcagattgaaggaggtgtgaacgaaggtggcagaggtaaaagcatatgggatgctttctctcacattgaaggaaaaatcgttgatggaagcaatgctgatgttgcagtggatcattacaacaggtacaaggaagatatagagcttatatccgagttagggttcaaagcttacagattttccatatcatggcctcgtatttttccagatggtttgggaaaccaaagttaatgaggaaggaattgcattttacaacaatgtgatcgatgccctttttgaaagggtattgagccctttgtgacattataccattgggattcttccttgcatctccatgagtaaatagagggtggataaacaagcaaattggggactactttgcaaaattgcaaatacttgcttgaacattt

SEQ ID NO: 4475 - DNA, 681 bp, Gossypium hirsutum
  Clone ID: GOSHI-09MAY01-C30092_1
ggcagcaacgtgggtgacggaacggaaaatagattaggatcttggttaatgctgacatgtttccaaacttccgttatttcttcttcgatgtttttaactgcaatggcggcgaatccattaagtgctaatttagctttcaataccattaaacagcagatcgggtggatggattgggctaaggcggcattcgtgccgggtttagtttcgttgcttgttgtgccattgattttgtatgttatttatccaccaacggtgaaaactagtcccgacgcgccaaagcttgctagggagaaactggagaagatggggccgatgtccaagaatgagattatcatggctgggactctatttctaacggtggggctctcgattgttggaggggcgttaaatgtggatgctgctactgctgccattcttgggttatctgtactacttgtgactggggtagtaacatggaaggagtgacttgctgaatcagttgcatggtatacacttactgggttggctgcactcatcgctatggctgagtctgtgtacaaatgtggtctaatctgatgggttagtcacaccgtgtcaaggtcgcacgtggattcagactttcatggcatatgtcaagcggcattgtgcttcttctctatagctactggcattacttctttgactgtggaactgctcatattg

SEQ ID NO: 4476 - DNA, 473 bp, Gossypium hirsutum
  Clone ID: GOSHI-09MAY01-C30292_1
cggacgcgtgggtaaaaataatataagttacttttataaaattcattatagaatcaacacagagtggttgataagagagagagagagagagagagagagagagagattataattctaaaaaaatatatataaatatatgcatgggtaaattacaatcatatttttgggagacatacataaagaggatatatcatctagatgtttgtatattaggaaggaatctagtccagaatccataataaaataatgaaggaagaggatatataatatatataagttagtgaattagaaataattccattatataatcttcaatgagatggataaggaaaaacaaacaaggttgaacaatttaatggttgatcctcgtaacatgcgtatataaattattgactttgagttggaggaaaattatatgatttctaaattagatttgtcttaataggtatatatatatatataaggctgaagga

SEQ ID NO: 4477 - DNA, 1584 bp, Gossypium hirsutum
  Clone ID: GOSHI-09MAY01-C30252_1
cggacgcgtgggctccttgttggccatcttcgtggtcgtcttcattcgtaccactaacagaagaaacctcttagtcccaccctccccgccgaaactcccaatcatcgggaacccccacaaccatcggccgctaccctcatcgctcactcaggtccttacctcaccggttcggccctctcaggtcgctacgcttcggcaatttccccatactcgtcgtctcctccgctgatgctgcctctgagatcaagaaaactcatgacttgacattcgtaaacagaccgaaacgcagcctctttcaaaagcttctttatgactacaaagacgtggcgtcggcaccttacggtgagtattggaggcaaatgaaaagtatatgcgtagtaaatcttttgagtaacagaagggataaatcttatcaaggtgtgcgagaagaagaaacggctctagcagtggagaagatcgaaaagtctagctctttgtgttccccggtgaatctaagcgaactcttttccgcaaccaccaacaacgtcatctgcagaatcgctttaggaagaaaatacagtgaagataccaacaagtttggtaagcttttgaatgagtttacggagttgttgggtactccggatgttggggattatcttccatggcttgcatggttaagccatgttaatggactccatggtaaagccgagaaagtggcgaaggagttagatgaatttctggatggagtgctcgaagaacatatgaatcggcatgacagacacttaaatgatcatgcagggatccaaggtgaatatcaaaaagacttgtggatattttgctggagattcagagggaaaacacagtcccccgcccccgggaaaaatcagccttaaggctcttatcttggatatctttgcagccggtaccgatacgacatacgtggtcctggagtgggcaatgacagaactcttaaggcaccccaagataatgaagaaacttcaaaacgaggtcaggaatgtttctgctgaaaattcaagcatatcagtggatgatctcgataacatgcgctacctaaaagcagtgatcaaagagactcttcgtttacatcctccgattcccttgctgcttccaacaatatctacaaaagacgtcaagctcaagggctatgacatttatccaaggaactcaagttatcatcaatgcttgggcaatcggaagagaccttgcgtcatgggagaatccggaagagtttcttccagacaggttcttggataattccatagatttcaaaggacaacatttcgagctgattccattcggctctggaaggaggatttgtccgggaatcttgtttgcaatcgcaataaatgagcttctcttagcaaatcttgtgcacaagtttgattggtcattgcctggtggagcaaaagagaaggatttagacatgaccgaaaccggcggccttaccatacggaaaaaatctcctctaatcgctgtagcgaatagatgttctttctagtgcaaagcctcgtctgttacagtaagtattctaagttacatgtgcttgcaaatctatgcatgttattttccttgccataatgcatt

SEQ ID NO: 4478 - DNA, 376 bp, Gossypium hirsutum
  Clone ID: GOSHI-09MAY01-C31532_1
gcgcgctgcaacagcagcaggcaggcgaagctcacgtatttcgatcccccatctttggcttattgcccaggatcgcccctttcattgtagtccgaaatgattttgaggagtgcatcaacgccgctactcaattcattgggtccacactctaaggagccatcgccggacctcgagtttccgtaccagatttctcgaacccgaaccctttcgttcacgggttcgcgttcgagctcgatttcggttgcatcgagcgacgattcgactcggaggatgacgagggcggtgtcggagacggatctcagggacctagtggttccgaaaattaaaaccgttcagaaaaatggcggcatcttgaatggggtttgcgttgaggaag

SEQ ID NO: 4479 - DNA, 1270 bp, Gossypium hirsutum
  Clone ID: GOSHI-09MAY01-C31792_1
cttcaatccatttctctttctctctctatctttcaattttcccgagaaaatctcgcattttctcacccgagagaaagagccggaaaatcgcatgatgaggtagtttttttaagttttccggagtgaaaagcaactggaaagtaagtttatcctccgtagattactcgttgatcggcttagacaaagtttaaaacagtatctttcttgaatgctacgatactgaaattcgctattagtttgtggaaattttgagatcagctagattagttgggttttgaaaaatgagttggaatccgaacatggaagttcagtacatcaacagtagctacctttataacagtgctggcagctttatggaatattttgaaggtcttacatatcaacatgtcaatttcatttttgacggtgcttcccatcttcaggagagtgcgtacccatcgatgactacaagcttctacaagtttggattatctgattttggcaataatacccccgcgtccgcccacgcgcccggttatgatgggagtaaccatgaaccgtgcgctgaagggtatagaagggcatcagtgaattccccatcaatgagcaatgaagagactgtagcaatgaatgtggaatggggaggaaatgcaaattcaacctctcgtgaaaacccagtagattgtccacggaggctgcagaatgctcaagattatcaggtcatttggcaagatggtgtggatcctgacaacatgacttatgaggaattacttgaattaggggagactgttggaactcaaagtcgaggcctctcccaagaacttatttctttgcttccggtttcaaaatacaagtgcagcttattctcaaggaagaaatcaaggaatgagagatgcgtgatttgccaaatggaatataaacgaggtgagagacagattactctgccgtgcaaacacgtctaccatgccggatgtggcaatcgatggcttagtatcaacaaggcttgccccatatgttaccccgaggtgttcggcgatgcttcaaaacattgatgacgaactaatcatggtttcttcattaaattttcgcttgggtttgggtatttttcctctaggatgaaaatgctttatttcggtttttttttttttttttttttactttcttggaacagaagtaagagttgaattaggttttgcaataaatgaaaggtatgaaccctgtagaaaaaaaatatgggatgttttaactagaatatgtggagattgtatagagaattagagtttttcttttg

SEQ ID NO: 4480 - DNA, 1056 bp, Gossypium hirsutum
  Clone ID: GOSHI-09MAY01-C31782_1
cggacgcgtgggaaacactttccccgtccgctcgcctctgtttatttttggctgggttgcaacttgcgcataaaagctctggcctttcgctttgccttcggttattttcattctttggtggtccctggtaaagaaacagaaaaaagggaaaaaaaaaaagggatttaagaaagtgaaatcctcttgtttatggtttctaaggtgggtttcgcttcaaattttgatttgattaagaataaattgaaaggaaaagaaatggagagagattttctgggtttgaactcaaaacaatccttccctttggttaaagaagaagttgaagaaattggttttaccaaaagcttggggattcaatggccaatttcaaacaaggtttcttcagctgttccaccacagcagatgagttttgattttgctcaaggagataacgctaaaagaatgggatatgattcaatagtatcctctactttcatgcatatctcaccaccagatgctgctgaacttcagaaatccttcaatcacaacaggcaacgagtaggcaatcatttcccattcacagctgcttcttctgttcagcatgatgtacatcatgttcaacggccttatgacatgaaaatgtttccggtctcgaaccaatcagttcccgtttcaactaccaacccatttatgaatagtcatttcactactactgctatgaaatcacaattgcttggaggaattccagttacgactccgccgcattcggttcttcccaccctcggttcctttggtggaagcatcgaaccacggaaaagtgtcaggggccttggggactccagatcacctgttcaattgactatcttttatgctggtaccgtgaatgtttatgatgatatcacccccgagaaggctcaggctatcatgttacttgctgggaatggatcttccttgacttctaatgtggcacatccaaatgtccaagtccaggcaccaatttcaaaaccacttcaattcgaaactcttccacgaatcatttcacaaatgcagaactttgttctggtatcccaagccctttat

SEQ ID NO: 4481 - DNA, 160 bp, Gossypium hirsutum
  Clone ID: LIB3493-015-P1-M1-B4
cgagtaggcaatcatgtcccattcacagctgcttcttctgttcagcatgatgtacatcatgttcaacggccttatgacatgaaaatgttttcggactcgaaccatcagtgccgttaactaccaccattataatgcatttatgtctgttaaatacatgtga

SEQ ID NO: 4482 - DNA, 431 bp, Gossypium hirsutum
  Clone ID: GOSHI-09MAY01-C31732_1
attattactattcctatgactaagtatttgactttcccacatcggtaaggagtttattacgtgaaagaagtgtttttttgagtctgtttacatgatgtaattgagtaaatttcatttcttgggggtataagaatgattcttgttgcatgtttagtagagggtctctcttattttttagaagtttttaaattcgtgttggatacatatttggatatggaggccggcatacgaatgatgaactacttgtacacgatccttgattaatgggggtccgtagctatattatttggattggcgtgtcaatgtcagatacgggtatgcgtcgattttttcccattggacgttaaatccttatccatgtgtcggacatgattgttggacaagggtacttctagaaaaatgaaaagtccaactaaatttcctttcttggg

SEQ ID NO: 4483 - DNA, 915 bp, Gossypium hirsutum
  Clone ID: GOSHI-09MAY01-C31722_1
ccttacttcaccttatccatcatcatctatttccccatacacccgcgcgtccgcatttttgttctcttcaactttattgcataccaaaaaaacttacaacaatggcaacagcctcagttacctacactccacccatgttggctgctgccaccactaaccccaagaagaagaccaacaccaatgtgaattacataacaggcttgaattcttttggtgggttgaaagctcataacaaagtggtctcactaggccaacgtgtatgcaccgagcaatcatttgcaaacgttgttagctcactcaaagctccgacaaagggcaagacaggtaaaagcagcggcggtgcactgtcttcaacctgtaatgctgttggtgagatattcaggattgcagcaatcatgaatggccttgttcttgttggtgttgctgtcggatttgtgctgcttcgaatcgaagcttctgtggaagaggctgagtaagagaattttaagacataacttgttttcattgccccaaaatttgtacttttactttatgtggaagtttggttgttttatatgtgttgtaagttcattggcttgtaagaaaatttagcattgatatctaataacatccaaaatggaaagctactgtgagggaaatcaatatttatagaatatgcataacattattcagcaatgtttaatattagccattcttgtccaatttctttgttattgattacaagacctagggatcatcagctcttgaaggtatcaatagttatagggacatcactggttctaatttcgagttgctcgtattcggttgattgtgcccttggggtacattttccagcaaatttgaggctggtgaaccctgtgaatattaagatagcagagagtatccaactgaattgcatgttagccaatgctatag

SEQ ID NO: 4484 - DNA, 650 bp, Gossypium hirsutum
  Clone ID: GOSHI-09MAY01-C31662_1
gatttacccaaaatgcatgtgtctgcagcatttgttatgcccggttaactttgtaggcttttcagataactttaatattctgtagaagtagtgcattatctacaggtttggttaatttgtgtgctattccacctcatattgaacattgaccattccatgatactggactactaccgatgctctatatcacgcagcatacatctggggttgatccatttacatcacattactaacatgacattcagtgcatggcactatcgtgaagtaaacagcgcagaaaaccatcccattttttcattccattcatggaattgttagcaccattgccatgggccattaggccctatttggttcgggaaaccgaaaaatggtgattgccatgccttttaacatattaggggtcttcaaaacataagatttataggaactattcggaagtatatatgcctctacggtcaaaatacactacatgaataacatttcatttgaagaaaatccagattttcatatcatggcactattattatctgagaaaatgtagggaagcataaccattgccatagccattgacaccatttattccattgaagtgaaaggatgataatcatcttttgaacttttagggcttgatagatataagcgtctatgat

SEQ ID NO: 4485 - DNA, 766 bp, Gossypium hirsutum
  Clone ID: GOSHI-09MAY01-C31112_2
gttccacataaaggttaaacaacaacagtatataaagttataaacaacatattcttattgagagctgttccagtaaggataacagagtttgaaataatgcgcaactgttgaagtggaatgcaaagatcggaagagctcaagggcaagctttaggcaacaagtgaaaaccaataggcatggggaattcaaggttcattggcctttttctgtgagcaaacatgtgaagaaaatcgagggatgtgaagttaaactgattaaaagcagtgagccatattgtgcagtggcctcatctgctacttcctcttcactccatctcaagtcaaggaagcaaggaacccatgttttctcagctgggtttttcaccttcaagccattcaaacaaccaaccttatgcagccaaaaaccaagtgttcatcccaaccagcttcttccgccgcccattcttcctccaaacccacttctgccgccgcccattcttcctccaaacccacttctgccacccccagtgctccctcctaacccatttcagccgccaccagctccactagttccaaacccattgcagcctccaccagctccactagttccagacccattgcagcctcctccagaacctgcagcaccatccttgccgccggttccaggactagctcctccaccatcgtccccgtctccaccgccagacttcccatttccacttccaccattccctttccttcctgtaccccccttcccaggtgtgcccccatcgaaatcttctccttga

SEQ ID NO: 4486 - DNA, 652 bp, Gossypium hirsutum
  Clone ID: GOSHI-09MAY01-C31112_1
gttccagtaaggataacagagtttgaaataatgcctgggtttttctttacatggctgctttgtttcatcatttttaatggttactcagagggtagccatggatatcagcaacagcaatctgctgttgttgttggaactgtgtactgtgatacatgtttccagtctgacctctcaaggccaacccatttcatttcaggtgcaactgttgaagtggaatgcaaagatcggaagagctcaagggcaagctttaggcaacaagtgaaaaccaataggcatggggaattcaaggttcatttgcctttttcagtgagcaaacatgtgaagaaaatcgagggatgtgaagttaaactgattaaaagcagtgagccatattgtgcagtggcctcatctgctacttcctcttcactccatctcaagtcaaggaagcaaggaacccatgttttctcagctgggtttttcaccttcaagccagtcaaacaaccaaccttatgcagccaaaaaccaagtgttcatcccaaccagcttcttccgccgcccattcttcctccaaacccacttctaccgccgcccattcttcctcctcccccccctctgccgcctcctccacaacctgcagcaccatccttgccgccggttccagaatatctcctcc

SEQ ID NO: 4487 - DNA, 408 bp, Gossypium hirsutum
  Clone ID: LIB3146-059-Q1-K1-F8
ccaaacctgtgtagaacaaaaccaaatgattttaatggagaaaaggctgtccttggggaccgtgaatcattctttttccctcctcccctgtttcctccgaacccctttcagcctcctccgttgcttcctcccatactgccaccaccagctccactagttccagacccattgcagcctcctccagaacctgcagcaccatccttgccgccggttccaggactagctcctccaccatcgtgcccgtctccaccgccagacttcccattttcacttccaccattccctttccttctctgtaccccccttcccaagtgtgcccccatcgaactcttctccttgatttaatacatatagtaacatttcttcatgtataattctctcaataatataataatgtaatttgttttt

SEQ ID NO: 4488 - DNA, 283 bp, Gossypium hirsutum
  unsure (1)..(283): unsure at all n locations
  Clone ID: LIB3120-019-Q1-K1-H5
cccacgcgtccgcccacgcgtccgcccacgcgtncgcagagtttgaaataatgtctgggttgttctttacattgctgctggggttcatcatttttaattgttactcagagggtagccatggatatcagcaacagcaatctgctgttgttgttggaactgtgtactgtgatacatgtttccagtctgacctctcaaggccaacccatttcatttcaggttttaaattgaatcccaaactccatcttctcttttctcacgtgatgcaagttttcctttttttttc

SEQ ID NO: 4489 - DNA, 669 bp, Gossypium hirsutum
  Clone ID: GOSHI-09MAY01-C31082_1
cccacgcgtccgcttttcttcactaaacccattaatggcttcttctctcagtctttcaagccacacagtggcttcattattcccttctcacacttcaaagccgcagttgtcactttctaaatccatcccaattctcaccaaatcatcacagtctcaatttcatggccttaaattctctcacccttcttctcttaaaattcctcgtttttccacttttaaaacctcgatttctgctaaggtgaataaaggtacagttcctccagcatttactttgaaagatcaagatgggaaaaatgtaagcctttcaaagtttaaagggaagcctgttgtggtttatttttaccctgctgatgaaacccctggttgcaccaaacaggcatgtgcttttagagattcttatgagaagtttaagaaagctggagctgaagttattgggattagtgttgatagtgcagaatctcacaaggtttttgccctgtgattttgagttgaaaatgtatatggttgtgtttcaaattttcgcgggaaaataaattggtgattaattggtaaaacaaccatggacatggtctttggggtaattgaattgagtgttacattgtattttattttttgtacttaaaaaatgataaattaattgttttattatatatcaaaaaataaattgat

SEQ ID NO: 4490 - DNA, 726 bp, Gossypium hirsutum
  Clone ID: GOSHI-09MAY01-C31062_1
cccacgcgtcgctctaattccctgtcaaagacccagcagcaatgaaacaagctcttaatagatgagttgagagttgagacccatcttcaaaatcaaactctaacactgaaactttgtcaggcggttctaattggaaccaaaaacaatgtcttgtacctcagtttcttcttttactgcttctctctttgtcccttcaaaaagttcatctttttccaatcataagcgcagattcatccaatgttctcttggtggggctgtggtagaaccaaaagctttagcagaacccctgttgctcaatgctgttcgagggcaagatgttgaaagaccaccagtttggcttatgaggcaagcagggaggtacatgaagagctatcaaataatatgtgaaaaatatccttcctttcgtgaaagatcggaaaatgttggtcttgtcgttgagatttccctgcagccatggaatgttttcaagccagatggggtcattttattctccgatattctcactcctctctcagggatgaacatacctttcgacattatcaagggtaaaggtccagttatctttgaccctatagccactgctgctgatgttgatcaagtgagagaatttagccccgaggggtcagttccacatgttggtgaagcattgacaatcttgaagaaagaggtagataacaaagctgcagttgggtttgttggcgctccattcactctagcatcatatgt

SEQ ID NO: 4491 - DNA, 458 bp, Gossypium hirsutum
  Clone ID: LIB3583-040-P1-K1-E3
aagaaaaccaattacatctgccgtctaccacctgcttcagctactggtttgtcacggtaccttctttgagagcctgccttacagattccatgaaattcgcgaccctgcagtggtagatcctggtgaatcggtttcgacttgttgagatttgtctcaatcttcatggggctcgtgctatacaaaaattgttggagaaacttactactcaacaaaagatctcgttgtttatgttagctctaagcattgaagttgttgcattgtcgaaggacttgaatggtcatcgtgtaatccagtattgcttgaaaaatttctctgatgaagataacaaggggctgtagtagaaccaaaagctttagcagaacccctattgctcaatgttgttcgaaggcaagatgttgaaagaccaccagtttggcttatgaggcaagcagggaggtacatgaaggtgaaatcgtgtt

SEQ ID NO: 4492 - DNA, 494 bp, Gossypium hirsutum
  Clone ID: GOSHI-09MAY01-C31032_1
cggacgcgtgggcggctggtgcctcacttcgtcctccactgccaccgccacttctttccctctctggcgacccacattacgatcctcctccattgttgccaccctcaactcttccccttctcctccaacactcatccgcaaccagcctgttttcgctgctcctgttcctttgctctcagacccttctcattggtagagaagacatgggagacaagtcatacgaggaagccattgaagctctcaagaaactgcttagtgagaaaggagaattgaaagctgtagcagccgcaaaggtagatcaagtgacagctgagttaaagacaacatctgatgattctgtggagaggttgaaacaaggattcgtttacttcaagtcacaaaaatatgagaagaatcctgcttgtatgctgagcttgccaagggccaaagccccaagtatatgattgttgcctgctccgactccagggtatgcccatctcatgttctggacatgc

SEQ ID NO: 4493 - DNA, 778 bp, Gossypium hirsutum
  Clone ID: GOSHI-09MAY01-C31392_1
gagagagatgatattggtgagattggctacctaaatgggctctttgtgctagcacgatccattggttcgattgggaacacttgtccatcagaatagactgaagcatgcactataccgtaacccatgggaagatcttgtctacactaattgagagaacattactagcagcacgtgcactctacttgagcattgacgttacaagagtccttgctcgcgtctgaatttttatgggtgattgagggatgggtaacatgtgaaggacacttatgagagggttgaaggaaaaacgctctcccctggaaatttgagagctacatttcataaccccgaatatgacaagttgatcaactattatgtaagagagaaatacacattgaggtacactggtggaatggtacctgatgtcaaccagatcattgttaaagagaaaggaatatttacaaatgtggcctcgccatctgccaaggccaagctgagattgttatttgaggtagcaccattggggttcttgattgagaaagcgggtggttacagcagcgatgggcaaaaatcggtgctcgacaaagtgatcgagaacctcgacgataggactcaagtcgcgtacggttcgaagaacgagattatacggttcgaagaaacgttatacggatcctcgaggcttaatgcaggggtccctgttggagctactgcttaagcaacaatgtttttacttttgtttgccttttcaagacattttgttttcgttgtaccttaatgatctcaaacaaaacttttaagt

SEQ ID NO: 4494 - DNA, 345 bp, Gossypium hirsutum
  Clone ID: GOSHI-09MAY01-C31272_1
ggaaaaaagaaaaagaaaagatcaagtgagaggtggcatcaaccataccatggctggtttgcgaagatctgcagtgtcgtttaggaggcaaggatcttcagggattgtttgggatgacaggtttttgtccgagttaacccatgcaaatcaagaacaacaaggagacaccaagcaagaagaacatgcccaggttgcgcaagacaacaataaccctgaaaaactcgatgctattaaggatgttaagcccacaagaaacctcccacccatcaacaccatcgaaaggagccgatctaatggtgaaaggcgaggttaccgtaccggtaaagtatcccctgctattgagcc

SEQ ID NO: 4495 - DNA, 671 bp, Gossypium hirsutum
  Clone ID: GOSHI-09MAY01-C31262_2
tcgctacgcgtccgcggacgcgtgggtttttattttattttaattcactctcagaagagagcattttggggtttagttttagagttctcaaagaatgagcttttcgactaagcataataatagcagagccatgaatccttgggttcttcatctccaaaaactgggtctcgagcttaagtgtcctctctgtttgaacaatggccggctcatgtcgcattctcaaagattatggtacgccaccggaaagatctgatgatcttttagaaccgtatgttgaatcacttggagacaaccaagcgatagagcacgactttggggagagtcccgtttcgaatttggagataggctttgatggactcctttgggcttaattattaacgattgtgaattgagttcgacaaaaggtcaggggataaaagaaaatcatcactcggaaattatggtcggttttgcgagcagcttcagttcgcctttgccaagtcaaagtttcagagtagcttatgatgctgatttccatggagcccttagcagaataacagagtgccatatcttccttcctttaacccttgtacttggggttatcccttttttctaaaaaaaaaaaaaagaaaagaatttgggtggaacaggtttccagaattcttgaatgattaaagggagaataatagcat

SEQ ID NO: 4496 - DNA, 604 bp, Gossypium hirsutum
  Clone ID: AI727512.1
cactttcctttttattttattttaattcactctcaggaaagagcattctggggtttagttttagagttctcaaagaatgagcttttcgactaaacagaatagtagcagagcaatgaatccttgcgttcttcatctccaaaaactgggtctcgagcttaagtgtcctctctgtttgaacttgtttaagcggccattgttgctcccatgtgatcatttgttctgcgattcgtgcgtagcaagaactgagtttggttcaaagtgccctatttgcaaagttcaatgcgcaaatcgagatctaaggcctttgaccttcatggagaatatagtaggaatctatagaagtttggattctgcattttctgccaacctttctcattccattgaagatggggttggcaaaactgaaaattttgataagtgcagcatgcaaaggcgtgctacagatgtaggatacgagactcctaacaaagatggagttgatttgttacgatcagtttcccataaacaaataggggcatctaaagagtctaggaataggcagatcatcatgagccgagctgatcaagcatccctcagcccgccttcctatggtgatacaaaggtt

SEQ ID NO: 4497 - DNA, 557 bp, Gossypium hirsutum
  Clone ID: GOSHI-09MAY01-C32932_1
gaagacattccggagagtatcgtgagtaaagaaaaagagctggagatgcaaagagatgatctcgcatctaaaccagagaacattagagagaagatagtggaaggcagagtttcaaagaggcttggagagcttgcccttttggaacagcccttcattaaggatgacagtctgttggttaaagactgggtaaagcaaactgttgcagcacttggagagaacataaaagtccgaaggtttgttcgatttacacttggagagacaactgaagataccaaaacaggaactgaagcatgagaaaaggagcttccattggcatccagtgggagtaatggaggtaggaactaattttggacgagagaataacttgattcttttttgtagtggccttcattgtatgctttaattggcccttaaagcttactgtttgatcttgtaagttgagaactgtttcttcagtttatttgtgcaaaatggaaatactgagataagcgaggaattattaaattagctaaaaagctggtctgtaattctattttacacgaattttcattgtttct

SEQ ID NO: 4498 - DNA, 617 bp, Gossypium hirsutum
  Clone ID: GOSHI-09MAY01-C32922_1
cttatttgttcgtcacatctcaagcatgggacttcttctccgacccaactgttgagataaactcattctatttaggaggtggtattaatggtgttattacagatttcccgaagacatctaatagatatcggaggaaccgatgcttgaacagaggcaatcaaattcctggctacatgagtcccgtgcaacccggaagcctttatcaactaatcacagctccttacttgccaccagctgaagccccaaatccgttcctgaccgaagcagatgtcaccgagccccctttgcctcctgtcgctgcaaaagccccaagtacttctccaaatggtactgcactggccccaacatcaccaaatggacaacctaaagttgctgcagccgccatcatgcagctatcgactgtttttcttgccatttctctactgttttgaagccgtcgaaaacctggccttcccctaacacgttttacccccttgtcgtcgtatcttattgcttccgtaccgagtagctcgaaggtcttattgcggagtggtgtggcaaataccacttgtcttttggttctctcccttcaaagccaaacaaataatcttcacctttatttgaagtgtatctttttg

SEQ ID NO: 4499 - DNA, 870 bp, Gossypium hirsutum
  Clone ID: GOSHI-09MAY01-C32822_2
cggtcgcgtgggcggacgcgtgggtaaacttgtagcaaatttgattactgaagcaggtgcaaatcgtgttcttgcttgtgatcttcattcagggcaatccatgggttactttgatatcccagtagatcatgtttatgccccgcctgtgcccccgcgtccgcttgccagcaagacaatatgttctgatgatttggtggtagtctcaccagatgttggtggtgttgctagagcacgtgcttttgcaaaaaaattatctgatgcacctcttgctattgttgataaaaggcgtcatgggcataatgttgcagaggtcatgaatttgataggtgatgtgaaaggaaaggttgcagttatggtggatgacatgattgacactgctggaacaatcgcaaaaggtgcagctcttttgcatcaagagggggctcgggaagtgtatgcgtgtagtacacatgctgtttttagtcctcctgcaatagaaagattgtcaagtggtcttttccaagaggtaatcataacaaacaccatcccagtgtcagagcaaaactattttcctcagttgactgtcctctctgtggcaaaccttctgggagagaccatatggcgtgttcatgatgattgctctggagggtttgaaccctatgcaaccttgggcattgattgatttctccacatgctatgagaattttgttatggaactgcagatcattatctatgctacattgggcagttaggtggccttcttttattaacaaaagtttgttgaatgaatgtaatgcaacaattgaatgctattattttttatcttctcttctttgggttatatgtattctgtatatggttgtatttttttttccatcaaatatatgggtt

SEQ ID NO: 4500 - DNA, 1156 bp, Gossypium hirsutum
  Clone ID: GOSHI-09MAY01-C32822_1
caagcacatagcgctagacactcacaccagctcaactccacagttgaattattagtatggtacgaagaagatgagcatttgaatccctaaaccctaaaaatattttattagaaaaacaaaacaaattaaaggtgaatgaatggcgtcgtcatctctgctttggctctgctcttccaatcctctaatctcccccgctactctccttaaggctcaccctcgcttccctatccggcaccgcttcaggtgtagcttggtggagcccttgaagttcgaaaatggaaagcctcactttcctctcctcacctctgatcctgcgtttccaaccttcttgtcccctaattcccatttccaaaacgatatcaacaaacacgacactaggctccgtatattttctggcactgctaatcctgctcttgctcaggaaatcgcatgctatatgggtctggagcttgggaaaatcaagataaagcgttttgctgatggtgagatttatgttcagttgcaagagagtgtgagagggtgcgacgtgttccttgtgcaacccacttgtccccctgccaatgagaatcttatggagcttctcattatgatcgatgcttgtcgaagggcttctgctaagaacattactgccgtcattccctattttggctatgccagggctgacagaaagactcaggggcgtgaatctattgctgctaaacttgtagcaaatttgattactgaagcaggtgcaaatcgtgttcttgctggtgatcttcattcagggcaatccatgggttactttgatatccatagatcatgtttatgggcagcttaggaggactttcttggcctttgtcctgcccatcttattcaagttccaaggaaagtctaaaaggcccattctgcaccaagttcccaaatgagaagctagaaactgtctattgctgagattaagtgccactgaagattgaaaggtgcctgccctggcctttaaagttctatggccattaaaagatggggtcttaataaggggatccttggctttttcctgtttagagggctgagcaatcttcttacaggcagtctgtttctttgcataatgatgtattatggatatggactaatactaatcaggaatttcattgtttctatgccttaaaccttaatatatcaa

SEQ ID NO: 4501 - DNA, 459 bp, Gossypium hirsutum
  Clone ID: LIB3120-044-P1-K1-G6
gcgtccgtcacgcgtccggtgaagtgtatgcgtgtagtacacatgctgtttttagtcctcctgcaatgcggagattgtcaagtggggggttccaataggtaatcataacaaacaccatcccagtgtcagagcaaaactactttccttagttgactgtgctgtctgtggcaaaccttctgggagagaccatatggcgtctccatgatgattgctctggagggttagaaccctatgcaaccttgggcattgattgaattctccacatgctatgagaattttcgtatggaactgcaaatcaattatctatggcttcattgggtagttaggtggtcttcttttaatcacaaaaagtttgtggaatgaactggtaaggcaacaattggatggctactatttttttgcttctcttctttggggttatattgatatccggcgtaatgggtggtattttttttttcc

SEQ ID NO: 4502 - DNA, 608 bp, Gossypium hirsutum
  Clone ID: GOSHI-09MAY01-C32582_1
gcgcccaacgtccgtccacgcgtacgttgaacggtcttggcagaatcagcaggcaaggaaaggctggatacgactcgatagataggaaaccgggggcaaagcaggaaaaaatgcggacttcgttgagatacactggtgactccaaagctctacgaatccacgccaaggagaagttccccttcgattccaaaacccatttgcaggttcaaggcgagctggacacaagaactggagtccccaataacttctgtgcaatgataaggcactcatatcatgatttgttcacaagccttcgggttggaaatgcgctatgataagcgtgataaggtgcggtacacactgcgaggaaaaaaatctttccttgtaaccaacgatgattcagtcaattttgttatcaagggaagatatgatgttgatcaagaattcaaggggaggaagtcagaaggagctgctgaatttatttataaaatcttcaatttccagaaagaccaagatgttagactcaaagttggctatgaagtatttgagcaggtgccatatctgcagattagggaaaataattggaccctcaatgctgacatgaatggtagatggaatataagattcga

SEQ ID NO: 4503 - DNA, 809 bp, Gossypium hirsutum
  Clone ID: GOSHI-09MAY01-C32502_1
acattgccatcatttcttcacattcatgaatttaggcagagttcatatatatatcctgtgctctgtttgacacattttattacttggataaacatatacccgatttagtgacacattttattacttggataaacatatacccgatttagcagaaaacaagattcgatttctgaatggctaaggctttgatatataacactagcacatgaacccagaataagctaatccggaacaaggttacacgctttagttgccagcaagcttccatttgaaaggttagttcagaccccccggggggggggggggaggaacagcagaaagttactccatgtcaaattcttcctcgtcctcgtctgattccacttcccattcatatccatattccacctcacctccatttccctgcagtaaattcagaatctgctccaagtctctcacacccatctgcaaactggttatagagctcatctgctcaggtaaagttggcagtgaataactctgtacctctagcacgaatttttctggaggttcaagtatctgaatactaaaagcaggagataatgggcgtcccacaacttgaacatgtgacacacagatatagaacaagccatctatttcctgtctctggaccctactcaacagctcaatctgtaatattccaccaatgcaaagaataggctctggaagcttgaaagtctgtaagcggttttcctgagccatttcaaactcttgtgaggtgtaagtccatgcaaacctgtcagtaccagaatcctggcatgactcatccgcaccctgatatgacccatgcg

SEQ ID NO: 4504 - DNA, 597 bp, Gossypium hirsutum
  Clone ID: LIB3828-016-Q1-N6-F2
ctgaatggccaaggctttgatatataacactagcacataaaaccagaatataagctaatccggaacaaggttacacgctttagtttccaacaagcttccatgtgaaaggttagctcagatgtcaaattcttcctcgtcctcgtcttccacttcccattcatatccatattccacctcaccttcatttccctgcagtaaattcagaatttgctccaagtctctcacacgcatctgcaaactggttatagagctcatctgctcaggtaaagttggcagtgaataactctgtacctctagcacgaatttttctgggggttcaagtatctgaataccaaaagcaggagataatgggcgtcccacaacttgaacatgtgacacacagatatagaacaagccatctatttcctgtctctggaccctactcaacagctcaatctgtaatattccaccaatgcaaagaataggctctggaagcttgaaagtctgtaagcggttttcctgagccatttcaaactcttgtgaggtgtaagtccatgcaaacttgtcagtaccagaatcctggcatgactcatccgcatccttgatatgacccatgcg

SEQ ID NO: 4505 - DNA, 442 bp, Gossypium hirsutum
  Clone ID: LIB3120-036-Q1-K1-A9
catttccctgcagtaaattcagaatctgctccaagtctctcacacgcatctgcaaactggttatagagctcatctgctcaggtaaagttggcagtgaataactctgtacctctagcacgaatttttctggaggttcaagtatctgaatactaaaagcaggagataatgggcgtcccacaacttgaacatgtgacacactgcattgatgccccacatactgcattattagaggggcatggcaaaatggtcatagaaaaactaaagatacctagatatgtatattatgattgaaatttatggcaaatctatactcataactctactgcaatgtactagtagagaaggggtgcatttgaccgtaccagatatagaacaagccatctatttcctgtctctggaccctactcaacagctcaatctgtaatattccaccaatggcaaa

SEQ ID NO: 4506 - DNA, 413 bp, Gossypium hirsutum
  Clone ID: GOSHI-09MAY01-C32422_1
ggaagagaagggtatggctagggacattcgtgacagctgaggctgctgcaagggcatatgaccaagctgctattttgatgaacggccaaaatgcaaagaccaatttccccaaggctgctcaccctggtgaacaaaatgctcgtggtggtggtggtggcggtgatgatgatgatgatgatgatcggtctccattgccccctaaggccttggccgagcttttgaatgctaagctgaggaagtgttgcaaagaccaatctccttctttgacttgcctcaggctcgataccgataatgctcatataggtgtgtggcaaaagcgtgcagggaatcgatcgagttccaattgggtcatgagggttgagcttgggaataagaaggttgataccccggcgtcccgagacagaaggacactg

SEQ ID NO: 4507 - DNA, 334 bp, Gossypium hirsutum
  Clone ID: GOSHI-09MAY01-C32742_1
cggacgcgtgggcggacgcgtgggcaaaatatacatcctttgtatcgcttcacctctttcaattattttttctctcacactgagaacatgcaaagacaatccttaggctcgcctacctctaagctccatagccatggaggagaagagattaccggagcaatcgtcgacgacgatgaccgccgcaaagacagcaagtctcgccgattgacgttttcggcttcttcttcttcgtcgtcgccgttgttgttgccgacgtctcctaagtctgagaagctcattcatctcattcctgttcttactctcctttgcttcctcatactttacttaaattctc

SEQ ID NO: 4508 - DNA, 564 bp, Gossypium hirsutum
  Clone ID: GOSHI-09MAY01-C32682_1
cagctaacaaatacagatttacaaaagaaactgccatttcgtagaccaaaaagaaggggggagatggagagcaacgccgtcctagctactgtccagcctaattacaacattcttagcccttcacggttttactcctcttcctcctccgccgccaccacatttctttctgttttctaccctcaacgcacgcgcttctctccgccgcaatatctcaagttagataagcaagttttagcttctgcttcctgtcgctatgctcatgaagttaagtctccttttaagaatgctgctgttttatccgattcttatagtagtgaggcatccgaactagctgatatagagtgcgacaatcttggatttgggttacttcctactgattatatgtatatgatgaaatgttctcaaggtggaaacttctctaaaggtgaattacaacggcttgggaatattgaattaaatccctcagctgggatcttaaattatgggcagggctgatttcttggtctcatgcccgactgttatctgcgtggtaatattctttttttttcgccctgaggagaatgc

SEQ ID NO: 4509 - DNA, 429 bp, Gossypium hirsutum
  Clone ID: GOSHI-09MAY01-C32112_1
gcgtggtgttgcaggtcttcgttacgcacttgaagttgcgaaacatggatctggggcgagtatcaccaaggccgagcctcatgagaggaatacgaactatgcacaaggtggtgttagtgcagtcctgtgtccatctgattctgtagagagtcacatgcaggatacaatcgtagcaggagcttatctttgcgatgaggagtctgtcaaagttgtctgtactgaaggacctgatagaatccgagaattgattgcaatgggggcttcgcttgaccatggtgatgatggaaatttgcatctggcaagggaaggcggtcattctcatcaccgaatcgttcatgctgctgatatgactggacgagacattgatcgggctttactcgatgcacttgtcaatgatcctaatatttctgtgttaaacaccatttcgca

SEQ ID NO: 4510 - DNA, 649 bp, Gossypium hirsutum
  Clone ID: GOSHI-09MAY01-C32082_1
caaacataaggcataaactgttgttgttggttttttttttttttcttttccttcagcttttgggtcttgctctggtttaccccgaaaaagttgttttctgtatggagaaatcgatgaattcgacaactttagctcgaacacaatcggagcaactggtgattgagacgcaggcggcggcgacgccgacgtccaagtcaccaacgatgcaaaatgaagatgcaccgataacatcggaaaacatgggaactctgtcgcggaagtcaagccagcggatggtggtgggtgcatcgccggggcggagcgagcggcggttacaacaataacacccacattaggaaggctagaagtgctcaggtgaagatggacgtggaagagttgagcaacggggctgctctcagccgcgcctctagcgctagcttgggctttatctttttccttcactggcttcaccgtcccacctgatgaaatcactgattccaaacccttcagcgacgacgatattcctgaagacattgaagctggcacctgtaagccgaaatttcagacagaacctactttgccaatatatctaaagttcagtgatgtgacttacaaggtgatcaccaaaggaatgacaacttctgaagagagggatatattgaatggaatc

SEQ ID NO: 4511 - DNA, 296 bp, Gossypium hirsutum
  Clone ID: GOSHI-09MAY01-C32222_1
gtgctaagttctgttatggtatcacaatcactctcatcgcctataacatcgtatctgcacgagctgcggctgaatacttgcgggtgaccgaagatgtggcgaaggggactttagtttacaagctccaagtcatcttcaattcctgcatcttacatggctggagggactctattgtgactcttcacaccaccaaagcctttcctttatgggctgaagaccttacgattacgagcagatctatcgaaaccattgctttgaacgcgtgcacacactcttgcaaggtgaacttgtcacat

SEQ ID NO: 4512 - DNA, 651 bp, Gossypium hirsutum
  Clone ID: GOSHI-09MAY01-C33982_1
gctttctccaaatgaccatgcctcctcaagtgattcccgacaagacccttcaaggtctctatggtttgggtagagaaaacaattcttctcctcaccctagaaggttggaagggaaagttgctattgtgacgggaggagcaagagggattggggaggcaacagtgaggctttttgcaaggcatggtgctaaggtagtgatcgcagatgtggaagacacgcttggaactgcgttggctaattctttgtctccttgtgtcacttttgttcattgtgatgttagcctggaagaagacattgagaatttagtaagctcaacagtttcccgatatgggcggcttgatatcctttttaacaatgctggggtgcttgggaatcagagatagcataaaagcattgttgatttcgacgtggatgagttcgataatataatgagagtgaacgtgaggggaatggcgctgggaatcaagcatgctgcacgtgcaatgattccccgaggtggtgggttcatcattttgttctgaatatggtggctggtcctgctaccgctcgaaccgcattgtgatgacaaaacgcgtgtgactaggcgatggataaggactgttttcatcgggctcactttctggatgctgaagcccacttaaaagaacgctt

SEQ ID NO: 4513 - DNA, 331 bp, Gossypium hirsutum
  Clone ID: LIB3135-011-Q1-K1-B2
tgaataactatggcagagcaagtgctctaatccagcatgaatggcgcccaaaatcgctcatcacaatatctggagaggtggacaccggagcaattgaaaaaagtgctaaagttgggctggccttggcactcaagccctatgcaaaggcaaaactgtttttgttgtgtcatatggaaggtgggccttaattttgattggttgaggacttggagaaaaatagtgtactttcatggattataaaaataatgttattggcaaaccgaaattagcaatttgctttgttgaacaagtgttgcttacatctaattagttcaacttgtttacttctttc

SEQ ID NO: 4514 - DNA, 242 bp, Gossypium hirsutum
  Clone ID: LIB3148-016-Q1-K1-D4
cccacgcgtccggaaaaaagtgctaaagttgggctgtccttggcactcaagccctaggcagtggcggaactgtttttgttgtgtcagatggaaggtgggccttaattttgattggtttgaggactttggagaaaaataatgtactttcatggattataaaaataatgttattggcaaaaaaaaaaaaaaaaaaaaaaaaaaaaaaagataaaaataaaatgaaaaaatataaaaaaataaag

SEQ ID NO: 4515 - DNA, 351 bp, Gossypium hirsutum
  Clone ID: LIB3149-063-Q1-K1-C11
tgcttgtcttcttttacaggtacggaggcaacgtggcgggggtagctggcgcgtacggaggctgctggtggcgcagttgctgctagggttagggtttgctgcaaacatggtttaggttttgggcctttttgggcttagggttttattagttttgggtttttaatttaggttatataatttggattttgatgatggactattaattatttggttttttttatgttttttaattgtttgggctggttaatagtttgggcccgggtaaatttgggtacttacaacggtaattatacttttttaatataaaaataaattgatgtatttatttctttaaatgtatagaattgaatc

SEQ ID NO: 4516 - DNA, 331 bp, Gossypium hirsutum
  Clone ID: LIB3135-011-Q1-K1-E2
ctcttgcagttgtgtccgtcttttgcttgtcttcttttgcaggtacggaggcaacgtggcgggggtagctggcgcgtacggaggctgctggtggcgcaactgctgctagggctagggtttgctgaaatttggcttagatattgggcctatcgggccatcagggtcatgggttagagatggggttgattagttttgtttgggtttataaatgggctattgggtatgatatgtaatagattgataattggaccattcaattaatttatatttggtttgaaaaaaaaatatgggtaaaagaagattgttccaagtgtttgctgtaccatcattg

SEQ ID NO: 4517 - DNA, 614 bp, Gossypium hirsutum
  Clone ID: GOSHI-09MAY01-C33962_1
gctagaatgggtagtgcttggctacgccgcgggtgcagaagccatcatggttctcctcctcacgctacctggcctcgacggtctccgtaagggcttgatcgccgtcactcgtggcctcctcaaacccttcttgtcggtggtcccgttttgcctcttccttctgatggatatttactggaaatacgagacacggcctagctgtgagggcgattcttgtactccttccgagcatctccgtcaccagaaatccattatgaagagccaacgcaacgcgcttctcatagccgccgctctccttttctattggcttctttactctgttactggccttgttgttaaggtcgagcagttgaatcagcgccttgagaggcttaaaaatcgggattgagtgagataagtgctttttttttttacaacgcttgtgtttgggctacactttttgttgtgatgttttaaatttagaattccctctctgttgtgtttggctactatgaaggattttattatcttacaagaattacatggtcatattgtttaatctctgttttctccaagttgtaatttgttaggcttttggttaaaattatgctctcttatgattttgtttttgattc

SEQ ID NO: 4518 - DNA, 710 bp, Gossypium hirsutum
  Clone ID: GOSHI-09MAY01-C33572_1
tgtacacccagcaccagcctcttcttttccaaactatggaaagcataatcaaaggacgactgagagatgtggactacccatatgttggaaatcattttcagcagggcaggccacaggaggtggttatattcatcattggtggaacaacttatgaggaatcgcgctctgttgctcagctaaatgccagcaattctggaattcgttttataattggtggaacagcagttctcaattctaagaggtttctgaaggacttagaagaagctcaggggatagctcgaagcaatgccaatgttgtttaagtccaaattgtggcgtatatatatacgggttgagcatgagaagcatgtaaataagcatttgtgggtcattagtttagatgattggcagtggaactgtgttggtaaaagcaatatgacaaggtgagactcgtgaaatcagctcattgtctgtgtttaagatgagataaatggttcgacgatcaccattgcagagtataagtgaaaggtagaattggctaaccccctcattgtattcgtctttagggggcattaccatatttcttctacataaaattttgtaatttagtattcaactccctccttttgtgttttgctggtgtgtacctcattgatgcatctagcattcacccatgtatttgtatccgcatctgattgtcaaaaatggaagctatagttttctctttaaac

SEQ ID NO: 4519 - DNA, 871 bp, Gossypium hirsutum
  Clone ID: GOSHI-09MAY01-C33562_1
cccacgcgtccggaagaagtgaagcttttgaagacctggtcaagcgcttttggattaagggttgtttgggcgttgaagctcaaaggtataccatatgaagcaatagatgaagatctgtccaacaagagcgctttgcttcttcagtataaccctgtccacaagaaaatcccagttcttgttcacaatgggaaccccatctctgaatcccttgtgattcttgaatatattgatgagacatggaagcaaaatcccatattgccccaagatcctctacacagagccagggaacggttctgggccaaatttaatgatgaaaagctactaccatcagtatggggtgctttcaccaaagaagggaaagaccgagaggaagctatggctgcaacgatggagaacctgaaattcgtagaagaagagctgaaaggaaagaaattcttcagtggagagaagataggcctggtagatcttgttttcggttggcttgctaacttgatctctatttttgaagaggtatctggcttcaacatagttggtgagggatatccattgttatcggcctggatgcaagaattttcagaactccctgtgattaaagatacctggcctcctcgtgacaagatgatcatcaagtatcaagcactttatgacaaataccatcctgcagaatgacctgttcctgaggtttttccattggtagtttacattaaaagtttaggcatcatattgctgcaataagttcaaaactatgtgtgtagacaaggccttggagcttatttaccattaatgagggattttcctttgtaatctgtcaagaaactgaagttgtaattgttgaaccagattgcctcgtgaattatatcagttgttgctg

SEQ ID NO: 4520 - DNA, 448 bp, Gossypium hirsutum
  Clone ID: LIB3135-005-Q1-K1-E1
cctgaggaatctcttgcttcaacgaccgagaaccggttactcgtatatatcgagctggtgaatacgtcattctccaaagggctgacatttgccctggtatatcttccgttcggttgacttgctaactcgatccctacttttgaagaggatgctgacttcatcataccgggtgatggatatccattgatatccccctcgatgcaagaattttcagaactgaccatgattaaagatacctcgcccattcttgtcctgatattcatatattcccaagcactgtatgacatatacgattctgcataatgacctgttcctgctgacttatcattggtagttgacattacaagtttatgcatcatattgctgcaataagttcaaaactatgtgtgtagacaaggcccttggagcttatttaccataaatgaagggattttcggttgtaatctgt

SEQ ID NO: 4521 - DNA, 397 bp, Gossypium hirsutum
  Clone ID: LIB3135-023-Q1-K1-H12
gaagaagtgaagcttttgaagacctggtcaagcgcttatggattaagggttgtttgggcgttgaagctcaaaggtataccatatgaagcaattgatgaagatctgttcaacaagagcgctatgcttcttcagtataaccctgtgcacaagaaaatcccagttcttgttcacaatgggaaccccatctatgaatcccttgtgattcttgaatatattgatgagacatggaagcaaaatcccatattgccccaagatcctctacacagagccagggaacggctctgggccaaatttaatgatgaaaagttaaggatcttctgttgctgcatacattggagaaaacataaacgtatctctgttctggttgctggcgcaactactaccatcagcatggggt

SEQ ID NO: 4522 - DNA, 430 bp, Gossypium hirsutum
  Clone ID: GOSHI-09MAY01-C33452_1
aagcggatggccttcagctggtgggttcgggacgtcggttgataacgcagccacttatctatcaaacttgattaaacatgtccaaaaaggtaccccaaagaggccaggaaaagctatagagacatatttgtttgcattgtttgatgaaaaccaaaaatcgggtccagagctagagagacactttggcttatttttaccaaacaagcagccaaaatatcagctccgttttggtgggggaaggcattgggatattgcttctaaggaatataatgcaacatttcctcttaaatatgatatgtaaaaatctgcaaagcttggggaatttggggagttttggccgccttgtgtgtttctcttttattatcctatgtatttttcgtttaaataaggagaactctcatgggttaattttgattgtatttttatcatc

SEQ ID NO: 4523 - DNA, 460 bp, Gossypium hirsutum
  Clone ID: GOSHI-09MAY01-C33442_2
accccacgcgtccgcttctttccacacttgaaaatcttcatggttagcttctgcaagagggagtgggcaagattctttgggcaatttctgtttgaaagatcacatttcctcttccaactctccaacaaagtccatctcgaagaagaccctttgctacccaaatactcttccaggtaaatgaagatgcacatctccaccttggctatctttcttcaaactgtaggagacaaatgtgcaagatgcgccgacttcaagcaatagaaaacaaaaaacagcagataaacctagaactcttgccagagacgacagacaataacgtgctggggtagcaaacctttctttttatatttataataaaatttaccaatactatacatacatgaaaaaaaaagtagaaaatttccaatttctttcttttccctgtggttgcgtttcccccctcccttccttccccttccct

SEQ ID NO: 4524 - DNA, 741 bp, Gossypium hirsutum
  Clone ID: GOSHI-09MAY01-C33442_1
tttactgattccgtgagctccaaatgaaccataaagcgcagcaaaaagtccaacactattccttagtactcttttcaaaaacctagggcattgtttaaagacatggtggctatcctcttctccggagcaacaacgaggacatctgacgttagtggtcactcgcccgcgcctccgcttctgcaagagggatttgtcaagattctttgggcaatttctgtttgaaagatcacatttcctcttccaactctccaacaaagtccatctcgaagaagaccctttgctacccaaatactcttccaggtaaatgaagatgcagatctccaccttggctatctttcttcaaactgtaggagacaaatgtgcaagatgcgccgacttcaagcaatagaaaacaaaaaacagcagaaaaacctagaactcttgccagagacgacagacaataacgtgctggggtagcaaactttctttttatatttataataaaatttacaatactataaatacatgaaaaaaaaagtagaaaatttccaatttctttcttttcaaaagaaaaataattaaattttaaaaaaaaaaaaaaaaaagaaagaaaaaaaaaaggatgggggggtcggtataaagggattcgagcttacgtaccccttgcttcgaggtactaaaatttaatatactgcccgtaaatttacaacactgggcctgggaaaacaacgtcgttactgaaaaaactctggttgcaccaaa

SEQ ID NO: 4525 - DNA, 426 bp, Gossypium hirsutum
  Clone ID: LIB3148-023-Q1-K1-G2
gattcggtgagctctaaatgaaccataaggagcagcaaaaagtccagcactgttctttagtactctttgcaaaaacccatattgcagggcattgtctaaagacatggtggctatcctcttctccggagcaataacgaggacatctgacgttagtggtcactcgcttgtgtctaaggttgactagtgtaggtatatagttccaggagatccgccatattgttaatgtaattttttatggtagttataaattccatagttttctacagaagtctttgattttggtctgtattaagtaaactattaggatccaagctagcatattgtaatagtttataggcgctccgtactgagtattctccggaaagttcttctttccacacttgaaaatcttcatggttagcttctaaaaaaaaaaaaaaagggcgg

SEQ ID NO: 4526 - DNA, 408 bp, Gossypium hirsutum
  Clone ID: GOSHI-09MAY01-C33462_1
cttttaatggggaaaccacacgttgtggtaatcccttatccagcacaaggccatgttattcctctcgtggaactctcccaaaacttagccaaacaaggcatcaaaatcagctttgttaacacagtgtttaatcacaagagggtcctagatgcattcggcgagaaggtggatgaaaatggcttacttcatctactttcagtccccgatggactggaagatggggaagataggaatcagttagggaagttaactgaaagattatgccaggttatgcctactcaactcaaggagctcattcataaggttaatggatcagatgatgataagatttcatgtgttttagctgatattagcatggggttggctcttgatgttgcggcggagttggggattcctacggtgggcttg

SEQ ID NO: 4527 - DNA, 420 bp, Gossypium hirsutum
  Clone ID: GOSHI-09MAY01-C33752_1
gttttttgtaaatgtgtgtaaccgattacaagattagaatctggctttatagccgaaaagaaagaggaaaataaatcaaaatacaatatgtgtttttttggttggatttgctgctgtgtttggctggttcttttgcaggtacggttgtgcgctcgggtaccgggccgtgtgctggcgttcggggcgtgggcctggcgccaggaggccgtaccgaggcctggaggctgggactgctgccgcgcaaacaagctgctagggttctgccctaatttttgagtcttgggtcacttgggcttatcgtatttgggctcgggtttatttgtaaatgggttgatttgggcttgtatagggtcatgtattaattttgggttttggacttgtaaaaaggatatttaatggactgtggttatttaattattt

SEQ ID NO: 4528 - DNA, 947 bp, Gossypium hirsutum
  Clone ID: GOSHI-09MAY01-C33712_1
aagtttgtagattaaaattgtagaggcttgaaagaattgtttataaacttgctaacaaataaatccgaactatttggctgtctttgccctctagcccttgatattctcacccttatatagagtatgataccattgatgcatctaggaaggtggaagaagtgatacaactttcggtctctcaccctttttactttaatttattgctgcaattttattaaatgctttcctttagcttaaagcttaaatcctgccatagctgtatgatgctatttaggcagtgacttcgtgttgatgttaaaaaagtagttggatgatataaactagagaattgaagaaaagataccatggaatgacagttaaaaatggcatatgcattaaattgtcatggaccacatggtgatgctgttgcctttataaggcccaatggtgattcagacctaactaatttatcttttatttttttgggcaagctaatttatcatttctaaaggttcttggattggagcggttgaaatctgaactacagtcacgtgggctaaaatgtgggggtactttgcaagagcgagctgctcgtctgtttctgctaaaatctacccctttagataagcttccaaagtccctgcttgcgaacaagtgaaaagctatgtagtaggctaaggcttcatatcacctcatagtgtattgctaaggagtgctcctttttgtcaaatagagaaatgtatagatttctttcgcttctgttcaatattgtataacttggttcttgtaagctgaaactctgttagctatgaggggatattaactaatggtctctgtaagttacacttcgcctaaactgaattttcagatttgtggaatgatcatggtgataagaatgtggtgcgttagcttattgaaacccccagctctctgccccgcttctcttttctttgaagttattttcaaac

SEQ ID NO: 4529 - DNA, 620 bp, Gossypium hirsutum
  Clone ID: GOSHI-09MAY01-C33012_1
ggcaaatactacatttgcctcagctattcaaattggtgaccctgtttctattgatagagccgcgtactgctttgaaaaattcaaatgggattgtcgaggaagcgactgaggaggagttaatggatgcaatggcacaggcggattctacaggaatgttcatttgccctcatactggagtcgcattgactgctttaatgaagcttaggaagagtggggttatcggagctggagacagaactgttgtggttagtacagctcatggattgaagtttacacagtccaagggttgactaccactcgaaggagattccggatatggcttgccagtttgctaacccaccgatgcaagtgaaggcggattttggttctgttatggatgtgctgatgaagtatttgggagataaagccccaaagcactaggtgctgcattttgtaagtttagcagtttgtactctgagatttatgctttggttttaattttagtgttgccttgctttttcattttgtggtatacgaatctcgatctagattgccctagtttagaaatcatctgtcagccacgttaataatctaaacttgtatgagatttatattactgttgcatcaatttcttgttcaat

SEQ ID NO: 4530 - DNA, 442 bp, Gossypium hirsutum
  Clone ID: GOSHI-09MAY01-C33322_1
gccactctaactgttttgatcagtttcgcaagtcattttcagatacctcctcgacaacaccacaaaatcctcaacaaggagctcaacttgtaaccacaaactctatcaccagttgtgaatgcaacttcagaatcaactgtctccgagttgcgggaagaaaggactgaggaaggtccctccaacccatctattgtctcatgtgaaaaccaggtgctcccaaaactagtatgccctctatgtcgtggtgaggtaaaagattgggttgttgtagagcctgctcgtcatttcatgaatgccaaatctagaagctgttcctctgaaacatgtaattctactggttcctataaagacctaaggaaacatgctagactagagcaccctgctgcccgcccatctgaggctgatcctgagcgacaacgaaactggaggaggttggagcgtc

SEQ ID NO: 4531 - DNA, 531 bp, Gossypium hirsutum
  Clone ID: GOSHI-09MAY01-C28912_1
gtctttctccttcacctattagcccaaaaaataaatgaataaaagaaaatttactgtttcactgaatccaaactttttttatcttcttcttcgttaactggcttcctataaccctaaccctaaccctaattaccggttcgaatctcccattctccatcatcccttttagccattctccccatttcatactgtgattataattatgccatgcgaggcttcatttcttgcatattgtgccagatccacacgaagaatctgaatatttatcattgtattttatgatcgggttaaattcgtggattttgagcggcgggttcatctcagtgggcatctgattgggtggtgacgatgtcaaacttatatggcgattataaccaaaggattgattatgtattcaaagtgggtttgattggggattcagcagttgggaaatctcagctgcttgctcgtttcgccaggaacgaattcagtgtggattcaaaagccacaattggtgttgaattccagactaaaacccttgtaattgataac

SEQ ID NO: 4532 - DNA, 682 bp, Gossypium hirsutum
  Clone ID: GOSHI-09MAY01-C28802_1
ccgcattattccgctttctttttatctgtgtacttattgacccctatcagtcaactgtcaatcaggttcctttcttttctgtcgatccatctccaaagtttattgcttaaggatcctttcaatcagtgattctggtgtgttaccaggggcggatgtaaagcctttaggcttggcacttggtgcccatgtgtgttccagagggatgttagcctacaagctaggcagttgatgcccaatttttgtagattaaggtttgtggaaatggacgatcgaatcaactcaaagaatcattctatccagatatcttttggttattttttatatgtttatctttgggttatatggcatgtaataggtgtgttttgttaatgttttgaatatttactacatgtgttacatatgagattgatccaaagatgattaagcttagtattagcttgcttgtgtaggtgcccttaatcatgtgtgaatatggtcatataaaattgctttggtcattggatataaacgttatgtaagtatttgaatcatggtatgaatgattaagaataaatggtgaaatataaacatgcatggaaagaatcatatactaacctaaaatatgaaccaaatatgataacaccatttacttaatgtatttatccgccgaatcatatctagcataataaacaggggcggccgt

SEQ ID NO: 4533 - DNA, 463 bp, Gossypium hirsutum
  Clone ID: LIB3189-005-P1-K1-H2
caggttcctttcttttctgtcgatccatctccaaagttttattgcttaaggatcctttcaatcaggggcggatgtaaagcctttaggcttggcacttggtgcccatgtgtgttccagagggatgttagcctacaagctaggcagttgatgcccaatttttgtagattaaggtttgtggaaatggacgatcgaatcaactcaaagaatcattctatccagatatcttttggttattttttatatgtttatctttgggttatatggcatgtaataggtgtgttttgttaatgttttgaatatttactacatgtgttacatatgagattgatccaaagatgattaagcttagtattagcttgcttgtgtatgtgcctttaatcatgggtgaatatggtcatataaaattgttttggtcattggatataaacgttatgtaaggatttgaattatggtatgaatgaat

SEQ ID NO: 4534 - DNA, 406 bp, Gossypium hirsutum
  Clone ID: LIB3272-037-P1-K1-H8
ttctttttatcttttctacaaaaagacccctatcagacaactgtcaatcaggttcctttcttttctgtcgatccatctccaaagtttattgcttaaggatcctttcaatcagggttacttaatggatcaactgtttctattatattatagtgattctggtgtgttaccaggggcggatgtaaagcctttaggcttggcacttggtgcccatgtgtgttccagagggatgttagcctacaagctaggcagttgatgcccaagtatgttctcggttggtttagcttgtttaagtgttttggtgtgttctggatggttaaccatgtaaacgaatctattatatcggtcatcgggcagatttttaatggttacatgatttggaattcatcttgtaaatggttatatgcct

SEQ ID NO: 4535 - DNA, 405 bp, Gossypium hirsutum
  Clone ID: LIB3048-039-Q1-L1-C6
atttattttcaagttgctctttgttaatttcaatagatttggtttgtgaagacaatcaaacttagggattcaattcattcttaatacaaatcaaacattttcttagactttatactttgctttattcttcatgttctatctttatatcatttctattgttctatctttataccatttctatattgtttttgaaaatcatgaagaactaatccttctataagggattaacgagtagaggtatgatttgttaactattttgtagggttacttaatggatcaactgtttctattatattatagtgattctggtgtgttaccaggggcggatgtaaagcctttaagcttggcacttggtgcccatgtgtgttccagagggatgttagcctacaagctaggcagttgatg

SEQ ID NO: 4536 - DNA, 675 bp, Gossypium hirsutum
  Clone ID: GOSHI-09MAY01-C28462_1
cagatcctcaaaaatccactccttttgcttcccatggtcttggtggatcagatctggttttgcagccattgaagaagctcaatcaggtcaagaaaaggccaggtggggcttatgcatcactatcagaaggagctgaatatcactcccaaagaccagcggcgcctctcttggacactataaactatccaattcatatgaaaaatctctctgtcaaggaactgaaacaactatctgaagaactgcggtctgatgtggttttcaatgtttcaaaaactgggggtcacttgggttcaagccttggtgtggttgaactcactgtggctcttcattatgtcttcaatgcccctagagacaagatattgtgggatgttggtcatcagtcttaccctcacaaaatcttgactgggagaagacataagatgcataccatgaggcaaactaatggattggccggattcacgaaacggtcggagagtgaatacgattgcttcgggactggtcacagttcaaccacaatctctgcaggcttggggatggctgtgggaagggatctgaaaggtgaaaggaatcatgttgttgctgtcataggtgatggtgctatgactgcaggacaagcttaccaagcaatgaacaatgccggatatcttgattctgatatgattggtattcttaatg

SEQ ID NO: 4537 - DNA, 329 bp, Gossypium hirsutum
  Clone ID: GOSHI-09MAY01-C28172_1
taaatagaaagtagacgatagccactaactatgatggaaacctagatcaaagaagaaaaatcaaacatcattactacttgtttacttttagtttgagctgatatggtgtgtctatgcagattatattgtggagagttcatttccatcttgaacattaatatcttactctgcattttaccttttgggttgaggcaggtatcataaatgtacaatccgggtttgtctgtgattgcatgataatatgattcgtccatgattttcatgaattaatttatttgtacaattaaggcacaagaacttgtgtgtttaagttataatttcttttttat

SEQ ID NO: 4538 - DNA, 401 bp, Gossypium hirsutum
  Clone ID: GOSHI-09MAY01-C28032_1
ggggctcggaagctagggcagattctttcccagtctgaagaaaccctaggagatgaacttcataagtttttctcgaacactctggataggcatggaaatggacagaggcctgatgttcaagatcctgctccattgtctagatttagaggacttggtgcaacacaatcagtgtcaggtacagagtcatgtcaagaagatcaaaacttttatgaatcagaatcttcaaattcaagtactgtgactgggaattatagatcttctgataatgaggggtcactgtgcacagtctataatggggatatgtctgagaggggaacacatgttggtataacctttaaagagccacagggttctgcaaatgcatcaagtatttcagaaatccgtctcacaggggatgctaa

SEQ ID NO: 4539 - DNA, 1160 bp, Gossypium hirsutum
  Clone ID: GOSHI-09MAY01-C28352_1
aaaaaaattttttttttttattttataaaatttatcgtcgtgttttttttttctttttttttatttttttttttgtttttggttttttctatttttcaaggaatttgacaaatttcattgaatatatattataaggtgaagagtatatatttgcattagggacatgcttacattttttaccaaaaaggaaaaggggactaagagcactacactaagaggaaggaaagttttgtgggagtaccagacacattaaggttcacaagttggccggttggctggcttcttccatcttcgagattgaaacggtcgcattgcgagtgacaaaacttactcgagctggcatgtcggtactgacaaaagctggaagagatcgatatagtaaggtggcaagatcaaatttgtgcatctatgaactgaccattctatggcacttgattgaatctttttataagtggtgtcgactcagccacctttttctcgttcgtggtttggtagcagatggttttatagatggcgccatggtggcattcgtcgatcattcttgaagaactagattcagttcttgtgcacatcttgctatcacaccacctctcctttcgagtggtggaagaagtttcagaatcttttgcagctgcgtgaaacactgattgcagcattctcgcctttgctcagcatgtaaatcgacaccaataccacgtgggggtggaacagttgagcgtatcattggaccaaatacagctacaagcttcaaaagcatctccaacgagatatttacgtgcctttccgttttactatctaataagcccttaagcacaggaagcaggccagaaaacagatccaaggtaagtatctccattttttcccagcattccactgatttcaccgacttgcacagaatgatccggcagcttctgtagggcaccgattgcacctttaatgttattcttttcccaaaaatgtcgcaccacctgtaattttgtcaagcgagacctaagagtgcttaagaatatatcatgtgtctgtcattagagctttccagcttaatgattcccatcatacaggagtcaattgagtgtgaccctttgaacacttggctttacaataatcagtagcattgcccatccttgagcagaactcaatcccccccgagaatttgcgga

SEQ ID NO: 4540 - DNA, 669 bp, Gossypium hirsutum
  Clone ID: GOSHI-09MAY01-C29982_1
gtcttcaacctcggcaaatggcgttattttcttcggcgagggtccttacgtgttcctccctggtgttgatgcatcacagtcgcttacttacacgccactcttcataaaccccgtaagcacagcatccgctttccctatgggcgaagcctccgccgaatatttcatcggcgtaaagtccatcaaggtaaacgaaaactccatctcattgaatacatctttattatccatcaacaacgaagggtgttggtggcacaaaaatcagcacccgtggatccctacactgttctcgaatcttcaatcttcaaggccgccaccggagcctccacttagtgaagctactgccatgaacatcagtagagtgcccggtgtggctccatttgaggtgtgtttcaccccggtaacatagcagcacgagattggaccagccgtgccatcgatagaccttgtgctgcagaacgaacgtgtttgagaatgtttggttcgaactcgatggtcgaggttaacaggacgtgttgtgtcttggattgtgaatgtggtcgaaccgactacttcattgtatggaggcaccatttgagacacgctgctcattgatttgcacttcaggctggatcagcgcacctatggcagcaactactggcactcactccatcacgctaattaccgaacctg

SEQ ID NO: 4541 - DNA, 652 bp, Gossypium hirsutum
  Clone ID: GOSHI-09MAY01-C29972_1
cccacgcgtccgcccacgcgtccgcccactcgtccgtaatgatacatgggctagcatgagtacaatagctgatataaatgacaaatgggcttcccatgctggacctggaggatggaatgatcctgatatgctggaagttggtaatggaggcatgacttatcaggaataccgtgctcattttagcatttgggctttgatgaaggcccctcttttaattggttgtgatgtaagaaacatgactgctgaaacccttgaaattttaagcaataaggaggtcatttctgtaaaccaagactcactaggtgtccagggaaggaaagtttatgtttctggagaagctaactgccttcaggtttgggcaggacctttgtctggcaatcgcttagtcgtagctttctggaatagatgttccgaagctgcaactataacagctaggtgggatgtcccccgtcttgaatctagcacccatgtctcaataagagatttgtggcagcacaaagaggtcaaggaaaatgcagtggcatcatttggtgctaaagttgattcgcatgactgtcatgtgtacattttcactcccaagacagtggctcactcagaaagttaggttgttgctcataatggtatcccttttggggttctctttggtattact

SEQ ID NO: 4542 - DNA, 701 bp, Gossypium hirsutum
  Clone ID: GOSHI-09MAY01-C29632_1
gcggaatatatgctcttgcttttactgcatcaaacctctcaatctggtggagccaccattacttcaagtaaagaaattgggatttattcttcggagaaggctggagtaatcaaaagcgagaacgaagagccactacagaagttttcagatggaagtgcaaaattctgaacaagggcagataattgaaatacgtggagatgtgccagctgcagagacaagcctaggtggaagtacgatttgtggaggcgcagcatgtgggttttctgatgctcaaaccatttctaaagatgcaaacgaacgtgcagcctctatgcggaaattgttaacagcagtagtgctgtgcattgtctttatgagtgttgaagtagccggaggaattaaagccaacagtcttgcaatcttaactgatgcagctcatctcttgtcagatgttgcagcatttgcaatttccttgttttctctctgggcatcagggtgggaggcaactcctcgtcaaacatatggattcttcaggattgaaattcttggtgcccttgtttccatccagatgatatggcttctagctggcatccttgtttatgaagccatagctagacttatccatgatactggtggaagttcgaggctttctcatgttcgcggtttctgcatttggtctagtggttaatattgctatggctctcctgttgggtcacgaccat

SEQ ID NO: 4543 - DNA, 603 bp, Gossypium hirsutum
  Clone ID: GOSHI-09MAY01-C29002_1
cccactcgtccgcggacgcgtgggtggctagcaagtctcatcaagatgcagatcccaatgctatcatagcaaacgagggagattttatatttaaacccaaagcatttaacattgtatggggaaatgacagtcgttattggcgcattcctcgctcacctataccagatgagcaggaagcagcagagctgattcaggtatcttggttggaagtaacgggttcagtgaaactagagcctttaaccagacatgaaatcagctttaaactcagcttcagaagggattcttttggatggagcggggcacctattttcttgatggccaaggtagggaagaaaggtaagtacaagtggaaaaggctcaaggaactagacaacttgcctaaggaccccattatggttccaaccgatgattccttcactatcgaacctattccttcaaacgaacccgacaaaaggctttattttggtttgtatgatgtctggagtgggaaatggaagggaggttgaaagttcatgacgccatcgtcaggaaaataggttacaactgaatccatccaatcagaaggcatttatttgattctgtttatataacatatataatata

SEQ ID NO: 4544 - DNA, 598 bp, Gossypium hirsutum
  unsure (1)..(598): unsure at all n locations
  Clone ID: AI054918.1
aatggctagcaaagtctcatcaagaagcagatcccaatgctatcatagcaaacgagggaggttttatatttaaacccaaagcatttaacattgtatggggaagtgacactcgttattggcgcattcctcgctcacctattccagagtacgaagttagaacaaatcttatttatttattcattatccttgcatttttggagaaataagttgattaaatttgtggggaagtaaaaataatgggtaggaaacgtggggttgtntcagtgagcaggaagcagcagagctgatttaggtatcttgtggggaagaaacggtttcagtgaaactagagccttaaccagatatgaaatcagctttaaactcagcttcaaagggattcttttggatggagcggggacctattttcttgatgcncagtnnggaagaaagggcaatacnagtggaaaggctcagggactagacaactgcctaaggacccattatggtccaccgatgattcctcatatcgaacctatcagactcncgacaaagcttatttggtngatgaatctgatgggaaaggaagagttgaagtctgagcctctcaaaatagttacac

SEQ ID NO: 4545 - DNA, 861 bp, Gossypium hirsutum
  Clone ID: GOSHI-09MAY01-C29342_1
cccacgcgtacacataattgctaggtccatacatggaccccactgatgcatggtattttaagacgtacatgggtgctggtgaatacgggttcgggctgcaagctatgccacttgacccgcttaatgattgtccaagaaatgcatattatatggatggggtgttcgccgccggtgatggtgtaccctatgtccgatcaaacatggtctgcatgtttgagaggtacacaggtgatatagggtggcggcatgcagagagtccaattacgggtatggagattaaggaagtaaggccaaaggtgacattagtggttcgaatggctgcatcggtggctaactatgattatattgttgactgggagttccaaacagatggacttatcaggattaaggttggacttagcggcattttgatggtgaaagggactgcatatgagaacatgaatcaagtggaagggcaagaaaatctgttcggtacccttctgtctgaaaacgtcattggcgtcatccatgatcattacatcacattctacttggatatggacatagacggctctgataattcctttgttaacgtaaatatcaaaaggcaagaaacttctccaggagagtcaccaaggaaaagctatctaaaagctgttagaaatgtggctaaaacagagaaagatgctcaaattcaacttaaactctatgacccatcggagttccatgttatcaatccaactaaaaagacaagggttgggaaccctgtcgggtacaaggttgttcctggtggcacagcagctagtttgctggatcatgatgacccaccacagaaaagaggtgcattcacaaataaccaaatatgggtcacttcatataaca

SEQ ID NO: 4546 - DNA, 1553 bp, Gossypium hirsutum
  Clone ID: GOSHI-09MAY01-C29372_1
aaaatccttactttctcagaatagatcacatcgcagtttctcatttccctcgcttcacttattttgttcacatatggacggactgatcaagggtttactggacgtcgctattggccacgagggagataatgagtctcaagatgaacgctccagatccagttcggcgcaggcggtgtcaggggatcaggaacaccaacgagatgaacgctccagatccagttgggcgcaggtggtgtcaggggatcagtatcacgaaaaacaggtgcagagccaatggcagggttcgggttcaagaccttcggggaggacccacaagaccgagtatgggggatatgaaaaaaatgaaggtgatgagcgacgacatggttataaccaaaataagtggaacagaaaggagcaagaagaggagaataatgatggctgggaaactgttggcaaaaagcctcgaagacggccacaaaaggttaatatggatcactggcaagggtataaacgacctcctagtgagcaagaatactctgatgaggttggaactggtactagcatcgaaccttcagaagaggaacttgctgactttttgcaagcttgcaacaggctgtggcaacttgatttaaaccgtctggaacctggaaaggattatcaaattgactgtggtgaaaggaagaaggttttccagaaggaagatatggcagaaggaagcctattttgttatgttgatgaggacatttttagaacaaaacctacatttgctcgtttttgttctctcttggataattacaacccaaatgctgggtgcaaggaagttgttacatctgaggagaaacaagagcaggctgcatttatcgaagaaatcagtagaactgcgcctattcaatatcttcacaagtacctgtctcggaagggcattgtatctgaaaactatcaagatttcaaaagaatgttgacaagcctatggtttgatctttatggtcgaggaggtacatctggttcctcttctgcttttgaacatgttttcgttggggaaatcaagcaacattgtgagcaagaagttagtggcttccacaattggcttcagttttacctagaagaagcaaaaggatgtgttgactatcatggttatatattaccccgaagacgtggggaaactcctgactccgagacacagttgctaacagttcagttcgaatggaatggggttcttaaatccgtgtcaagtacattggttggggtgagtcctgagtttgaaattgctctctatactctgtgtttcttcgtgggtggagaggataactatgtacagctgggtccatactctgttaacatcaagtgctaccgatttggaaataaaatcggttctgtatttccaatagcagaatgatgattttcagctctgtgtgttattattattattgttattatccagaagctacagaaacactgtagatatcatgttcatgttcatgttcatgttcctgtctagctttagtttatgatatatcataacatatcttttacttggatcttttaacttacaaaattgataattatgatat

SEQ ID NO: 4547 - DNA, 493 bp, Gossypium hirsutum
  Clone ID: GOSHI-09MAY01-C29242_1
gcgtgatcttcacggtttgcataactgggaggggctgattgagccactccatccttggttgagacgggaggttgtcaagtacggagagttcgttgaggcgacttacgatgcttttgatttcgatccattatcggagttctgtggaagctgtaggtacaacccgaataaactgtttgaagaactaggacttactaaacatggttacaaggttcccaagtacatttatgccatgtcccatgtcgatgttcccgaatggttcgagaggtcacattgtgcttggagcaaggagtcgagctggatggggtacgttgccgttagtggtcatgctgaaaccacgagaataggtaggccagatatcctcgtggcttgacggggtactgtggctccacccgagtggtatagtgacttaaaaacaagcctgcaacgtcttggcaagaccaatatcaaggtccaaagtggattcctcggcgtctactgctccaaaggtaagaac

SEQ ID NO: 4548 - DNA, 820 bp, Gossypium hirsutum
  Clone ID: GOSHI-09MAY01-C24952_1
acgtccacgcgtcgagcttaactgtggaggtaagtaaatatgctcgtttaagacatatgggggctttcattcaccgctccttcaaaagattcattccaagttatggtgttgtttagaaacttcgggtaatgctggagatcacaaccttgatttgagcttagggaattcaacctcgaagcaaacgaatctcgagttaggtggtgatagggcaaattgctatgggcgatcagcacggtctgccacctgaagctgattggcaatataggggatttaggtctaaggtaaatctgcaccaggagccttgtagaagcgatggtgctactcatggaagatcggatggatatagtgaggcagcgtcggtgcagctgttgagccaaactcttatccaatctccagcatcgattaagtctaatgaaatgcaaagatatggacagttcaggagacctggaaataacaatgtgtttcacattcctccatcatcttatcagattcattttccaagcagcagcaatggaggccgaataggaagcgatcttttactatccattagtgaacaacaatggccatcaggtcctcaccaaatggttggaaattctgcagcatcatcaggattcccatcgcagattagaccttcttctcaaacttggctgcagaaaaatgggttccactcactcatgagaccctcctaactcaaaaagtagccataaaaatgtctccgctaattaaaaaatatatttctgtttctccttggtgggcttgtaagtatgtcattttttaaatcccccctttcttttcctctacaactttcttcggaaatcac

SEQ ID NO: 4549 - DNA, 604 bp, Gossypium hirsutum
  Clone ID: GOSHI-09MAY01-C24932_1
cccacgcgtccgcccacgcgtccggagatgctgtgtactaaccgaagccgtcgaccagaccttgcttcagaggtgtataaggtgcttgaaccgattagaaatactattggacccttatcaacattccatgcagggtctggagagcttcgtcagcctcctgattctttcttttgtcccatttcaaaggaaatcatgacggacccacatgtggcagccgatggattcacctatgagttacgacagatacggagatggctggatggtgggcacaatacctctccttgcacgaatattccacttgctcatcgcaatctcatccctaaccacgcacttcgtaccgcaatcttagagtggtagaagcagcatcaccaccattaacgttgttcctcattccaggaacatatttgatcagtttcctactatttttccccatagcccatgttgtgcttttctttctatgtagtatcctttaagatggaaccttcatgtcgttgcttgtttaaataggatatgtacagtattaacctataaatattatctgtatatatgcatatgtctatgtatggatggatgattttccttaaatttacattaaatttataat

SEQ ID NO: 4550 - DNA, 1095 bp, Gossypium hirsutum
  Clone ID: GOSHI-09MAY01-C24892_1
gcgaagaagcaaatggggaggatgatttatcagatgatggttcacaggcaggagaaaagaagagaagacttaacatggagcaggtaaagactcttgagaagaactttgagttgggtaataagcttgaacctgagagaaaaatgcagctggctagggctcttggtttgcaaccaaggcagattgctatttggtttcaaaacagaagagctagatggaaaaccaacggactcgaaaaagactatgatctccttaagacacagtacgaagcgatcaaagcagataatgatgcactccaagctcagaaccaaaagctgcatgctgagataatggcactgaagagcagagaaccaactgagtctatcaacctcaataaagaaactgaaggctcttgcagtaacagaagtgagaacagctcagatgtaaagttggatatctcaagaacaccagcaattgacagccccttatctactcatccaacaagcagaaccttcttcccaacatccattaggccaacaggtggtgctgcacaactattccaaacctcatcgtcaaggcctgatcaccatcatccatgtcaaaagatggatcaaatggttaaagaagaaagcctcagcaacatgttctgcaccattgaagatcaaactgggttttggccatggcttgagcaaccacatttcaattgattcatagtgtgaactcattgaccatgctgtcaaacttggaacgttcttgatctaaagagggaaactgctggttatatataatcataatattgaatgttttggtaccttcagagtggtgtataaaagttgaattatattcagtttaagacttttcatcaggaggggctgaaaagataattatggaggaataaaagtgtgtgttttgggttatatatatttatatcaggtttgctaggcttattagagagagagatgttttctaggttagattaatgcgagacgaatttccaagttaataataacttagtaattttgctggtgatgactagttggtttgcagcagcatgcagctctagctagcctagcatgggccatgaaaacaataaaaaaggggattctctcttggttccat

SEQ ID NO: 4551 - DNA, 503 bp, Gossypium hirsutum
  Clone ID: GOSHI-09MAY01-C24582_1
cacacatgtcggtatgaggggtgtggatttgaccccaggacagaaacattgaattgcgcatcgctcgagtggtgctgaagagtgctcccatcttattattggatgaagctagctcgtccatcgaatctgagtctagccgagtggtccaggaggcacttgacacgctgataatggggaacaaaactaccattttgatagcccgtagagctgcaatgatgaggcatgttgacaacattgtagtacttaacggtggtcgaattgttgaggaagggacacatgattctttggtagccaaaaatggcttgtatgttcgtttaacgcaacctcatttcgggaagggcttgcgtcagcatcggctggtttaggttggcttgccagttgatcgtgccttgcttctgctcttctgtgctctactcatttcactcatttgaattgctggaactatgaccattctgtgagcttcacttctctcggttgaaaagaatcccaaatcagaaggggaa

SEQ ID NO: 4552 - DNA, 510 bp, Gossypium hirsutum
  Clone ID: GOSHI-09MAY01-C24572_1
cggacgcgtgggcgagaacctttgcaaggcttgagttctgtttacccctattacaggtcgaatctctcaagcagagatcagatacatccagagtcaactatttggtcaattattttcacttgaaagattcgggcttatgtatgttgctgaacattcatttctggtccattgtttgcaaaaacctctccagctgagcttctttctgtgtttccttttttcatcttcccaggcatcttattttactatggttcctagttaaatagaagctgtttattagacaaatgtgtaagaattaataacccttttggctgaataacataagatgtcagggctttcaatctttgatgaactttaaactgtgatttaattttgctgcttgttttcatgtttgcattcaatctcaaaataataaatttgtgaaatatatttgaaataaaaaaaaaccatatattaaaaatataaactgcttaaacgtaaaagatgtgcaaataaaaactattgtattaataa

SEQ ID NO: 4553 - DNA, 975 bp, Gossypium hirsutum
  Clone ID: GOSHI-09MAY01-C24462_1
ggcaatgagaatgtggttcctaagtaatccaccaggggaaagccaccatacaggtccagaacattgaagaatttacatggttaaactcaagctacagtccagttcttaagcagttaggttctccttccatgattgattattacttcagggcacatcgggctagttctgattcaaatctgaagttccggaacccaaagtatttgtccatactgaaccatcttcggttttatctaccagagatcttcccaaaactaaataaagtgctgttcctagatgatgatatagtagtccagaaggaccttactggcctttggtcccttgatttgaagggaaacgtcaatggtgctgttgaaacttgtggggaaagcttccatcggtttgatcggtatctcaacttctcaaatcccctgatctcaaagaactttgacccacatgcttgtggatgggcatatggaatgaatatttttgatctggcggaatggaggcggcaaaacatcacggaggtataccacagatggcagaggctgaatcgtgacaggcaattgtggaagttgggaaccctgcctcctggtctcataacattttggaaacgcacatactcccttgacaaatcttggcatgtgctggggcttggctacaatcctaatgtaaaccagagggagatcgaccgggctgctgttatacactataatggcaacttgaaaccatggctggagataggtatacccaaatttaaaatctattgggccaagtatgtaaattatgagacagtgtacttgcgagagtgcaacatcaatccatagaaagccttgatgggatattaaagtgtggtggtgagccatggtttacccgtgcattttgacatcaatttgtagttatttcgttaagaggtagcgggttgatattcatcatgccttgtatacattgtcaattttgtttttgattttttggttcttaccggaatgtgttgatttc

SEQ ID NO: 4554 - DNA, 336 bp, Gossypium hirsutum
  Clone ID: LIB3083-120-Q1-L1-F10
cttgatttgaagggaccaaaagccaataaggtccttctggactactatatcatcatctaggaacagcactttatttagttttgggaagatctctggtaaataaaacccaagatggttcagtatggacaaatactttgggttccggaacttcaaatttgaatcaaaactaacccgatgtgccctgaagtaataatcaatcatggaaggggaacctaacttgctttggtcccttgatttgaagggaaacgtctatggtgctgttgaaacttgtggggaaagcttccatcggtttgatcggtatctcaacttcttaaaatccctgatctcaaagaactt

SEQ ID NO: 4555 - DNA, 600 bp, Gossypium hirsutum
  Clone ID: GOSHI-09MAY01-C24432_1
gtccgatttcccgtgtcactcaacgcccccgcgacgcgttcggccacgcgtccgcccacgcgtagcggtccacttcacctctcttcctcctttctgaatttttcagcaattattttcccttagcttctcaaagtaaaagaaaacaccatttaaacaaatagtaaggcaagccaaagcaaaccaaatcaatccgacttttctcatcaggtgaacaactgataaaaccagaatttattttattcaaatatggaaggagagaacctagcaagtactgaaatcccagtgaaggaagctcttaaggatactgtacacattgccgagcccgttaatgtccgaaaggaaggaaacaaagacgaagaagaaaccgccttggatggagaattcattaaagtagagaaggaagcactagatatgaaggacggttcaaatgtcgctaagccctcacccaaccagggcgatgagtcaactaccatcgaaagaagcttaagcaatccaggtagagaactacttgaagcccaagaaaagatgaaggaactcgagcttgaattggaaagagtgaccggagcattaaaggattttgaatcagaaaatagcagactg

SEQ ID NO: 4556 - DNA, 862 bp, Gossypium hirsutum
  Clone ID: GOSHI-09MAY01-C24722_1
cttttcattgaaataaaaacaataactgatgcaaacacaaagagcaatcttcacgtgtcttgctttgttgcgtactgtttttgttctttgatcgtctttgttttgattcttagacggtgttgctttttaaatatatagggattcacaagagagcaaaagagaagcttgattttgtgtgtagagaataatggaaggaaataagaaaggggggtcttcttcgtcgtctgcggcttcctcgtctgtagcttcagagctatttggttcaaaagacccaccttcttcttctactgggatttttggctctatttttgctcctccatctaaggtattaggtagggagtcactgcgtcatgaccttattaccaaaaggtacgactcacccggggggcccgggaacacaacaaagccaggtccctatggtaattcttccaaaggacatgaaggtgaaaatcagaacatgggaaatagaaacatttatgaggaacaacgagttgaaccctgtcatttaagttcatcgatcttctacggtggccaagatgtatgcttcgatcccaagagtagagaggacttggaattgaactccgtgtttaacaaggatattggagaagatgatccagggtttgcatcaagaggaaactggtggcaaggttctctatattactaatacttgtttgccaatcaggatatatacttaaaggtacagaggaatctatgggcaacattttaatctgtttcaagttatagatataggagatggattatatggtaaatcaaatgttgcagagagctggattgtttattactgtctccagccaagcaattatatttatttgggtctcccttttaaggattatcaaacttg

SEQ ID NO: 4557 - DNA, 447 bp, Gossypium hirsutum
  Clone ID: LIB3146-004-P1-K1-C10
gttgcgtactgtttttgttctttgatcctctttgttttgattctttgacggtggtgctttgtaaatatatagggattcacaagagagcaaaagagaagcttgattttgtgtgtagagaataatggaaggaaataaaaaagtggggtcttcttcttcttctttagcttcagagctatttggttcaaaagacctaccttcttcttctactgggatttttggctctatttttgctcctccatctaaggtatttaggtagggagtcactgcgtcatgaccttattaccaaaaggtacgactcacccaaagagccatggaacacaacaaatccaggtccctatggtatgttcatcagtctagttccattccacaccattttgttcattacatatagtattaagtggtattgtgcactagaccaaaacaagaaccaagttttttttacagaat

SEQ ID NO: 4558 - DNA, 321 bp, Gossypium hirsutum
  Clone ID: LIB3146-038-P1-K1-G8
ccacgcgtacgtttttagctatctctagatttaaggtttttagtttaaggaaaataataagtactactctggggggttttttaacatataaattcaacacaatcaactttcttttgattcttagacggtgttgctttttaaatatatagggattcacaagagagcaaaagagaagcttgattttgtgtgtagagaataatggaaggaaataaaaaagggggggcttcttcttcttcttcttactacttcttcttaagcttcaaagctatttggttaaaaaaaccaacttttttcttctattggaatttttggctttatttt

SEQ ID NO: 4559 - DNA, 781 bp, Gossypium hirsutum
  Clone ID: GOSHI-09MAY01-C24662_1
aactggagcagtattactgggagtgctaataagcctcacaaaggaaatgatcctaggtggaatgccatcctggctatccgggctcgagatggaattttgggaatgagtcatttcagattgcttaaacggcttggttgtggtgacattggcagtgtatatctctcagagctgagtggtacttcttgttattttgctatgaaagtaatggacaaggcatcacttgcaagtcgtaagaagttgactagggctcagactgaaagggagattctgcagcttctggaccatccatttctgcccactctttatactcattttgagaccgacagattctcatgtctagtcatggaatattgcccagggggggatctacacactttgagacaacggcaacctggaaagcatttcttagagtatgctgcaaggttttacgccgcagaggttctattagcactcgagtatctccacatgcttggtgttgtctatagggacttgaaaccagaaaatgttctagttcgtgatgatggccatataatgctctcagactttgatctttccttaagatgtgcagtgtttcccacactaataaaatcctcagcattcgattctgatccttcaaaacgtggagctgctggtacattctgtgttcaacctgcctgcattgagcctacttcagtttgcattcaacctgcgtgctttatcccacggatattccctcaaaagaacaagaagaaaacccgaaaacctcgaatagaatttggggcgccttttcatacccctccag

SEQ ID NO: 4560 - DNA, 570 bp, Gossypium hirsutum
  Clone ID: GOSHI-09MAY01-C24632_1
atttggaaaaaaaagagagagagagagagagttaaggtgttaaagctttagggttgtgcaggcggaaagtccgttaaaggaaacaatggaacacgggtctttcactgacaatagtgctgccactttttctttaactgatgaggatcataccatagctaacgctgttagattcactttgaatcaagacccaagggttacattctgtggctacagtattcctcatccttctgaggctcgagttaatattagagttcaaaccactggtgatccagcaagagaggtattgaaagatgcatgtcaaaatctgatgttgatgtgtaggcatgtgaggagcacttttgacaaggctgttgaggattttagagcaagcaatgccgtgaaggccatgaaaattgattcacaagacagtagtggtgatgattcagaagagagtgaatgaaaatgatttcctgctatctatctttcacatcttaagactatcatgtggtcattagctcaatctgaattacttctttttgtaatcatatcgaaagctttttggtcgatatctcacttatcattaactatttt

SEQ ID NO: 4561 - DNA, 486 bp, Gossypium hirsutum
  Clone ID: GOSHI-09MAY01-C24192_1
cggatcgatcacagattctcggccccgtcgtttggctgccactccagttgacctctcttgttttcatccccctgtgagaaggtagagagcaaaaccaacccagcaacccacttttactatgccctattagtaaagcatttactttttgcaaggcttgctgagcttcttcatgtgacagacatcgcaaaagtaatccgtcgaactctcgccgatagagggcatcgttaaagtatacgattttttaaccccgatgggtttcgcagtcgaccatttgatagccctgttcctgaatatacagaactaatagggcttcgatgagccctagatgtaaaggggttaaaatacctctaagcaattagaagagcgcggaatttgacctccctcaaatggatggatctgggattgattgtggaatccgagcagagagaacccggggcgggcaggaagatgccccacgcggggtaggcgctctggagcaggttcttc

SEQ ID NO: 4562 - DNA, 522 bp, Gossypium hirsutum
  Clone ID: GOSHI-09MAY01-C24142_1
ccctcgcttccgaatccctctctttccttcaagttgccaacataccaggaaattaaatatgtcctaatataaacatcgaatggacacgcaaaagagtcaacccgacgagcaaaagagtcaacccgacaaacaatcgtcgtctgctgctgctcccctagtctcgacttcgtgtaggaagaaaaagaacgaagaggccaccttccttgaagacttgaaggatcacatcgatgagttcattaatgcttcaatggaagagcacaaaacttgctttaagaagaccatccagaagatgtttgggatgtcgaaagttgtagcagaaaggagtgcggctgaatccaaggaagccgaaaccgtgtcgaaataagattatcttcttacctctttagtaatgtgacttgtggactacatttatatgcattgaggttgcactgaaatgtagcttttggtttggtctaaaccgtgtagcagtgctttcattttgctttggttgcactttcctttacttaaattagtttttgtttt

SEQ ID NO: 4563 - DNA, 472 bp, Gossypium hirsutum
  Clone ID: GOSHI-09MAY01-C24002_1
ccctctcggactcctgcgcagccgctgattcatccatttcccgaagatgctgcaaccagtactggggctcccttctggtctgctccaaaacgattccctcatccacttcaagtctcaacagctgatccaagccacctgcagtttgttatggctgcttctatcctgcgtgctgaaacatttggcattcaaattcctgattgggttaagcatccacagatgttggcagacgctgttgacaaagtgacagtcccagatttccagccgaagaaagatgcgaaaatagtaacagatgagaaggctactactctgtcaactgcatctattgatgatgcagcagttatcaacgaactcatcttcaagctagaactttgcacaaaaaatttgcctcaaggattcaagatgaaacctattcagtttgaaaaggatgatgatacaaactaccacatggatctaatcgctgggcttgcaaaca

SEQ ID NO: 4564 - DNA, 536 bp, Gossypium hirsutum
  Clone ID: GOSHI-09MAY01-C24302_1
cccacgcgtgcgccagaatccagtgaccctgctcctattcaaaatgaaaattctacagctgcagaggatgttcagatgatagatggttcttctgcttctatgacggatgtgcttgaggctgatcctaaagaagttatgtatgctgagaggctgacaaaaatcaaagaaattctgtctggagagacctcaatacagttgattttacagttcttgcacagtcataacacatcggatctattaattgtgaagaccataaaacaatctgctgcaatgaggaatagcgtttgtcacagtgctacaatctatgcaaatgctataatgcatgctggaacaactgtggatacattcctgagggacaatctggaccggctgagtagggctacaaattgggccaaattcagtgcaacagctgggcttggtgttattcacagaggacatctgcagcaggggaggtctctgatggctccatacctaccccaaggtggtgctggtggtggtgggagttcattcttttaatgttttttatcttttttttt

SEQ ID NO: 4565 - DNA, 1119 bp, Gossypium hirsutum
  Clone ID: GOSHI-09MAY01-C24292_1
cagattggtacaggcgaactcctttcactatctgagcaggagtgggtggattgtgatacatctaacaatgaaggttgcagcggaggtctcatggattatgcctttgaattcatcatcaaaaatggtggcattgacaccgaagaagattacccttacgccgctcgtgacggtacatgtgacccttaccggaaaaatgctaaagttgtttcgatcaatgattatgaggatgttccggtaaatgacgagaaagcattgaaaaaggcagtcgcgaatcaaccggtgagcgttgccattgaggcaggaggaaggagtttccagttatatcaatcaggtatatttgatggaaaatgtggaacacaactagaccacggtgtcactgctgttggatatggcacagagaaaggtaaagactattggattgtaaagaactcatggggaagcagctggggagaagcaggctatctcaggatggcaaggaatgtggccaataccgtaactggcaaatgtgggatcgcgatggaagcctcttatccgatcaaaacaggtgaaaatccccccaatcccggaccgtctccaccatctcctataaaacctccgaccgtgtgcgatagttattattcctgtcccgagagcaatacctgctgctgcatatacgagtactataactactgctttgcttggggatgctgcccactcgaggctgccacttgctgcgaagatcgctacagctgctgccctcatgactaccctgtgtgcaacatacatgaaggcacctgcttgatgagcaagggcaatcctttggcagtgaaggcactgaagcgcactccggctaaaccgttctgggcacattgaaagcctgggattgtaatgcagtagatgatgggttacaagggagaagatgaaagcttgacagtgcttaacaatctccttgggtttaatatcggtagatggatggtgacaattatgtatatagtatcctatttattacccatggtgtatttgggaaatggatagaatatttccaatttctgtatatcatgtcatcatttagcaatgactttgaaaaagttctattcctgctttaaaaaaaaaaactatagagacaagacagaacattat

SEQ ID NO: 4566 - DNA, 328 bp, Gossypium hirsutum
  Clone ID: LIB3083-116-Q1-L1-D12
gactattggattgttaagaactcatggggaagcagctggggagaagcatgctatatcacgatggcaaggaatgtggccattaccttaactggcaaatgtgggatcgcgatggaagccttttatcttatcaaaaccggttactattcccctatttcatgaccgttttcactatcttctataatgtttttgacttcttcttatattatttatttctgttcttttatttagttccttttattcatttgtaaatactttattttttatattctttttatattttcagtttcttctattttattttttatcttttaattttttttcttttttt

SEQ ID NO: 4567 - DNA, 484 bp, Gossypium hirsutum
  Clone ID: GOSHI-09MAY01-C24212_1
ctcgtgcctcactggcttatctttgatagtattaataatctgttaattgaaggtggtggaactggaaaaattaatggtaatgggaagatatggtggcaaaactcttgcaaaatcaataaaactcttccatgcaaggatgcaccaacggctctcaccttctaccatagcaaaaacttgaaagttcaaaacttgaacatccaagatgcacaacaaattcatgtttcttttgaaaaatgcaacggtgttcaagcttctggtcttgcggtggcagccccagagagcagccccaacaccgatgggattcatgtcactcgtactcaaaacatatggatcacaaattctgtcataggaacaggtgacgattgtatctccattgtaagtggatccaaaaatgtgcaagccatggacataacttgtggccctggtcatggaatcagtattgggagcttgggatctaaaagttcaaaggcttatgtctcgggtg

SEQ ID NO: 4568 - DNA, 398 bp, Gossypium hirsutum
  Clone ID: GOSHI-09MAY01-C25952_1
attgatgatcctgtaaacaagcatgctcggagggtcgggtcatcagttgcagtttatggaagtttgattgtgatgctggtatttttgccagtcaagtttgctatgaagatggcaccatctatcttcccacttgatatatcggtatctgatccatttactgagatcccagctgacatgcttctctttcaaatatgcattccatttgccattgagcattttaaattgcggacaacattcaagtctcttctccgctactggtttactgcagttggctgggcattaggcttaacagagtttttacttcccagacctgatgagaatggtggccaggaaaatgctaatgtagaaccaggtcagctagatagaccacaaattgtgcaactaggtggacaggaaca

SEQ ID NO: 4569 - DNA, 895 bp, Gossypium hirsutum
  Clone ID: GOSHI-09MAY01-C25972_1
ggaaaaccaactaaaacccatccctatttccacccgccctccgcctccccgcttcgcctacctcatctccggctctgccggcgactgtcggatgcttaagaggactcttttagccctttaccatcctttgaatcaatacgtggttcatcttgaccgggaagctagctctgaagagaggctcgatctggagaagttcgtgaaggatcatccagtgtttaacaaagtagggaatgttaggatgattgtgaaagctaatttggtcacttacagaggccctaccatggttgctaatacgcttcatgctgctgcaattttgttgaaagaaggtggagactgggattggttcattaatcttagtgcttctgattatccccttgttacccaagatgatctggtacatacattttcatacttgccaagggatctgaatttcattgatcatacaagcaatattgggtggaaagagtttcatagagctaagccaattattatagatccagggttgtacagtttgaaaaaagctgatgtgttttgggttactcaaaggagaagcgtgcctactgcattcaaactctttacaggttctgcttggatggcactttctcgatcttttatcgattactgcatttggggatgggacaacctacctcgaacagtcctcatgtactacgctaactttttatcttctccagaaggttacttccacaccgtgatttgtaatgctcaagaattccgtaacactaccgtgaacagtgacctccatttcatatcatgggataaccctcccaagcaacatcctcattacctcaggctgaatgacatgcaacggatgatcaacagcaatgctcctttcgcaagaaagttccctcgggatgatcctgcagcgctagacaaa

SEQ ID NO: 4570 - DNA, 607 bp, Gossypium hirsutum
  Clone ID: GOSHI-09MAY01-C25962_1
aacaagttcacactactcttctcaacaacatggaaacagcatctttttgcaacgcaacaacacacaattttattacttcatctctacccattaagaggatagtcaaacagcttccaaaaccatgtcaaactcaaactcatcattgctgtcactcggggatgccattaggttttagtggtttgcagggtcatggtttaaatattaagccaaagcagcgttatggtgatgcagtagcagcaaggtgtgctacttgggattcagggcttttggctgagttagaaagagaactggaggctaaagacgaagaagaatgggtgaaagtgggaaggctgagagagaaatgcaaggaaaggaagggaatggtggagttgttggagtgtttggaaagggaagcaatacaaggggaagaccatggaagagaagctagtgattacaatagaagagcccagatctttgaaagagttccaggttttcagctctcaagcacgcacccaactacttactctcaaactcttgatcccctgtcctttaatgggatggagggactctatctccaaatgaaattagggaccccaatgttttcccctttggaaaatggatactggga

SEQ ID NO: 4571 - DNA, 605 bp, Gossypium hirsutum
  unsure (1)..(605): unsure at all n locations
  Clone ID: LIB3825-016-Q1-K6-E1
cacaaaaaatttcacactactcttctcaaacaaccatggaaacagcatctttttgcaacgcaacaacacacaattttattacttcactctctacccattaagaggatagtcaaacagcttccaaaaccatgtcaaactcaaactcatcattgctgtcactcggggatgccattaggttttagtggtttgcaggggtcatggtttaaatattaagccaaagcagcgttatggtgatgcagtagcagcaaggtgtgctacttgggattcagggcttttggctgagttagaaagagaactggaggctaaagacgaagaagaatgggtgaaagtgggaaggctgagagagaaatgcaaggaaaggaagggaatggtggagttngttggagtgtttggaaagggaagcaatacaaggggaagaccatggaagagaagctagtgattacaatagaagagcccagatctttgataagagttccaaggttttccaggctctcaaagcacgcacccaacctactcactctcaaaactcttgattccctntgttcttttttaatgtaatttgtagtgactctaatctacaaagtgaaaataatgtcaccccacat

SEQ ID NO: 4572 - DNA, 656 bp, Gossypium hirsutum
  Clone ID: GOSHI-09MAY01-C25902_1
caaccgagggctccggtgatgtcggatcaaacaaaagcagccccttcttccaatcccactgtcgttgatgatccttacaagcgcctcgaaatcattcttaaccccaatggctcgcttacgcgcaaccctaataggtttcccaacacttcagccacacctgatccggacccaactgtcccggttctctccaaagatgtcactatcaaccaaacgacacacacatgggctcgtgtgttcctccccaggcagaagccgcttgatacgaacaagttccctctcatagtttattaccatgcaggaggcttcatccactgcagtgcggcatccacgatcttccatgttttttgctcaaacatggcgttggaactccaagccatcgtcgtgtccgtcgactatcgtcttgctcctgagcataggcttcctgctgcttacgacgacgctattgaagcgttgctctggatcaaaaccacccaagaagagtggttgacacaatacgcaaatttcaccacttgtttcgttatggggtcgagttcaggtgctaacatagcctaccatgcaggaatacgtgtggcggaagaagccgactgtcttcgaccctggaagatccgagggctaatattgcaccaaccattcttcggcgggtccgtaaaggttga

SEQ ID NO: 4573 - DNA, 439 bp, Gossypium hirsutum
  Clone ID: GOSHI-09MAY01-C25892_1
gtgtattcagtaaaggaaatatgttggcaatattcagcaaagggttagtgaatccaccccaagagctgcagagtccagcttcactcacttcatcaatgaagcctaagcttccctttgaaatccttaatggttttgtctcttcaaatcccaccaacgctttttcaatgcggtttggatcttcggcttctttggcttatgttccaccccacaatccttcctccacttataaaaggttgtttagtggagtggatgaaatgcattgcatattcatgggtaatttgaacaatctatgtagcctcttaaggcaatatggtctatcaaggggcaccaatgaagcaatgttcatcattgaggcatataggacccttagagaccgtggtccatacccaccacatcaagtcctcaaccacattgaaggtagctatgggttcgtcatcta

SEQ ID NO: 4574 - DNA, 436 bp, Gossypium hirsutum
  Clone ID: GOSHI-09MAY01-C25862_1
atttgcgctgtagcatcagttgatgaagtttattcgcaacaggggctcctggatacaagggacaataatatgattcccctttgtcaaaggtttctatcagctttaattccagaagaagatattgacagtggaaatgaagacctcccatttgatagttatgaaactggatttgagatggatggagaattgggatgcaatggtttgacttgtattaacttccaatctactgggcatgcttctttcgatggttataggataactgacaagccagaacatgatgatcctgaaattgatatgttgggaaacataggaactaactcaaattttagtcattcccggaatggcagtttcccagaccaacagatgcccggcatggtttgttcagaactccagtatgagagtatgacaacaaatgagaaactcattttggaggctc

SEQ ID NO: 4575 - DNA, 528 bp, Gossypium hirsutum
  Clone ID: GOSHI-09MAY01-C25812_1
cctttctctgtcttctactcattaatcaaatatccgggtcgttccttcctctcccaaacaacttcatttctctcttcttttgtgggaaacccaaaattattgacatgaatttggatctatctttgctataaaattctttcctttatacatatttataacaacttccaatttatttccctttattttccttcttctgcgaaataccatgggaaacatcggaagtagcggttcacatggctggcgtaggaacggcagtcgccggaaccaccctccgacgccgcatccgccgcaaccgcctgctccatctcaacctcaacctgaaatcactgccaatcgctacgtctttgccgccgccacgccttaccctgcccagtaccccaacacgaaccctccccaatactatcaatatccaggctactaccagcctcagccggcggttcccttgcctctttccgcgccttacgatcatcaccatcgaggcggtccggacatggaacccggccattggggtaggtatccttatgtacc

SEQ ID NO: 4576 - DNA, 676 bp, Gossypium hirsutum
  Clone ID: GOSHI-09MAY01-C25482_1
gtaatgaacctaattggtgacgtaaaaggaaaagttgcagttatggtggatgatatgattgacactgctggtgagtgaaagcaatgtgaagtgagcaaacgtaaacctgttctcaatcacaaatacacgtgtaacttttgcttatccttatgtattcaatggtcaaatggtggcaaaaaactcgtttcttgcaccttttttgttttctctttaaagttctgttctcgtcatcttttgtgaagtactttcttatccttttggagaaaatacttccatcaggattgtccatggctgccttgaaaattgtcttttttgtccatcagctgtgttatcaattcaatctatgttttaccaggaacgattgcaaagggggcagcactgctacaccaagaggggggcgagggaagtttatgcatgctgtagtcatgcagttttcagcccttctgctatttttggtggattaatgtgtaatatgtataaacctttcatggaaatattttggtaaattaatatgttttaatggaaccttctggattaataggttgcaggggcttttaaaaagtgtcttacaaaacttttagtggcaaaaagactacttcccagtaacatctttgggccacgttggtgaacattggtgtcacagatgtctggagtgatttcaggaatcaatggagag

SEQ ID NO: 4577 - DNA, 435 bp, Gossypium hirsutum
  Clone ID: GOSHI-09MAY01-C25792_1
atcatggaatccatgagacaggatgagcctgattttgaccgggttattgagcttgtgagggaagtgagggatgaaatatgtgagctggctcctcgaagttggagagaagaaataactgatgctattgatttggaaattcttgcccaggtgctgaagtcaggcaacctggacattcattatcttggacggattctggaattcgctttgatcactttgcagaagctatccgctccagccaatgatgatgaaatgaaggccgctaaccaaaggttattgaaagagttggctgagatatgtggagccagagagaactcggataattctcctgccctcgcaatgatcaagggtctacgttttgtcctagaacagattcaggttcttaaggcagagataagcaaagctcgtataaggttgatggagccattgttaaaggga

SEQ ID NO: 4578 - DNA, 761 bp, Gossypium hirsutum
  Clone ID: GOSHI-09MAY01-C25772_1
cttgcctcctcacttctctgcttctttaaaaccctcaaaacacacccatatagcttcatcgccggtccaatttctttaccaaagacctcgcttttcaaaacccttttctgggttttctccatctaacctttccttccctctgaacagcaaaaactgtccacaaaggtggactttcaaggcttctctttcagcccaggaatctgctcgcactgaaaatgtaaaagcatcagctggagaagattttcccagtttaaaggccatgattagagtttacagggaggcgcttctcaatggagatgataggattgtatctgaaattgagagtagaattagcattttagaaaacgagaaggatggattggaaaaacaagttttggaattgtcggcagagataacctctgggaaagagaagtatatccgtttacaagctgattttgataattatcggaaaagatcggagaaggagagacttacggcaaggtctgatgcttaaggagaagtgatggagagtctgttgcccatggttgacagttttgagagagccaagcaacaaattaaacccgaaacagagaaagaaaagaagatagatacgagttatcagggtatatacaagcaatttgtggagatcatgaggagcttgcaagtggctgttgtccctacagttggaaagccctttgatccctctctacacgaagcaatagcacgcgaagagtcgcaagagttcaaggaagggattatcatccaagaattttgtcgtggat

SEQ ID NO: 4579 - DNA, 416 bp, Gossypium hirsutum
  Clone ID: GOSHI-09MAY01-C25702_1
gctcttaccttttcctgatttacctatcaacggttggggggatgtggttatagcgtaaaatgtttaaagaccttcatgttatatggctaattccttggtgtagatactgtgaccaaggtgtctcatcagtgcaagtggcttatgcaaacattgcttgactatgaaatgagtaaatgctaatactacttgatcgccttttagcatttattagcttattctggcgcacctatattgctatctccacagtgcatgtatgcatgcagagtggtgcatacacatgcatgtcgggtgtctaatggtttagttcttgcattgaaggctatcggtaggtttcctggaccaaattctatatgatatcttgctaatctcacttctgttaacagcatcaggtaagatctttctcctttacgtgcata

SEQ ID NO: 4580 - DNA, 1146 bp, Gossypium hirsutum
  Clone ID: GOSHI-09MAY01-C25682_1
ttttgcttctctctctctctctctctctctctctattcacccattttttctttttttgtagaaaatcaattcgagcctttgatcatgatcaggatgaagtgaagtgaagtgaatgcttctgtatttggcaattgaatggatagtgtcatgctgcagtttttatgagatatattgatcactaggtatttcttcaatgggggctgcttgttctaggaaaagagaccaactggacaatgtagatggttttgacagaggggtttcgggaagatattgcaggagtgggagttcgaagtggttagcaacaactttttctagacctgttctagaaattcaaagggagaaaaagaaatgtccatcacttttggaactatgcacctataaaatacgggaggatatagataattatgtttcattttctactcttccaagagatctaagtcagcagatcttcaatgaactagtgaagtcacaacgtctgactgatgtttctcttgaagcttttcgagactgtgctcttcaggacctttacctgggagactaccccggggttaatgagaattggatggatgtcatctcttcacaaggctcatccttgctttcactagacctctctggttctgagttcgtttcctggattgtatatctcaaagattgcgtgaaccttcaagatttaaccctaaattactgtgaccagatttctgaccgtgggcgaaaacacatcagtggtctgtcaaacttgaggagtctcacttttcggagaaacagtgcaatcactgcacaaggaatggcctagtaaacctgatgaagctggacctggaaaaatgtcctgggattcatggggggcttattcacatcaaaggtttgacaatgttagagtctcttagtattaaatggtgtaattgcataacagatgctgatatgaagcctctttcagggcttacaaacttgaaaagcttacagatttcctgtagtaaggttacagattttggcatcacttatttaaaaggtctgcaaaatctttctgttttgaacttggagggctgcccagttacagcttcgtgctttgatactctttcagtgcttgtatctctggtatatttgaatcttagcagatgccatttatccgatgatggatgtgagaagctt

SEQ ID NO: 4581 - DNA, 326 bp, Gossypium hirsutum
  Clone ID: GOSHI-09MAY01-C25642_1
cttgagacattgattctcgacttcaatgagttgactgggacaaggcctgctggcctaagcaactgtaccaagttgaattggatttcattatccaacaaccggttgactggtgagattcctgcttggcttggcaagctttccattcttgctatcctcaagctcagcaataactccttctatggaccaatcccgctggagctcggagagtgtaaaagcttgatatggttggaccctaatactaataacttgaatgggaccatccctcctatgctgctcaaacaatctggtaaaattgctgtcaatttcattggttggaagaggtttac

SEQ ID NO: 4582 - DNA, 630 bp, Gossypium hirsutum
  Clone ID: GOSHI-09MAY01-C25602_1
gtcggcttatagcttgatgttcaacagagcaatcgggttcgcaccttacggggtttactggcgaaccctgaggagaatcgcggctacgcaccttttctgtcctaagcaaatcagaggtgccgaggaacagagacgccagatcgcctctgaaatggtcaccttatttgctctccataaccaaagcttccacgtccgccaactgctcaaacgagcttctctaaacaacatgatggcttcaatattcggacgaaaatataacttaaattcttccagcaatgaagtcgaacaacttcgagctttggttgaagaaggctacgatttactgggctcattaaattggtccgaccatcttccatggctagccgatttcgaccctcaaaaaatcagagttcgatgctccaaccttgtgcccaaagttaaccgctttgtggcccgaattatatcccaacacagacacaaaacaaactgcgaaacacaagatttcgtcgatgttttactttctcttcaaggtgccgataaaatatcagactccgacatgatcgccgttctgtgggaaatgatattcaggggagctgataccgttgcggtcttgatggagtggatactagccaggattgtgcttcaccctga

SEQ ID NO: 4583 - DNA, 826 bp, Gossypium hirsutum
  Clone ID: GOSHI-09MAY01-C25112_1
gcaggaacttaggagggttaggtctgggattttaggtgagaaagataatatggtgaccatgcatgatgttatggatgctcaatgggtttatgataattatagagatgagacttatttgaggagggtgattatgcctcttgaagtccttttgactagttataagaggctggttgtgaaggactctgctgttaatgctatttgttatggggcgaagttgatgattcctggattactgaggtttgagaatgacattgaggttggggaggaagttgtgttaatgacgacaaaaggagaggcaattgctctgggaattgctgaaatgaccactgcggttatggctacttgtgatcatggtgtggtggcaaagattaagagggtagttttggacagggatacttatccgaggaagtggggcttggggccaactgcatccatgaagaagaagttgattgcagaaggcaaattggataagcatggaaagccaaatgacagcactcctaaagagtggttaagaaatgtcgcgttgccaactggtggggattctatggttgccagcctagcagcttctgctgaacctgcggcggtggaaaaggaaaaggaagatggagaggggcgcaagcgcaaattggatgacagcagtgatagccctgctccggttgttgctaagaaagccaaggttgaggaaggtgaagctgaagttgagaagaaagagaaaaagaagaagaaacataagaagagtgaagaggatgctgatgctgaaactgaagagaaggtgggaaggaaaaaaagaagaagaacaagggataaggttgaagcttcttcacca

SEQ ID NO: 4584 - DNA, 414 bp, Gossypium hirsutum
  Clone ID: GOSHI-09MAY01-C25132_2
tgaagcagcacacaggtccatctccgtctcctctctttcccgcttccttcgacttgctttctcgccttttgcttcaaaccctacttctcttcttcatgctcaaaatgaagctcgtcaggtttttgatgaagttgaacaatgaaacggtgtccattgagctcaagaacggaaccgtcgttcacggaaccatcacaggcgtggatagcagcatgaacacccatctgaaaacagtgaaacttacattgaaggggaaaaatccagtgagtttggatcacctcagtgtgaggggtaacaatattcgctattatatcctgcctgacagcttaaatcttgagacattgctggttgaagagacaccaagagtgaagcctcaagaaggcaacagctggcaggcctttgtgacctggtccgagt

SEQ ID NO: 4585 - DNA, 784 bp, Gossypium hirsutum
  Clone ID: GOSHI-09MAY01-C25132_1
tctgacaaaagcctgaccctaaatcctctctctcgcatcgcagagtaaaaccagacagcaaaaatcaacgtcacaaacgggcaaacagctcaatctctctcccgcttcctttcacagttcaacaactgctgcctctctttctctcacatttttgcttcaaccattaccgctcctcatcatgaagctcgtcaggtttttgatgaagttgaacaatgaaacggtgtcgattgagctcaagaatggaaccgttgttcacggcaccatcacaggtgtggatatcagtatgaacacccatctcaaaactgtgaaacttacattgaagggaaaaaatccagtgactatggatcacctcagtgttaggggtaacaatattcgctactatatcctgcctgacagcttaaatcttgagacattgctggttgaagagacaccgagggtgaaaccaaagaagccaacagctgggaagccattgggacgtggtcggggtcgtgggcgtggacgcgggcgaggtcgaggccgttaaatatgctgccatgcctccaaattttcgtaacagctggatgtgtagacaactttgttgtggggagaatttatgggtgaagttacgaatattaaaaggaatagtgattgatattttacttttctatatgatcattagccttggttgtacggcttaatcatggatcctgagattcccgactagcagatattttaatacctctgtcaattatgctgtaaaatgaaggaatgcggcattctgatcatgttcattgccttcgatcag

SEQ ID NO: 4586 - DNA, 256 bp, Gossypium hirsutum
  unsure (1)..(256): unsure at all n locations
  Clone ID: LIB3148-007-Q1-K1-D5
cggaaatnccggggcggcccaaggcgtccgcccacgcgtccgggacgtggacgtggtcgaggccgttgaatatgttgctttgtttccaaatggttgtgacagctggctgtgtaggcagctttgttatagtgagaatttgtgggcgatgctacgaattttaaaggaattgtattggtgttttactgttccgtgtgattattagcctgggttgaatagcttaatcaagaatcctgaggttcaccgctctttaattttt

SEQ ID NO: 4587 - DNA, 877 bp, Gossypium hirsutum
  Clone ID: GOSHI-09MAY01-C25022_1
atctagggtcattttcattttaaaaattctgcacaatccgtttgggttcgatgcatcataggacgaaaaggcagcaaataaaatgttaacattaactccggttctttgatgaataatataaatggagaagttaaagagaggatttatcagaatggtactgttcttgcaagtgatcagcaagcagaagggagttctggctcagtcttagaagcaaattggcataattcaagagaaattggttcgtttaaagatggaaaaacaggctcatctccaaataggcatgtgcttaccaaaggtctgggggagactgctgttgccagatggaatgatatggacaaagtatctcctgctcagaccatagaagcaaatgattcggaaagtaaaggaattggttatgttccagatgaatgggatgaagaatatgacaggggtaagaggaagaagataaggcaaaataagcacaagttcggcggtgcaaatcttttccaacaaatcgccaccaagaaaacacggtttaagaaggctaagttagaccattctaaatcagaaaaccgaccattcaggatatgaagtaaatccattatcaatttggagcaattttgacctgtctgtctgctgttatagtttatgcagtaattcttgctctcttgttgacatgagctaaattgtattttgtaaccaggagagtgtttaaagtggagaaaaaaaaaacatcagataattgtagtttttcctattccttttccttttctgaagtttcttcattagatagttgtagtttgggacacacggacgaaaaggacctgttctatggaataaagaacttgtgatagtaaattttggtctattattagtgtatgtcaagtccaatgctgct

SEQ ID NO: 4588 - DNA, 441 bp, Gossypium hirsutum
  Clone ID: GOSHI-09MAY01-C25362_3
gaatgataagttgaaaagaagaagagagaaaactgtaaggacagcaatgcttgccattcatgcaagccaccaaagcccattccaccacctgctgcatgccctccaccaccagcaaagcctgcttcttgccctaaggacacattgaagctaggcgtttgtgctgacctgcttggactggtaaacatagtggtgggagcacctccttcgagcaaatgctgtgctttgctccaaggcttggctgatttagaggctgccctttgcctttgcaccgccattaaagccaatgtgcttggggccaacctcaacatccctattacccttagcttactccttagtgcatgtcagaaggaaatccctccaggcttcaaatgttgatatttttttttaagaagcacaatcagttgttgatgttggctaatggctaagtttgctctactttaa

SEQ ID NO: 4589 - DNA, 636 bp, Gossypium hirsutum
  Clone ID: GOSHI-09MAY01-C25362_2
atttttcactctcttccactcaatcaaatcccagcttagcaacctcacaaattttttctttaaaaaacccatctttctggttctaaactcacccccatccatctcttttgcatataccttcagtcactaagcaatagcagccactactgcaaatggcttccaacaaaacctgtgctgtccttacagttttctctcttcttcttttcaacttatcattcaccaatgcttgccattcatgcaagccaccaaagcccattccaccacctgctgcatgccctccaccaccagcaaagcctgcttcttgccctaaggacacattgaagctaggtgtttgtgctgacctacttggactggtaaacatagtggtgggaacacctccttcgagcaaatgctgtgctttgctccaaggcttggctgatttagaagctgccctttgcctttgcaccgccattaaagccaatgtgcttggggccaacctcaacatccctattacccttagcttactccttagtgcatgtcagaaggaaatccctccaggcttcaaatgttgatatttttttttaagaagcacaatcagttgttgatgttggctaatggctaagtttgctctactttaaatttatattatggtgctgc

SEQ ID NO: 4590 - DNA, 652 bp, Gossypium hirsutum
  Clone ID: GOSHI-09MAY01-C25362_1
ggaaaacccgggccgacccacgcgttcgccctcccccccggcttgcccgtcatgcaagccaccaaagcccattccaccacctgctgcatgccctccaccaccagcaaagcctgcttcttgccctaaggacacattgaagctaggtgtttgtgctgacctgcttggactggtaaacatagtggtgggagcacctccttcgagcaaatgctgtgctttgctccaaggcttggctgatttagaggctgccctttgcctttgcaccgccattaaagccaatgtgcttggggccaacctcaacatccctattacccttagcttactccttagtgcatgtcagaaggaaatccctccaggcttcaaatgttgatatttttttttaagaagcacaatcagttggtgatgttgcctaatggctgagtttgctctactttaaatttatattatggtgctgcaaatcaatgtgtccttgcttttaattagtgtattttgatgttggaataggactatttatctatgatgtttgtattgcaaagagcttggcattgtgtgatatacttgttcaaataagtaggcatgtgggttaacatttaactccgcctaatgtaatgttattttattgtaagattgttaatgttaagtttatgatttgatt

SEQ ID NO: 4591 - DNA, 554 bp, Gossypium hirsutum
  Clone ID: uC-gsflmaxxa061d03b1
atcaaatcccagcttagcaacctcacaaattttttctttaaaaaacccatctttctggttctaaactcacccccatccatctcttttgcatataccttcagtcactaagcaatagcagccactactgcaaatggcttccaacaaaacctgtgctgtccttacagttttctctcttcttcttttcaacttatcattccaccacctgctgcatgccctccaccaccagcaaagcctgcttcttgccctaaggacacattgaagctaggtgtttgtgctgacctacttggactggtaaacatagtggtgggaacacctccttcgagcaaatgctgtgctttgctccaaggcttggctgatttagaagctgccctttgcctttgcaccgccattaaagccaatgtgcttggggccaacctcaacatccctattacccttagcttactccttagtgcatgtcagaaggaaatccctccaggcttcaaatgttgattttttctaagaagcacacctcagttgtgatgtcgcctaatggctgagtttgctctactctaaat

SEQ ID NO: 4592 - DNA, 966 bp, Gossypium hirsutum
  Clone ID: GOSHI-09MAY01-C25292_1
accacgcgtccgcccacgcgtccgaccaaattgaaaacttcagtttgagatttggcaaatcaagcgaaaatgctaacagcggatatacctcccaatcaaactatttacatcaagaacctcaacgagaagatcaaaaaagaagaattaaagagatccctttatgctttattttctcaatatggaaggattttggatgtcgttgccttgaagacgcctaagcttcgtggacaagcatgggttgtgtttgatgaattgacttccgctagtaacgccttccgtcagatgcaaaatttcccgttttatgataaacctatgcggatacaatatgcaaagacaaagtcagattgtatcgccaaaaatgatggaagctttgttcccagagaaaagaagaagaagcaagaagaaaaagctgaaaggaagcgacgtgcagaggaagcacagcaatctgcaatgccgaatggcacaggttctcaaaataatggtggtccaaaggctcctctccatcatggaaacctgaatgctgagcaggccgcaccaaacaatattctgttcatacagaatttgcctcacgagacaacaagcatgatgctgcagctgctttttgaacagtaccctgggttcagggaagttagaacggttgaagcaaagccaggttttgcatttgtagagtacgaagatgaagagcagtcttctacagcaatacagaaccttcagggtttcaaaattgctcctcaatatcccatggccatcacttttgctaagaagtaacctacccttgtgttagtgatgctttatttttcgccttggtataactttgtttgggtacgttttatcatatgtagtgagtgcaaagattaatgcataccatattaccatggtcatgtagatctgaaagaaactaatgccggcaaccttctctcttgtgatgtttcaaaatagttaaccaagttagatgattatatgatc

SEQ ID NO: 4593 - DNA, 900 bp, Gossypium hirsutum
  Clone ID: GOSHI-09MAY01-C25262_1
cccacgcgtccgcccacgcgtcgggaagaacttcaccgtgaaacatgccacactgatcaaaagcacttcatcagtatgattgcctgagagctaacaaagcaacatcagcgtggggattggaggctcgagtacccttcttagacatagaatttatcaacgttgccatgtctatagaccctgaatcaaagatgatcaaaaaggatcaaggacgcatcgagaaatggattcttagaaaggcctttgacgatgaagagcgtccatatttgccaaagcacatcctctaccgacaaaaagaacaatttagcgatggcgttggttatagttggatcgatggtcttaaggcgcatgctgccaaaaatgttactgataagatgatgcttaatgcttcttacatatttcctcacaacacgccaacgacaaaagaagcatattactacaggatgatattcgagagattcttccctcagaactcggctagattgacagtccctggaggagctagcgtggcatgcagcactgctaaagctgttgagtgggatgttgtctggaagaacaaccttgatccttcagggagggctgccctgggagtccatctctcggcttacgatgcagaggctcctctcatcagcaacgtgccatccaaggttatcgatagtataccacggatggtggaagttccaggagttgccatacacacttagtacctgcctgcctactggaaagggatcggaatcgatgaaatcaataagtgatagtagtatgttgtggcatattcatcaaaattctcatttactaaaatactttatgattgtttggatcttccattcttgttgttgcttatgtttgaatgtgtgtaactgttatcgtggaagtcaatcagatatttgaatgtgtgtaacc

SEQ ID NO: 4594 - DNA, 292 bp, Gossypium hirsutum
  Clone ID: LIB3149-024-Q1-K1-G1
gtataccacggatggtggaagttccaggagttgccatacacacttagtacctgcctgcctactggagagggatcggaatcaatgaaatcaataagtgatagtagtatgttgtggcatattcatcaaaattctcatttactaaaatactttatgattgtttggatcttccattcttgttgttacaaacattcaaatatctgattgacttccatgataacagttacacacattcaaacataggcaacaactagaatggaagatccaaacaatcataaagtattttagttgttgc

SEQ ID NO: 4595 - DNA, 484 bp, Gossypium hirsutum
  Clone ID: GOSHI-09MAY01-C25212_1
aataacggtcgaagtattccacaaatgagaacacgtttactgttggaggggcgtttgctgttgatcatctcactctgattaaaggtaagctcagcagtcatgggaggcttggagcactgctgcaacatgaagttgtaccgaagtcgttgttgacaatctccagtgagcttgacacaaaggccttggaaaaaagtccccggttcggattggcgcttgctctgaagccctaattaggttttttcatttttggctattcaatgatgcttttggaatttgatacgttaaaattttttttcttggagattgattaagggtggcaataaatagttccacagatgataaatattcatttctaggttctcaaaagctgtggatggatgtttgatgatactttaggcttttccatgattcaatattgcaagttttgagccatttgataatggtacatttaagccttgttttgtcgagggctttcttttaaaag

SEQ ID NO: 4596 - DNA, 440 bp, Gossypium hirsutum
  Clone ID: LIB3146-057-Q1-K1-A2
tggatttggggtcgccacgcgtccgccacgcgtccgaaagatccggacaaggaagagaagctcagaggtagacctggatatgagcacctgaatgatccgcttcacatcttaatcgaggccgatttgcctgctaatattgttgatacacggcttagacaggcacaggaaatcatagaggaattacttaaacctgtggatgagtcgcaagattttatcaagagacagcagttgcgggagctggcaatgctaaattcaaacttcagagaggatagtccgggtccaagcggcagtgtctcaccttttaattcaagtggaatgaaacgtcccaaaaccgggcgctgagaaataaaccaggaatcatctgaaattgtttctaccggcctggggtttcgtcatagccaagtatatcttctgatgcatattggttgggtgtaactttg

SEQ ID NO: 4597 - DNA, 351 bp, Gossypium hirsutum
  Clone ID: LIB3149-006-Q1-K1-A4
atactgtgaagaggagtgtgcgctcagaaattactgatgatacatatccaaacgaatagaagctcagaggtagacctggatatgagcacctgaatgatccgcttcacatcttaatcgaggccgatttgcctgctaatattgatgatacacggcttagacaggcacaggaaatcatagaggaattacttaaacctgtggatgagtcgcaagattttatcaagagacagcagttgcgggagctggcaatgctaaattcaaacttcagagaggatagtccgggtccaagcgggagtgtcttaccttttaattcaagtggaatgaaacggaccaaaaccgggcgctgagaaataa

SEQ ID NO: 4598 - DNA, 1376 bp, Gossypium hirsutum
  Clone ID: GOSHI-09MAY01-C26902_1
gggggccgcgtgcgggtcatctttcaatcatggcttctcttcagtatcttctctccattccattcttagtttgcgttgttgctcctgggttagcccaacagtcgttccgccccaaggccctggtcgttccagtctctaaagacccctcctcacttcaatacctcaccactattaaccaaaggccaccctttggtcctatacgcgttggggtcgatctcggtggcccctacttgtgggttgattgtgaacgggcttatgtttcatcgactcaccggcctggcaggtgcgggtcagcccactgctcgctggctggagccaatgggtgcggagattgtttcgatggaccaaggccagggtgcaacaacaatacatgtgctggcggacccggcaacaccgtcactaacaccgccggtcctggtgagggtgcacaacatggtggctctctgcaatcaactggtgggaggaatcctggcagagtggtaaccgtgcctagattccttttcgcttgtgcaccaacttccctgcttcaaggccttgctaacggtgttgtgggaatggctggtttcggtaggtatagaattgggcttccttcgcaattctctgctgctttcagtttccgaaggaaattcgccattggtctctcgtctgccaatggtgttattttcttcggtgatggtccctatgtgttcctccctggagttgatgcatcagaatcgcttactttcacaccgctcttcattaaccctatcagcacagccccttctttccctctcggtgaaccttccgccgagtatttcatcggcgttaagtccatcaaagtgaacgaaaaacccgtctcactgaatacaacgttactgtccattaacagcgaaggtgttgggggcacaaagattagcaccgtgaatccctacactgccctagaggcttccatcttcaaagctgtgactgaggccttcattaatgaagctgctgctaggaacatcaccagggtggctggtgtggccccatttgaggtatgtttcagctcaagaaacattgtagggacacgtttaggagcagcggtgccatcaatagacctcgtgttgcagaacgagaatactttttggaggatttttggagcaaactcgatggtcaagtttagctgggaagtgacgtgtcttgggttcgtgaatggtggctcgaacccacaaacttccattgttattggagggtaccaattggaggacacttttcttcagtttgatttggcaacttcaaagctggggttcagctctacccttttgggtaggcaaactacttgcgccaatttcaacttcacatctaatgcttagatggcatacggcagaaataaattttacaaattataatgttgtgag

SEQ ID NO: 4599 - DNA, 1056 bp, Gossypium hirsutum
  Clone ID: GOSHI-09MAY01-C26852_1
ggataaggagatctgttttgtgacgatatagagcacaagtggaaactgttgcgaagaatcgtattactaagaaaggatgaggggaagatctgatggaggccaaaagaagcgattaatcgcctctctctgtgctgcggtgatctttcttggttttctttatgtatattatggatggccaagccgtggtgctgcagatctaggatatggcagcaaatctttgataaaacttggatcatcttacttgggtggagatgatgacactgatgggaagcaatatgaatcttcaacaaaattcggacaggatgaaggagaagacatcgtaccaaaaactttccctgtttgtgacgatcgtcattcagaattgattccctgcttagacagacatttaatataccaaatgagattaaagctggacttgtctgtgatggagcactacgaacgtcactgccctcctcctgaaaggagatacaattgcttgattcctcctcctccaggatacaaggtcccaattaagtggcctcaaagcagagatgaagtatggaaagcaaatattccccatacacaccttgcacatgagaaatctgaccagaactggatggttgtacaaggtgaaaagatagtatttccagggggaaggaacccattttcactatggagctgacaagtttattgcttcgattgcaaatatgctcaactttacacaacaattaaataatgaaggaagaatacgacagttttatggttggtcggtgtccaagttttggacatatctcttcttcgatatatacaatgtcatagcaccatggagtgcataaaccaaatcattgccctgaagagaatcctgctatctgtgtttaggaccaagctcctacccagcgatattgactgctactgctcctgagatgatgcttaaaggagggtattctctgactaacccgcttaaccgagggtatgccttattccagatttgccaacaaaaaatatttgtttgaaaaaaaatcctccgcccattttggattgaagaacctttgttgcaactacaaattttttgaaaag

SEQ ID NO: 4600 - DNA, 429 bp, Gossypium hirsutum
  Clone ID: GOSHI-09MAY01-C26802_1
tctgctacggttctccaaaaactctttgggaaacccttaagccggtccccccataagaaaagcagtggccaagggcagcaacaagctaaccaagctcttatcggttctaaagaagctgaattcattcaacagcaagcaaagccgcacccccacgtcaaccgccgcggtggcggcttccgatatcatctacaacgaagaaagctctgccgatctccaccctgtctacgttgggaaatcccggaggcggtaccttattagctccgacattatcgacaaccctttgttccgtgagctcgcggaacggtccggtgaagacgatgacgccgtcatcaacgtgtcgtgcgaggtgggtttgttcgaacacttgctttggatgctcgaaaatgctgatcctcaacccgagtctttggaagagctggttgagtttta

SEQ ID NO: 4601 - DNA, 409 bp, Gossypium hirsutum
  Clone ID: GOSHI-09MAY01-C26592_1
ggaatgcggatgttgaagaggggagtagcaatgatgggtcagatagagtgcggaaggatgagggaaggaaaactgggaagaagactatagaagagttgcgggaagaacgcttgaagagggagaggcgggagaaggagagggaaagagcattgttaatcgagaagaacaaaacaaataggactgtgaaggacacaaggttttccaggaggtgaatgagcttgcagaagttaaagctcagcagtttcatctttctaaatgttcaaattgcagtcatttgaaattggggtctaactggccttttgatatttgttagagcagcatataaatttactccatatttaatttcacaatatattttgtaagagctacgtttgatgcttatgaatgaaagttaacttttcttcaaaaa

SEQ ID NO: 4602 - DNA, 1390 bp, Gossypium hirsutum
  Clone ID: GOSHI-09MAY01-C26552_1
aatggattcaaactaaaatagacggctatggagttgcaggggcagtcgagcgtgtaggatggtggtcgccaacaattataagaggtgatgaccgtgaagcagttcacattccaaaccacaagttcactgtgaatgttgtgaggaacattagccagaagactcattggcgcatcaagaattactttgccattagtcatttggatgttaacaaaatcaataatgtagtagcagacatgcggaaggttttagccaaaaatcctcaagtagagcagcaaagattgcatagaagagtatttttggaaagtatcgatccacaaaaccaggctcttttgatattggtatcttgttttgtgaaaacttcacatattgaagaatacctgtgtgttaaggaagccataatgttggatcttctcagagttattagccatcatcgtgcccggcttgccacccctatccgcacagttcagaaaatatacagtgagcctgaaattgaagatataccctttgctgatactattttcagacgttctggagcggctaccaaccgtccacttctcctcattgaacccgattataaaatcaacagtgatgacaaagccaaagctccaacacgtgcaaacgaagaaatactaactccaacctcaacatctgactcgaagggaaatactaactccggatcagcattggacttcaaagaagacaaggttatggcttcatcaaccaataattctggtttaagttcaaacgaaagtgggaactcggtgcctgttggttcagttgaagtcaactctgaaaagcaactcagtgagagcaagggtgataacctcgaaagacaacaagctcgggaagggttccagtacctaatccacaatccgcaattgaagaatccgaaatcccattgggtgattcacaagcaaagcaggatgttgataataagcctgtaccggtaccatcggttgccaggccggcttccttggaagagaacatcgttcttggtgttgcactggagggctcaaaactgacccttccaatcgaggaagaaatgtctgcagaaatagaggaaatgggcagtcaccagagtggaagtaggtctcattcggtcggccaggacaagaaagacaatgagaagtcggtagttcatggtggcgcaccgaataattagagtgctaaatcgcgcctgattgccatttatatatatatttataatgcttagctgtgttttttgaagctagcattattgttattaccactactattattattcattgtgtactcatcatttgtaaataggtggttggatttaaagggagaactaagtagagggggaaagatactaagttagcattcaatattattgtggtattttgttatcaagaatctgatgactcca

SEQ ID NO: 4603 - DNA, 476 bp, Gossypium hirsutum
  Clone ID: GOSHI-09MAY01-C26492_1
gcgcccacgcgggcggccacgcgatctggacgacttcattttcttcttcaatggcagtgtcagaaatctcgcgatgtactgatcatgtattcttgagttttagaggtgaagatacgcggaaaagtttcacggatcatctttacacagctttggtgcacttaggaattcgaacatttagagatgatgaggaaatcgagagagggaataacataaaagatgaaattgaaaaagcaatactacaccactccaaaatttctatcgttgttttctcaaagaattatgctgcatccacatggtgtcttaacgaacttgtaatgatattggagcacaggaaatcctctaaacatattgtgttgccagttttctatgatgtggatcccagtcaagtcaagaaccagacgggaagttatgcagaagcatttacccaacatgaacaaaacttcgagtccatggtacaagatggaggaatgctttaa

SEQ ID NO: 4604 - DNA, 407 bp, Gossypium hirsutum
  Clone ID: GOSHI-09MAY01-C26402_1
gttgatcacgggtacttcaataacagtgaaaagtcgggtactgcatatggaaaattatctgcctatatgtggctacttcaatcattcagatgttgcatatggaaaatttgcctgtcctgtgatatctatttatctacataggatagtttgtactctcacaaaattataaaataatgacatgttcagtcgatgaaattgctgatcccaggttactgctgccctcgcacaagctggcctcgagtcctctaacctcatcgttggtatcgatttcacaaaaagcaacgaatggacaggtgcaaggtcattcaaccgcaaaagcttgcatcacatcgggaatggccaaaatccctatgaacaagctatatcaattattggacagagcttatccgcttttgatgaggataact

SEQ ID NO: 4605 - DNA, 434 bp, Gossypium hirsutum
  Clone ID: GOSHI-09MAY01-C26782_2
ccatgatattgatgttgatgatttaaaaaataatacacggtatactggtggctattctgagggaagtcgaactgttaaacttttctgggaggttatgaatgattttgagcccaaagaacgttgcatgctgctaaaatttgtgaccagctgttcgcgagctcctttattggggttcaaatacttgcagccggctttcacaattcataaggttgcaagtgatgctcctctttgggctgcaatcggaggttcagatgtggagcgacttccatcagcttctacatgctataacactctcaagcttccaacatacaagcggtcaagtactctgaaagcaaagcttcgttatgcaattaattctaatgctggatttgaactttcttaaggacctgagatttttaactggcgcagaataggtggtttaccattatcactag

SEQ ID NO: 4606 - DNA, 639 bp, Gossypium hirsutum
  Clone ID: LIB3543-056-Q1-K6-C3
ccacattcccttccatagtacacttctactaccgatggcagtcgtattggtttatatgcaacctaggctacaagttttcacttctttatgcaaaacttccttgaaagccgttgttggtttttgaaatgaccatggaaggtctgctattaactatgttctatacagtaggtttttgtttaaatacctggaaattgctttgactctcgtttttcttaaaatatccgtgtttgacacattcacatatgagtatgagtatactggtggctattctgagggaagtcgaactgttaaacttttctgagaggttatgaatgattttgagcccaaagaacgttgtatgctgctaaaatttatgaccagctgttcgcgagctcctttactggggttcaaatacttgcagtcggctttcacaattcataaggggtgaacgataattgcaaatggagaaagggtacacgactatcctaaaatctcagctacaactgaaactaagtcaagaatcttcttggccttatataggttgcaagtgatgctcctctttgggctgcaattggaggtttagatgtggagcgacttccatcagcttctacatgctataacactctcaagcttccaacatacaagcgatcaactactctg

SEQ ID NO: 4607 - DNA, 435 bp, Gossypium hirsutum
  Clone ID: GOSHI-09MAY01-C26772_1
gtttattttcagattcagcgtctcatcattcttctccatcttctccatcttctccaccagatctttctcaggccagatggtacaccaaagggtcaaaatctttgtcttcaatattctcttacatcatcccatcactaagctatgctgagtctaaattggataatcatggaggtgaactaaagccggttccttcgcttcctgttagatggaaaaagaaatttgagacacgacatgaagtcctggatagtgttaaagaatacactacttgtacaactgaagaattaaaaaaggcttgtgaagataataaaaaaatttggactcatagtaacaataagcaaattgctagaattagactttgtagtgagaataacgactgtgtttctggaacgagtaccagctctgatgaattccatgatccagagaagaacagagtcc

SEQ ID NO: 4608 - DNA, 485 bp, Gossypium hirsutum
  Clone ID: GOSHI-09MAY01-C26712_1
gcgaactctagtgactcctaagaagaagtctgaggagttagggatagccacttcggggaaaagatctgagtcttcggatgttaatgctgccgtttcagcggagcacaacgatttgccaaatttaggacttgattcttccaaaagcagggataaattgaacaacagaagctctgctccatggaatgataactcaatttctgtcacttctccagaaagtaccattgaggctaagaatgtgaagaaaacttctgcttccgatttaaaagttgatagcactggtacaatgtttggcaataatgcagggtctttactagattgtggaaaaactcaggattctcaaatgaagactgcacacaaggatctcccaaagttcaccggtgctgcagtgtctgaggcaccatgtgagggtttgctaaagccttcatctaattcctcgggaaataaacctgctttggccttaatttctgtgaccaagcccgagcaaa

SEQ ID NO: 4609 - DNA, 687 bp, Gossypium hirsutum
  Clone ID: GOSHI-09MAY01-C26612_2
atcctctcaaaatcctttttctgatgcaaaatttactcctttttagttttgtggagtatgtcaaaagctggggtttttcctggttaactaaggcctatttttgggtgggttgaacttatatcagtactagcagattagaggttctctcaagtttcagacgagatgggaatttgtggggataagggtttcttcagtgctccacttggggaaaaagatgtggcagcctctctaattgaaccagaggcgacggtggaggatgattatagtgatgaagaaattgatgtggatgaacttgagaggaggatatggagggacaaaatgcgtctcaaacggcttaaagagcagaataagtgcaaggaggggattgatattgctaaacagcgcctgtcacaagaacaggcgaggagaaagatgtgggggttctcacggcagaataagtgcaaggaggggattgatattgctaaacagcgccgatcacaagaacaggcgaggagaaagaagatgtgggggttcacacggctgtgatcaagcatatatgctcgttttctttagttttggaatgggtcagaagatttctttctgaccattttcaaattttttgatgttgtaaaactatataacatatggattatgatgtagaattttattttaaccttttcttaatataagttaattatgtttatgtag

SEQ ID NO: 4610 - DNA, 896 bp, Gossypium hirsutum
  Clone ID: GOSHI-09MAY01-C26612_1
cactttgtctctgtcttttcttttttatataaaactttgacaatctacagggaaggaagcaatcaccggcccttccctcctctctctctctctctgtaataatttatatttctcttttaggagagtagaacttataaaacccatttccctctttctctgtccatccatttctccctcttttcttctttttcttcttttttatcctctcaaagacctttttgtgttgcagaatttactcctttttagttttgtggactatgccaaaagctggggttcttcctggttaactaaggcctatttttgggtgggttgaacttatatcagtactagcagattagaggttctctcaagtttcagacatatttgagttcctatcttggaacaatgatgatgtttgacgagatgggaatttgtggggatatggatttcttcagtgctccacttggggaaaaagatgtggcagcctcacaaattgaaccagaggcgacggtggaggatgattatagtgatgaagaaattgatgtggatgaacttgagaggaggatgtggagggacaaaatgcgtctcacacggcttacagagcataattagtgtaacgacgggattgatattgcttaaccgcggctgtcccatgatcaggcgaggagaaagaacatttcgatggcacacgatgggattttgaactacatgttgatcataatcgacgtttgctaagcgcacggttttgtttatgggattattccccaaaaggggaagcccttcactggggcttctgacaatcttcgggaatggtgcaacgatctactctcgtttgatcgtaatgggtcctgctgctttctgctcgttttcccgcagattatcccatcccctgccacgaatgatggccgttacctccc

SEQ ID NO: 4611 - DNA, 415 bp, Gossypium hirsutum
  Clone ID: GOSHI-09MAY01-C26162_2
cttagttgttgccactcagctggtggaagaatctatggtgaagcttgatagaatttgtagacaagaaaatgtgatgtcgatttttgctcgctcctacggcctaacaggtttagttcgaatcagtgtgaaggtaacatgttcttggcattgactatctcaccatggtgacatcaatatctcactgataaagctgaatatcagcaagaacaaatcttgaaaatcgtttgaacttatataggcctagaggaaatggatggttatttaatatttttcaagagtctagtatataggtaacagacaaaggaaatatctcgaaatgatgatcaagttttgcttgttgcaggaacacactgtaattggatcaaagcctgaccattttctagatgaccttcagctaaataatccatggcctgag

SEQ ID NO: 4612 - DNA, 755 bp, Gossypium hirsutum
  Clone ID: GOSHI-09MAY01-C26162_1
aggaagcgaagaagcaaattgaagctaacaatggcggagcctaaaaccaaatacgatcggcagctcaggatctggggtgaacaagggcaagcagctctagagaaagcgagcatatgtttactaaattgtgggccaactggttctgagactttgaagaatcttgtccttggtggtgtcggaagcattactatagtcgatggatctaaggttgaattcggcgaccttggaaacaattttttggtggatgactcaagccttggtcagtcaaaagccaaatgtgtttgttgcttcctccaagagctaaacgatgctgttaaagctaagtttattgaagagtatcccgaggctttaatcgacaccaacccctcttttttttctcagtttaccttaagttgttgccactcagctggtggaagaatctatggtgaagctgatagaatttgtagacaagaaaatgtgatgttgattttgctcgcttctacggctaacagtttagttcgatctgtgtgaaggacacactgtaatgaatcaagcctgacatttctagatgactcgggttaatatcatggctgaattgaaggtttgttgagctatgatctaatgtcagatctgtgctataacacataccttgtgcatcctgaagatgcccatatgagaacaccatgagctttcttcaccaaacaaaaaagtcagactctaaacgatggttacgataatacttaaattgggcccttatgtgcctggggaatattgag

SEQ ID NO: 4613 - DNA, 429 bp, Gossypium hirsutum
  Clone ID: GOSHI-09MAY01-C26132_1
aagaatcataaccacacttacaaactgacattgaaaatttgaagttggaactttgatatttacaatactaactaaaacatcatatcctttgttatttaagaaaaaaattaatacctattctgaaccttaaaaattttattttggaaaaaaagtcccatatattcacatgtttaccccttgataataggctaaatgtctattttgatttgtattatagtgaaattttcactttcatatctatactacagtgatactctcacctcgagccttttattattatccaaatgttcacatttgataagtgagattttttttttaaacagaaatggtgaaggagctaaagtgatgaacatagtaaaagtaaagagataaactaaccgaaaataagaatttctatataggacaaaggaaaaaataaatattaagcct

SEQ ID NO: 4614 - DNA, 949 bp, Gossypium hirsutum
  Clone ID: GOSHI-09MAY01-C26122_1
ctcaagcatagccagccagctgccagatctgctaagtcgatcaatcgataaaataaaatccagatttcaagaaactagtacttttttttttctgtaaatctgtttcgttgtgttgagaggaggtagaactagaagaggcaacaatggatgcttttagaaggcaagccagcaagctcagagaacaagttgccaagcaacagcaggctgtaataaagcaattcagtggaactggttatgagagctcagatgttgtagttattgatgagattgagatgcaaaggcatcaacaactggacaaattgtacaagtccactcgttcagctagggattttcaaaaagaagttattaaagctgcagaagcatttacagccatcgggtataagcatattgaaacagggaccaagttctctgaagaatgctgccgatatggaactgaaccctctcgtcccatcaacgaaaatattcttgccaaagctgcagctatttatggtgatgggtgtaaacatgtagagaaggagcaagaagatttgattaagttgttatccgaacaggttttggatcccttgagagcaatgagtgctggtgctcctttggaagatgctcgtcatcttgctcaacgctatagtcgaatgaggcaggaagctgaggcactggcagcagatatttccagaagacaagcaagaataagagaagcgccaattcctgaaaatgttgcgaagttgcatgctgctgaagcaaagatgcaggaactgaaagcaaatatggcagttctgggtaaagaagcttctgctgcattggctgctgttgaagcacagcagcaaagactaactctacagaggcttgtagctatggttgaaggggaaaagacttatcatttaagagtggctgcaattctttatgagattgaagctgagaaggtttctgagaaacagcgcaaagattctgctcc

SEQ ID NO: 4615 - DNA, 1202 bp, Gossypium hirsutum
  Clone ID: GOSHI-09MAY01-C26052_1
tgttattccattgatgccccaacttagaagttcttgagactaggaatgttataggagatagaggattagaagttctcgctcgaagttgtaagagactaaagaggcttagaatcgagcgaggtgctgatgagcaagaaatggtggatgaagaaggtgttgtttcgcaaagaggggtaatggctttagctcaaggatgtctcgaattggaatacttggctgtttatgtatctgacatcaccaatgcatcattacaatatattgggacatactcgaaaaatctgtgtgattttcgtctggttttgcttgatcgagaagaaaggataacagatttgcctcttgacgatggagtccgtgatctattgaggggctgtgaaaagcttagaagatttgctctgtatcttcgacctggtggtttaaccgatgtgggacttggttatattggacaatatagttcgaaagtaagatggatgcttctgggatatgttggggaatctgattcggggcttttggagttctccaagggatgccctagcttgcagaaactagaaatgaggggttggtggttcagtgaacgtgcacttgcagcttccgtgatgcaattaacttctttgaggtacttgtgggtgcaaggatatagagcatcagaatcaggtcatgatctgttagctatggctcgtccattttggaatattgagctaattccccgaatagttggagaggatcctgtgattgagcatccggctcatatactggcatattactccctagctggaccaagaacagatttccctgaaagtgtcattcctttggatccatctgctgctggaatatcaagctaattcccacaagacaaaaagttatgaccaatcaggttggagtggctgctgtggttgagcatccggctcattttctcatgtattacttactccctagccaaaccaagatctgaattccccgtaagtgtcattcctttggatccattaggtgccggagtagagctgtaaatataaccttcgtcctagtatccatttttcttatccacgccctgtttataaagttgatgtacttgtattttgtccttttcgattagaggatttcgattttattcctagaagttgtgatgtaataagattgtgttttcctgtgtaattttgaaagcacttgcaagcttggtgggctactgttatgccctttgttcgtgg

SEQ ID NO: 4616 - DNA, 324 bp, Gossypium hirsutum
  Clone ID: LIB3048-006-Q1-L1-E12
ctaaactagtgatccccccggcctcaaggattccggaccagcccccatggcttaattccattttttggggccttccgggaaaaatcggggggattttcgcctggttttcctggatcgaaaggaaaggttaacagatttgcctcttgacgatggagtccgtgatctattgaggggctgtgaaaagcttagaagatttgctctgtatcttcgacctggtggtttaaccgatgtgggacttggttatattggacaatatagttcgaaagtaagatggatgcttctgggatatgttggggaatctgattcggggcttttggagttctc

SEQ ID NO: 4617 - DNA, 550 bp, Gossypium hirsutum
  Clone ID: GOSHI-09MAY01-C26062_1
gcgagaaatgtctttccagcaaaagagtgtatggatgccgagagatggatcatttctaagtaacggagagatgggttatgatgattcttcaaaatctgaagcaaagcggggtcatcaatggtttatggatgccgctgcatcagaattgttcagcaacaagaagcgagcaatagaatcctttaacagccaaccagtttcaggaattgcagacgtcagtgtttctccttggcaaaatgcttcctgttttcagtcggtttctggcccatttggtgaccacctatttggatctgagtccatacgaacagtcaacttggttgataggaacatttcttctgttgaaactggaaatttgaatatgggaagaaaggattttgaggatcaatatggtagtggttcatctgcggctttgtctatgtcccataccattgaagatgcctcttcatgtctcagttttggtggattaaggaaagttaaggtcaatcaagttagggattccaacaacgacatgcgaacattaatggggcacccgtattgctgatgatttaataac

SEQ ID NO: 4618 - DNA, 328 bp, Gossypium hirsutum
  unsure (1)..(328): unsure at all n locations
  Clone ID: LIB3048-006-Q1-L1-F10
cagggttattggttcccgttgattaaaaattgttaaccggccggatccagccattagattccttaaccagccaaccagtttcaggaattgcagacgtcagtgtttctccttggcaaaatgcttcctgttttcagtcgttttctggcccatttggtgaccacctatttggatctgagtccatacgaacagtcaacttggctgataggaacattgcttctgctgaaactggaaatttgaatatgggaagaaaggatcttgaggatcactatggtaatggttcatctgctgatttgtctatgtaccataccattgcagatgcctnttcatg

SEQ ID NO: 4619 - DNA, 1609 bp, Gossypium hirsutum
  Clone ID: GOSHI-09MAY01-C26002_1
catttaagtttaaataataattctaaaacggactgaaaataagaatggcaaaatttattttaccattatcactggtacttggaagatatcctaggatttcaatacaagcagcatttgccaagcaaagcttttaatcctctacactctctcaaaaaaaaaaaaaccaaaaggtgttttgctggcaattagtaaaggagacgatgttacaaagcacattgcaaacaaaatgcaggcggtgcactggattccccaaacatccatctctcagtaaattccaggaacgatcttatagggaaccttgttgcagtatagtttccagtacttaccatatttggaccggcaccggtcatcatccctcttggctcggtcgaataagaggatggtaagaaacacgacgtagaagtatggcagaaaatggttgaataaagccggaacagtccaaaagaatgcagctaatatttctggcacgtaatggaaatgacgagccaaaccccaccatcccgatgttaaaagaaggctggttttggtttccccgcatgttgttgtgtaggtggcttcaatctttgatggagcttttccccaaattttgcatttgcccttccttctgcgaaattcttgtctttgcctatcacaatcatagttgatatatatgcaaagaacgccagcgacaagaatatatagtgcaagctgcattccaaggtttaccggatggttgacaaggtacatccctggtgaagtatacacggatggaacccaaaccaagcaaccccagcaaatatagaatccagctcgatcgtgtgcaatgtccattgtgttccagtaaccagcttcccaccaaaagaactttgtaacatacacaagcatcaatgtcgtattctctagcactgcatctgttgctctcccattgagttcatactgctttatgcaataggtgacagcgagaacagcccaagacttcatcccgaatctgcaatttgtaaagactttgatgtcgaagtttttcccaattcgtggatacagctccatgccccagtagaaatcaattataaggttccccgatgacccaggaatctgtagaagaaggtgccacatgacctttaatgtataagaaaacacaaaagatcaagcttccaaagatgagtgctgaatatatttctcccaaatgatcgtaaacaaccgggggttgaaattctcgaaccacccaaagactaatataggtaaccaatgtcacaaagtacgctgccataccattcgccttgtaaacaggtcggttaccagtgggagataccggacccttcaaccctctttccagggagaagcaattgaagtgctgcttcaaatgctccataaacaaaaataattttccaagcaatggcagtgggtcttggccatatatctatgaaaccttgcaatccatgctgcttgagataattccgagtttgagcaacggatccatcagcatgtaccatcgtataccatagtaggataacaaaaggtgggcaaagtgagagcaaggataacatggagaaataagtgagtgctggtgaatgaacggtctttgtttctggagctgctgccattttttgatcgcttcttagtctttgctctc

SEQ ID NO: 4620 - DNA, 587 bp, Gossypium hirsutum
  Clone ID: GOSHI-09MAY01-C26372_1
gtttaatccaaggaaggattgaacaagtagagagaccgctgagaactccccaaccagaacggctccgtcgtttacaacggagatctgaataagtctaactctaaccctaaccccatctctaacccttgcgccgcctccaagaagtcccgcgagagcgaacgacgtcgtagaaggcgcaagcagaagaagaataagagtaagaatacctcccaccaagaaaatgacgccgcagacggtcccgtttccgaagccggtgacagcgacgctgccgaagatggaaagaagaattccgatcagcagcaggtaatggaagaagttcaggtagagtacgttcctgaaaaagctgagttagatgatggcattgatgaggaatttaggaaggtttttgaaaaattcagcttctgggaagctgctggttctgaggagactgacaagaaggacgagtcttcccaagatgctgatgcaaagaagggggctgattctgattcaggagaggaggagcaggataatccacagaaagaaaaggtggcctatcaaataagaagaagaagctgcaaaggcggatgaaaattgctgagttaaaacag

SEQ ID NO: 4621 - DNA, 376 bp, Gossypium hirsutum
  Clone ID: GOSHI-09MAY01-C26362_2
caggaatccccataatcgtcactgaggggagatccagcgcgatgcctagctttaacacctgcagacctgcaaaggctcctactgcaaatggggatggaacatttgtgtgcagtacagtcgttgttgcaaggagtttccctgaccggccataaaccaccagacccgatgccgaattaaaacttcttttatcaaaagttgcgtcgaattgaatcgtcaccctaacaatagcctctcgttgactgtgacttctacccgtattcaaggtacattttctctccattaaacctttgatttcagctatgtatgaatttgttcctcgagctccagatgaaccacagtccacaacaaaatattttacatgttcagaagtactcgt

SEQ ID NO: 4622 - DNA, 451 bp, Gossypium hirsutum
  unsure (1)..(451): unsure at all n locations
  Clone ID: LIB3048-010-Q1-L1-C5
tctaggaattctcccatannatcgtcacttgagagggaggatctcatgcggcgatatcctcagcgtttatacatcgctgcagtactctgtcaaagagcgtctctatctgtcgaaatgggnngatggaaccatnnttgtgtgcacgtatcagtctngttgttgcaaggganngtttccctgactcggctcatataaccatccagactccgtatgccgaattaaaaccttcttttatcaaaagttgtcgtcgaattgaatcgtcaccctaacaatagcctctcgttgactgtgacttctacccgtattcaaggtacattttctctccattaaaccttcgatttcagctatgtatgagtttgttcctcgagctccagatgaaccacagtccacaacaaaatattttacatgttcagaagtactcgtcttgaagactcaggtaatccactcccag

SEQ ID NO: 4623 - DNA, 512 bp, Gossypium hirsutum
  Clone ID: GOSHI-09MAY01-C26322_1
gcttgttcagctaattttgattttcttttggcaactgagacagacgatcaagagttagaaatgctaagggctctggtgaggaaagcagcttcaacttcagcttttgggagtgcaaattcagccccatgtcttattgctaatccaatccaccacctacagaccaaacacttctccataggaatcctccctgatggggtcaatcgtagctccgacaattttgtccagaattccgatgccatggaacgtctcttgtctgaccttcaatcccatatcaacaaggttcttgctggaggaggagaaactgctgtgaaaaggaacaggagcagaaataagcttctccctagggaacgaatcgatcgtcttcttgaccctggttcttctttcctcgaattgtctcagcttgcagggcatgaattatacgaagaccctttaccatcaggtggaataataacaggaattggtccagttcatgggagactttgtatgtttgtggctaatgacccgactgttaa

SEQ ID NO: 4624 - DNA, 727 bp, Gossypium hirsutum
  Clone ID: GOSHI-09MAY01-C26292_1
gcaagatctgttgtcaactgagattgtcaaccgtgggatcgaatcatcgggaccgaatgccggttcgttaacgttctcggttcgggttcgaagacgactacctgattttcttcagtcagttaacttgaagtatgtgaagttagggtaccattatttgatcaaccatggtatatatttggctaccatacctgttttggtacttgtttttagtgccgaagtgggtagtcttagtagggaagagctttggaaaaagctttgggaagatgctcgttatgatctcgccaccgtgctgtcttttttcgctgtttttgtgttcaccgtttccgtttacttcatgtcacgccctcgttccatttatctaattgatttcgctcgttatcgtcctcacgatgacttaaaggtgacgaaagatcagttcattgagcttgcaagagcatcaggcaagttcgatgaagcgagtcttgaattccagaaaaagatactgaaatcttcagggattggggacgaaacatatgttccgaaggtgattatgtctaaagaaaactgtgccacaatgaaagaaggccgtctcgaggcgtcgactgtgatgtttggtgccttggatgagctctttgagaaaaccaggatccgacccaaggatgttggggtcctcgttgtgaactgtagcatattcaacccgactccgtccctttcggcgatgatcatcaaccattataagatgagaggt

SEQ ID NO: 4625 - DNA, 436 bp, Gossypium hirsutum
  Clone ID: GOSHI-09MAY01-C26272_1
gtagtctcgagttcactcattaatatgtatgtaaaatgtgggcagctagagattgctcgtactgtatttgatcaacttggttccaaggacttgatttcctggactgcaatcatgtcaggttatgccatgagtgggagaactagagaggcaagggaactctttaatatgatgccggaacggaatgtaatctcatggaatgcaatgctagcagggcatactcgtttgtctcagtgggaagatgccttagaatttatttttcttatgcggagaatgactaaagattttgaccatgtgacgcttgttctaattttaaatgtctgtgctggcctgtcagacgttgaaatggggaaaaaggttcatggatttatctaccgacatgggttcttttccaatatatttgtaagtaatgcacttctggacatgtaccgaaaatgtg

SEQ ID NO: 4626 - DNA, 406 bp, Gossypium hirsutum
  Clone ID: LIB3135-013-Q1-K1-D8
gaaatgattgaaatttctctgtttttgacatacatgagttcatttttctctgcggggtttcctttcagttagatgattgggttccttgccgaatctacaagaaatccaatgctttatcttcaacaacagcaataggagcagcaacaagtgatcaagatctagaggaagaagaagcagaacagttcattaaagatgcccttttaccagcagccattaaaagcccttcaaccaccaatgcccttctgcctcagaaatcttgttccttctccaacctgttagacgctatggattactcaatgctcagtagtttcctggcagacaaccagtgcaatgggatccggatatgatcccacttcatttacctttgagcagccactagtgaataattacaccattggaaacaaca

SEQ ID NO: 4627 - DNA, 291 bp, Gossypium hirsutum
  Clone ID: LIB3048-008-Q1-L1-H2
agaatattggtgtgaaaaaagctctggttttttacaaaagaaggcctcctaaggggatgaagaccaattggatcatgcatgaatatcgacttgcagataaccctaattccaacttcaacaatagaccactcaagtccaaagattcctccatgaggctagatgattgggttctttgccggatctacaagaaatccaatgctttatcttcaacaacagcaataggagcagcaacaagtgatcaagatttagaggaagaagaagcagaacagttcattaaagatgcccttttaa

SEQ ID NO: 4628 - DNA, 429 bp, Gossypium hirsutum
  Clone ID: GOSHI-09MAY01-C26232_1
ctccaactccacagcaaaagccacccaaatattaaaggtccatggatccttttagaagcttcttcagttgttttttcggttcaagtaaggtggcgtctcaaggtgacaatactccaccaacatccagcaacgttaaagccaaatcgaaggaaagaaacagtaagaaaagccctccgatcccgatgacttacttccccattggaaccaggtttagtcgcttgtgaagggttccaactacagtttcttttcatcttccacattattaacgaatcaaccatgtttcgtcgagggaagtactgagttactctgtgattctttcttccatttagtgggaaaaggaattaagtttggaattgagcaaaggctaactggtgtgcaaataagctgggttttttttagatgtatgattgaagaaattaatagtatatt

SEQ ID NO: 4629 - DNA, 398 bp, Gossypium hirsutum
  Clone ID: GOSHI-09MAY01-C27942_1
gtcaagacctccaccgatccacctccggtctgtttgttgattcccgaatagccaagtagaagcaagcatacaagaacgaggagtttggtacaggtacgggtttgctcatcttattcggtttcctcgttttcattctctttaagatacttcatttcttctgaatcaatggttacaattatgttatcttccttgttaatgacactttgggaaggaaattatattaatgttgttgttgttgatgaatccttgtgattgtatgatcaaatatggctaatcgaaactttcgaaccgcagaaacccaactgggtttggttgattatatgtttatatctggaaataaaggccttatgggtaattcctaatttcgtcccaaaacttcccaactgggtcaactcctt

SEQ ID NO: 4630 - DNA, 457 bp, Gossypium hirsutum
  Clone ID: uC-gsflmaxxa026c09b1
ctattgttcacgcgttcgcccacgcgtgcgtccacctgcaccgtcaagaccttcaccgatccacctccggccggtttgtttattcccgaatagccaagtagaagcaagcatacaagaacgaggagtttggtacaggagttcctaacacgttgaatgtgagcaccaatttcccatttctgattgagggtgttcttgggtttgttctttgccttggaggaggaagctttttcaatataagattgccaggagagctgtggggctggctgcttttctatggaggaactgcaagtgcggcttttggttctgcttattatcatcttaagcctgatgacaatcgaagactgctggacaccttgccgatgatgattgcttattcctcacttttttctactttatactcgagagactcggagaaagaattggattaaagtgccttttttactagtagatcttgctg

SEQ ID NO: 4631 - DNA, 853 bp, Gossypium hirsutum
  Clone ID: GOSHI-09MAY01-C27972_1
ataatatattcttcaacggactcgttggttggcaccggccgcctctttgtctcgcttcacgacaagtcccagtttcatttttaattattgttttcacatccattttcactaagctatatatatcgttagttttctggaaatttgagctattgatctttgcgttgaatatggattgtgaaatggagaaaaattcccacgatggggttgtcgttaacggcggaaacgagggcgttttgggcctacatgccaagaggaagaagctcattatcgataccgatccaggaattgatgatagcatggcaatcttaatggcattccaaaatccggaggtggatatcttaggtttgacgactgtatttggaaatgttaggacggaagatgccactcgtaatgccttacttttgtgttagatcgcagggtgtccaagtgttcctgtagttgaaggcagccacgaacctcttaagggtgggaggcccacgtgttgctgactttgatcatggctctgatggaatggggaatatatttcgacctcctccaaaaacagagaaatctgataagagtgcctctgaatttttagttgaaaaggtctctcagtaccctggtgaagtatccatacttgcacttggaccactgacaaatgtggcattggcaatcaaaagagactcttcctttcctagcaaggttaaaaaaatagtagtacttggtggctcattctttgcattaggaaatgttaatcctgcagctgaagcaaatatttatggtgatcctgaagcagctgatgttgtgtttacttcgggagcaaatatcgttgttgtcgggataaacattactacacaagtccaaatgacagatg

SEQ ID NO: 4632 - DNA, 1105 bp, Gossypium hirsutum
  Clone ID: GOSHI-09MAY01-C27532_1
gtttgaattccattatctgaaactacgtgtaattgttgtattcctctctctgttgattgaatttttaaacttcgtctgtatatctagggtttattctttttacgaaccctaaaaaaaagaaaaaaagtaattggatattttttttgtgctttttcttggagattttgttttcttttgtcttgaatctttttattgagaagagttgtgtggttcttgattggtatggcggcagggcgagttgatgttcggaggagaattgatgttgagaaattgaatcggggccatgttcatgcaaatcccgttaagaatggatacaattatccatctaatcataagaataagttcgatctgggtcctaggcgatgtgggttagacgatgttgccagggttaaaaatgatgtgaaacagatgatggatgatggggttcagcagcccccggaaaaaaagagaagttttccccgattgtatgggacctggaagacaagaaggaagaattcattcaagacagggatgttgtgacgactaccattctgtcatctccttcttcaccttccaaggtgtcaaatactgtttccaatcaggtttataagcatcaaccgttctctgcaaacatgatcaaagaagtggagcatatggcatccaagtctctggtatctgattttggtgctgctttatctccttcactgcctgagcagcaatgccaggatgatgaacaagaaccagagttgattggaaaagaaaatgttcgagcacccaacatatttacatcacgttgggcttctgatagtgatgatgaagatggatctctaactgaggaaaagattaggaggagttcgagtcttgagagtggagagcttgaaagagaggagttggaagtagatagggtacagtctgatcaaagaagcagcagtgtactgtctgcttgtgaggatggaggcatggactgtaagttggactctgttgatgtgatggatattgatgacatgcgtgatgaaaatgctattgttgatcggccagatttaggtgttgaagagccagctggaggatgtatgaacatcctttatggatgcagaagtgtttttgggtatgaacaattgaaccaaat

SEQ ID NO: 4633 - DNA, 440 bp, Gossypium hirsutum
  Clone ID: GOSHI-09MAY01-C27762_1
gttgctaacactttcgggtcatttgctttactcgtactgtttgcgttgggtggcttcgtcctgtcacgagaggacataaagggttggtggatatggggttactggatttcaccaatgatgtatgggcaaaatgcattgatggctaatgagttccttgggcaccagtggagtcgagtccttccgggttcaaacgtatcactaggagttgaagtcttaaattccaggagtttcttcccagattcatattggtattggatcggagtacggggattgattggcttcgtattattgttcaactttgtctttactgtggctctttcctatctagccccctttgagaaggataaggccgtaatatcagatgaacctgaaagcggtaacctatcaagtcaatggggctggagttggtggaagcattcagttaacaaaccatgaaagca

SEQ ID NO: 4634 - DNA, 443 bp, Gossypium hirsutum
  Clone ID: GOSHI-09MAY01-C27602_1
tagatatacaagcttgaaatggaacagaagagattagaagaggatgcctttgtctataattggctgcaagagcaacttaaactatcaccggcttacaagaaggtagagctcatacctatattctaatagcatagtaaagcttatcgtaaaattttgttaatgctgttgtctgtttagttctcaaggaaggataactgagcataattgcccaaattattgcaaagtaaagcttatttgtctcccatcactctgcttttggcttttattcttagtggcttcttgttaaccttgaaactctatgcatggaactttattttgttattacctatctgtccgtgcaacttaacagctattatcatgtggttgaatttggaatataaacaaccttttcggtttggcttcaactctttaagttgcagtttggtacgacacttaatttaaca

SEQ ID NO: 4635 - DNA, 770 bp, Gossypium hirsutum
  Clone ID: GOSHI-09MAY01-C27352_1
tttaactccccgcttctctgaatcccgggcggttttaatatgtctttcatttcttaaaagaccctgtcaagaacaaacctaaactatcatagcaggtgtttttggtttttctgaaagccaggtgatcccagaatagagatccagatttcccttttttgtttttgtttttcaatatttattatcatcagctaagagggtttatttttggtccctcaaggttgtttttttttttaatcaaactagtacctgttctttggttttggttaagatacaggtttttacctagttattgaatatggcagcagctatagatatgtataatagcagcagcaacagctcagttttctcagatccttttagtgcggagctgatgaaagcgcttgaaccttttatgaaaagtgcttcatctacctctcctttatcttcttcttcttcttattcacagtctaacctgtatcctgaattttgctccccatggaggacccatttgtgctcagaacaagggttctgtaactatcaaaacttgatgggttttgagcaaacaggttcaattgggctaaaccaactcaccccttctcaaatcctccaaatccaagctcaaatctatcaacagcaacagcagcagcaggaggttgcttccaagtctacgaccgcatccctaaaaaaccaaaggttcaactttctttccccaaaagctgtacccatgaaacatgtgtcttccacccctccaaagcctaccaagctgtacagaggggtgagacagaggcact

SEQ ID NO: 4636 - DNA, 333 bp, Gossypium hirsutum
  Clone ID: LIB3048-022-Q1-L1-A1
ccactccagaaaataaaataaaaaattgagagttttcagaggttgcaacactgttcgagcattttcagatttcttcttaatcccccccttttctgtaactccccgcttctctgaatccctttctgtaatcgtctgtctttcaagccgaaaaagtttctgtcaagaacaaacctaaactatcatagcacgtgtttatggtttttctgaaagccaggtgatcccagaatagagatccagattttgttcttgttttgtttttcattatttattatcatcagctaagagggtttatttttggtccctcaaggttgaactctattaatcacactagta

SEQ ID NO: 4637 - DNA, 633 bp, Gossypium hirsutum
  Clone ID: GOSHI-09MAY01-C27232_1
cccacgcgtccgtgcacgaattatgaatgccatacttgtactgcctgagctggatgcaggctccttttggcatgatgaaagtggtttccaaggtatctatgatgttgagcattttatccagacattgaagtatgatgtacaaattgtggaaagcatacctgaaatccgacaaaatggcaaaaccaagaagataaaagggtatcagcttcgccccccgagggatgctcctatcgagtggtatacaacagtcgctctcaagaaaatgcaagaacatggtgctatttatctgactcccttttcacatcgtcttgctgaagaaattgacaatcccgagtatcaacggttgaggtgtagagttaactatcatgctttgaggttcaagccaaatattatgcagttaagtgagtcaatagttgataaactccgggcacagggtcatttcatgtcgatacatcttcgttttgagatggatatgctggcagtggctgggtgcggtctttttgttatccttgtagagctatggtaattcattcacagttgccataggttgtctaggctatgcattcattttgcttggggctttgtgcctgaatagccttagctgtaacattaagaaatataaaatctttcatc

SEQ ID NO: 4638 - DNA, 415 bp, Gossypium hirsutum
  Clone ID: GOSHI-09MAY01-C27222_1
agcgagagattaggaagaggaagtatgaggagtcattgcgggatgctagaaggaattatcaaagtatggcaaatatgtgggccagtttagctcaggattcaaatgttgcaactgcgcttggattggtgttctttgtgatattttataggacagtggtgcttagttacagaaagcagaagaaggattacgaggataggttgaagattgagaaggcagaggcagaagagagaaaaaagatgagggagttggagagggaaatggaaggaattgagggggaagatgatgaggctgagcaagggggaggtgagcagaatccttatttgaaaatggctatgcaattcatgaagtcaggagcacgtgtgcggagggcacaaataagagactgccacagtatttggagagaggagtggatgtc

SEQ ID NO: 4639 - DNA, 628 bp, Gossypium hirsutum
  unsure (1)..(628): unsure at all n locations
  Clone ID: LIB3828-013-Q1-K6-H12
ggnaaaggctaccattggctgttcttccacttttatcattgaaagaaaagtagacatgttttcacttcctcaactttgagtccaacaaagattgaaaatttggctgtttttagtggttcaacaagaggggtttctttgttttgtaatagagggcagctttggaggtttaagcctgtaagaattgctggtgatgacccagagggttcacttcagtttacaattaagaagagcaagaagattgcagaaacaaggaaactggtttcgtccttaaaaataatattactgacttagatgaaaatgaagcttttcatgagcagagggataagtctcttcctgatgtggatctcacttcaagcagctctattagtacagttgaaggcaaaaatgggagcattctttcaagcagtcatgttacttcaactgtgaaggacatatcggagatacgaccttcagatgaagctggtgatgaacctgaagtacatttgtcttcagaaaaggcctcctcagatttaggttctaccaaactgctgaaaaccactgattcgaaagcttttaagtctgacatgcttccttcttttccctcaagttcctctgatgctgtcctacttacatctgttgagaatgaaaa

SEQ ID NO: 4640 - DNA, 440 bp, Gossypium hirsutum
  Clone ID: LIB3083-055-Q1-L1-C7
atagaactagcgcatacgacccttcgaagaactatcacgactcgaagctcacttacacgcagctctattagtacagttgaagacaggtgtggaaccattctttcaagcagtcatgtcacttcaactgtgaaggacgtatcggatatacgaccttcagatgaagttgatgatgaacctgaagtacatttctcttcagaaaaggcctcctcagatttaggttctaccgaactgctgaaaaccactgattttaaagcttttaagtctgacgtgcttacttattttccctcaagttactatgatgctgtcctacttacatctattgagaatgaaaatccgaccaaagcatgcctagaaatggttggagagttacatgatcctgcggttgaaagtacaaaacccccagcactatccggtgcaaacgtcatgaacatcatattagt

SEQ ID NO: 4641 - DNA, 1151 bp, Gossypium hirsutum
  Clone ID: GOSHI-09MAY01-C20922_1
gggggggccgccctttgggtctggaggaaggcacagaggcggtagaggagggcatggggctttggttggtactacagtgaaaattcgccagggtccttataagggttaccgtggacgtgttgtagatattaaaggtcaatcagttcgagttgagctggagtctcaaatgaaggttgttacagttgatcgcgattccatatctgataacgtggttatttcaacaccccaccgtgagtcatcccggtatggtatgggaagtgaaacacctatgcgctctgcacgaactccattacatccgtacatgactcctatgagagatcctggagcaacacctatccatgatggcatgaggacacctatgcgtgacagggcctggaatccttatgcaccaatgagtccacctagggataattgggaagaaggaaaccctgcctcttgggggaccagtccacagtatcagccaggaagtcctccttcaagggcatatgaagcacctacacctggttcgggttgggccagcactcctggcggtagttacagtgaggctggaacacctagagacagcggttcagcttatggcaatgctccaagtccctatatgccatcaacaccaagtggtcagcctatgacaccaagctcgggaccctatattccgggtacacctggagggcagccaatgacaccaggaactggtggtcttgatgctatgtctcctgtaataggtcctgagagtgaaggaccatggttcgtgccagatattttggtcaatgtgcacaaatctggggatgagacacttggcgttatccaggaggtgcttccggatgggtcatgtaaggtggcccttggatcaagtggcagtggggatacagtaatcgccatgcccagtgagatggaaatcatacccccgaagaagtcagacaagatcaaaatcatgggtggctcactacgcggtctgactggcaagctaatcggggtagatggcacggatggcattgtaaggatagatgacagtcttgatgtgaagatattggacttagttatactagcaaaattaccctgataataataacaacaacaataatgataactagcaatgtatatgactggtaagtagtttttgagtaaattttgtttggaattcacgttgtcgc

SEQ ID NO: 4642 - DNA, 1126 bp, Gossypium hirsutum
  Clone ID: GOSHI-09MAY01-C20872_1
gcgaacgaaagagagagagagagagaaagagagagatcgagatcgccttctcaggcttttgtgccctaagaattctcacttttctcgctgtaaataagtgcaaaagtcggtgaacttttggggacgtgttcttactgaggttcagagccttcattcgaggattcttgttcttccttagcatggcaaccaatgaaaatcttccaccaaatgttataaagcaactggcaaaggaattgaagggtcttgacgaatcacctccggaaggcattaaagttggtgtaaatgatgatgatttttcgatcatttatgctgacattgaagggccagctgggactccatatgaaaatggtgttttccgtatgaagttgttactgtctcatgatttccctcattctcctccgaaaggctactttctgaccaagatttttcatccaaatattgcacccaatggggaaatttgtgtaaacacactaaaaaaggattggaatccaagtcttggattacgacatgtactcatcatagttaggtgtttattgattgagccatatccagaatctgcactaaatgaacaggctggcaagatgctgcttgaaaattatgacgagtatgcccggcatgccaggctttatactggaatccatgcgaaaccaaaaccgaagttgaaatcaggagctatttgcgagtcaactacagcattgaacgtggagcagcataacacctcggttctgaatatcgagcagaaaaatgcagcaagtggtgccgggttatcattgccatccccactcgctccgtcatcgacaaaaggaggcaacaatccagaccatcagtcgcagccgcagcagcagcctatagttccggcaactgaaactggagttagtggaaccgccgtcgtaggaatctcgggaactgctcctaagaaggaaggtctgtcgaaaatccctgcagacaagaagaaaatggatgctagaaagaaaagtctcaagagattgtaaaaccataggtttttttataagtaataagatataattaaaagaactttgtaagggttcggaaattggttgttttctggtggtaatggatgcttcattctgagaaggtgatggatcaaatttgcacgttgttttcc

SEQ ID NO: 4643 - DNA, 340 bp, Gossypium hirsutum
  Clone ID: LIB3083-049-Q1-L1-B5
tgctgaattaatcacgacgagagaacttgttttacttctcatactttttaaccctaggggggtttttcatgagaggggtgtgggtgagttcaaaaatcatgaaaaacttttggggacgtgttcttacttaggttcagagccttcattcgaggattcttgttcttccttagcatggcaaccaatgaaaatcttccaccaaatgttataaagcaactggcaaaggaattgaagggtcttgacgaatcacctccggaaggcattaaagtgggtgtaaatgatgatgacttttcgatcatttatgctgacattgaagggccagctgggactccatatgaaaatg

SEQ ID NO: 4644 - DNA, 561 bp, Gossypium hirsutum
  Clone ID: GOSHI-09MAY01-C20562_1
gaaccgcttttaagtacaggcgtgggaatacgacgtgaacagggatgaatggaccgagttggctcggatgagtcaggagcgagatgagtgtcaagggatggtgattgggtcggaattctgggtggtgagcggatatagaacggataatcaaaggattcgaggggagcgcggagttgatggatttgaggacgggcgaatggagacgaagtgaggaagcttggaaggcgagccagtgtcctagatcttgcgtgggtgttgggaaagagcagaaactcttctactggggcgactgtgactcggcgatacgagtgggagcatgtgctgtacctttgggagaacgcacacttgtgtctggatcagcttaccaaggtggtccacaggggttcttttcggtcgcggggcacggtgaaagatttaagagaatcgatgttccaccccagttttctgggtttgtacaatctggttgttccctggatatctaattccttttgtaatgaagttggtcggctgagctgatggccgctttatgatgaagtaaatctaagatcaggaaggataata

SEQ ID NO: 4645 - DNA, 792 bp, Gossypium hirsutum
  Clone ID: GOSHI-09MAY01-C20492_1
agaagatcaacatgttgctaccactcaagcaaattgccctccttgaatgaagctgatgatgttcaaccaaatgccacaacaagagaagaggaaatcgatttagatgttaatcaagcaatatcaatagggacagatgttgtgcagtttaatgaaacaattgaagatattcaaatacaacatttatatgaatgcacacaaggagatccctcaaccagttctgaattacatgcagatgctgatcgtggctccaaggatgttgaggaagaaacaatgcagcagcttaaaactgcaacatttgagagtgagactagtgaccaaccaatgaaaaaccatctatcattatcttcagagcttaatgatattgaggaagataaagttccggatacaccgacttccatcgacagtctccatctgttgcacaagaaattgttattgcttgacagaaaagaatccggaaccgaagattccttggatggaagtgttttcagtgacattgagggtggtgatggggtactgactgttgacaagttgaaatcagcattaaaagctgaaaggaaagctttaaatgcattgtatagcgagcttgaggaagagaggagtgcttctgcggtggctgcaaatcagacaatggcaatgataaataggcttcaagaagagaaagcagcaatgcagatggaagcggtgcagtaccagaggatgatggaagaacagtccgagtatgaccaggaagccttgcagattctgaatgagcttatggtcaagagggagaaagagaaggcagagctcgaaaag

SEQ ID NO: 4646 - DNA, 1060 bp, Gossypium hirsutum
  Clone ID: GOSHI-09MAY01-C20792_1
ctcgagtttttttttttttttttttagacatgcaggatgcgtcgtcactcgattgcatttccataacttgtacaagacattcgaaaatttcagttgttcaaactactgagataaataaattggagaaagaaaccgtctctgacaaactataactgatgagagcaaagattgtaatgggaaatgaagaagtagaaggaatgaacaaacccaaacatcttggaacaatcgatttgacactagaaacttgcgttgttgttctttgtgtctttcatcgagcatcagctgatgcgaatgaatcagcaaaacctggcggccggcatggtatgctggtctgtgtagtgtctgtacttcccagaaatgatgaggagtcatccacattgctgttcccctcgaaggcttgccactttttcaatgcttggggtaaagttaattcaaggtcaatgccatagatgtcgtcggaatcgggttctgctggtttccagagctctgctagtgatgacagcacattgaccgcatggctcatatctggcctctggtagggctccctggcacaacagtggccagcaagctcagtcactgtgctaacactggctagcgtttcctcatcaagctggattgtttcatcaatggccttccggaaggtttctttgttcatgtgcatccgacggaaccatgacacaaggtgcatgctttcctcaggctgagtttcatcaagtgcccttcggcctgagatcaattccatgaggatcacaccaaagctaaacacatctaccttcgtggttactcgtccagtaactgcatactccggtgcccgcggcccaaaggttcctgctagccttgtttcaattgactgtttgccatccacaggagtagacggaccaagccaaaatctgcaaccttggcacgcatatcatctccgagaagaatatttgatggcttaagatctcgatgaatgaaactctgttgtgccagaccatctagatactcaacacctcgagcgacatctagggcaattgtaagtcgtctagtccattcaagtggtttcagtccttcatgtttc

SEQ ID NO: 4647 - DNA, 739 bp, Gossypium hirsutum
  Clone ID: GOSHI-09MAY01-C20772_1
cccacgcgtccggttttctgtcttcctaacttctaaccttttttgtgtgattttcttcggggccaaacagctattaagagcaaatggcagattcgacggtcatcaacggcgaagtggagaatcagatggcggacaatttctacgacgctgatgaagccaaattcactgaacaggatagcaaaattaaagcgcttgaaagtgagaagctggacctgagcaacgagaacaaagagttgaaggagaaggtgaaaaaggcgaccttagaaattgatcaactgcgaaacaaggaagaagaaatgaggcaagaaatggataactgggacgaagataagaaggtcctgaaatcagttgccacgagatcggctgatctcgaaaccgaggttgcgaggcttcaacatgatctgatcacttcgatgagtgatgcagatgaagcgaacaagcagtcgatggagttgaagagagaattggaagagaaagggttggagattaggagattgggcaaggaaatcactgaactgaagaaagagaaagttgagagcgagaagagagagagggagttggagaggaaattaggggttctagaagtgagggaatcggaggagaggagcaaaaatgttaggatggaagaggagctgaggcaacagctggatgtattcaagaataaagttaaggacctggaagcagaggtggcgaaaacgagggttgaactggagacgactataggagaacaacgagaatc

SEQ ID NO: 4648 - DNA, 747 bp, Gossypium hirsutum
  Clone ID: GOSHI-09MAY01-C20192_1
gggagactaaaacttcttcgctacttcactcaaatacaaggctcaaacaaatgtggccaaggttccgcagtatacaaactgtgaccaaaccaaataacagttgaaaactacatatgataaactgcatttgagcacctccgatcatgttttccctaggaacaccatcttttttttctcctagccctgaaaatatgtggggatcaaaccaattcttgttcatggcagattgcggtttacgccaaaacaaaataacatacctaccctcaatttcttcctccctactcataaccaccaatgccacttagacgtccatggaagttacccccaccacgccttgagtgtgtctgacccctctccttgtaccttgcaccagtgccatgagatccctctcttcctccttcaggattatttgctctactattattgttattattttggggtccaactggctggtactcgtaatgtgaattgtgcctctgcctctcacgatttgctggtgggttaggctgcttttcttgaccagatgagccccaatcaccacgagattcatgccctctgccatatcggttagcttggtttccatttttgcggaaccctgagactgaacgctgctcatttctattatccatattcgatggaggcgcctcgactggaagaccaggaccttggtttggggagtgtgggcgctctttatgtgaagttacattcctttccctccttggattccatgaagcccaacattatgtg

SEQ ID NO: 4649 - DNA, 411 bp, Gossypium hirsutum
  Clone ID: LIB3083-030-Q1-L1-E2
gtgagagactaagacttcttcgctacttcactcaaatacaaggctcaaacaaatgtggccaaggttccgcaggatacaaactgtgaccaaaccaaaaaacagttgaaaactacaaattaaataaactgcatttgtgcacctccgatcacgttttccctagggacaccatctgtttttctcctagccctgatcaatccatataccattatcagttagacaagatttaatagttttttacaacacaaaaatgctgcctactcgtgaatacctgaaaatatgtggggatcaaaccatttgttgttcacggcagattgcggtttacaccaaaacaaaataacatacctaccctcaatttcatcctccctactcataaccaccaatgccacttagacgtccatgaaagtttccccc

SEQ ID NO: 4650 - DNA, 600 bp, Gossypium hirsutum
  Clone ID: GOSHI-09MAY01-C20162_1
taattatctgatgattattacgaggtctatgatatgatcgtatgattgtgtgtaaatttcgtgaagaaattctatgcataaggtgcggtattcgaagttagggactaaattgaatagttgcaaaactttcattctagaagtttctagtatgaaattgctttgaaatattaactaggaggtcttaaatataatttcaccaatttctaagtttatggacaaaaattggacatggatggaatttttggaaagtttactagtaagggcattttggtcatttaggggtaaaatgaattaaaatacataattaaaagccaattttgctcatcttcttcaccatggacgtgtataccaagggagactccatggctagggtttccaagcgtcccaagctcgattgtaagtccgttctagcccccgttttcatgttctttacgtttttggagtcccgagtaaccttgatttagcttatgctagcaataattcaacctagggttcatatttggaaaaatacccataggtaaaatttgtgtattctagtgttttatgatacaatatgaggttttaaattatattggacaacttgtgctactcggttttaag

SEQ ID NO: 4651 - DNA, 470 bp, Gossypium hirsutum
  unsure (1)..(470): unsure at all n locations
  Clone ID: LIB3083-028-Q1-L1-E9
tggcggtcgttgtctcagaatcagcgggctttttgggtcgtaggaacctggtatgagagtcgaagaaatctcctaacggtcgaaaagagtaagggcgggactactggaggaatcggacactcgggaaagcctaccgcggaagttagcgtaaaagagggctactttatccctgcccccgcaagggagcttattgctcttgatttcgccaagggaaaatccgctgataatcctaagaatccaggggcttacccgccgccaggggacacgcatgattacgagagcccggctaaggtaacaaagtaagccgacgcggcgaccctggccgcgggctaaacgtagccagtagactaagccaagactaccgtcgtcaccaaagaagtcgggaacgctaagagaccccctttactggaacccggaacggatgcggataagaataacgtggccgagttagtanaactgatacctgtaac

SEQ ID NO: 4652 - DNA, 467 bp, Gossypium hirsutum
  Clone ID: LIB3083-028-Q1-L1-F10
tggcggtcgttgtctcagaatcagcgggctttttgggtcgtaggaacctggtatgaggactaccgtcgtcaccaaagaagtcgggaacgctaagagaccccctttactggaacccggaacggatgcggataagaataacgtggccgagttagtaaaactgatacctgtaactaaggtctaaacttgctgcgtcgccgaggtcgaagggactttccatatccacgcgttcgtcaatcgtcccgtaggtcacccctccttcataccgctgtagttaggagttattctctttttaagagataaggcggccacctcaggcgacggaaacttcaaagtcgcccctaattacgaagtcgatactggaatgcatattactaaagtcgctgacgattttagaatagtgaataagatctcacctactaagttccttaagaatattcatctacccaatgagtctactgtttcgcggg

SEQ ID NO: 4653 - DNA, 514 bp, Gossypium hirsutum
  Clone ID: GOSHI-09MAY01-C20022_1
cttaataatgaagggtccaataaagattgcaatcgctgacatgttgatctctttcatgtgggtattttgttcatctgcgtttggtctattaacttattttataaccaccgccgctggtgttcaaaccgtaccttgggctgctattgttatcatcaccgtcgtctttttcgttttcctttccatctttaatattattggtggatttcttggcggggctagttttgatcctgctgctacaactgccttctacgccgccggttccggcgccgatacccttatctccatggccctccgcttcccagctcaggctgctggtgccgtgggtggtgccctggcgatcatggaggcaatcccggaacaatacaagcacatgatagggggaccatctgtgaaagtagatacgcacactggagcctttgctgagggggtcttgacttttgcaatcacctttattgttcttttaatcatgcttagaggcccgcagagtgaaatcttcaagacgtggtttctttct

SEQ ID NO: 4654 - DNA, 708 bp, Gossypium hirsutum
  Clone ID: GOSHI-09MAY01-C20352_1
acgcccacgcgtacgctagttctagatcgccgccatgtatctgagatcggcgggagattcaagactggaatctcgaagctgtctaataatattaatgtctcggcgttctctaacatcgcttcgaatttccttcagtttggatccgaaggtgagggtgttgaaacatacgagagtggaatcgctgtcggtgtgaccgaagaagtggtcgcgttcgctagggatctcgcgatgcatccagagacttggcttgattttccggtgcccgatgatgatggttttgatgattttgacatgtctgatgagcaacaagaacatgctttagctgttgaacgtcttgcaccaagattggctgctcttaggattgaactttgcccaggatatatgagtgagggttgcttttggaagatctattttgtacttcttcttcctcgactaaataaacaagatgcagaacttctgtctacttcccaaatagttgaagcaagagcaatgttaatgcaagggatacacaaccgatctaaggctaagatggaagatcattctgaaagtggcacttcaaatataaaggctgatttaccacatgaagagtttccttctgtgccttctcccgctcaatctaagccaacaccatttaatgaatctcgaaatgacgcagccgatactgctgtagctgttgacgcttcaacacataatccccctcgtcctgcc

SEQ ID NO: 4655 - DNA, 774 bp, Gossypium hirsutum
  Clone ID: GOSHI-09MAY01-C20372_1
cggcacgagggcaccataagaaccgatccatcactctcgggtcagttaaagaattcaatttcgacaatattaatggagagatagaagaggatgctactaagtcagtggaaacttatgaaggtcgtgttggtgaaacatacaatgaaaggccagagcaagctccagcagatggggaaggcaaaccacagcaccataagaaccgatccatcactcttgggtcacttaaagaattcaatttcgacaatgttaatgccgagatagaagaaaatgctactaagtcggtggaaactcatgaatgtcgtgttggtgaaacatacaatgaaagaccagagaaagctgaagtatctctacagaacgaagcagcaagagaaacagaagaaaactctaagtcggcggaaacttacgaatatcgtgtcggtgaaacatgcaacgtaagaccagagaaagctccagcagataaggaagccaaaccacagcaccacaggaaccgatccatcactctcggatcagctaaagaattcaattttgacaaccccgatggaggtgatgtccataacaagcccattgttagttccgattggtgggccaacgagaaagttgccggaaacgacgatggcattcccaagaattggtcctttttccccatgctgcaacctggtgtaagttaaaaaactggtaagcattttagtggggtgccttctgattttccacattattttaggaacttaggtgtggcttgggttggggattcaaacaatttggtaacaacaacag

SEQ ID NO: 4656 - DNA, 529 bp, Gossypium hirsutum
  Clone ID: GOSHI-09MAY01-C20312_1
ccttaaccgtagaagataacggggactgatcccccaccaccccaaaaaaaaaaaaagaaacacaaagggaaaatcgagggagccggcttttacttccaataattcatcattctcctaatcctctctgtattcaagctggcaacaccctctccttcctcttcttcttctcatctcagattttccataaaccctaaatctaaattcccgtttctatgaccaacaattctccaatccccatgctttaacacaaaattccttgtgagaacccctccccaaaatgatgattcctttaattgtttccacatgtattcaccttgttttcatcttcgcggctgtcagctgcgagaaagattctatttacgatatcctaaaggcccatgggctgcccatggggttgcttccgaagggtatatcccgatttgacatcgacgatacgggccgcttcgaggttcatttggatcaggcctgtaatgccaagtttgaaagccagttgcattttgataccaatgtgtcgggtaccttgagttat

SEQ ID NO: 4657 - DNA, 651 bp, Gossypium hirsutum
  Clone ID: GOSHI-09MAY01-C21962_1
gactctttattttttaaagtgctaaccgtatttaacgaaccggtccggttccggttaactgtgcgcactttagcactccctgctcaggataagcgctcccttcctcttcctcgccggttatctgtttttttcttttgtgtatcgtgaatcgttcgatatttgcgaatggctgagctgactcgggccgaggtgtatacgcctcggtcgatgcaagtatggagggcgcttttgaattggcttgcttttttctttcagatcttcgctcagatcatcagagccgttggtcaatatcctttgctttcttcttcgtctacgacggagacggagacgaagaccacgacttcgtcttctacgcaccgttttaagcccttgccggtcgttgactccgtcgagatcgagtgcccctctacagtcgacatcgctgccgttttggactcacccgttcccattgaccaagaccgaaccgaaaaactcaccgttgttctcgacttggatgaaactctagtatgtgcgtatgagacatctagtcttccaccggcccttcgcagtcaagcaacggatgccggattgaagtggtttgaacttgaatgtgtatcttcagacaaggaattcgaagggaaacctaagatcagttacgttacagtgtttgag

SEQ ID NO: 4658 - DNA, 793 bp, Gossypium hirsutum
  Clone ID: GOSHI-09MAY01-C21932_1
aggaaatggggaacagcataggaggaagaaacagggcaaaggtaatgaaaatcgatggtgaaaccatcaaattaaagacaccaattcgggtttgggatgttctaaaagattatccaacaggtcatgttttattagattcacaaactgtgaagcattatgggatccgtgctaagccattagagccacaagagagcttgaaacccaagaaaatatacttcttggtggagctgccgaagcttgccgatgatgaagttcataaggcgccgaggagggtgcggtcaggggggattcatatgagtgctaaagataggttagagtgtttgatgttgtcgagaaggacggtgtcggacctttctatggttcgaccgtcgtcgacgagcatggtgtccgatggggttcgactaggtggtggtggtggtggtacttccggtggggggatgatgactgtgaaaatgaggttgcctaagtctcaaatggctaagttggtggaagagagcaaagatggtgttgaggtggctgaaagatccttgatctttatatcgaaatggtggtatggcggtgatgatgccggtaaccgaatccaccgtgaagcaccgtggaagcctggccttggtaccgctggagaaaactttaagcccaaacgtgagaagagagtgagttttattccacaagaagaaagttaaatccatttagcaaatccattgtaaccacccaatttggaattcgcctccaaatcccgccattccggccccgatacaagttttctttctaaataatttattatttatgattt

SEQ ID NO: 4659 - DNA, 1169 bp, Gossypium hirsutum
  Clone ID: GOSHI-09MAY01-C21892_1
gcatgcatgcaagttgcatgtattgtgttaccaacaaagaaaaagtgatcaatattcaaatcatatgcatctttggagaagataaacttgtcaaaagatccaccatttcaatctatttgataagcatgtgtatatatgaataaaaccaacacatattccactaacaaaggaactcaaaaaagtatttttaatcgctggttataaaatcttacatttgtgaagcatgaagcctttcttcggattcctcttgttccttgttcttcggatcatcgttctcacgatatgagctcgacaacaaaccagcactttttactagggaaagttgatccatcacaattgcatttcttttgtaattccatactagcatcgatatgtagtcctgcggtgaaacaagtccctgctcttgaatgcaacctttttgctcttccagagtttttggatcgtcgagccttatatattcaattaatgccttctcatgatcaggcctccaattgctagggaaaggcgtataatcagtctcgggaatcagagacatccttgtatactgaaggccatcaattgactcagcaagacccattcttagtagattctggtactcgggtgactgtcctttcctctccttcaaaggacgactcagatttcttgcaccaattttataaacctttgctcgtgaacgaagcttgtactttgcagcatagagctttgctagggaacccctaatgatataggaacaaaaattaacaacttttttccggttgtcggcatatctataccactccaccattgttgacaagaacttgttcatttgagcattggtgtgagcttgagttgcatggaacattctaaaacatggttgtgggtctggttccctatcacccttaagaaagtttaacttcctaaattgcttgatgcattgtttcaagctcgccgtgacagataaaagggtcccaacacctttctcactaataatcttaccaccggttgccgtgtaccgaagagttggatataccactctccgacaaagtacatggtcgagaaacataatacctttggttatgtgttcaatcgggaggctctcattatcaagcttgatcataatttctgatcacaaaactcgattaactgtttctcagcgttgctgcatctgcttttggtccacggataccaac

SEQ ID NO: 4660 - DNA, 676 bp, Gossypium hirsutum
  Clone ID: GOSHI-09MAY01-C21872_1
gtttttaactttcagattttggattgtttagccaccaaaaaaaatatcgaaattaaaaaaaaaatcgaaaactgaaagaagagtaagtggttgaaacccattttcgtttagacggaagggaggagagactgtgtggaaatatagagtcagagaggcatggagactgccatacgtggtagattatctctctcaccaaacaccgtctttaatcctaaaccaggagagaaacggtcactgtgcagaggaccatgcaccaatcgtggcgttctcatggctatatcgaccacaggaccaagtaaaggaggaggaatcttggagaagccagttatagagagaaccactcctggtcgtgaatctgagttcgatctgaggaagtcaagaaaaatagccccaccttatcgggtcatgctgcacaatgacaactacaataaacgggaatatgttgtccaagtattgatgaaagtgatcccggggatgaccctagacaatgcagttaatgttaatgcaagaagcacactacaatgggttggcagtggtgattatttgtgcacaggccgatgctgaagaacactgcctgcagctaagggggaatgggcttcttagttcaattgaaccagcaagtggtgcttgctgaagagtagacctatttggctttatcactgtaatgtatatacat

SEQ ID NO: 4661 - DNA, 662 bp, Gossypium hirsutum
  Clone ID: GOSHI-09MAY01-C21862_1
caaaactctgcattcagggggaacttcaatctgcaaaatcttcttattctgacagctattaaggcagatccatctagagttatggattatatcaataggctagataattttgatggacctgcagttggagaagtggccgtcgaagctcaactgtatgaagaagcatttgcaattttcaaaaagttcaaccttaatgttcaggctgtcaatgttttattggataacataagaagcatcgatcgggctgtggaatttgcattccgagttgaagaagatgctgtttggagtcaggtggcaaaggcacaactgagggaggggctagtaagcgatgcaattgaatcgtttattcgtgcagatgatgctactcagttccttgatgtaatccgagcatctgaggatgctgatgtgtaccctgatttggtgaggtaccttctgatggttagacagaaggtcaaggagcccaaggtggatggtgaactcatttatgcatatgcaaagactgatagactgggtgaaattgaagaattcattctcatgccaaatgttgctaatcttcaaatgttggtgatcgtttgtttgatgaagccttgtatgaagctgctaaaataatatttgcatttatatcaaactgggccaagttggctggtacactggtgaggctt

SEQ ID NO: 4662 - DNA, 353 bp, Gossypium hirsutum
  Clone ID: GOSHI-09MAY01-C21802_1
accactctttatgtcacctaaaaaggagaacctcgattatctggttaacttattgaaagacggaaagcttaagacggtaatcgattcaaagtatcccctaagtaaggctgaggaagcatgggctaagagcattgatggtcatgccactggtaagatcattgtggagcccgaatctatgaaatattactttatacttactgcagtgatgcttggaggtcatgctgcttgtgtgtataattaggatttgtgtatcttgaaaattatgtgtatgaaatgtatggttaatatacacgttggatgacattgcaaaagttttcttaatgtgtcataacctgtgtgttcacaaaccaccc

SEQ ID NO: 4663 - DNA, 889 bp, Gossypium hirsutum
  Clone ID: GOSHI-09MAY01-C21562_1
ccgggtcgacccagcgtttctccggcttcccaaacaaactaaaggcggaatcaaacgccatttaaacctttattttgttcccctttcggctttatataagagggttaattttctggcttccctcttcgcttcccgttcttattctatcctcgctgttcgcagattcctcagagctccgattacgatggctgctgttaccggatccaatgtcgtcgctctaaaacccgccgcgaggcttgctgatcctactgaccgaaaatttgttcagattcggcaatggtctccgatttccgccggattcggatcggttcaggctcggccctgcatcggtctccagtgccaatcgaaacgatcatttgcgtcccccggtgtaaaagctcaggttgccactgttgaacaagccagcattgaagcagctcaaaacgtagaagctcccgtagccatagttactggagcttctagaggcatcggtaaagcagttgcgttggctttaggtaaagcaggttgcaaggtcctagtgaattatgccagatcatcaaaggaggctgaagaagtctcaaaagagattgagtcgtatggtggtcaggctgttacttttggtggagatgtttcaaaagaagctgatgtagaaggaatgataaagactgctgttgatacatggggaactgttgatatattgataaacaatgcaggaatcactcgggatactctgttgatgagaatgaagaaatcacaatggcaggaggttattgatctgaatcttacaggagtgtttctttgtacacaggcagcagccaaaatcatgatgaagaagaaaaagggagagataattaatataccatcacttgttggtctggttggcaacatcgggcaagctaacttcattgca

SEQ ID NO: 4664 - DNA, 372 bp, Gossypium hirsutum
  Clone ID: GOSHI-09MAY01-C21422_2
atagagatctacaggaagcatcggaacgggtagagatgctggaggcaaaaaatgcttagattgaatcagaggcatttatgtaccggaatttggcagggtagctggagtctgatctcaagagtctttcagatgcttacaataggcttgaacagaccaatttccacctagacatagaggcgaattctctgaagagtggggggacatcaacatcttccgatttcgacgcaattaaagctgatgcttgggaagaagcccagaacgaaagcgtagctgagctgtatgatttactcgtgtgcctcggacaagagcagagcatggtggactagcggagcgcaaggatttttcaattaggctaggatgtagacaaactgt

SEQ ID NO: 4665 - DNA, 679 bp, Gossypium hirsutum
  Clone ID: GOSHI-09MAY01-C21422_1
cccacgcgtccgcccacgcgtccgcccacgcgttcgcccacgcgtccgggaagctggagtctgatctcaagagtctttcagatgcttacaatagtcttgaacagaccaatatccacctagaaaaagaggcgaaaactttgaagagtggagggacatcaacatctcccgatatcgaggcaataaaagctgaagctagggaagaagcccagaaggaaagcgaagcagagctgaatgatttactcgtgtgcctcggacaagagcagagcaaggtggaaaagttgagtgcaaggttatctgaattaggcgaggatgtagacaaactgctcgaaggtattggagacgatatggcgcttcctgaagatgaagacgaagaagattgatggagcttgtgttagtactactagtaccaaatattattatgtcttcaacctctcttgaggtaggctggttgtatgttgtcagctcccaatttgtacatttcctggggaaactgtgcagtttattatttaccaaggaggagtaattaatctttgttcatttggatttgtgtcatgatttctatagacctttccggagcatgtcagaaagctggatttatcgtccacccaatacaacctgttcatgtctaaatcatgtcggatttatttattttatttctggaattatatttcgttgttat

SEQ ID NO: 4666 - DNA, 595 bp, Gossypium hirsutum
  Clone ID: GOSHI-09MAY01-C21792_1
aagatcggaaagaatggatgtatattattagctattttgaacataacatgattgtgttacatgtacagtttattaagtcggtaaatttaatttcaatgccatattcttctcacacgaacaaaccataaatgaagaaatggctaagggtagatgtcactaatatccacgcgggcggttcaagtttttctcaacgacggcagtttcctcagagccatggctgaggtagcttagagcggacattcggtatagacaagtaaacactaggatatgcaaaccaattgtgtagaaaaatgcaaacgttcgagcatacttgtttcccagaagaaaacgtccgctgctgagtgtgattctgtctctgaagcccagctccttgtatctttgatccctctccttttttgagaatgctgcaaagggattaatatcatcctcatatatcttcttgtacttggattcaacatctgaggtgaaaccactttcaagatcctcggcatacttctttgatcctctagaaattactttctcctggttataatcctggacataacgaatctttccataaagtttaacattatcagcttttgttttctccagttct

SEQ ID NO: 4667 - DNA, 326 bp, Gossypium hirsutum
  Clone ID: LIB3147-008-Q1-K1-D8
cccacgcgtccgcccacgcgtgcgcccacgcgtccgcccacgcgtccgcaggattataaccaggagaaagtaatttctagaggatcaaagaagtatgccgaggatcttgaaagtggtttcacctcagatgttgaatccaagtacaagaagatatatgaggatgatattaatccctttgcagcattctcaaaaaaggagagggatcaaagatacaaggagctgggcttcagagacagaatcacactcagcagcggacgttttcttctgggaaacaagtgtgctcgaacatttgcatttttctacacaattgggtagcatatcctagt

SEQ ID NO: 4668 - DNA, 610 bp, Gossypium hirsutum
  Clone ID: GOSHI-09MAY01-C21782_3
cttctaatcacccccacctccagtgaaggctccagcacctacctaccactacaactcccctcccccaccatcaccatctcctcctcccccatactactacaaatctcccccaccaccagcccactctccctcaccaccatactactacaaatctccacctcctccatctccctcaccacctcctccatactactaccactcacctcccccacctgtgaaatcacctccacctccagtctacatctacgcttctcctccaccaccaacaccctactagatctaaaaagatcgaccacacaccgttcatgttgtagtttcgccagcaaaataaaggaaggtgccaaggaggaagggagatttggacatcaaagcagttccttttcaagtccatggaataagggtctaagcattacattggagagatacaattttgataattcaggcctacatataacttccacttctttggtagccatgttacacatgctctttatttattgtagtggcataagaaggaagcgagtggtttttctattttaattattgggttctcactttaatttattcgtgtatagaaatgtggcccttccgatgattgatgaaagctttt

SEQ ID NO: 4669 - DNA, 816 bp, Gossypium hirsutum
  Clone ID: GOSHI-09MAY01-C21782_2
ggctccagcacctacctaccattacaactcccctcctccaccatcaccatctcctcctccccgatactactacaaatctcccccaccaccagcccactctccctcaccaccatactactacaaatctccacctcctccatctccctcaccacctcctccatactactaccactcacctcccccacctgtgaaatcacctccacctccagtctacatctacgcttctcctccaccaccaacaccctactagttccgtgtcgtcccacgcgtccgttaatcgatcgaccacacaccgttcatgttgtagttgcgcctgctataaataaaggaaggtgccaaggaggaagggagatttggtcatcaaagctgttcctttttatttctttttctattttttttcttctttcctattttttgttttttttttttatcttttcttttttttctttttaattctttctcttttttttttcttttcactctattttttttttccttttttttctttatttttttttttttctatttttttatctcttattttctttttattttttatttttttctttcttttttttttattttctcctatctctcttttttatctatttcttctttttttactcttttctcttctcttcttttctatattttacatctctattttttatctttttttttttatcttcatcttttttcttctttttattattattttacttttccttagtattttcttatctatcccttttttatctatttatattttttattcttttttttatttttcttcttttttactttttctttcttctt

SEQ ID NO: 4670 - DNA, 677 bp, Gossypium hirsutum
  Clone ID: GOSHI-09MAY01-C21782_1
caagtccccaccacctctaccatactactacaaatcacccccacctccagtgaaagctccagcacctacctaccactacaactcccctcctccaccatcaccatctcctcctcccccatactactacaaatctccccccccaccagtccactctcccccaccaccatactactacaaatctccacctccggtctacacccacgcttttcctccaccaccaacaccctactagatctaaaaagatcgaccacacaccgttcatattctagtttcgccagcaaaataaaggaaggcgccaagaaggaagggagatttggacatcaaaacagttccttttcaagtccatggaataagggtctaagcattacagtggagagatacaattttgataattcaggcctacatgtaacttccacttctttggttgccatgttacacatgctctttatttattttagtggcataagaaggaagtgagtgttttttctattttaattattggtttttcactttaatttattcgtgtatagaaatgtggccttccgtatgattgatgaagctttttctatttattgtgggcatgcatttgctatttggtggataatttggtgtactatgtgcactattagcaataaaagaatctatttgttccaatgtcaaaactttttccccttttc

SEQ ID NO: 4671 - DNA, 323 bp, Gossypium hirsutum
  Clone ID: uC-gsflnu33B079d02b1
atcacgcgtccggtctaatttatgcgagtgtagaaatgttgccttgcgtatgattgatgaagctttatctatctattgtgggcatgcatttgctattaggtggataattagatgtactatgggcactattagcaataaaagaatctatttgttccatatgcaaaacgagtcaaaaagagataaaactatattagggaacacattatatatgatgatatgtgaaattgaggtagaatgaaaaatagctttaatatttcttttttatatgatcaaaaaggatcgggtggggatttttaaagaacaaaagttttttttcctttgat

SEQ ID NO: 4672 - DNA, 344 bp, Gossypium hirsutum
  Clone ID: LIB3135-004-Q1-K1-E7
gatacattacttgtatctatcctttatacctacacaaactcaacaaccccaacagcctactggatctaataagatctaccacaccccgtccatattctcgtttcgccagcaaaataaatgaaggccccatgaaagaaggcagatttggacatcaaaacagttcctttttaagtccatggaataaggttctaagcattacagtggagagatacaatttttataattcatgcctacatgtaacttccacttctttggttgccatgttacacatgctttttatttattgtagtggcattagaaggtattgtgtgttttttctattttaatcacttgatttttacttt

SEQ ID NO: 4673 - DNA, 280 bp, Gossypium hirsutum
  Clone ID: LIB3083-072-Q1-L1-A6
tccaccaccaacaccctactagatctaaaaagatcgaccacacaccgttcatattctagtttcgccagcaaaataaaggaaggcgccaagaaggaagggagatttggacatcaaaacagttccttttcaagtccatggaataagggtctaagcattacagtggagagataccaatttgataattaggcctcatgaacttcacttttggtgcatgtacacatgctttattattaggctagaggaggggttttattaatatgttactaatatcgtaaaggct

SEQ ID NO: 4674 - DNA, 560 bp, Gossypium hirsutum
  Clone ID: GOSHI-09MAY01-C21612_1
aaagaataaaaacaacagaaaatcttcatttctttccttgcactgagaaaataataaatccttggagaaaacccaattgagcgctggaaccatcgaattcgaaatacacttgtacctgttcttttttatctcttcatataattggactgaaataagcagaagaaaaaagcgacgcggagtaacaagaagatgaagcttcagctttgcttcaccttctcctcctattgattttcgccccccttttcatggcctcatctcaacatcgctgcgtttttgtggggaatataccatatgatgctactgaagaacagcttatagaaatctgcagggaggttggccctgttgtttccttcagactggtgattgatagagaaactggcaaaccaaaaggctacgggttctgtgaatacaaggatgaggagacagctttaagtgctcgacggaatcttcaaggttatgagatcaatggccggcaattacgagttgtttttgctgaaaatgacaggctctgaacgaaatcgggaacagactgtagaatttgttcaaaagaaacatgactg

SEQ ID NO: 4675 - DNA, 721 bp, Gossypium hirsutum
  Clone ID: GOSHI-09MAY01-C21062_1
gcaaacgaagaaggagaagaagaagaagaagataatggacggttgggtttttaggatggggaatagtgggcaatgaccatgtcaatgaatttgctgaagaatggatttaaagtcactgtttggaatagaaccctttctaagtgtaatgaattagtggctcatggtgcctcaattggaaaaaccccagctgaagtgattaacaagtgtacgatcaccattgctatgctatctgatcctgctgctgctctttcggctgttctcgacaaagacggtgttcttgaacaaatttgcggcggtaaaggttacatcgacatgtccaccgtcgatcccgaaacttcttgcaagatcaatgaggcgattacatcgaaaggtggacgattcctcgaggcccctgtttccggtagtaaacagcctgcagaaaccggtcaactggtgattcttgccgctggagataaggcattgtatgaagcagcaatgccagctttcgatatcttggggaagaagtctttcttcttgggacaagtcggaaatggagctaaaatgaaacttgttgtcaacatgatcatgggcagtatgatgaatgcattttcggagggactcacactagctgatcgaagcggactgaacccacgtgaccttcttgatgtgctggacttgggtgccattgctaatccgatgttcaaagggaaaggaccagcaatgctccaaaacaactattccc

SEQ ID NO: 4676 - DNA, 397 bp, Gossypium hirsutum
  Clone ID: GOSHI-09MAY01-C21382_1
gttcacaagacgatagagttaaagttttgtctaaagaaaaacacgaagtaggtaagggtgagcgtagacggggcaactgcaaggaggataatgtctcaaaaagggatgagatcatctttccacctaaacaggaatttgctgttgaggggtaccagccacatcatggcagggagcaagcttctgcaaggaagaatgatctcaacattccatcatggcaaaaacaggaagtctctgctggtaaggttgaattttggaatgggaaggatgatgttgccttcaaaacagcaagattgagcagttcttctcatggaaaaataatggaatgagctgatggtggagccaaactacaagatggtaggcagaatgggacgcctagattatataaccaagatgttct

SEQ ID NO: 4677 - DNA, 1184 bp, Gossypium hirsutum
  Clone ID: GOSHI-09MAY01-C21372_1
ttttgcgggcgcgccggccgtcgcgggcgcgaacagagtctgggatttttcgagctgttctaaaagctgatccaagttttgatgaagcaccttggccatctctatcttctgaggctagggattttgtgaagcgtttactgaataaggacccaaggaaaagattgactgcagcccaagctctgagtcatccctggataaaaaagtataacgatgtaaaagtgcccttggatatactgatattcaaactcatgaaggcttatctgcgttcttcatctcttcggaaggctgctttaagggccctgtctaaaactttgactgtggatgagctgttttacttgaaggagcagtttgcattattggaaccaaataaaaatggcactataagcttagaaaatatcaaagcggttctgatgaaaaatgcaacagatgctatgaaggatgctcgcatccctgagtttcttgcatcgctaaatgcacttcaatacagacggatggactttgatgagttctgtgcggctgcattaactgttcatcagctggaggctcttgatcggtgggaacagcatgcacgttgtgcttacgaaatctttgagaaggaaggaaacagacctattgtcattgaagagctagcttcggagctcggactgagcccatctgtgcctgttcatgctgttcttcatgactggattaggcacactgatgggaagctaagttttctcggatttgtcaaattattgcacggtgtatctagccgaaccatcgcaaaagctcaatagaagccgtaaaacttcgtaagagctctactgagctggtatggctaataaaaggttcaggttaggtgtttgctaggctataacctgaatatgataaagaggtagagtgaatttcgccgtcgcaatcaatgcccctaccccaaccccttcgattatggcttatttcatttgtctagcacaagcttattgaccccccccccccccacacacaattgaaggcaatgaacctcctgcaagtgcaacttaacattgaccaagctttagtcattttatgttttctttttccccactgtaaagttaaagaatgtgttaaatataaatataaatatatatatatctaaacagacttgataaatctgccctatttcgtcaagcccccgtgagatcattgattgctgatgtatcatcatc

SEQ ID NO: 4678 - DNA, 659 bp, Gossypium hirsutum
  Clone ID: GOSHI-09MAY01-C21242_1
ggcggtgacagccataaattgctatggcatcagaatgtttgtggttccacaaacaagagtactgtcttgtgttgcaaatgtggtatttcaatggcgccaaatcctgccaacatgtgcgtaacatgtttgaggtctgaagttgacatcacggaaggtttacgaaagcatgtgaccattatgcattgtcccgattgtgatagctacttgcagcccccaagaacttggataaaagctcagttggaatcgaaggagctcttgacgttttgtgtgaaacggctggagactgatttgaagaaagttaggctggtaaatgctgaattcatttggactgaaccacattctaagagaatcaaggtcaagctgggggttcaaaaagaggttcttaatggagcgattttggagcaatcttatgttgttgagtatgttcaacaagataacatgtgtgactcttgtacgaggtttcaggcgaatcctgaccagtgggtggcttctgtgcaactcagacagcgtgtatcccacagacgaaccttcttttatttggaacagctcatcctgaaacatgatgctgcttgccatgccattaaaatcaagcaaatggatcaaggaattgattttttctttgctaacaagaatcatgctgtgaagtttgtcgaaatttt

SEQ ID NO: 4679 - DNA, 751 bp, Gossypium hirsutum
  Clone ID: GOSHI-09MAY01-C22992_1
agaagattaaggatgaagaaggtgaggggtgtaatatatatggctttttagaagttaataaggtggcagggaactttcattttgcacctgggaaaagctttcagcaatcgaatgttcatgtacatgacttgctagcttttcaaaaggacagttttaatctaagtcacaagatcaatagattagctttcggagattacttccccggggtcgtgaatcctcttgatagtgttcattggactcaagaacagccaagtgggatgtaccagtactttctcaaggttgtccctaccgtgtacacagatgtgagtgggcacactatccaatcaaatcagttttctgtaacggagcattttaagggtgcagaagtaggccggcttcaatccctccctggagttttcttcttttatgacctttctcctatcaaggtgacttttacagagcagcatgtctcgttcttgcactttctaacaaatgtttgtgctatagttggaggtgtttttactgtttcgggaatattagactcttttatataccatggtcaaaaagccatcaagaaaaagatggaaattggtaaacttagttgaagattggggctgctgcttcatgttccagtaagaggtgcttggggaaaaatcaaactaagcgagaagaccacgcagcaatgtaccgtacgtattcctgttcagtcagatttcttggtaatcatgaatatggttggaatgatttcatatttcatttacgagtcttcgtt

SEQ ID NO: 4680 - DNA, 662 bp, Gossypium hirsutum
  Clone ID: GOSHI-09MAY01-C22962_1
tcgaaatgtcattttggataacaaagtgcagcaattggaaaacaagataaagatgcttgaaggagagttgagagaagctgctgccactgaggctgctttgtactcggtagttgccgagcatggaagctccatgagtaaggtgcatgctccagcccgtcgcctttctaggttgtatcttcatgcttgtaaggaaggttcccaattaaggagagggagtgctgctaaaagcgctgtttctggacttgctttggttgcgaaagcatgtggaaatgatgttccaaggttgatgttctggtggtcaaactgtgtcgttttgagagcaattataagtgaaagtactgttggatgcacggaaagaaatggagttgagaaggggaagaaactggcatcatctccattgaaatggagagaatcctctcctggtagaaaggaaaataaaagttttagcgactgggacaacccgcttgcctttacttcggccttagaaagggttgaaacatgggtcttttctagaatcatcgagtctgtctggtggcaggcactcactccgcatatgcagtcggagggcaaaaaggaaatttatgaaggcaagggctctggttcaagtaaaagctatgggaggatacctagttcaagtaatcaagaccaagtgaacttttcat

SEQ ID NO: 4681 - DNA, 312 bp, Gossypium hirsutum
  Clone ID: GOSHI-09MAY01-C22882_2
cggacgcgtggggtccagtttcgagggttaaaaacttcaacatctgaattataagtaaaccccatactcgggtaagactagagagtaaaatactgttcctttgttcgtcggatgcagtttatgtgtcacattttcgttgcatttttttttcatgtttccattgatctcgggacttgtctcgtgtcggttcagccgtaaacatgcaaccaagataatggctatacttggtgcttcgtagggttacttttttttggttagaagtgtcagatattagtgttcaaactttggattatttgaatgcatgccatgttg

SEQ ID NO: 4682 - DNA, 755 bp, Gossypium hirsutum
  Clone ID: GOSHI-09MAY01-C22882_1
gtctcgagttcatttgattttttttttccccacgcgtccgcaaatttctgaatctttatttggtccaaattcgtgttcacagttgagttcgcagcgatgtcgaacgagttcgccgataagggggacaagattatctatgaaaccgaagccaaagggttcaacccgggattgattgtattgctggttattggtggactactgataacattccttgtggggaactacatactttactcgtacgcgcagaagactcttcctcctaggaaaaagaagcccgtatccaagaagaagatgaaacgagagaggctgaagcaaggagtctcagcaccaggggaataggaattcaaggtccgacttttctcttttttcgacattgttaaaaactgttttgttcacaatttctgtccagtttcgagagttaaaaacttcaacatctgaattagaagtaaaccccatactcgggtaagactagagagtaaaatactgttcctttgttcgtcggatgcagtttatgtgtcacattttcgttgcatcttttttatgtttcccttgatctcggtacttgtctcgtttcggtcagccgtcaacatgcaaccaaggtaatggctatacttgggtgatgtttacttgatagagatatatctctaagtattcaccaaagaagccattggtgcttcatagggttactttttttttgttagtagcgtcagatattagtgttcaaactttggattatttgaatgcatgccatgttg

SEQ ID NO: 4683 - DNA, 703 bp, Gossypium hirsutum
  Clone ID: GOSHI-09MAY01-C22832_1
aaatcgggcgagagctctcgcgtcaatttgtacttctttcaatccgatttgactcagttaccttgttttaaggcgtttttggctcgctttccggtcgttcgtttcgatggcgtcgacctcaaaccgaaccggtggcggttcctcctacggcggtgcggctccttaccgatcaagagatggtttaagcacgagaccggtggctagctccgatgagatacaattgcgtattgatccgatgcatgctgatttggacgatgagatctctggtctccgtagccaagttaaacaattgagaaacgttgctcaagagataggatcagaagcaaaatttcagaaggactttttagatcagctgcaaatgaccatgattaaagctcaagcaggggtgaagaacaacatcaggaaactgaacaagagtataatcaagcatgggtcaaaccatattgttcatgtggttctttttgcactgttttgcttctttgttgtctacatgtggtccaaagtatccaggagatgaagttcgcaagactgccggatacattgttgaacggggattgaaaattattcaccaagttggttgtgtataactttgtttgttcatgactttatcactgtataattgaaaaaaacatcaatgtttctaggtttaatgctatggtaaaaacgctagttctttcatcctaaagagatgttttgcgtttat

SEQ ID NO: 4684 - DNA, 656 bp, Gossypium hirsutum
  Clone ID: GOSHI-09MAY01-C22552_1
atataatgacatttaatatatataaatataggatccatgcaacatataataggatggatttctcccaccctgtatatatacatatatatttgtcaacttatcttgattcaatgcataattgatcaatgactacaatttgagaagcagtatagcaagacgtgtacctcattgggccctgataacatgtgcatgggcatgcatgtacagaaacaggatgaaacacttgacagcaaggcctagcgaagcttaaagtgatacacaaacagaacccccacgaagttcatcctctcgacccattgatcgatgtgaccggagttgaatgtgctttgttgattgtttcgttctcttgttaaacaagaaacattgcgatgttcatgttgccaaaatagggactcgcttgttccccgtaaatgcttgcttaagcttataatacccatctctataatgttcgagagagaagcagagttgtcgtatagcttctcttttctcttccgctgcttcctctattgctctactttgcctctcgatttcatcctctagttccttcgcttttccatgcatttcctccaccaatttgtttgctccttcagcactagcgattaattccccgtgttccacacgtcatcggtgcagttgcttatccatttcaacaattt

SEQ ID NO: 4685 - DNA, 596 bp, Gossypium hirsutum
  Clone ID: GOSHI-09MAY01-C22562_1
tttttacgcgtccgcccacgcgtccgggggttccaagaagtgactaagaagctcttcggcttgatacaaaaggcagcatatacagttggaggctactccttcagcgcagctgcaatcgaatatgtaattttgaagatgaaaccaccattgcatagaccacaaattgctttgcttcttgcccttcacaaactgaaggtgtcagatgagcaacgcaagtctgcaatcgatacatacgaaccacttgtaacttttgcactcagttctgggatgtactcatcacctgcggtgagaatttacactgctaagaatgttagggaagagcttgaagaagcacaacgcgattttatacgagcttcggttggggttagcagcaaagggaagctattagttccgaagttactgcactgcttcgctaagggctttgtggatgattccaatttggcagtatggatatctcattacctgccaccaaatcaagctgcctttgtggagcaatgcatatcacaaaggaggcaaagccttcttggatctcgaaattgcggcattcttcccttcgattcacgcttccgttacttattcttgccagataaaaatat

SEQ ID NO: 4686 - DNA, 423 bp, Gossypium hirsutum
  Clone ID: LIB3189-040-P1-K1-E2
cgatgttcaaatcttatactttggagaacttcctggttcaacaggcattgaataatttagtagtctgtgcattctagatctcatttcatctacaatttataagcttctacgttatatatttatatctaatttatatataaggggatgacttcacatggagaactacaagatgattattaatttagtcaagttttagatttttgcagctatttctgatgaaatgtttttactcttccaggcagcatatacaggtggaggctactccttcagcgcagctgcaatcgaatatgtaattttgaagatgaaaccaccattgcatagaccacaaattgctttgcttcttgcccttcacaaactgaaggtgtcagaagagcaacgcatgtgtgccatcgatacatacgaaccactttgaacttttgcact

SEQ ID NO: 4687 - DNA, 338 bp, Gossypium hirsutum
  Clone ID: GOSHI-09MAY01-C22502_2
ggagccaatctgaaaaacctagatctaagcagcgcatgagtcagctctgtcggaattgggattttagtcggacatgttcccaaacttgaaaatgtatctttatctcacacagcaatcgatgatgttgccttgtcatatatcggcttgatgccttcacttaaggttatcgacttaagcaacacagacattaaaggtttttttctccagctaggcactgagtcgcatgtggatagcacactaacagcacttcaaaatcttagttatctggagagcttaaacttggagcatacacaagttagggatccggatttgctccctttattgagttgcaaaaacct

SEQ ID NO: 4688 - DNA, 831 bp, Gossypium hirsutum
  Clone ID: GOSHI-09MAY01-C22502_1
ggatccaatctgaaaaacctaaatctaagccgcgcatgagtcagcatctgactgcatggtaatattagctccacatgagcccgaccttgcaaagtcagccgtatctcacacagcagtcgatgatgttgccttgtcatataatcggcttgatgccttcactctaggttatcgacttaagcaacacagacattaaaggggcttttctccagctaggcactgagtcgcatgtggatagcacactaacagcacttcaaaatcttagttatctggagagcttaaacttggagcatacacaagttagggatccggatttgctccctttattgagttgcaaaaacctgagccatttgtctctcaaatgtgcgtctcttacagatgccactttgcatctcctttcgtctctcccaaagctgacaacacttcatgtccgtgatgctgtattaacaactaatggtctggacacatttagcccaccaacaacactgagagtactggacctgatgggttgttggcttttaactgaagatgctatctcacaattcataaagaaacatcctcaagttgagatacgacacgaaattgttcaaaacctttcaacagagcagcaaacaatttcgaactgcctatccacatcacaacattcttggaggggacctcaatgggaccaaaaagcagggaaatctgcctatgcctcagttttttggtgatcaaagattgaaatataacagagaggagctacttgcgctacagttttcacctctagcccttcaatctccccatgatgcaggtagtgtcacacccaatatataatcatatcaaatgggctaattc

SEQ ID NO: 4689 - DNA, 765 bp, Gossypium hirsutum
  Clone ID: GOSHI-09MAY01-C22522_1
atcatgagtaccaccagatcaaattccttgttagtcaaggttgtataaagccattgtgtgatcttcttaactgccctgatccaaggattgtaacagtctgtttagaagggcttgaaaacattttgaaggtaggagaagctgataagaacctgggcactaccggaggagtgaatctctatgcacaaatgattgatgatgctgagggtctggagaagatcgagaatgtgcagtcccacgataacactgagatttatgaaaaggctgtgaaagttctcgagacatattggttggaggaggaggatgagacaatgccgccaggtgatgcctctcaaacagggtttcattttggcgggggtgagcttcctgttccttcagggggattcaatttcagctaaaggtatgtagtgctgctgtttgcatgcatttgtttttgtgttggtgcactattgggagcgtgttatgtcgtttgagatgggactgcatatctgactaccatttgtatgcttttgagctataaaagctgttagtcttccaggagttatctggtccagtattgaactccttacggagatgatgggacaatagttttgggggttggggggggccggtgccgggggcggcgtctttctttgggttgtgttccccgtcgggtgtggtccacggttccctgtgaatggtagccggctggctgtgggttaaccgcccacgcaggtgcagattgtgcgtgaagggggtgtggagacggactatacccttggcggtggt

SEQ ID NO: 4690 - DNA, 359 bp, Gossypium hirsutum
  Clone ID: LIB3083-082-Q1-L1-G9
gagctgctgtttgcatgcatttgtttttgtgttggtgcactagtgggagcgtgttatgtcgtttgagatgggactgcatatctgactaccatttgtatgcttttgagctataaaagctgttagtattccaggagttatctggtccaatattgaactccttacggagatgatgggacaatagtttttttttttttttggggggggggtccagaggacgcatctaatctttgggttgtgtccacaatctggtatggtccaaagtacagtgtgaatggtagcgggctggcttggggttaacaatacagccaggtttatattatgcattacggggtaatggagacataatttagcttggacag

SEQ ID NO: 4691 - DNA, 418 bp, Gossypium hirsutum
  Clone ID: GOSHI-09MAY01-C22492_1
cggacgcgtgggctagttctagatcgcgagggccgccctttttttttttttttcttttatagctaagcaaatccaaaccttcacaccgtttcttgagtcacaagtcacaaaaaccttttctactacatacatacatacatatatgtttaattattatcatcattcatgataatcacacaaaagacgaggaaaagaggggaaaaaaaagggttttaattagttagaaattgggttttagttacgtatatgcatctgggctactgctttgatgtcgtcccatgcaatgcattattgttgcctggatatgtctaaatgtcaattcataatcatctacaaatcagggagtgagtggaccggtggcctttggatggctaacaaggcgcaagggaggtgcctgtggcatgtgatgaggtggtcg

SEQ ID NO: 4692 - DNA, 476 bp, Gossypium hirsutum
  Clone ID: GOSHI-09MAY01-C22482_1
agaaaaaaataagcttatcccttcgattgattcaaacttatcaaaggtagacattatctcataagtataacgatagagtttgatgcagaaacaatccatgaaaaaagatttcagtttcatttacaaatttcaatctcttaagcatataatttcccctataatcagcaaattaaccatctatatccttcttaaatcataatttaaaaaaaaaaaagaaattaacgaggattcttacaagcacagatcaacaaagaaaactcatgacctcttcctttgtcactatgttccaaacacccacttttttcttctaaccaaagcctgctatcaaacccactccttgtcctaaacatgaactcagctctcccatctgtttgcttaaacacccaatcatgcgaatcccacatcatatccactaataatccatccaacaatataatttgatacgctctaagatacgacttcaatcacgtgtgacg

SEQ ID NO: 4693 - DNA, 506 bp, Gossypium hirsutum
  Clone ID: GOSHI-09MAY01-C22462_2
ctcattttgatcttagcagagatctagcttgtcaccttttaattatttcaacgccgtatatagccgacgccgtccgataaaatctctcgccgccggtgtatggaaacaccgtgggtacatctctagtgcacggttttagtacagattcattactcatggcttcgtggcttaaagtcgctgaagatttatttgaagttgtagatcgaagagcaaagctagttgctaatgatctgtcggaggagccacctgattctcaaacacaaggttcttcagcagaaaaaacaaagccaagggcaaaggcacaaaaaagactttctacaaaaagatctcccaaacctagtgatactataaacaagcaaactagttcagaagtactaaaatcttatgaggctcgtataaaacaactgcagcaagatttatctgtatctaagagtgaagtaaccagggtagagtcaaatatgctgattgctttggcagcaaagaactctgagatagaggcacttgtc

SEQ ID NO: 4694 - DNA, 635 bp, Gossypium hirsutum
  Clone ID: GOSHI-09MAY01-C22462_1
ctaccaaagatattgaggttgttagtgaagatcatttaactgatggtggccaaaattctgattcccaaacttcagatgtcccttcgaagactgaccaagagaggccacaacaccctcaaaaagagagttcacaacatgtaattgctgattctcatgataacttcgaagctaagttgaaagaagttgatgttaaagtcgaaactcctgtgaatcaaaagaaatcacaggagcaaaatgctgatactccacaaacggtagtccaggaccaacttgatgaggctcaaggactgcttaaaaccaccaattccaccggtcaatcaaaagaggcaagactagctcgggtttgtgctggactttcatcccgtctccaagaatacaaatctgagaatgcacagcttgaggagcttctaattgctgagagggagctgagtaaatcttatgaggctcgtataaaacaactgcagcaagatttatctgtatctaagagtgaagtaaccagggtagagtcaaatatgcttgatgctttggcagcaaagaactctgagatagaggcacttggcaattctatggatgcactaaagaaacatgctgctttatctgaaggaaacctggcttcacttcaagcaagcatggag

SEQ ID NO: 4695 - DNA, 887 bp, Gossypium hirsutum
  Clone ID: GOSHI-09MAY01-C22402_1
atgataccaaagtagacgtgttttcatttgctctgatcttacaggagatgattgaaggctacccaccattttctgctaagcaagacaatgaagttcctaaggtatatgcagcaagggagcgtccacctttcaaagctccagctaagcattatgcccatgggctcaaagagttaattgaggaatgttggaatgagaaacctgccaagcgacctacattcagacagattataaccagacttgaatctattcacaacagtttcagtcatagaaagcgttggaaggttagaccactaaaatgctttcagaatctggaggcaatgctgaagaaagatcattctagtccaagcagccgtagcagttcatctcgatctactaacagcatttgaatgaatggctggtgttttatcttgcaaagcttataattctgcaaaatttattcagtttattggctaaaagattgagcgtataaccaggagcatacttgaaaaaaaaatgtttgatgtctttaagatttgttctcccttctgccttgtgggctgaaaactacattttgttccactccatttgtttgtaacttctactgtacattatgtatgctatcataagctgcataaaagaaaagtatgttatcgtaatcagctaagggaactactacaagaacaacgtatttggaccatatgaattggaattggaattggaattggggaaaacggttttgctaaagaaagtcgaatcaagcaaagatattttaattattatgtaatgatgtctgtctgcattcgattgattgtacttttctaagattattgaggagaaagcttgtttttgttttatttatgagattaaaatagcacgattttgtttcatgtaaatttatttatgagatt

SEQ ID NO: 4696 - DNA, 582 bp, Gossypium hirsutum
  Clone ID: GOSHI-09MAY01-C22752_2
cccacgcgttcgtggacgcgtgggcggacgcttgggcaaaaattgtatacaagccaggtgctgaaaaaaatgcaacgaatagtgattccgcggatgccaagaaaaaggctaagggagataaggaagctgttccagagaagaaagcacctgaaaaagaagcatctgataaagacaaagaactcagtgtcagtttactgaatatacaggttggtcttatacgtaaagcatggaaacatccatctgctgatagtttactggtagaggagatagatgtcggagaggctaaagtacgacaggttgttagtggattggccaagtattgcagtccagaagacttgacgaatcgtcgtgttgtgctgattacaaatgtaaaacctggaaagctacgagatgtgatgtcagagggactggtgctttgtgcttctaatgaagatcataccaaggtagagcccttactgccccctgaaggtgctaaacctggcgagcccatttcattttcggggattgatggaaagccagaagatgtcctaaatccaaagaagaagcagttggagaaaataacaccgaatcttttcactgatg

SEQ ID NO: 4697 - DNA, 883 bp, Gossypium hirsutum
  Clone ID: GOSHI-09MAY01-C22752_1
agaaaaacccagacatggcaaccaatggaaccagtgatctcaaaaggaagcaaggaatagtatcatctctttgcaagcacttctctttggatcctaaggctttttcaagtcaagtccctggaaatgatattaaggccctgtacataaacattttgaagtcatcagggaaggagtcaccgcaaaataatgatgaggtgatgaagtggatagcttttgcagacagctttcccagtgattctaaggcatgccatggtggtttgaatgaattaaacaccgacttggctaaaaaatctgtacttttgggcaatggatttacaccctcagaagctgatgttattgttttttcagtcatacatagttcaatgattgccctttcaactccagagaaggagaaattgccacatgtgatgcgatggatggattatatccagaatagtgaggatcttggtgcactttttgagaagatattgctggagaagcctgtttttgagcctcagatggcaaaagctgcagctaagcccgaagtaacctcaagggctaaagggactgttcaaaacacaaaaattgcagacaagccagacgcagaaaaaaatgcaaagaaaagtgattccgcggatgccaagaaaaaggctaagggagataaggaactgttccagagaagaaagcacctgaaaaagaagcatctgataaagacaaagacctctgctttactgatttcccgtgtctatcgaaagatgaacacctctctgaagtactggtagtcaatttgaagctaatcaaggtgtaggtggcaattgtcaaaatgaaattgtggcgtgcaagtaactgagctcattattaaaaaggtcttattatgtttaaatatataatacatagatataaa

SEQ ID NO: 4698 - DNA, 717 bp, Gossypium hirsutum
  Clone ID: GOSHI-09MAY01-C22702_2
cctactcgtccgctttcccctgtataattatattaggttttcatggatttgtggcttttatctgattccagtttagtgtcagattctaacattttagaatgatgtcatttagatatttagtgagcatcagatggcaaagttaaaacaaaatgaggcactcacagttgagagggaaagggagattcaacaggttgcggagtccgtaaatgagcttgctcagattatgaaagatttgtcagttcttgtgattgatctgcgttcccccgcgcgttcgatagactacaacattcaaaatgttgcaactacagttgaagaaggcctcagacaactacagaaggcggaaagaacacagaaacagggaggcatggtgatgtgtgctacagtgctcgttataatgtgctttgtcatgttggtcctcctaatcctcaaggagataatcttttgattcgcatgcatgtttttttcgttgatgatttccagtttgaccagcggtgagagcccattactttagaatcagcaatttccttggtcagcagcatgagcatgggggattttgaatacccccatacgcatacgacttaaccggcatgaatacttatttttttactctttaattcttgggttgttgttctttcaagaaaaaggaaaaggcgggtgtttgaatcgcgtttaaaagattgatctataatagagttaataagttatgtatttcttttt

SEQ ID NO: 4699 - DNA, 680 bp, Gossypium hirsutum
  Clone ID: GOSHI-09MAY01-C22702_1
ggcgaccaagagctccggtggaggaccggtgatcgagatggttagtacttcgttgctccatccaaatcgttcttatactcctctaagtaccgaggatcctggaaattcaagtaagggtgcagttacagtgggtctaccaccagcttgggtagatgtgtctgaagaaatacagcaaatgtgcaacgtgcacggacaaaaatggctgagttggctaaggctcatgcaaaggctttaatgccttcatttggtgatggtaaagaagatcaacgcattattgagtctcttacccatgagataactaatctgttgaggaaatcagagaagagattacaaaaactctctgcatctggaccttctgaggatgcaaatgttaggaaaaatgtccagcgtcaacttgctactgcccttcagaacctatcaatggagctcccgaagaagcaatcaacttatttgaagcgcctcaggcagcaaacagagggccaggatggagttgatctacagatgaatataaatggagataggtcttatgcagaaaatgatcacttggatgatatgatatttagtgagcatcagatggcaaagttaaaacaaaatgacgcactcacacttgagagggaaagggagattcaacatgttgcggagtcccgaaatgagcttgctcagattatgaaagatttgtc

SEQ ID NO: 4700 - DNA, 919 bp, Gossypium hirsutum
  Clone ID: GOSHI-09MAY01-C22722_2
tgcttattgaactttggtgacagtatcacaacagacacatttctcctgcaggaagcatccataaagacagtcctgcggccgcgtccccacttgaccgtggggtggagcgcaaggacttcaactcttatggaagtcgtcgcggtaacgatgaagtgatggcacgtggaacttttgctaacattcgccttgtgaacaagctgttgaatggggaagttggcccaaaaacggtacatgtccctacaggagagaaactctatgtatttgatgcagcaatgaggtacaaggatgcaggatatgacaccattgttttggctggagctgaatatggaagtggtagctcccgagattgggctgccaaaggcccaatgctattgggagtaaaagcggtaattgccaaaagttttgagagaatccatcgcagtaatttggtaggaatgggcatcattccactttgtttcaagtctggggaggacgccgacacactaggtttaaccggtcacgagcgttataccattgatctcccacgcaaaatagccgatatacgacccggccaagatgtgactgtcacgacggacaatgggaagtctttcacctgcactgtccgcttcgacactgaggttgaattggcctacttcaacaatggtggtatacttccatatgttatcagaaacttgattaggcagtaaatccatgggttgggagcctgcccttccaagatttccatcaaatgtagaatgtgagatgcaaataaaaataaaggctatcaaataaccgaaaatttcccattacggggacttggtagtttcccccttcaatttagttttgcagacaggctttgtctgctagtgaagaaccaagattattattttgagaaatgcagtcaattttttccatcggcaaaaaaatttatataaaaatg

SEQ ID NO: 4701 - DNA, 1731 bp, Gossypium hirsutum
  Clone ID: GOSHI-09MAY01-C22722_1
gcgcccacgcgtccgcccacgcgtccgcctgtattgggggacctaagagacctcatgatcgagttcctttgagagaaatgaaggctgattggaattcggcgctcgcttattatggttgggttccagggcggggccgtgccaaaagaggcacagggtaaagtagcaaaattttcattccacgggcagccagctgagcttaaacatggtagtgtggtgattgctgcaattacaagctgcaccaatacatcaaaccctagtgtcatgcttggggcaggtcttgttgcaaagaaggcttgtgaacttggtttacaggtcaaaccttggataaagacaagccttgcaccaggttcaggagttgttacaaaatatttacttcagagtgggctgcaagaatatctgaataagcagggatttcatattgttggatatggctgcacaacatgtattggaaattcaggggacttggatgaatcagttgcctctgctatttcagaaaacgacattgtagcggctgctgtgctttctgggaaccgcaattttgagggtcgtgttcatgccttaacaagggccaactaccttgcttcacctcctttagtggttgcttatgcccttgctggcacggttgatattgactttgacaaggagccaattggaactgggaaggatggtaagagtgtctatttcaaggacatctggccttctactgaagaaattgcagaggctgtccaatccagtgtcttgccagagatgttcaaaagtacttacgaggctattacaaagggcaatcccatgtggaatcagctatcagtgccttcttccactatgtactcatgggaccccaactcaacctacattcatgagcctccatacttcaagaacatgaccatggagcctcctggagcccatggcgtgaaggatgcttactgcttattgaactttggtgacagtatcacaacagatcacatttctcctgcaggaagcatccataaagacagtcctgctgcaaaattcctacttgaccgtggggtggagcgcaaggacttcaactcttatggaagtcgtcgcggtaacgatgaagtgatggcacgtggaacttttgctaacattcgccttgtgaacaagctgttgaatggggaagttggcccaaaaacggtacatgtccctacaggagagaaactctatgtatttgatgcagcaatgaggtacaaggatgcaggacatgacaccattgttttggctggagctgaatatggaagtggtagctcccgagattgggctgccaaaggtccaatgctattgggagttaaagcagtaattgccaaaagcttcgagagaatccatcgcagtaatgtggtatgaatgggcattattccactttgtttcaaggccggtgaaggtgccgacactttaaggtttactggttaccagccttatacccttggatcccccaacaaaatattctgcctaaaacctgggctagatgtaccgtttccaattgccattggaagtctttccattcccttgtcgccttgacccttaggttaaatgggttacttaacattgtggcttccttccttggtttttgaacctggttaccataattccttgttggtgccttctaattttattatgtaacgtgatgcattaaggtttaatacggatattctcgaatgggctccagttcctttttatgattggctgccttcctttgttatacaattccttcgaatt

SEQ ID NO: 4702 - DNA, 519 bp, Gossypium hirsutum
  Clone ID: LIB3829-034-Q1-K6-H4
ggctgacagggctaccattgctaatatgtctcctgagtatggtgcaaccatgggattcttccctgtagatcatgttactttgcagtatctgaaattgactggccgaagtgacgaaactgtggcaatgatagaatcatatctccgtgcaaataaaatgttcgtcgactacaatgagccccaacaagaaagagtgtactcatcatatctagaattaaaccttgctgaagttgaaccctgtatatctggaccaaagagaccacatgatcgggttcctttgagagaaatgaagagtgattggaattcttgtcttaataataaagctggtttcaagggctttgctgtgccaaaagaggcacaggacaaagtggcaaaattttcgttccacggacagccagcagagctcaggcatggcagtgttgtaattgctgctattacgagctgcaccaatacatcaaatcctagtgtcatgcttggggcaggacttgttgcaaaaaaggcttgtgaacttggtttacaggt

SEQ ID NO: 4703 - DNA, 507 bp, Gossypium hirsutum
  Clone ID: LIB3829-034-Q1-N6-H4
agcaacaaaccccaccctgcccgcttacaaaatttcactaaattgatccaaaagggagtcggccataacactggcatgcctgtttctaaaaaacttattcaacccccatgttgggccagctactacaccgattgcatacatttattagctgcacacatttaacaagtgagcggacatctataaatgggtggaggctccacggccaatgtctttcattgcttaaacaggtttctaaaaacatatggaagaatccccccattgtcgaagagagccaattcaaccttagtgcccaagcgggcagttgctattttaaagacttcccattatccgctgtgacagccactatcttgaccgggccttatatcggttattttggttgggaaatctatggtgtaacgctcatgaccggttaaacctaatgggggggaatcctccccaatcttaaaacaaagtggaatgatgcccatgcctcccaaattacttatatggattctctcaaaacttttg

SEQ ID NO: 4704 - DNA, 466 bp, Gossypium hirsutum
  Clone ID: LIB3825-027-Q6-N6-G4
gcaataaaccccaccaaggccgattaaaataatttactaaatttctcgaaaagggtgttcgtccatcaacggacaatgcctggcagtaaaaaaactaatacaaagccccattaatgggggggtttcgatcagggattgatagcatttatttgcgtcacacattttacaattggcgggaatctaaaaatgggtggaggctccgggccaatgcatttattgcttaatcaagtttctaaaaacatatggaaatatgcccccattgttgaagtaggccaattcaacctcagtgtcaaagcggacagggcaggtgaaaaacttcccattatccggcgggacagtcacattttgaccgggttttatatcggttattttgcttgggaaaactatggtataacgctcatgaccggttaaacctagggggtcggggtcctccccaaacttaaaacaaagtggaatgatgcccatt

SEQ ID NO: 4705 - DNA, 274 bp, Gossypium hirsutum
  Clone ID: LIB3146-051-Q1-K1-C4
agacactctaggtttgactggtcacgagcgttataccattgatctcccaaacaaaatatgcgacataagacctggccaagatgtaaccgtcacgactgacaatgggaagtctttcacttgcactgtccgctttgacactgaggttgaattggcatacttcaacaatggtggtatacttccatatgttattagaaacttgattaaacagtaagtgcattggttgggagccatttctagatctttcatcaattgtgaaacgcgagatgcacataaa

SEQ ID NO: 4706 - DNA, 569 bp, Gossypium hirsutum
  Clone ID: GOSHI-09MAY01-C22192_1
cggacgcgtgggcgttccctgtttctccgatccccatccatgtcagaagctgaacaagccaattccccaaagcctcctccatatttagaggttttatgcaaaagttccggcaagaaaacccggtttgcagccggcactaaggccggatttgcagtgtcattgataaatagaaagttgggtatcggagctccggttgccttgcatattgaatcctttagagaaggggaggaacccattatttttggccctgatgctgttcttgtgaattatggcaatggttggaatttgcaaactgttaatgaaatggattttcctggcattggaaaaggcaaacatgttcggggatttccgacacagctccctaatggaaagaacgttgatctcactaattctcgcaaaatggtttcaaaaccaggaataagttttctttacattgcaaaagtcttgttagcttttggctcggatgttcatgttggcgggagttttcatgttggctcttgacaatcttcctaaactaattttgctctttaactcttccatgtaactatgtcagttgtgaaaaaagttat

SEQ ID NO: 4707 - DNA, 407 bp, Gossypium hirsutum
  Clone ID: LIB3083-078-Q1-L1-E12
tggatccctctgctgcatgaatttagctcgagcgtcttttttcttgcatattgaatccattagagaaggtgaggaacccattatttttgtcccttattctgttcttgtgaattatggcaatggttggaatttgcaaactgtttctgaaatggattttcctggcattggaaaaggcaaacatgttcggggatttccgacacatattcctaatggaaagaacgttgatcttactaattctcgcaaaatggtttcaaaaccaggaataagttttctttacattgcaaaagtttcactagcttttgttttgatatttatattgcctgtagttttcatgttggctcttgacaatcttcctaaactaattttgctctttaactcttccatgtaactatgtcagatttgaaaaa

SEQ ID NO: 4708 - DNA, 543 bp, Gossypium hirsutum
  Clone ID: GOSHI-09MAY01-C22142_1
ttctttcgtccgaaaaaatacaagaagctaggggcgaagcagctgcaaaccgcgacaagtacgttggcctgtcatctacttgcataacttataagtccagtgcatcctcatacagaagtggtggcttcaatggtggtggggataagtatggaggcataagtagcagaagagaaagtgacagctatagagacagttataaagaaagcgatccatatggggaagaaaagtttgatacagatacctacgtcaaatcgcatcgagggactgcatgtgagatccaagggaattcctctaaggagtctaggcatcatggcagcaaggattcaaagaaaaaattctcttcagagttgaatgattccaataaatatagccaaagcaccagcaccccttcaaataattttgatgatgactttgatgattttgatccccggggaacgtccagttccaaactagcagctggaagttctaatcaagtggacccgttcggaccaaatttgattgatgacctctttgacggaccagcaccagtccctatggaaaaat

SEQ ID NO: 4709 - DNA, 598 bp, Gossypium hirsutum
  Clone ID: GOSHI-09MAY01-C22172_1
atggaggggatggttcaattcagttcataccattggggaacactattactagtggaatgcttcaaaagggtgggcgtgaggcgtctgaacacaatacaatacaaacacaccaccattgtcgcacagtgatgttcgcatgaacttaatgctcagtggaagcaacaaaagagacggggtttcagaagctggagtacaaggtactgaaatgaatgatgttactattactgttgatcaagaccacggaagtttgctggctggggagatattgaagcgtaattatagttcctggctatccggcctttttaacaaagacaacaacagtgtggaagttgcacacttccatggcttacaagaagcattggacaaaactcgctatggggaaacaccagactacctcaaaggtatcgcggctctaatcgaagtggatcgtggaaaagctactaagtttggccataaaaatattgaacttttggtttgtgccgcaatcaaagagatggaagactggcgtacacctaaggaattccggctataaccacttgataaagtgggccgcgacgctcaatatgggtaaggaacaagattttgacatgaaacctct

SEQ ID NO: 4710 - DNA, 811 bp, Gossypium hirsutum
  Clone ID: GOSHI-09MAY01-C22162_1
cggacgcgtgggttggtctgtttagatactgtgtcagagacttagtcagcttttgtccctgcgaaccaaccgtgtctgaaccacttctcttccatcccttaaaagggcaatacccttattagatatttgcttgatctcataacccaacaccccccaaaaagaaccctaatttgttatcaactttcatatctcaataaatcatatagtatatcccccctccccatgaataaccctcaccatctgaaccctacttctctaaaatccaggttcaccacgaggttcctccgcgccctgactaaaatccgtgctcaaaaacctatctcctcgtcttctcccacagagatcttccgacggtatcgaaggatcaaggttgcagctgacaagtccatggcttactccgttaggtcgaggagaatttggagtaaggcaatgctttggaagcttcgaagccgatcttatcgtcgtcaagacccttgttcaggcagaagatctgggaagactaatcaagccatcatgaaaaaatcaagtaacgagaatactacaacaagaagggaagatggggttgggtttgttgaagaggcagatgaactaagacagcttgttccaggtggtgaaaccatgaatttatgcaacttgttggatgagactgcacattacataaagtgtcttaccacccaggtacaggtgatgaaaaaaattgcggatttctactctttctgagtaattatatataaatatattcttatcacttcaatatatataaaataaatccaaggaacataatttaaaaaaaaaaaaaaaaaaaaaaaaa

SEQ ID NO: 4711 - DNA, 1058 bp, Gossypium hirsutum
  Clone ID: GOSHI-09MAY01-C22092_1
cccacgcgtccgcccacgcgtccgattttccgggaaaacatacaacgaaaaagaaaatttcgaagagagagagaaaaaatgtttgcatacgatcgcgtaagccactcgagtgccaacaaggcggatgagatagatctagaatcaggggagactttgtacccgggactcagctacggcgagaaccaactccggtggggttttatccgcaaggtttacggcatcttggcagcgcagttggttctaaccaccgtggtctccgccttcgtggttctttcggctccggtcaacgagctccttcgtggaaattctggcctcttgctcttcctctgtttaatccccttcgtcttgttgtggcccttgcatgtctatcaccaaaagcaccctgtgaacttggttatcctcagcctcttcaccgtgtcattgagtctcacagttggtgtgagctgtgcaaataccgatggaagaatcgtgcttgaagcgctaattttgacagctgctgtggttgcatctcttactggctacactttctgggcatcgaagaagggcaaggacttcagctatctcggaccgattttgttcaccggccttattatcctcatcttaactggtctaatccagatgttcttcccgctcggcccaacatctactgctgtatatggtggaattagtgcgttgattttctgtgggtacatagtatatgacaccgacaacctgatcaaacgcttcacatatgatgattacattttggcctccgccactctttatttggacatcctgaatttgttcatttccattttacgggttctgagatccggggataactagttatacaatatttctcacaaggtcggtcggaaagatttcatggtatggcgattgagttattgtccgatgaatatgaaaaatattactgtctattagtatatttgctagacttggcaattattgtattcgtaccgtatttgtgtattttcccatgttataatcatgttctatttacttatttgatatcgtgtaatcatgttgctagatctaatcttttcttgttgtgttttacc

SEQ ID NO: 4712 - DNA, 626 bp, Gossypium hirsutum
  unsure (1)..(626): unsure at all n locations
  Clone ID: LIB3828-020-Q1-K6-E9
cttcttcatggcttctttttctttctgataaaatcggtaacattggcctccaactcttgtagtaattgaaatcttagttatcttaaacccatgttgatctgactttacattttgcttgaagtactcatgtccaacacaatattcaaacatggatgcggggatttgaacttctaaggatcttgcaaatacatgngaaaaatttggaaaaaaactacgccttcactcaagattttacggaattctgtttgatccattgtgtcatatttctctgattaatcttaattttaaaacctaatccatgcagtgttgtggcccttgcatgtctatcaccaaaagcaccctgtgaacttggttatcctcagcctcttcaccgtgtcattgagtctcacagttggtgtgagctgtgcaaataccgatggaagaatcgtgcttgaagcgctaattttgacagctgctgtggttgcatctcttactggctacactttctgggcatcgaagaaggcaaggacttcagctatctcggaccgattttgttcaccggccttattatcctcatcttaactggtctaatccagatgttcttcccgctcggcccaacatctactgctgtatatggtggaattagt

SEQ ID NO: 4713 - DNA, 413 bp, Gossypium hirsutum
  Clone ID: LIB3083-062-Q1-L1-F2
ccaaattccaatcccttaactcatttaattcccaccaagccgattaaaatcaagttaggttcaaataaaactttttccccggaactaacttacggcaaaacccaactccggtggggttttatccgcaaggtgtaccgcattcttgcgccgcagctggttctaaccaccgtggtctccgccttcgtggttctttctgctccggtcaacgagctccttcgtggaaattctggcctcttgctcttcctctgtataatccccttcgtcttgttatggcccttgcacgtctatcaccaaaagcaccctgtgaacttggttatcctcggcctcttcaccgtgtcattgagtctcacacttggtgttagctttgcaaatactgatggaagaatcgtgctttaagcgctaatttttacaac

SEQ ID NO: 4714 - DNA, 268 bp, Gossypium hirsutum
  unsure (1)..(268): unsure at all n locations
  Clone ID: LIB3149-064-Q1-K1-H4
ccggaacggaanggccggaccgacccatgcgaacaaggccagtcgaaaagatttcaaggtttggttaacaagtaatggcctgatgaataggaaaaatattagtctatatagtataattgctagacttggcaattactgtattcgtactgcatttgggtattttctcttgttataatcatgtgctatttacttatttgatatcgtgtaatcatgttgctagatctaatcttttcttgttgtgttttaccagccactaagatggttgcac

SEQ ID NO: 4715 - DNA, 735 bp, Gossypium hirsutum
  Clone ID: GOSHI-09MAY01-C22332_1
attgagcaaatccgacgtcggtttcccatgttggagtcgtgaccatgtgacgtatgatagcaaggtaaaccaagctgagaatcttatggtcgtgggcagaggacctgaatgcacagcaattgctgaccctaaatactcaatgtgccaacttgcattgaatggtttgccaagtgaagtttatgagatgaaatgggacttgataatggtggatgcaccgaccggttacttcgaggacgctccggggaggatgaccgccatatacaccgcgggtatgatggctaggaataaagagaaaggagagactgatgtgttcgtgcatgatgtgaatagggtggtcgaagataagttctccatggcatttttatgccaagggggcatgaaaatgcgagaaggaaggcttagacactgcagaatccctagccataaggatagcttggaaagacccttttgccctgagtgatcttacaaatttcttgcctaccattttcccttcatcaattctttgttatattgttgattgatgctgtttcacgggggaattatcctatttttttggtcttctgctttgtttgatcaaagcaaaataggaaagcgtagcactattgcattggcaaattgctgtgcatgcatttctttgaactcaaatatagaactgcagaatttataataaagaatcagtttcgtattccaaaaaaaaaatggataactttagggttgcaatatagtgtttttaac

SEQ ID NO: 4716 - DNA, 605 bp, Gossypium hirsutum
  Clone ID: GOSHI-09MAY01-C22262_2
tcgctcacgcgttcgtgacacttacttcttcttaccacacaaaacacataaattcaaagcagagagaacagggaaaagaaaacccttgttaaggtgaaataatggcgagtaaggaggaagttttttctgttgagcttccagcacctgcttcttggaagaaaatgttttctcccaagaaagtcggttcacccaggaagactgagatcatgttcattgcaccaactggggaggagattagtagcaggaaacagttggagcaatatctaaaatcacaccctggtaatcctccaataacggagtttgattggggtaccggtgagacccctagaagatcagcaaggatcagtgaaaaggccaaggctactccaacaccagaaaaggaacccccaaagaagcgaggccgaaaatcgttgagtgcaaagaaggaaaacatggaaacagaggcctgttcccgaaaaatccgatggtgagacagaaaatgaaaaggaagatgcaccaaccactgaaaaggaaactgcggaagctgaaagagaaaaagatacttccattgaaactcaggttcaggatggaggtaaaacagaagtggcagaccagactgggcatgc

SEQ ID NO: 4717 - DNA, 574 bp, Gossypium hirsutum
  Clone ID: GOSHI-09MAY01-C22262_1
gatggtgcgcctgctggtggcgccgcggactaattggcgcgaccgcacgcgtccgcttactcgtccggaacccccaaagaagcgaggtcgaaaatcgttgagtgcaaagaaggaaaacaaggaaacagaggctgttcccgaaaaatccgaaggtgagaaagaaaatgaaaaggaagatgcaccaaccactgaaaaggaaactgcggaagctgaaagagaaaaagatacttccattgaaactcaggttcaggatggaggtaaaacagaagtggcagaccagactgggcatgctgacaccaagatggaggaagctggtacagatgttaaggtaccagaaactgcagaggctggcaaaaaagaagaggctgctggtaccgaagaaacaccaactgcaatggaggttcaagagaaacctgcagaagctagttgcatagatgggactcaaactgccaaagaagaggaagcccctactgaaaaggtgccacaaactcaggcagagaaagagaatggtacatgtgagaaacaaccagaaaacccagaaactgtgacattggaagctaatgggggagtggag

SEQ ID NO: 4718 - DNA, 966 bp, Gossypium hirsutum
  Clone ID: GOSHI-09MAY01-C23942_1
tttactaaacaggtttcttatctatggagttgatgaaatcatcagacaatattattcaagacagaacccaacagcagcataaacaagaaccagaaatgcaggcgcaggagggacaacaagaacaaggacatcattttcatgtattggcagttgatgacagtgttatagacaggaagttattggagaaactcctcaaagtatcttcataccaagtgacctgtgtagactctggggataaagctttggaatatcttggtctgttgaataacctggattctgactcaacagcttcttcttcttctccttcttcttcttcttcctcctcctcatcttcttctaactcatcttcttgttcccaatcttcgcaacgagagggacttaaagtcaacttaatcatgacagacttttgtatgcccggaatgagcggctatgatttactcaaacgtcttaagggatcttcatggaaagatgtgccagtcgtggtcatgtcatcagagaatgttccttctagaattagcatgtgcctggaaggaggagctgaagaattcatgttgaagcctcttcaattatcagacctagagaaaattgaagcttaccttctcaaatcccttcatctttcttgcacaaacattgacaaagatgatgatgacaacaacgccgaccacaatagtgataataacaatgacaaggtcgtcaacaacgatagcaacatcgacaaaggtaataatagtacgagtatgaacaataattttagcaaaagaaaggcgttatcttccgaagatacagagagccggcgacctaaaataaaagggttaagcggttgcgatatgaaaaagggtataaattaatttagagtttaagatgagtgacactccattttcttatacttggggttttgtgcatttacttggttattgctaatatcaaaattaagagccttctcttttaaggcttctttttagttac

SEQ ID NO: 4719 - DNA, 538 bp, Gossypium hirsutum
  Clone ID: LIB3585-064-P1-K2-C11
cccacgcgtccgaatcttttcactttatcagacacactattgcttatggtacatttaaatgctagtctcttccttcttagaaaccaatttgcattgaaggacttatataaatatttatattctatttacacatttacatgtttaggaatgtgaatggaaaaggaaaaataaactctgaccattatagcttttataatgtgcatttacatgaaattaagtccctctagagatattatttatgttacttttcacataaaatttttcccagtaggactaaaagctaaatgcatattataaatctctgttggtccaatttaatttcatcattctattctatctaatataatttcacccctggaatttttgagtttacaatgtttgtttatttacatgattaatacttttctgatcaaatgtagggacttaaagtcaacttaatcatgacagacttttgtatgcccggaatgagcggctatgatttacttaaacgtgttaaaggatctttatggaaagatgtaccattcgtggtcatgtcatc

SEQ ID NO: 4720 - DNA, 585 bp, Gossypium hirsutum
  Clone ID: GOSHI-09MAY01-C23802_1
taaattccttttaagtaccccttttattgttcatcttcatgagtgtaaattaagtttccttttagcttccaaaaaaaaaaatctcaccatctttccatcaaaagcccatacttttctcttccatccagacaagatattcatcaatgaagaagataaatctcctacttacgaaatgcaagagcttgtcgagacaactaggaaggtcatcttcatatagtagcttaagatcgaaatcaactcgagaagatcatcaccgttatatatgggatcatttaagaagaagaacgaggcggaaccaagatggagacaattatgataatgatgatgaacatcaatgttacgaaacggtttatgtcgcgagtacgacgaaacgatacgtggttagttcgaagtaccttaaacatccattgttgcatgctttaatagagaggcctaaacaaaagcatggagggggaagatcacatattggttaaatgtgaggtagtttctgttgatcatctttgtggatgattgagaattctgatccaaatctcattttggattcattggaggaattgactgacctttatgtgtctggatcaatta

SEQ ID NO: 4721 - DNA, 410 bp, Gossypium hirsutum
  Clone ID: LIB3493-038-P1-M1-E11
ctgactcgtggatctatctgtgcattataaacacgaggaggatctttcatccaaacaggacatacaacaatgaacaacataaatattcctacttaagaaatgcaaaaacttgtttagacaactagcaaggtcatcttcatatagtagcttaagatcgaaatcggctcgagaagatcttcgccattatatatgggatcatataagaagaagaacgaggaggaacgaacatggagataatgatgataatgatgatgggcaccaatgttacgaaacgatttatgtcgggagtacgaggaaacgatacgtggttagttcgaagtaccttaaacatccattattggatgctttaatagagaggtctaaacaaaagcatggaggggaagatcacatattggttaaatgtgaggtag

SEQ ID NO: 4722 - DNA, 537 bp, Gossypium hirsutum
  Clone ID: GOSHI-09MAY01-C23822_1
gaatttatatcccgagcgggagaccgagcaagaatcctgcgacgaggaagtatagtcaaaggtggagaacaccgaagctgaaggctttgatcaaataaacggttctacggaaaatgctgacgacggcaaaatctccccatcaaagcagcagcagcagcaacaacaacaaaaaaagaagaagcctctactccgtaaattcgggagcctactgaagaagaaaggaagtaacaacccgaaatagataacgaaaaacccgaaacccgaaatccgtaatggcatgacttttagccttaccagcaagcaggtatagcagataatgtcttgcaagctgaatgtgttttgcttcacttattttgtttgttttttcttctaaaaatgtcctcaaatagaatttaaaattgaagagggttgtattcatgtttagtttcttcttcttattttttttttttatttgattctccatattggatagtatcttgtatgtgatggagataattcttttttttttttttttttaattttcttgtacttcatttt

SEQ ID NO: 4723 - DNA, 671 bp, Gossypium hirsutum
  Clone ID: GOSHI-09MAY01-C23752_1
gcttaagcggtataatctgactgttagcactctaataaataacttggcccttcatcacgtcacgtttccgagggttctgcctttctctttcccactgtattttccttttcttgcttcccaaatactcatttcaacgccagaaaaaatgagtaacgatgacgcatccgatctcggcgtcgccctccccgccgccgctgccgctttgagtgctgaggaacgcgccggcctggttaatgagcttaagaataagcttcaaaatttagcgggagaacatgctgatgtgctagaaacactatcaccaaatgtcagaaaacgtgttgaggttctcagggagattcagagtgaacatgatgaactggagaagaagttttttgaggagagagctgcattggaggccaagtatcagaaactttatgaaccactttatactaagaggtatgaaattgtgaatggtatagtgaacgttgaagagaaacaaatgaaactgtgatggacgaagatagggataaatgtgtacaacaaaaagagtgcctgacttttggcaaactgcgatgaaaatgaatgaaattttggccgaggagatttcagagcgagatgaaagggctctcaagtatcttaaagatatcaagtggagcagaaacgatgatcctaagggtgtcaagctaaaattt

SEQ ID NO: 4724 - DNA, 744 bp, Gossypium hirsutum
  Clone ID: GOSHI-09MAY01-C23742_1
atgggtgtctttccctaatgcaaggaatgtgagataccataagtgcacacaaactaatcgaacaaagcattcacggtatcaggcaactctaattaaccacaaacaagtatatcatccagaggaatcatcttacagaataacaacatgaaaaatgccttaatgaggtcggtaaccccttctatctcatagaaaacataacttgacttaccctaatgaggacccacgggcagtaaattggttcagctcagttttactccattaaaccttcaagactgaagcttggtacagacaaatgacatgaaaatgcctttccagcatcaccggcaggtaagaaatgataatccaaagcatttctgaaccgccatagctgaatatgattttgaccctttattacccacaagttcaactacctaccatcatattcagcaacacagaaaaaagacattgaaagattaactccaagaaatgggaaagattcaacaattaaaaactaacaatttattgttgtagcagaagaaaatagcagaacacgtaacaggcatcaaaagagttattcttagctcactcttttctcggatcgtttttaatccccaggcattaagaacacaaaactcatcatcagctgatcacagattatttacatacatatttataaaaatataccccaccatcatcgttgtagctaaaaccaatcaataatccggatgaccggacgctcggtaatcatcctgtcccttgatgcga

SEQ ID NO: 4725 - DNA, 375 bp, Gossypium hirsutum
  Clone ID: LIB3493-060-P1-M1-D5
ggaatcgtggaagagtggaggaggacgtcgcatcaagggacagggatgattatagtgattaccgccatccggattattgattggttttagctacaacgatgatgatggggtagttgaacttgtgggtaataaagggtcaaaatcatattcagctatggcggttcagaaatgctttggattatcatttcttacctgccggtgatgctggaaaggcattttcatgtcatttgtctgtaccaagcttcagtcttgaaggtttaatggagtaaaactgagctgaaccaatttactgcccgtgggtcctcattagggtaagtcaagttatgttttctatgagatagaaggggttactgacctcattaaggcatttttcat

SEQ ID NO: 4726 - DNA, 741 bp, Gossypium hirsutum
  Clone ID: GOSHI-09MAY01-C23772_2
cagaatttgatatcaagagatatggatgaactcctgagaattgcagctgctgataagagggaagagttaaaaattttttccggagaggtggtacgatttggaaatcgttgtaaagatcctcagtggcacaatttggatcgttattttgaaaagttgggttcagaacttacatttgaaaagcaattgaaggaagaagcagagacaataatgcaacagttgatgacttacgtccattatacagctgaattatatcatgagttgcatgccttggacaggtttgaacaagattatcgacgtaagcccctcctagtgggtttgtcttgtcctgctcatgggggagacagccttgcaatattgagagcagagttaaagagtcaaaataagcatgtgaaaaatttgaagaaaaaatctctttggtctagaattttggaagaggtactagtaaagctctatgaaattttcttttttgttaaatcaattttcgtatacttatgatgaactccaaaaaaaaatgtggtgttctttttatcttttgcggtgaactccaagtctaaacgtatgcgagcttttgtacgtaatgttacaagtgtcttttgctgcttgatttgaagttagtcgatatatatcagtggaagttttatgccttgtattcataggtcatggagaagcttgtagatatcgttcatttcttgcacttggagattcatgaggcatttggcgctgctggtaagaatttaaatc

SEQ ID NO: 4727 - DNA, 604 bp, Gossypium hirsutum
  Clone ID: GOSHI-09MAY01-C23772_1
cttggggggactctctgttggcgtggcagagcggcctacctcttcctcttcctcttcctctacgacaattaaaacaggaaattcaaatctctcaatggtttttttattcacatccatattcattaaaatctgagattagattattaccacttggggtttttctaatggcgttgaatatggattatgaattaaagaaagattgtcacgatggaattgtcgttaatggcggaagcgatggccttttactctcacatgccaacagcaacaagctcattatcgataccgatcccgggattgatgatagcatggcgatctttatggcatttcaaaatccagaatatgagatcttaggtttgaccaccatatttggcaatgtccaaaccgaagatgccactcgtaatgccttacttctgtgtgaaatcgcagggcgtcctgatgttcctgtagcacaaggcagccccgagccgcttacgggtgggaggccgattgttgccgactttgttcatggctctgttggactggggaatatattcctatctcctccaaaaactagcaaatctgataaggctgcctctgaatttttagttgagaaagtttctgaata

SEQ ID NO: 4728 - DNA, 608 bp, Gossypium hirsutum
  unsure (1)..(608): unsure at all n locations
  Clone ID: AI055290.1
gtcggattttgttccagatcttcaacagcagaaagattgtcacgatggaattgtcgttaatggcggaagtgatggccttttattctcacatgccaacagcaacaagctcattatcgataccgatcccgggattgatgatagcatgacgatctttatggcatttcaaaatccagaatatgagatcttaggtttgaccaccatatttgaaatgtccaaaccaaagatgccactcataatgccttacttctgtgtgaaatcgcaaggcgtcctgatgttcctatagcacaaggcagccccgagccgcttacggagacagccttgcaatattgagagcagagttaaagagtcaaaataagcatgtgaaaaatttgaagaaaaaatctctttggtctagaattttgaagaagtaagctctatganattntattnnttggtaaatcattttcatatacttatgatgaactccaaaaaatgtggtgttcttttatctttgccgtgaactccagtctaaagtatgcaactttggacgtgatgtacagtgtctttgctgttgatttaagtagtgattatttatgaagtttatgcctgatctaggcaggaaaccttaa

SEQ ID NO: 4729 - DNA, 540 bp, Gossypium hirsutum
  Clone ID: GOSHI-09MAY01-C23762_2
caacactatcgtcatctccgccattcttggttcattgttttccgacaatatgaacattaaaagaaaaaataataaaagaataaagagaaatggcatatagattaaaaaaaagaagcttgcgagctgcaattgttttgccaaataaaaaaccaagacattacttttgcgcctcttgcactctttgaagaattagaagcacttcctgtgcacaatagaggggccggattcatcgtactccgccttagcaatccacatctgctggaaagtactgagagatgctaagatggagcctccaatccagacactgtatttcctttcaggtggagccaccaccttaattttcatgctgcttggggctaaggcagtgatttccttgctcattctatcagcaattccagggaacatagtagttccaccactgagaacaatgtttccatacaaatccttcctaatgtcgacatcgcacttcatgatagagttgtaggtggtttcatgaatgccagcagcttccattccaatcatggaaggttggaaaaggac

SEQ ID NO: 4730 - DNA, 493 bp, Gossypium hirsutum
  Clone ID: GOSHI-09MAY01-C23762_1
gaaaaggaaaacaaaagaataacattgataggagagttccaaatgtccctgaggggtacataacaaaacggagaaaagctagagaaataataaatcacaaatccgctgccgtttcatggaatggaaatcgttgaaacatctgctaaattggaagaaataaaaataaaaacgaatgaatgttgaagctcttatcatcatctccattctctcttaagctttgcttgtaggacctcatgcgttgtgaagaactagaagcacttcctgtgcacaatagatgggccagattcatcatactctgccttagcaatccacatctgctggaaagtactgagggatgctaagatagagcctccaatccagacactgtatttcctttcaggtggagccaccaccttaattttcatgctgctcggggccaatgcagtgatctccttgctcattctatctgcaataccagggaacatggtagttccaccactgaggacaatgtttc

SEQ ID NO: 4731 - DNA, 575 bp, Gossypium hirsutum
  Clone ID: LIB3828-015-Q1-N6-C11
tcttttttttttttttcttttttttttcctttttttctttggtggatacaatacctttaaaaatttgttgtagcatgtcatcctgcttcttttcggatatagtgtgagaatatgctttcaagtatcagaatacaagggagtgtgaaagatagagagaattgacaataatcacaaatacgttgaatgatcaaagaactgccaagggaaaataaaaatgaaccaatttgaactctatatgaagggaggatccggaaattttggtcgtttcgccaaaaaacaagacatttctgaagaattagaagcacttcctgtgcacaatagacggtccggattcatcgtactctgccttagcaatccacatctgctggaaagtactgagagatgctaagatggagcctccaatccagacactgtatttcctttcaggtggagccaccaccttaattttcatgctgcttggggccaaggcagtaatttccttgctcattctgtcagcaattcctgggaacatagtagttccaccgctgagaacaatgtttccatacaaatccttcctgatatctacgtcgcacttc

SEQ ID NO: 4732 - DNA, 487 bp, Gossypium hirsutum
  Clone ID: LIB3828-009-Q1-N6-F10
gaattcatacattttcatttacccttatggcagcacattgaatggaaaattcactcttatcaccatctcaactaaaaacagagagaattctaaacactatcgccatggactgccattcttggtacatcgtttctcgacaaaatgggccattccctgaaatattccatctaggaataaagagaaccggccatctggctcaaaaaaaagaacctggaaagctggaccggttccggcaagtaaacaaacaagacattatcttgagcgccttttgcactctttgaagaattaggaaacacttcctgtgcacaataaaagggccggattcatcgatctccgccttaacaatacacatatgctggaaaggactgacagatgctaacatggaacctacaatccagacactgaatttcctttcacgaggagccaccaccttaattttcatgctgcttggggctaaggcagagattaccttgctcattctatcaga

SEQ ID NO: 4733 - DNA, 673 bp, Gossypium hirsutum
  Clone ID: GOSHI-09MAY01-C23672_2
cggccgcgtgggcttttctaatcaaactaaataattttgtttaattttttcaattaatacaaattccatagcaatggcttgcagtggacagcttcatgtggaggttgagctcaagtctcttgcagaaaaggtctgggaaaccattagggactctaccaaaatatttcctcaagctttgtcccatgattacaagagcattgaagtgctcgagggcgatggcaaggcccccggatccatccgcctcatcaattatgctgaaggatctccaatcgttaaggtttcaaaggagagaattgaatcagtggatgaagctgagaagatatatgtttacagcatctttgatggggatctcatgaaatactacaagactttcattgctaagatcaatgtgattcccaaaggagagtcgagcttggttaaatggtcttgtgaatttgagaaggcaagtgaagagatccctgacccaagcgtcattaaggaatttgcggtgaaaaactttgtggagatcgatgactatcttcacaccaaggcttagaggccagctctcctattagcttgtcatatatatatatatgttttattaatgaataatatgcggggtttctactccctgtagtgtctgttactagacgtttcaatgctaccgtgatagaaaaattactgacattgccat

SEQ ID NO: 4734 - DNA, 742 bp, Gossypium hirsutum
  Clone ID: GOSHI-09MAY01-C23672_1
ccacgcgtccgctttttctcccttttagcatatagacaatagcaaatacagcaatggcttccagtgggcagcttcatgtggatttcgagctcaagtctcctgcagaaaaagtgtggggaaccattagggactccaccacgattttccctcaagccttgtcccatgattacaagagcattcaagtgctagaaggcgatggcaaggcccctggatctgttcgtcttattaactatgccgaagggtctccaatcgttaaggtatcaaaagagagaatcgaatcagtggatgaagctgagaagaaatatgtttacagcatcattgatggggatctcctgaaatactacaagactttcattggcaagatcattgtggttcccaagggagagtcgagcttggttaaatggtcctgtgagtttgagaaggcaagtgaagagatccctgatccaagcgtcattaaggaatttgcagtgaagaactttaaggagatcgatgactatcttcacggtaaggcttagagaggccaggccatgccatgccatgccatgcatgatcctagccctgtttaatggattctctcatgttttcttagtaataaaataacatgcaaggatcccacttcagaatatttgtctaggatccatccttaattagttcatcttgttgagtggtgacttcttgctgcaaagtaatcctgttgctttgtattttcaatattaatttatgtattgccatgggttttctt

SEQ ID NO: 4735 - DNA, 348 bp, Gossypium hirsutum
  Clone ID: LIB3083-106-Q1-L1-A9
atctaacaaatacttcaatggtttatagagggcagcttcatgtgggttgaaagaacaactctccagcacaaaaagaataaggaaccattacggactccaccacgattctacctcaaacctagccctatgaatacaccaagggttcacaagaatgatctcctagttgtcaaagaaggttctcacagaacattacctatacaaaagattacatggtcacatccgtatcaggagggatcatcaaatcagcggatgaagctgataagaaatatgtttacagcatcattgatggggatctcctgaaatactacaatactctcattggccagatcattgcggttcccacaggac

SEQ ID NO: 4736 - DNA, 673 bp, Gossypium hirsutum
  Clone ID: GOSHI-09MAY01-C23602_1
gcgttcttgccatctgggcctcgaatcagtgaaaaggaggaagcccgagaggataatgaggacctcaaaagcctgagttcgatgggggagaatcgtaagaagaaaccctcgagtaatagcaacaatgctgctatttctaactcgaaattgcgtcccaaagaagccaaagtgaagaaagaagagcggggggggactgatgattaagacgaaaaacccatctctaaaaggagctccgctactaaagcgaccaagcccaagaaggaagagagcgacgatgaagacgaaaaaccaatctccaaaaggagctccgctactaaagcagataaggaaaaagaaatgaagaaaaagaagaaaaagggggaagaaaagaaagcggctgctgggaaggaagtgaagcgggagaagaaggtttatgatttgcccggtcagaagagggatcctcctgaggagagggatccactgcggatattttatgaaacaatgtaccagcaaattccccatagtgaaatggcacaattctgtgaatatacaccaaggcttataaagaaattagaggggttcagggtcaaaagagttgcagctggcttgttgcattcaacatgcattgatgatcctgggtcgtctaggtattgcagaaactgggtctttgtttgtgtttggggataaagtggta

SEQ ID NO: 4737 - DNA, 427 bp, Gossypium hirsutum
  Clone ID: LIB3149-017-Q1-K1-A11
gagggatcctcctgaggagagggatccactgcggatattttatgaaacaatgtaccagcaaattccccatagtgaaatggcacaattctggatgatggagtctggtttgctccccttagcagaagcaaagaaagtcttcgaaaagaaacagaagaagattaagcagcaaaagctgagttccccaatgaaacctggttcagctgtaaagagtagtacaggatccgtcaccgttaagagaactcctatggtctccccaggttcttcgaataaaaagaaaacagattccaaggttgccccaaagcagactaagaaacgcaaggccgaagaaagcgaaagctctgatgatgattttgagaatactttggtcagtagaatgaagaaacagaaagcaaactaattttgatttccaccataactgattgtttct

SEQ ID NO: 4738 - DNA, 551 bp, Gossypium hirsutum
  unsure (1)..(551): unsure at all n locations
  Clone ID: uC-gsronu33b025g06b1
tttacgcgtncgaaaaggggaaaaatatcagtgtgaaggaaaaactcanagtgtggcgacgatctgcacattgaaattcgcttgttctcggattgacgtcgctatggtttatataacatcgtgggacgaatttgtcgagagaactgtacagttgttccgtgccgatcctgaatctacgcggtattgcatgaagtaccgacattgtgatggcaaattggttttgaaggttactgataacaaagagtgcctcaagttcaagacagatcaagcacaggacgcaaggaagatggagaaactgaacaatatattcttcactttgatggctcggggaccagatgtggacatgtcagaaattacagggaacgaacaggaagcacagccggtgaagaaaggaaggggaagaaaacaatagcttggattgctggtagacatataaatggttttgagccaacgtgattggacctcaatgaatttagaggaattttgtggcttacgatttgaaaatgctgggattgccaaaatttttcctgaagaaattaaagaacacttct

SEQ ID NO: 4739 - DNA, 278 bp, Gossypium hirsutum
  Clone ID: LIB3083-099-Q1-L1-B10
ggacgctccgttttgcagattctctcatcccgtatttcgattcttcttcgattgacggtgcaatggtttacgtaacatcgtgggacgaattcgtcgagcgaaccgtgcagttgttccgtgccagtcctgaatctacgcggtattgcatgaagtaccggcattgcgatggaaaattggttttgaaggttactgataacaaagagtgccttaagttcaagacagatcaagcacaggaggccaagaagatggagaaactgaacaatatattctttaccttg

SEQ ID NO: 4740 - DNA, 574 bp, Gossypium hirsutum
  Clone ID: GOSHI-09MAY01-C23142_2
ccccgcgtttttttcctcgtctcagatccggagcattattgacttcaaagaaaaaaaagtttgggttgtaattcgaaatcggattcggcagatattaagcaatgtctggagaaagggctttgttcaagctccttaagcctgtgcagcgtctacagcccgccgacgttcaagctgccagcatgtggggcgtcgatgccactaccggcgctctctggctcattcagcctttcgataggatgacgacgacctttctggcgaaaccagagtcggattcgaagcatatgggacatcttgcacctcattgcggttttgtttatcgggtttgctgatgaacaaatcatggaaagaataaaaataataatgtagtaagtgtaattttttgtggtttattgttaagagaacaagcctctttgcttttggtatcaattactgggaagttttgaacctttcaccttcagtttgaactgttgtctcatttctacttgagtttatgaattcatgcattcataaaaaaaaaaaaaaaaaaaaaaaaaaaaaaaaaaaataataaaaaaaaaaaaaaaaaaaaaaatat

SEQ ID NO: 4741 - DNA, 585 bp, Gossypium hirsutum
  Clone ID: GOSHI-09MAY01-C23142_1
gcgtccgatcattatttacttcaaaaaaaaaaagaacaagaaaaagaaaaggaaagttagggttttaatttgaaatcggattcggtagagattaagcaatggctggagaaagggccttgttcaagttccttaagcctgggcaacgtctacagcccgccgacgttcaagctgccgccatgtggggcgtcgctgccactaccggcgctctttggctcattcagccttttgattggttgaagaagacctttctggagaaaccagagtcggattagaagcaaatgggacatcttgcaactcattgcggttttgtttatcgggtttgctgatgaacaaatcatggaaagaataaaaataataatgtagtaagtgtaattttttgtggtttattgctaagagaacaagcctctttgcttttggtatcaattactgggaagttttgaacctttcaccttcagtttgaactggtgtctcatttctacttgagtttatgaattcatgcattcataaagaggcttagttgagattctgattgaatgcaaatcacaaggggcatgaatggtataaataattgactaaacattattg

SEQ ID NO: 4742 - DNA, 589 bp, Gossypium hirsutum
  Clone ID: GOSHI-09MAY01-C23132_1
cccacgcgtccgcccacgcgtccgtgttgaccatcttaacgaggaagtattacatccattacttcaggatcttgttaaaactccattttttcggtatttcaaggttaaattgtggtgtaactgtccattttggcctgatgatggtatgtgccgtttgcgggattgtagtgtttgtgaatgtccagaaaatgaattccctgaattatttaagaagccctaccatcatggccttccatcagatgaccttaagtgccaagaaggaaagccgcaggctgctgttgaccgcacactagatagtaaggcttttagggggtggacagaaacagataacccctggacatatgatgatgagactgataattctgagatgacatatgtgaaccttcaactgaacccggagcgctacactggctacactggtccatcagccagaagaatatgggatgctgtgtactcggagaactgtcccaaatatccagctgaagaattgtgccaagaggaaaaaatactttacaaattgatttctggacttcactcatctatttcgatccatatagcttctgattatctacttgatgaagccacaaac

SEQ ID NO: 4743 - DNA, 453 bp, Gossypium hirsutum
  Clone ID: GOSHI-09MAY01-C23002_1
cccacgcgtccgaaaaaaaaaaaaaaaaaaaaaagcacccccgaaaatgcgaagctctagattctcgatgttcctcgcgatttgcgcaatcctggccatccacgtggcggttacaacttcttctccgacgtttgatttcgccggcgaccatttcctccagatcaaatcggaatgcagcggatccaccgctgagtgcctgatgcaaggcggggaggactcgtcggacttcgatgccgagttcgccatgggatccgagatcagcaggcgcattttagcggcgagacggtacatcagctacggtgcactgaggagaaacactgtgccgtgctcgcgacgcggcgcatcttattataactgccgacctggagctcaggcgaatccctactcacgcggatgcagtagaattacacgctgtcggcggtagatttatttttacaagtctttttaaataat

SEQ ID NO: 4744 - DNA, 1012 bp, Gossypium hirsutum
  Clone ID: GOSHI-09MAY01-C23372_2
ccctcgcgtccggacccacgcgtccggacaactggtgaatcataccagatgactctttagattgttcaaaaaaggctgcccaggtgcaatctaaagagtcatctggtatgcttcattacttatctggtggtgcatgggatccacatgacatgaatgctgttgcgacaacttgtgaatcatcagtccagttttgggatctacgtacaatgaagaagacaaatgcaattgagcgtgcccacatccgcaatgctaactatgatatgaagaaaagtcatatacttgtcactgcagaagatgaatctgggatacacatatgggatcttagaaagcccaaaagtcctgccaaagagcttcctggacatacacactggacatgggctgtcacttgtaaccctgagtatgatgggctaattctgagtgctggcacagactcaactgttaacttgtggcaggctcctatatctgcagaagataaagcaacatctgaaagcataactgaaccactcaatcaacaggccgacccattgcttaattcctacagtgattatgaagacggtgtatatggcctggcttggagttctcgtgagccttggatatttgcttctctatcgtatgatggcagggtggtggtagaatcagttaagccattcctttcaagaaaatgaaaatgaaggtgttatttgttgtccctatgggcttctacggctattttttgtggaaagtttccaagtagcaacagcagtgctcgaagtgacttgaaatgaagaggggtagcattagcactcaaattaagtgttttttatgacttgttgctgccctgccagcccggccactgtattcttttggtttttttttcctgtcgagatagtatatctgcttcttataatcaggaccatctgacatctggtattttccctgaatactggatcatgccttttgttgttttgttatgtttgtgttaataatacataacaaaagtttaatataaaaagggaagaagaataataataat

SEQ ID NO: 4745 - DNA, 563 bp, Gossypium hirsutum
  Clone ID: GOSHI-09MAY01-C23372_1
gcaacgatgcaaggaggatcttctggcatcggctacggcctcaagtatcaggcaagatgcgtttcggatgtcaaagcagacacggatcataccagcttcattacgggaaccctcagtctcagggaagaaaatgcggtgcatctgattcggctctcttctggtggaaccgagctcatttgtgacggcttgttttcccaccctaacgagatctgggacctagcttcctgtcccttcgatcaacggattttctccaccgttttttcaaccggtgcatcttatggggctgcaatatggcagatacctgaattgtatgggcagttaaattcaccacagttgggaacgaattgcctcccttgtggcacatgtttgctaacattaattgtgttctctggtggccatctggaggacatgataagttgctcagcattgatgatgaaaatattttcttgtggactttagattgttcaaaaaaggctgcccaggtgcaatctaaagagtcatctggtatgcttcattacttatctggtggtgcatgggatccacatgacatgaatgctgttgcc

SEQ ID NO: 4746 - DNA, 836 bp, Gossypium hirsutum
  Clone ID: GOSHI-09MAY01-C23262_1
gatcagagccgtagtttccttgtcactttcttggaaggtggcgtcggagaaatccacgtcccccaaaattacacccgcgacgtcgtattaaaggaagtcacagttgtcaaagactctgacttgaccgggaatgcttccctcggcctcgcccttgaccgtcctcgaaaccggctgcttggcgccgttgccgacatgttcggcaaccgatatagtgcactcgcggcttatgatttgtccacgtggaaacgactctttctaaccaagctcagtggctctggtgatgagaaatccttggcggatgatgttgcagtagatgcagatggtaatgcgtacgtgaccgatgtgaaaggcagtaagctttggaaggtaggtgtggtgggtgagttcttgtctaccctcacaaacccactcttcactccaaaagagtggtacaaaagcttgcttggattaaacggaattgtctaccacccagatggctacttaattgtaattcatactctcagcggaaatttgtttaagattgatctagccaagggagatgaagtgaagttgattgaagttgccggtggtccactagcatttggcgatggtttagagctgatttctcctactaagcttgtagttgccgccggaaacccttctgggagattggtggagagcaccgatggatgggagacggcttccgtcgtggcaaagtttaagggtcctatgcatcgtttagccacggcggcgactgtgaaagatgggaaggtttatctcaaccatatgtttggaatggggtaccccaggaagacacatgccctctgtgagtttgtttctctaacttgaaattgaac

SEQ ID NO: 4747 - DNA, 754 bp, Gossypium hirsutum
  Clone ID: GOSHI-09MAY01-C98402_1
ccgggtcgaccaccgtcggaacctctcccttttacaatacaaataccttccatgccagaccaagtaaaccaaaagacaataatgacacatggaaggaaaacccaagacaccaaatcacagccaaggaggcacaggccggtcctgtggcttatgccttttcattttcctcctcttggcaggagcatcagcagttgctgtgtgcctcatctaccgtccccgcaagcctcgtttcgctgtagtaggtgcagctatctaccaactcaacgccacctcacaacccatcatttccacttccatgcagttcaccatcgtgacaagaaaccccaacaggagagtctctatcttttacgacaagttgcaagcttttgtttcgtacagaaaccagcagattactcccgcaatggacttgccaccactgtaccaagaggcaaagagcacggtggcactgacccctctgctgggtagcgggacggtgccagcatcggcggaagtggtgaatggactgatgatggatgaggcgtacggagtggtggccctgagggtggtgttcctggggaagttcagatggaaagctggtgctataaagccagtgaagtacggtgtttatgtgaaatgtgatgtttgggttaacttaaaaaagggtccggtaggcccggtgccattccttggagcccccccttgtaaagtaaatatatgatttgaagcatgtagatcatgtaaatggctttcattttccaagctaattattctggct

SEQ ID NO: 4748 - DNA, 886 bp, Gossypium hirsutum
  Clone ID: GOSHI-09MAY01-C98172_1
ctctagtggggttgagagaacatcttctcatcttaactaaagattgatcgtttactcaaatagttgtgtactttcggttttccagtttataggggaaaagaaaagagtgttttgcttttgcttttaatcttgcttctgtattttcttcccgtttatggtaagttgtctagggttagggtaagtgtttgtttaaagtggtcaggttttagtgaataaatatggctattaggaagaagaaaaagaagaaaatcagcccaagtatttagatgtaatccaaagtaagaaggtggggggttaggaatggagctccttgaagtccaatagagtttcttgctgggtatattgagctgcttggctatggatcccacagtcctatcccatgttgggagggataggcttgcggcttccatatctcaggagcttcattacctttaaagttagatccttgtttggattgaagggagctctacatctttctcctttctcacttcatcgtctagccaaagattgatgtgatcttataatgctacacttttatcttcttttgttgctgttgactctttttctctttcatggatctgtgaagtttagggtttgattgtaaattattttgccttgtggggtttattgtgaattaatagttgcatactgttgtgaatggttggatggatcttgaatttcttgttacctcttttggtttccattattaattttggcagagcgttgctgagactgcagatgtttacacaggataaagcaagtgaaagccaaaacgagatgtcagaaagtaaatcttgtggtcttttcttagattctgctgctgctgctgcgctgctttcaaaattcatttttaatgtaataataaaataaaagacatgaattattg

SEQ ID NO: 4749 - DNA, 849 bp, Gossypium hirsutum
  Clone ID: GOSHI-09MAY01-C98242_1
cggccgcgtgggcgataagactcaaactttcctcgatcgttggattgggtttcaaacaatggttcgtaaacggtatcaagaagccaaaacaggtttccaattgttaaaatcaatagacgcagacaagtattctaaaaaagataggattaggcaaagaagatcattacttttggaagcaagtcgggaaggcattgctatgcacctacacgctctttggcgttgcatggctttacaacgaaacgtcgccgctagggtggtggacgttgaagcctagaccaaaagaagaaagggaattagcccatttatatgagcggcgagagtttccgtaccccggtgatgctgaggctatggaagagttcgttgctaagggaggcatgattggaactacgattgggccgaaagggataatagaaaccgataaagattcggttaattatcagaaagagatgcagaacaagaagttcgaacaggaagcgatgaagctttggcttaggatgaggaatgaagttatttcagagcttcaagagaaagggtatgatgttgagtgagtgattttttcagctatggtgattctattgttaagggtcaaatttcgttattagtccttattatgaataagttgtggattgtggatttaatttttgtacttttcagttagtctttgtttttatgtgctaattatcctttagtgcccccccccccccttcatgtatgatgcaattgaaccaagctcaaaagctcgagttagacttgaaattcgagactcaaagcttggctcaagctttcgtgttggaagcttgagctaaatttgatatcatatatattattattttcataaacccccccccc

SEQ ID NO: 4750 - DNA, 615 bp, Gossypium hirsutum
  Clone ID: GOSHI-09MAY01-C98202_1
ctcggcattataaacgctttgatgtgtttgttgaagctgaggcaaataaagctgcaggcaaatatgataatgcctcgattgatcatcaagttgaattttataaaagagagggcttgacaccatattccgaggctaaacatcctattacgagcgatgttcctgaaggatgtgtgattataagggagcatattccgattagcaacctctttacttgtctttggttcaacgaagttgaccgttttacttcccgagaccaaattagtttttcaaccgtaagggataagattgcggcaaagacgaattggactgtcaatatgttcttggactgcgaaaggcgcaactttgtcattcagaaataccataaggatgttttagccctattggctcaaagggctcctccggtcatttattcttcacaaaggaaggtcccaccaagacgtagaagagataggaagtcaggcgctagacatcatcgtaaagttagtaaggaaatagtttaatgttataaccagttgtctaaaaatcaaaatttaccattctttttccttccccacttttttggaacattcatggcggggcttggaatatcattcaagagtgttgtaatttttgctc

SEQ ID NO: 4751 - DNA, 1056 bp, Gossypium hirsutum
  Clone ID: GOSHI-09MAY01-C99952_1
cacctgcaaagcttctgagactctactcgaacaactcaggatcgttgctcatcaacaacaacaacagcagcagcagcaaccacaacgtcgccatcatctgcgacaacaacggcgatatctgcgctcttggaattttctctaatggaatctctagaattgaaagagaataaccatcgcgttcctccaccaacatttgacatcgctaatctagactctgtggtgcctccaagctgcatgaaacttatcaatgaattgcagaaagagatccgcaagatctctgttgagagggagacattgaagcttgaaatgatgagtgctcaaactatgatcaacattctccattcaagaatagatttccttagcaaggagaacgaggagctaaagaggagcaactgagacgggtagcatgcgaagccttggtactcgcatttttatgcattgaataagagtacaccagcgcagttgtaaaattggtatgaacattagcatttggttctgtttgttgttgaacaatgttgtagctttcttgcattttttaagccctagttgcattttaaatctaaccaaataaacatgggttcacctcccatggttgtggccgtccgtttgccccaagtctctgttatgacctttgcttttcgatggactccgtttgctgttatctttggttggtgaagttcccttgctcttatggagttaagatgctggcacctctccggggtttcatcgtacctgaagatttagcatctggtggctgttgtagccgatgttcggctttggctccacctctatcggtggtctaccaaatgccaaggcaactttgggattgattttttggggcttcatggtgacatggcctttaccagaggcgtgcaacagcctctctttttgtttcccggtgctctctccctcctctggcttgtggggtagtgggttcggttggactttgcttgttgtacctttctgggtatcggacctttttgctgtaaatttcatctcctttctgcctaatcggcccttttgctgtaaattcatctcatttgaacccaaaagaaa

SEQ ID NO: 4752 - DNA, 331 bp, Gossypium hirsutum
  Clone ID: GOSHI-09MAY01-C99852_1
cgttttgggtctgtcgttgagttggtgcagagcaaatgaggtcgtgatatattgatttaattgaaaggtaggtcgattttatttctgtgggaccctgtttttgaaaaagttaaaaatgatggagcggtgaaaatgagatggaataaggtagagatctatgttgtttcagttgggatagctttgggggggccgagtgatcaataaatctattgataaatcagaggtgagactttgagcctagatctcgaagttcagttccttctgtctccttgcttcaccaccgtaaattgtaaattaaaaaataaaagtactttatagttgtagatttatt

SEQ ID NO: 4753 - DNA, 963 bp, Gossypium hirsutum
  Clone ID: GOSHI-09MAY01-C99772_1
tcgcggcgcgtgggcggccgcgtgggcgggcgcgtggcaaagttgctaacccttcaagcacaatctttagctgcaaatgctggacctccaaccccctcttctgttatgtctctcgaaactccatctacagcccagccaaaagagaaaagtcaaacctagatccaccttcttaaccagagggggggggacaccagaatccaaaaagaggggaccagaagaagcggtagttaaagagcttagactgactgtaaaggcattggaactagaaatggcaagaatgaagaaagaccatgccacacagttaaagcagaaagatgatattattcgcgagctttcaagaaagattgaaaaaacatcagaagtgggtgtgaagaagggtgtcacaagagctagcttgcggccgaaggaaccaaaccctggggaattgaagagcccaagtcatcgctttcgatcaccagttccgacagccaaaaaaagaagtttctgggatataacaacagctaacagcccttcagtcactacactcaatggaagaaaaactagaagccatgtcatttcaaaacctgttgcatctccctctatgctacctcagccgggatttgctcgacagagacctgatgttcacaagtaacgacgaagagaaagaaacagaaaaggaaattgtggtttgacagtgtagcattgtcaaaccttcccatttcattctctacacaaactgattgctcaacaatgaagcacaagttattgcttgctaagtggtgtattgattttttactaaatatgtcccccttttttttttcctcatttgatttcttctcattaaggtcaccaacaattactccattgatgtgtttatttttttcaagttgaagctcttggagcatttggggacccaaatattcatgtatatttaagttgtttttattcataatttttaaaaattgactaatgttttttttcttt

SEQ ID NO: 4754 - DNA, 432 bp, Gossypium hirsutum
  Clone ID: GOSHI-09MAY01-C99732_1
cgatcatgctcggcagcagctacactgccaatgatccaggagtccatttggacatctcgggtgttggtgaacacgagggcaagaaaccagcagataagacaaggagaaggggaaaggaaaaaagagaaggattcctccaaaagtgaagggtgactagtaagttaatgcataaaataaaatctttgtattgctactatatccaagattatgtttgcatgaaagcatatgtatgtaaaaggtgaagtatttccatagcatagttatgtcttccatatagataccatatggcttgtattgctagccaaggtcttgggtgtcaaacatacaaataatgatgaaagtgttggaactttcaagttcatatgttgtttttttttagaagttgtttgagttttaactcaaaaatcactataattaaaactagattccaat

SEQ ID NO: 4755 - DNA, 1090 bp, Gossypium hirsutum
  Clone ID: GOSHI-09MAY01-C99612_1
gcgttcgcggccgcgtgggcggcgcgtgggaattgaagtgatcaacaacacggttgctcctgatgataatgttatttgtgctctatccggtggtgttgattccacagttgctgcaacccttgttcacaaagcaattggggaccgacttcactgtgtttttgttgacaatggtttgttaaggtataaagagagagaacgtgtgatggaaacctttgaaagggatctgcatttaccggttacttgcgttgacgcaagtgagcagtttcttagtaaacttaaaggggttgttgtccctgagatgaaaagaaaggtaataggcaaagaatttatctgcatctttgatgcttttgctcatgaattggagcaaaaagtaggaaagaagccggcttttctggttcaaggaaccttgtatccagacgtgattgaatcatgtcctccaccaggaagtggaagaacccattcacacacaatcaaaagtcatcataatgttggaggacttcccaaagacatgaagttaaagctcattgagccacttaaacttctcttcaaggacgaggttcggcaactcgggaggatattgaaggttcctgagccatttttgaagcgtcatccatttcctgggcctggccttgcagttcgagtcttgggtgatgtaactgaaggcaatgccttggacattgtgcgccaggttgatgaaattttcattcagtccatcaaagatgctggtatttatgattcaatttggcaagcttttgctgtatttttgcctgtaaaatccggtggagttcaaggtgatcaaaggacacattcatatgttgttactctccgagctgttacaagtcaagatggaatgacagcagattggtactgttttgaaaacagtttccttaaagaagtttctcaaaagatttgtaacaatgttcgaggtgtgaatcgtgttactctggacattacatcgaagcccccatcgacaatcgaatgggagtgatgccatgccgtagagcaaaggtgatatatttgtgtctttatccgaggctagcatttcttaagctacattatctctctcaatgaaataccaaatttttattgg

SEQ ID NO: 4756 - DNA, 783 bp, Gossypium hirsutum
  Clone ID: GOSHI-09MAY01-C99202_1
aaagggaagctgaaataagtctaagaaaaataaagagaaagataaagcatttagtaagagccacactgatgcagaagagcttgaaaagagagctgttaaggaaactgaactgaagcatgactttgataagaagtgtgagattgatttctgggaacatctgaggtctgggtctgataatctcaagggcaatgctctagaaacaggacatgtaattaaaagtactcctgcaattaattttagccggggaaatggtggaactagataccttgaccgtatgaggggtacatttttgtcatcctctaaagcttttacaggaagtagtttctttggaaagaatactaatattcctgctattgcaaaagaaaacaaaaactaataatcctgtagaccatgcccatacttcagccgataggagggatttctgtccatctggaacgagtagctgggaagttgagtatggatggagatgataagaatgctaaaaacaaccactctgtgctttcagaaccccaactgtgggcagcacccaaaaagtcttggcaacagttatttactcgttccccttctcttcctcccgtctcaaatgcaaatgttattagtagaccgacttcgaagaataaaccagaagctgagggctcacaatttcctagtcattcaacaatacaaacatttgataatcctataaattgtggactaccatcggcatttatatctatgtacagaaatggagtccccagcagtagtttaggtttctcaccagctattggacccactttcccgtcg

SEQ ID NO: 4757 - DNA, 629 bp, Gossypium hirsutum
  Clone ID: GOSHI-09MAY01-C99222_1
cccagcgtccgcttgatatgattcaatgtggctataacatccttcataacataacatgctttccatgtaactcatcatttcaatgtatttcatgtatacctgtatttgttcatattgaacatttaccgtttcatttccaattcatgcctgttgtatcgaatagaatatcgttggatacctgggatagctcatacaaagtgtgctaactcatataattgtaatctgtcaattcatgtacatatatgctcacacgagctgtgaataagtatgatcacacgagctgtgaaaatgggcttgctcacacaagctatggagtatcgacaacatatgctggacctcagccatcggtaggacattcaagaccagcacccgaatcatgtaaaccctaatgacatgtcatttgtatcctacgaattcttaaggttcaaatggggctggtagtcgtcgtacgtcgttgaatttctatcatttcatgacataataaattgcataataacatctatatattaattaatgtaaaatagaatagcacattaaacagtcaatttaacttacatttaagtgtttatagttcatacgaatttacctggctaaattgcagaaatgtcaaagtacaggggcattttggt

SEQ ID NO: 4758 - DNA, 902 bp, Gossypium hirsutum
  Clone ID: GOSHI-09MAY01-C94612_1
gtcgctctttgctctccagtcctgcatctgcgaaaggggtgatggctttgaatcccgagctgcctattcaacttctctacaggatttcgctgctacaggaaatgccaatggtcgtgtgtttgctccttatacgatatacaaggggaaagcttcactctctatttctcctgttctgccaactttcgttaagatggattccgacattggtggccttaaagttaatcgccgtggttccatgatgttgacattctgccctgctattggagagcgcaagtacgattgggaacagagacagaaatttgctttgtcaccgacggaggttgggtctttgataagcatgggtgctcatgatgcctctgaattcttccatgacccttcaatgcaatcaagcaatgctggccaagtaagcaagaaagttatgtattaaggcacttgatggcggtaatggctacctgatttctttgactgttaccaacaacgttctaaaatcaaacgagcgctttaacgtacctgttacaacagcggaattcgcagtcttgaagacagcatgcagttttgcattgcctcacatcatgggttgggatcggttgacgaatcagtcacctaaaggcatcaaggggagtccttcaaaggtaaacccaaagcagcatttcgatttggagtgggatagatgaaagtgtaagtataaaactatataaaagtttcttagcactgctttgacttagtttgctagtatgaacatgctgaactagaggttctctttttgtcagttaaaagcctctattatgttaatttttactttgtgatgagcagtgctattatctgtcatgtttaaagtctgaactagatttgacgtatgtatcttctattatattatattggcacttgttttgttttcggtc

SEQ ID NO: 4759 - DNA, 668 bp, Gossypium hirsutum
  Clone ID: GOSHI-09MAY01-C94162_1
ctgtttcatccttttcaagccaccaaatatctttctttagaaatgttaaacatggatgtaatatcatgaaaaaagattaaatatatgttgtcctaggtctgctttcatttaaagtgttgatgcttgcattcagtgaacagaagtcatttaactggtctttttgtcgatttctgctgcagtgctctaacagggatatacttggtggatggtgtgattcgggtagcatttttgtagttgacgtaatagctaaaggatagtaaaaaggcccccttgaagtaagtgttgttaatggattttcctagtggctgttcgtcggccttctaatccaggaattcacatttcactccaaaacatgcttaatctaaggctttctcttatcatatgggcatgcaatcatttcaagcagcctcattacccccaagtcaagccctgctattgaacactcataattccttccaaaaattgtagtatttgattatcttgtgcccccccccccccccaaaaaaaaaaaaactcctgaaagtagaattgttggggtttgaagttgactgtgcatgactttgtgcatgtcagccactagttcattgcatgggatattacatgcaacttatgcacagattattaattttgccataatacataaggtcgagctggtattttactggttt

SEQ ID NO: 4760 - DNA, 224 bp, Gossypium hirsutum
  Clone ID: GOSHI-09MAY01-C94002_1
gaaaaggactgagtcaaagaattggatagatgtggaccaatctgtcgtgttagaggggttgttgactataacaaaaatgagttagcagttgggacggcgaattaactatgggttggtgttgggtagcatacttactacgattttatacaatttctattgtaacttgtgatgcttgtttgcttcaactttttttttttatggcataattagtataatatttctat

SEQ ID NO: 4761 - DNA, 1115 bp, Gossypium hirsutum
  Clone ID: GOSHI-09MAY01-C94252_1
atttgattgaccctggataatataaaaaaaagtaaagggcgtcggtcaacactaggagattcgtggccaaaagtccagagtgcactagatcatagagccttttccttgattactgcaaaaccaaaagaacatagacgaaaattagccacgccatctttggcactgccggaaacggctgcttcagttgcaatcgctgcaacagttgtgggagcggcagcaacatttcttgttaggagaactaaagcttctgatgcaactgaggttcctttgagaacttgtgaagattgtgagggttctgggatatgttcagaatgtagaggtgaaggatttgtgttgaaaaaactgtcagaagaaagtgcagaaagggcaagactgactgcaaagaatatggccacacgatacacagctggacttcccaagaaatggagctactgcacaaaatgctcttctactcgatcttgtactacttgtggagggagtggaaagttaagctagttttgctcgaacagcaatgttgtgtttttgcccaaaatgttgctgcctcatggaaggcgagaatcatgtttcagctaaggaatagaagtaaattaattttttgtgtttcagagatgatataagataccttgtttcatgcatgtacctaaagtacttgataagcttcactccatacatggagctttctggtgaccttcaatttctgccatttctgcccctccaaaaagataattagtaggcaacaggaaaggaggtagacaaagtgtggtaggaagtgttgatgttgtataacaaggaattggtcgttaactttgtaaaagccctgggagggtagcagcagagattcctagttattgtgattgtttgaacttggggcccgggggtgggccttatcgtatatcccaaagggtcagtttgttttttcacaatatggtatcccatcaacttgagaactactaagaaccaatcatagttttatgattttcccaataaagcagggttcccactattctgttgctgctagatggtggttgtaaacatgtttgctatcgacctgtggtgcactatattacagaaggtcaggttagttataatatctaaatcaaaagtggactttgaat

SEQ ID NO: 4762 - DNA, 548 bp, Gossypium hirsutum
  Clone ID: GOSHI-09MAY01-C95932_1
ggaatcaaatcagtatactcacttttatagaatttagttccataaagcaactagtaacatcggagcattcagcatcagtaactgacacgacctctcgtgggcaagtcataagtgataattctaccaccaacccaattgtgttggattcgcgtacgatatcgaagacggatttgagactaaacctacggaacttgaatttttcgattttaaagatcgccataaaatttttaactacactaattgcatggtttacttgattaaaaaagctaccttgaggaagtaagataaagacaattacaaggcaaaacccttcaagaaatcacattcacgcttggctttctcctgaaatttcttaaaccatctatccaaaatgtccatagggactaccaacttagacccatcttcaccacagaacgactgcttaaagttgaacaagttttccccaactttcaacgccatgcgttcgatcttcttctcagcagccacatctaaggacggcaacgcaaccagatcctccaccgacacaccaatcttggcggaaaggcgcg

SEQ ID NO: 4763 - DNA, 486 bp, Gossypium hirsutum
  Clone ID: GOSHI-09MAY01-C95532_1
gagctacctaagaagccaacagaagttgctggattggtggactaaacattacaaatggccttacccatcggaatcgcagaagctagcgttggcagagtcaacaggtctggccagaacaaattaacaactggttcattaataaagaaaaggcattggaagccatctgaggatatgcagtttgtggtaatggaggctacctatccacactatttcatggacaatattttggggaatcccttccctatggatctctcccacacacttctttaaagacaatgagtatggatgcatcgctgctgccaagcttgaaggcaactgcttctatatgcaaccggttatagttaattgtggggtagataattatgcattacctccggatattatttatttagtatatatcaaagattaactcctgttactagtatatacctatgttgaaactctttcatagtagttttgtcaaatgcttgaatcttttcccctatt

SEQ ID NO: 4764 - DNA, 624 bp, Gossypium hirsutum
  Clone ID: GOSHI-09MAY01-C95772_1
ctttcccttacatcagatttctcaaaattatttttcatttttttaggaaaaaccctaaattcttcaaaactctcacggacagaaatctcattcgattttctccagaaagtttagcgaagatggtgttagcacaattagggggtgagcatttcccggcgcgataccaacagtatgagcaatgcccacgatgaagtggcgatgagaaaggggttttaaaccgaatgcgctcaatgataatcaccagagctcttcttcaatccgatgttcaattcaagctcgttcgtgatatgcaaactaatattaagaagatcgtcaatcttgatgatctagctgccggtcataacaagcgaaaaatcatccaacaggcaatttttaatgaactttgtaagatgttggatcctgggaagccggctttcacaccgaagaaagggaaaacgagtgtcgtgatgtttgttggtttacaagggtctggaaaaacaactacatgtacaaaatatgcctattatcatcagaaaaaagttggaaaccagctctagtctgtgctgatacgttcagagctggtgcttttgatcaattgaagcagaatgccactaaagctaagattccattttatggaagctacat

SEQ ID NO: 4765 - DNA, 926 bp, Gossypium hirsutum
  Clone ID: GOSHI-09MAY01-C95692_1
gattacccatatgtacattgccaaaatttagtaatttaccgataaaagattggaaatagctacggagagtaattaaaaagaactgtaaacctacagttcaagaaagcaaaattgagtaaacatttctgactcattgtctggtcaaaaccccacatgtgcacatggtcccctaatcccacgtgacgtcaaacatccctatattatcatcctttgccacctcaccattgcttccattcgaatacgacaatctcagcacacgtgtacggttcttgatccgtttgagttcccccacgatctctctagcatccggtctatcatccttatcagccgccacacaccggaacgccagttccgccactgcctccacgccgtccatcggctgcccatcgaggatcaaagccgggtctaccacctggtgcaacaaacccatctggatcttcgaaaccaccaaatctgccagcgccatttcccttttctccctcctctgatccaccgctttcagcccggaaatcaactctagtaacacgacgccgaagctgtaaacgtcgcttttctctgttagccggaacgaccggtggtaatccggatccaaatacccgggtgttccctgaggcccggtccaaacaaattccgatttcaaagacgagttttcagggaaagccaaaagcctggatagcccaaaatcaccaactttaatcctcatatctttttcgacgaaaatatttgatgtcgtaacatctcgatgaacaatgggtggcaccacagagaaatgcaagtactcaatagctagagccgtttgcaaagcgatttcgagcctcactggccaagtaagtgagggttttggacggccgtgaaggtggtcggctagggtcccattaggaacatagtcgtaaaccaaaagtaaccccgggggtcgctgcaataac

SEQ ID NO: 4766 - DNA, 1050 bp, Gossypium hirsutum
  Clone ID: GOSHI-09MAY01-C95372_1
cggccgcgtgggtttggctattatactctccaaatcggtacatggagccttcggtagtagaaagtaagatattgcataagttgggatagactggagtatagcttttataaaacttcttttcctccctgggatagatatcttatactctagttgtcaattctttgtttcaatctatccttcaaattttgaaaagatggtctcttttttctacctaccatattaggaagtcctaaatatcgttttggatcagttgatcttcgtacaccaagtatctaagaaactgtaaccctttccccttcaagagtattggtactaaaaaagacagtagatttatcataatctgtcttagagaatgtgctccccttttagtagcttctgcaaataagatacagtcatcttcaaagagtagatgtgagatggctggaacactaagactagctttaacttcgtgaagaatattgttcgctttcgaaagtctcattagactagagattccttccccacagaataaaaacaaaaacggactaaaagggtctccttgtctaagacctctagatggaagaaaagtttctcttatatttccatttaaaatgacagaatatgatactgtagacacttttcattaacaaatcaacccatcctgggtcaaatcccattttcttgattaccccctccacaaaattccattcaaccctataataggccttgctcatgtctaactttactgccatcagcccttttttccttttcttgtgttttaaagtgtgcagaatttcatatgctagtaacacattataaaaaatcagcctccttggaacaaatgcactttatgcctgatcaatacatttatgaaaaactatccgaagccgattagcaatgaccttgactatccaacatcaaatgctatacttagactagcagatattgatgatatcaactttcttttcatgcatactattgcaatgattccttagaatttgctctaagaaagttagatagggtggctatgtccaacttttgtatgcttatatgaaaactatagaatgttcg

SEQ ID NO: 4767 - DNA, 777 bp, Gossypium hirsutum
  Clone ID: GOSHI-09MAY01-C96522_1
cagagcatcctgatcctgcaccacaggcaatggtattaatctttgaaggacaattgaaaacggaagttcagttttgttttaattcaaaaattcatccggacgtaaatccaacactttcgtggacagatactaccacgggattaagacccggtatggcataaaaattcactgggaaactaccaaataatagttgcagtagcgccatgggataaccataagtcaaggaactatcaatcatgtttggcatcagcatccccaccatcaacaattgatgcttcattgaacatgtattctttttggtactccatcaagtactgcgttgatctccttacatccagaaatagactgtaaacacgagtgatgtcctgcacttccacaaccatcccctttcgcttccggcaattcaatgcagaagccgtgatcagatggatagcatatctcaaggaggtctcgtgcccaattttggtcaacagttgttttgcatcttcagacatctctacatcttcctcttggcacctgatgtctagaatcttacgaatttcatcctcggaataaggctgagtagtgatgattagtagtctatcaagaagatcaattggaattccatgaggggatttgtaatttgtgccacggattgaagttatgcctctgtttgtagcaactactaatataggggccatctcattctcaagagcacggttcaggaaagaaaagcactcgatgtcaagcatgtgcacctcatcgataaagagaacaccaggcacgatttcagccttc

SEQ ID NO: 4768 - DNA, 984 bp, Gossypium hirsutum
  Clone ID: GOSHI-09MAY01-C96722_1
tttgcccactggatcagtagcttcgtgatgactcaactgtgacatttcacgatttgagtatctggtagcaaggcaaggtaaatcttgggttggccatcggttctcctttgcagatctgtaatacctggctgctagctttaggttcttctttagggcaaccgacgttcgcttgtatgattagagtttcagagatagagctcatggcagagttagcttgtctcagaagcagtatttaaagaaaatactacagcagtttggcatgaacgagcaaaccaaacctgcaatcgacaaaagggtcagcgttggcgcggggagtgtgtggtgagttttggaggtaaaaagccaacaattttcaacatgcctcgttacaaagaagatccgccagcggttcgcgtctatacagtctgcgacgaatccagatatttgattgtgaggaacgttcccgcgttgggatgtggcgatgatttgctgaaactcttcgctaattacggagacgttgaagagtaaatgtaaaccaatggatgcagaagattgtgagcaatttactgatgtttattggatcaaatttcgactcgttagcaatgccaggtttgcgaagagaaaattggacgagtttgtgttcttggggaatcgtttgcaggtctcatatgctcctcaatttgaaagccttgatgacaccaaagataagttagaatgcataatgaaagaaatccttgcaagattgaattctcaaagatctaaatggcgtacggttcatcgcattctctctatcaagaagctccatacttctgcttatctatcatattcctaccagattatatatcacgatgatgttggagatgcatatctcagtcttatcatataatgtccaatacatgagtatatttgtcatgattacttctttccatctatgatctatcgtataactgttggataactcatttgatcaatttgttttacattttagtcgacttcctaataaaa

SEQ ID NO: 4769 - DNA, 567 bp, Gossypium hirsutum
  Clone ID: GOSHI-09MAY01-C96232_1
atgcaaattatataataccagtactaataataatggatagaaacagttttataagtacaaaaccctcttcttttccagtactaggtaagcttcttaacatgtaccgaaccaacatagctataatttaaggtgcataatacttgtatatctaattgtcttttaactgatgtatacatatacactatattcctatcatcttttctcttccaactaagatatttcatatcttttgctgtttctgtttctaatttctagtcttcttttttttttcatctctttatttttattacatatggtgataatcgaaggcactaagcggatcaaacactgctttagcgtgtttggaaaccatgatttcagaggcagcccaaagctttgcaagcttcgttggaattcgaccccagtttggatgtccatgcttcgttgcagtctgcaaagtatttcccacttatatttagcagtcttggatgcgcggcgacgtaacaagtcgtggcagctgcctgagggatggttttcaggagcttggaagccaaaaagaaaaccagatctgttatcggacgagtgggt

SEQ ID NO: 4770 - DNA, 741 bp, Gossypium hirsutum
  Clone ID: GOSHI-09MAY01-C97912_1
cgggtcgatctcgcgtccgttcgattatcacgacgtaaacaaggatgggaagcctcctaagaaagataagtattaacgctttcatttattttgttttttacatacggggacgaagatcaaagaaaaatagaagcaaaaacgaaagacaaaaaatgagatttaaaatcacctttggaaaactctttttcctattcaaactgggggtatagattttgtatcgtctctcccaaaaatccccctttacattcaatttcatttcgttttatagctgaaaaataagaataaaataaataagaaaatcaaatttccttgctgtaatttctgttatttgctgtccattgctcttttgtttgttagtctgttgtaggtgtgtatggcgtggagaagccattagtgggcatgtcgacgtggagaatgaagcaacggcgcgcgtgaaagctggcacgaaggtagcagcggcacaagggggaaagggaaccctatagttctaaaaatattaaactttcgggcctgggctagtttttgtcattgggccgttgcaatttgatttgtattttgaggctttttattttggattttgggcttgggatattattatggacattggactttaattttggttttttttttgttttggtttattttgttttttggtttttgtatggcccgggctaaaattgggccttacaatgtaaagacttatttattgaatgcttaaaagaaaattattctacacgtctc

SEQ ID NO: 4771 - DNA, 549 bp, Gossypium hirsutum
  Clone ID: GOSHI-09MAY01-C97552_1
tgggcatagttggcttccggttttatgaggatacgtatattcttcgagctctagtttataaaccaagtagttcttcaagtcaaccaacttgagcagaagccaaccgacaatgtatttatcctcttacaacggaagaataattaccaagaaccaaaatcaatatttatttaccccattgatttcccatacctgtgtgtgccaaccaaatccgtgtgctttaagatgcagagggagacagggagatggttcatgttaatttggggtgttggggttttatctggaaatatgtagctggccatcaaataaagtaattgcagaaataatgagcagaaagagttggtggtggaggaggatcagatgcagagtgaataaccatttggtcaacctgttggattataaaaaagtttaaatttgtctgcagatagatttgaatttgatttgttggaataatttggtctctactgtgagatgcagctgatctcaacttttcttgtttacttttgtaatccttccttcattcattcataacacagagagcatttacttcaa

SEQ ID NO: 4772 - DNA, 749 bp, Gossypium hirsutum
  Clone ID: GOSHI-09MAY01-C97442_1
cttttatgcaagaaacaaaccaaaaaaaagcttctaaaccgatggctaagaaggaaacccaagaattccaatttgttgtttacaataccatgactcagcaaaaagaggttttcaagcccaaaacccctgggaaaagttcgcatgtatagtctgcggtgtcactgcctatgatttcagtcaccttggccatgctcgtgctgccgtttccttcgatgtcctttacaggtaccttaagcatttgggttatgaggttacttatgtcaggaattttactgatgttgatgataagataattcgtcgagccaatgagactggagaagatccaataagtttgagtgaccggtactgtaaagaatataatatagatatgagtgatctacagtgtctttctccaacacatgagccgcgcgtttctgatcacatggagcagatcaaagatatgtatttgcattaacaaaagtatgattcatttaaatgggttatatttggtagttatattttcatatcattaccatatcattgtgataaaaagctattattgggcatgtcattgtcatgtactgtatacttgtaatttaactacatctgcccaatgacaatcaatgatgtagcaatgacccatgctctagtcttagaaggcattttagatgtttccttcaatgaagaagtagaagagcagtttttaacttgcaccaattcatattgaactgaagttgcccattttaattgttaagagttgttgaactgct

SEQ ID NO: 4773 - DNA, 968 bp, Gossypium hirsutum
  Clone ID: GOSHI-09MAY01-C97782_1
ggcactttacgtcatgctgtgattcaaaagagccattatggataatttttgcccatgatatgaacattaaattatcacaagagctgatggttcaaagccataagacaattgatggtcgtggagcaaatgttcatatagcatatggatgtggcattacacttcaatttgtgcacaatgtcataattcataatattcacattcatcgcgttgttagaagtagtggtggcctaattagggactctgaagatcattatggttttcgcacagtcggcgatggagatgggatttccatatttggatcatcaaagatttggcttgatcatatttccatgtctgagtgtcaagacggactcatcgatgcaatacaaggttccactgccatcaccatctcaaattgccatttcacccatcatgatcatgtgatcttgttaggtgcaagtgatacctattctaaagatcaatttatgcaagtcacacttgcattcaaccattttggcaaggaattgatacaaagaatgcctagatgcagatggggatactttcatgtcgtcaacaatgactacactcattggaaattgtatgccattggtggtagcacacatcccaccattattagccaaggcaataggttcatagctccagatgaccccctaactaaacagataaccaataggaactatgcatcagagtctgaatggaggcattgggtatggagatcagaaggagaccggttcatgaatggagcattttttgtaacatctgggccaccctcaccaccccgactgaaattcaaaaagaaagatataattaaacctaagcctgcaatatttgttggcaagactcactaaatttttctgggactcttaaatgtaaggaaggagttaagtgctagaaataactctagattctactgaagctcacgacaatttgttttcctttgacgcattaaaaaaataaatctcctttgg

SEQ ID NO: 4774 - DNA, 832 bp, Gossypium hirsutum
  Clone ID: GOSHI-09MAY01-C97772_1
tttctctctccccagccatagctaatctcactccctcagcacttactttttccttcttcctttctttaaaaatgccaatcaacagagacccttctactcccccgcctatgatcggcaagatcggaccctacactgtcttcgttaccccaccttctactcctacccccactgaacctcctgtttttcagtctcctcagaaggcggtcgcgcctcctgcttctgctcctcctccggtccggccgccgcctcaacagtttgataagtcttttgttgcgtccgattctgatggctccattctgggttttttcaggaatgctatttttaaagtccaaaatgctcattcaagcttggatgaccatttagctcgctggtttggcttaaatcagtccaagtatcagtgggcactggacgattattacgagagcaagggattggaaaaggaaggtgtaaaagtgaaagaaatatcaagcaaaatgcaaagtgtgtagcatgctttttgtgctggtaatgagatatttgaagtccctcttctcttcctctgtttctgtttcccccttctaatgttattattatgtatctaatgagaatgttttaatcacggtgcatattgttattctgctgaacttgcaccgagaattggtggttgtgtatcatttttgtattatatctatatatactttacgtatggaaaggccaaaagacatttggattcctgaagcgatctttgttggcatctttggactgctgatcagagcagctaactgagcttgtttgtataccaatgtaggagtcatgttgtgtccttacaatttcaatttctagcgttgagatc

SEQ ID NO: 4775 - DNA, 800 bp, Gossypium hirsutum
  Clone ID: GOSHI-09MAY01-C97692_1
ggatggtacaattattgctccgactgattctaaaccctggggcaaaggtattttacatgtggctagaattcacaaagctgaaaggtataacagttcagggaaaaggtatcattgatggaagaggatcagggtggtggctagaagcaccatatgaagatccatatgatggtgaaagaaaataataatcccattaaacaatacagttcaagaacggccaccaatgccggccagaaatgaactcagtggaaaaatgcctagcatcaaaccaactgcactaaggttttatgggagctttaatgtgacagtcacgggcataacaattcaaaacagtccacaatgccatcttaagtttgataattgcataggagttgtggtacacgacatgtccgtctcatctccaggggacagtcctaacacagatggaatccacctacagaattccaaagatgtgctaattcatggcactactcttgcctgcggagatgactgcgtttcgatacaaacaggatgctcaaatgtatacattcacaatgtgaattgtggaccgggacatggaatcagcattggaagcttgggaaaggataatacaaaagcctgtgtctcaaacatcactgtccgtgatatcatgatgcataacacaatgaacggtgtcagaataaagacatggcagggtggatcaggcaatgttcaaggggttctattctcaaacattcaagtttctgaggtccagcttccaattgtgatcgatcaattctattgtgacaaaagaacatgtaagaaccaaacagcagcagtcgctc

SEQ ID NO: 4776 - DNA, 1211 bp, Gossypium hirsutum
  Clone ID: GOSHI-09MAY01-C90932_1
cgtccgttccattccacccggaggggtgggtcccactggttcaccgccgcattcccattcctccgttggccgtcattcacgcgaatcctcatcaagccggttttccgggtctctcaaacccggttcccgtaaagtttcacctaaagaagggtcatctaaatcgggttacaggggggggtcatcatcatcacatcataaacaatggaaagattgtgatgtcatcgaagaagaaggctcccttgagagtggagagcgtgagaagggtctccctcggcgatgctattttttagcttttgttcttggcttcttcgttctgttctccatgttttctttgattctctggggagctagcagaccccagaagcccaaaatcacaatgaagagtataaaatttgagcaattcaagatccaagctggttcagatttcacgggggtgtcaactgatatgatcaccatgaactccaccgtgaaaatgatttatcgtaacactggaacattctttggcgtccatgtcgcttcctctcctcttgatctgtcctattctcaaatcaacattgcttcgggaaccatgaagaaattttatcaatcaaggaagagccaaaggtctgtaactgtaatggttatgggaaacaaggttcctttgtacgggagtggagccagtttgagcagttcaacaggcacgacatcgcttccggtttcacttaaactgagtttcgttgtccgatcaagagcttatgtgttgggcaaattggtgaagccaaagttctacaagaaaatagaatgcgacataactttcgatcccaagaaactcaatgttcctatttcgctcaagaaatcttgcacatacgattgataagatccaatcacatggaaaacacgttgaagatgcttgttttttcttcctttccttgggttttattaataatttattgttcttcttttgttgaaaaagtgggaaatgaacgagagatacagctaagcgggcaggtttggagatcctgggcagttgtggacttattggggctgcccgtgtgtccattgagtcagaaaaaccacatactttgaattcggtgggtggcttgtgagtgatcaaattttattattttttattaatgtaaaagtaaggaaaagaaattatatttacttaaaatgtaatccattctttttcgtaaattcagtgttagaaaagcgaataatagatgattttggtc

SEQ ID NO: 4777 - DNA, 538 bp, Gossypium hirsutum
  Clone ID: GOSHI-09MAY01-C90892_1
ctcgttcctggcagactagcaaaggcacttggtaacgcgccttcagttgtcgactttgcatgtctaataatttctagcatttgaggactccccaatcaaacgaagtgtttccttaacagtcgaggcagatatgttgccattgatcggcccttttccctttgattctcccacccttctgagaacaaactgtgcaaagctaaagttttcagacatatgaacgacccccagcatagttcattgggtcaaaatatatatatgatgaaggaaaccaatatatggcgccgaaattttctcttcattgttgcaccagtttatccaacaactccaatggcttccccagtatttgaatgtttaaattatggtcccttttctctttggaacttcaacccttttgacttgagattcatttagacatgcctattgttgtattaaaggtggatccatctatatccagatacagagtacccagctgccaagctttgaaattcttttttagggaatttgaaaactgctaattgacaaaattactggttgatgc

SEQ ID NO: 4778 - DNA, 618 bp, Gossypium hirsutum
  Clone ID: GOSHI-09MAY01-C90882_1
cccagcgtccgggttattccaacttgcattgaacgattgccggcccacgtgtttaggagggtggtcactccagctatgttcctttatgggacatccaaacggaaaatagctcgagcttcacattcaatgtttgtagcattcatgtcttcaggaaaacacttcaaggatgaactagtgtcactgaaggagcaacttgttttttattacatgcaaagatctttagagggataccccgacattactccttttgagggcatggcttcaggagttgcggccctagttcgacatcttcctgctggtagcccagcaacattttattgcattcacagtcttgttgataaagctaataacctcctcagtgatgcgaatgctttaaaggccgatgactggaaaaactggcaaggggggccagagccttgtaaaaaaatcctcgagctgctttcacgtcttatttctctagttgatatacaggtattaccgactctaatgaagttgctagcacagttaattatccaactgccaaaaacaggccagaccatggttcttaatgagttatatgcccaggtcgctgaatcagatgatgtcactcggaaaccaactttagtttcatggttgcag

SEQ ID NO: 4779 - DNA, 565 bp, Gossypium hirsutum
  Clone ID: LIB3543-036-Q1-K1-A4
tccgccccgcgtccgccccgcgtccgtaaacatcattgtgggtgatgagagaggtcagtttgtgtacagaagtagtgatgtctcaagaaatgtcagcactaataaaaacactctcctgatgctgttgctcttgtatttgcgagagatagaaacaaagcctgtggtatagggaatattgaatttcatttagcactgtcaaagggtgtctcagcaattggaccaaggcttaaggcagcttctgttagagtgcaagactcttatactgtcacctggctcactgccagaagagaaggacagcaggagattcttgatggtcaacagatgctggaagatattgataatgaggtatgtcaatgtgcttctgtgtatataagaaagcatgagctttatagaaatatttaaaatatgcggttgcaatgcgaactgactgtttaatgtaaatattttgtgctcctaattgattcttttgtcttgaagcctacacccattctaccaatgttttgatccattgtgttgataccatatcaaaaagattcatgtgcttatgagcactgcttattcttta

SEQ ID NO: 4780 - DNA, 544 bp, Gossypium hirsutum
  Clone ID: AW186889.1
ggcaattggaccaaggcttaaggcagcttctgttagagtgcaagactcttatactgtcacctggctcactgccagaagagaaggacagcaggagattcttgatggtcaacagatgctagaagatattgataatgagatggaaaataatatggactgtgttgatctttacattggggttacaaggcgacggaactgttctgttggctcagataagcctaagatgatgacaaccttggcactccatggagttgaaggaggagattcagagtacctttatgttgatggtgttggtatcagaactggtgactattttcagttttaccattcggatccaaagactgcattatcttcaagcagaaatgtctcctcaacccttagaaaattgaagttggattgggattccaaaagcagcctcagcaaaagcacaattatcaatgccgttgataagaaggaagcttttggaggttttatcttttcatgccttggacgtggcgaatcattcttcggtcaacttaatgttgatagttccccattcttggataat

SEQ ID NO: 4781 - DNA, 696 bp, Gossypium hirsutum
  Clone ID: GOSHI-09MAY01-C90522_1
ggtcgttcttcctgctttccacatgtttcatggttgagaacttgaattctttgtcttaaaagtttatgattgtgtgttgtgtgtatacatatcgacggtatcgatatatttcgggtgcattgaatttggccctgcagagttttcgttcttcggtttcagtaatgctggcagtatgggaaagaaaggaagttggttttctgcaatcaaaagagttttcgtatcgaattcgaaggggaagctagatattgaatcggacaaaaagggcggtaaagaaaggaagaagaaaggtcaagcaaattacaagcatggagaagctaattccttcattcccctgtttagggaaccgagtagtatcgagaaaattctcggggaggctgaaagagatcggaaactatcgttccggccttcaacaccaccggatcaacttagaacaccacctttcatgcttcctagggctgcgtctcctcgtgttcgttctcaaaggattgcctctccaagggctgcttctccgaagactgcttcttctccacgagccaattcacctagagctgcttctccgtttctgcctccacctccaagagctgcttctccgagagcaggacctcctaggcttgttcgtcctagactggaaccaacgttaagaaaccatcatgcttcagctacaaagattcaagcagcctatcggggttacatgga

SEQ ID NO: 4782 - DNA, 582 bp, Gossypium hirsutum
  Clone ID: GOSHI-09MAY01-C90482_1
ttcccggtcgacccacgctccgattatttctccctcgggaaacttccattttctttgcgttttgttgaaatgaatggtgaaataaaagtttattctccgctcaacaaaatattcgatctcttccgccttttaacggaactacatggcgacccaatctgtgaaagtgggaaacgcttccttgggtgcatctgagagagatctcaaggagtccttttccttctccggtgaaattgcatatgctgaaatgaatggggactatgagcaatctcaagttgcatatattactttcaaggactcaaagggggcagagactgctgctcttctttcgggggcaacatttgttgatcagtctgttaccatagaattagctcctgattacatgccacccgcctctgcaacacttgcatcagagaacaaaggctctgccaatgctgaatctgctgtccagaaagcacaagatgtgggtgagtgacatgcttgccagaggatttattcttggcaaagatgcattgaacaaagcaaagacctttgatgagaagcatgggctgacatcaactgctactgccacggttgcttctctgg

SEQ ID NO: 4783 - DNA, 735 bp, Gossypium hirsutum
  Clone ID: GOSHI-09MAY01-C90682_1
tcctgattggggctttggtatcttgtccactttcctgaagttagaaactggagataggaatcgtcatgaacaccatgtctgctcagtttgccgttacccaattatcggttctcgctttaaagaagtaaagtctcattttagtctttgtaatcaatgctacagtgaggggaaggttccccctaactttaaacaagatgaatataaattcaaggagtatgggaaggaagctgaagcaatgaaagataagtgcttgtgctttaatttgcaatcccgcaaagatccatagctagttggttttaaagtcttttgctaatcttgtaccattccatcgtattattttaggcatcccgtgtgcattgtgcaatatacagttcatcattatgttcagtggccgtgtcatgctcttgtgtaataaccgttttcaagtgatggctctgaaatatccctgtttcgtaatagttgttgcagagtatttttactcttctgttcttgggggggaaaatttgagatgatgtatatttgagattattacactgtaacttcttctgcttctgcttccttttttttcccttggtgttgaattttccaggagaattttcaatggagaaacaaacgttatgtttctattgggcaaaaaagatgttatcctttggggatgcagagcattaattctgctcagactattcagctgaagtagttgatattaattgatgaattgcgattattgttttgcct

SEQ ID NO: 4784 - DNA, 572 bp, Gossypium hirsutum
  Clone ID: GOSHI-09MAY01-C90132_1
gtcaaatgagctgagactaccatgcatggggccgagcaggtagagaaagagagatggcatccggttggggaatcaatggcactaaaggaaggtgctacgatttctgggttgacttcagcgagtgcatgtcccgttgcagagagcccaagattgctctctccttcgtgaagactatctcgagtgcctccaccattccaaagagtttcagcgaagaaatcggatttacaaggaagagcaacgaaaaataagagctgccccacgaaaagaaaaggatggcggagatggtgttcaccatcatgcatgatgataatttgtgatcattcaaatttccaagaaaaataatgcatggagattgttgtatttttgttggatctttcctatatttcctgttccttggaatggagactgttgttttgagcccgtgcaacagaggcaatggttaatctttcatcactagacctggatgagacagcaatatttgcgactttaattttcaaattctgagaattttattttagtctcccccagcaggagcattgttgtttgaatcggattaaactgattagatcaga

SEQ ID NO: 4785 - DNA, 592 bp, Gossypium hirsutum
  Clone ID: GOSHI-09MAY01-C90092_1
ctctccctctccttgtataaacatcagctagtaacatgtatctatcatattatatataaatgtatagctctcctctactagttataggaagaaatggagttgcttgatcttgtggtgatctcgaaagcccttttctcggtagccctagcaagtgccgtttgttacgtcttccattactataccaggagctggctgaggtctcaaaggcttagaaaaaagctgtgcatgcaaggcatcaaaggaccacctcctggttttgtgtatggaaatgtagcagagatgcagcaaatccagttaaaggcaaagaagacacggaaccactctgaaattgttgctcatgactatacttcaaccctcttcccatatcttgatcattggagaaaagaatatggttcgatatacacatattcaacggggctcaggcaacacctatacgtgaacgacctggaaatagtgaaggaaatgaaccagttgaataccttgcaggtgggcaaggatgcttatatgaccaaagcactccaacccatgcttggcaatggcgttataagatccaatggccaattctgggcccatcaaaggaagatcattgcgc

SEQ ID NO: 4786 - DNA, 596 bp, Gossypium hirsutum
  Clone ID: GOSHI-09MAY01-C90052_1
cggcgctgggtcgacccgggggggggggggggggggcctcccaacatcccaaaaaacagaatagccccccatcttctctgcctgggtttcgaaagaacccctcttgagccgtcgtcatcaactcgccgctcctctaccgtgggcgatggtcggagcgacaaaggatcggggggcggcccggcgttccaaaagaatcgagggccacacccttttcacgccaaaaaaaacgagagagaagcccttttacctcgctcttggattcgattcccgtgacggagaataagcttcgacgacgcaaccctgaggctgctctggtaagtatctccttctcttctacttttattttcgtatttatatgagaaaataaaaataaaataaacttaagattaaaatgataaataatccgaaaatcaccttaaaagtttagatcttttgtttttctattctaaaatctcgaaagaaggtacaagcatgttgatgtggcttttatagccaaattacaagactttttatttctatatttttgtcgttttctcgttgttttctctgttgcttgcatgtggatcttgatttgcaggtggtgtcaaagaagcgtt

SEQ ID NO: 4787 - DNA, 719 bp, Gossypium hirsutum
  Clone ID: GOSHI-09MAY01-C91982_1
gacaagtgatggttcaatttgttcaattgacaatcataacagaaaatggatagctatttaacatcataattgataaatcaaaacacattgaagttaaagggaaaaaaaaagtgccaagttccattctttaatctattgcatctaggacattagagcatcatttaagtataacatatattcaaaagaaatataatatataatttaatatcgtagcaatgggattaaaatctcaaaacaaaaagtctataaatctaagaactggtaaacttggtaaccgccttggtaccttcagagacggcgtgttttgccaattcgccaggtaaaactaatctcactgccgtttggatctccctcgatgtaatcgttggcttcttattgtacctggccaatctagaagcttcctgagccaatttctcaaatatatcattgatgaaactgttcataatccccatggctttgcttgagataccgatatcaggatgaacttgtttcaagaccttgaaaatgtaaatcttgtaagtctctgtgctctttttgatctttttctttttcttatccccgccttcctttgatatttttttctccactgaagctggagctttctctgctacaggctttttctcggcaggcttcttctcggcctttggtgccattggaagaaaatgatgaaagtttctatctgttttaaccaaacaaacaaccggtagaaaaatgaagtc

SEQ ID NO: 4788 - DNA, 931 bp, Gossypium hirsutum
  Clone ID: GOSHI-09MAY01-C91412_1
gacattgaatgtatgtatgtgtatatatacataaatcatctgctagttcagtgtttcttttccttttttggctccagtacataacttggggaaaatatttagcacatcaataaattactccactgaagccagattcttaaccaacacaatgcggcttggaggcaggaaagccacgaatacaagttggaactgtttgtcttcaattaagtaatgagaattgtaaattttgcttagcatgggggtcaatactacctacttgcagccgtgacgttgatttaacatctcttaccgccaagacccgaaatctgaacatatttgataagaaacctgcggatttgacattatacgttttgcgtcgaaaacgtttgtcaaacatctcggaccttcgttcatccaaaacatgccagctcgatcctccatcattacttccctcaaccacccaatccattgggtctcgttcaggtgcatcattggcagacattaactcatatgcaacaagttcctgcatattcgctgatagtttgtacataatccaacaacctttagcaccattaggttcctcccatttagacatgcgagttccatcaaatgctgctgtggcaatcccaaaaggaagctcctcaccactcgcaaggactgctccagaacatattctattcaatcttagaagaggaaaggatagcgagcctttactaaagttgtcacatttgctaagatcactgatcagttcatccagagcatgcaaggcaacaggcaacgctaaggcagtttgaacaggatcaccagctaagcatacactgagaatgccattgctatcccgttcactcttcagtgaaagagcattaagcaactctttaaaagagggcagcaactgatgcaccaaagatgttccaacaacagagttaggctttaaagaagctctccttttttt

SEQ ID NO: 4789 - DNA, 703 bp, Gossypium hirsutum
  Clone ID: GOSHI-09MAY01-C91602_1
cttccatcggagtttggcatggatgcagaccgtatccacgcagtggagccagctgcgagcatattcaggatcaaggctaaaattcgaagagcaattgaggctgaagggataccatatacgtatatctcatccaatgcctttgcagggcatttcttgccaaatttaatgcaggaaaatgccactgttcctcctagggataaggtagtcatacttggagatggaaatccaaaaggtatttttgtccaggaagatgacatagcaacttacaccattaaagcggctgaagatccaagaaccttgaacaagattctttatataagacccccttccaatgttttgtctttcaatgaagtagtctccctatgggagaggaaaattggcaagacccttgaaaagagctatgttcctgaggaacagcttcttaacatcattcaagagtcacctgttccctggaatttctttttgtcattcgcccatcctatgtttgtgaagggagaggcttcgaatttcggtatagaagcttggttcggtgtggaggcatctgagctttatcctgaactgaaatatactagtgttgatgaatacctgcatcagtttgtgtaaaatacaccaactttgtagcctaacaaagaaaccatgcagtgttgaaacaacttatgttgcagttatgcccttgtttgcaatccagatgacaactttcaag

SEQ ID NO: 4790 - DNA, 700 bp, Gossypium hirsutum
  Clone ID: GOSHI-09MAY01-C91622_1
gttaaactgagagatcatcccttcagttatgtctgcgcttcattttactgtaactttcctccttctgactctgttactggaagtaaataaagcaaaatcccaatcatttattggcgtaaattatggacaagtggccgacaatctaccatcaccggcagccacggcaaagcttctccaatccacttcaatccaaaaggtccgactatacggctccgacgccgcaatgatcaaagcgctagccaacaccggaattggcatcgtcatcggcacggccaacggtgacatccctgccttggcctccgacccgaattttgccaaaagctgggtggatacaaacgtagttgcttattatccagccagtaaaatcatcctgattaacgttggcaacgaggtcatcatgtcgggtgataacaatttgatatctcagttgttgcccgccatgcaaaatgtcaagaatgccctcgatgcggcttcgttgggggataaggtgaaggtctcgacggtgcattcaatgactctgttgaaacagtctgagccgccatcttctgggagcttcgacccggcttatggagacatgttgaagggagtcttagcatttaacaatgctaccggttcaccttttgccattaacccgtaccctttcttcgcttaccggagcgatccaaggcctgaaacgctggcgttctgcttgttccaaccc

SEQ ID NO: 4791 - DNA, 929 bp, Gossypium hirsutum
  Clone ID: GOSHI-09MAY01-C91332_1
agctgtacaaaccaagatctcattctccaatgacatactttaatatatgcagaaaagaaagaaaaaaagaactgtaatcatacctcaatgccatacatacacaaggaaataattttaagtgattcaaacattatgcaagttttgtttcatgaacaaagcctgggcaaggatcttgcagtgctatgagttggtggtgttttcgatttcatgagtttggccatctgggcctgcattttcttgcagagtttctccagttcaatcaccctccattgcatcccttgtaaatgagctctgaggttctcgttgtcgcccgatatgtctaatctccctgaataaagaacaatttgttcactgccttcacctttctttgccttgcctcgggtttcattgagtttacaaggggaatccatgtcgggtttactgttcttagtgccctgcagtaagttcttaagcttcaattgctgggaaacgagagcttgtaccgagctttttgatggaaatttcgcattctgggaaaggtgtacgcaagcatccgaagagagcttctcgtagttcagtgcgcaacagaccttcactttttcttcttcagacaaccctgcatgcacctccagataaacgtcgattgcgtggtataattcatcccaacagtccctggcagaatccggcaaggccaccaccaacgctagaaacttcgacaatcttaaaaaaggatccggagctacttctgcaatatacagatccatcaagctagcaaccttcctcattcgtgttggtgataatcgccagcctccttcacatagaaatgctttcagaaatctaagaacaaggttcacatcatataaataacttgttccatatggagatgggatgagcaggttgtctaatgttgcttgatccatttgagaacctatcatacactccaactggtt

SEQ ID NO: 4792 - DNA, 717 bp, Gossypium hirsutum
  Clone ID: GOSHI-09MAY01-C91322_1
cccagcgtccgaaagttgtcagttggtctcaatatctttttttgttctacttttttcagtagctgctagacccaccgataatgattgtgtttacacgttgtacgtaaagacgggttggatgatgaaagcagggacggactcgaggatcagtgtagttctgggcgattcgttcgggcggtcagtttggattccagaactccgttcatggggtttaatgccatacgcccacgactacttcgagcgtggcaaccttgatgtcttcagtgggcgaggtagctgcatcggctctccctgccgcctcaacttgacctccgatggctcggagttgcaccatggctggtactgcgactacatcgaggtcacatccaccggacctcaacaaccatgcgcccagaccgtgttctatgttgatcagtggttggccactgatattccccctttccagttaacggcgtttcgtgatgggtgctatatgcgggatgagcctcgcaagcgtggcaggaatgtgcctctcattgttgggaatcccgaaagacctgcttgatgggtgccttttgggttaaaaatagttgctaataatgtggcagagatggcagtgagaggtttaatttggtccggttgtttcggagatctttgcatttttggatctctagtagatatgcttttccttcttagttctttaatcaatttaaaatatataaatgagttttggatagt

SEQ ID NO: 4793 - DNA, 1190 bp, Gossypium hirsutum
  Clone ID: GOSHI-09MAY01-C91252_1
gtttgtttagaacaatgaacaacaattcagcaaagagccctatgatcgtctcgttcggcgagatgctaatagacttcgttcctgatgttgccggcgtttccttggctgaatcctacgctttcatcaaagctcccggcggcgcacctgctaacgttgcatgtgccatcgctaagctcggaggcaacgctgccttcattggcaaagtaggagacgatgagttcggtcacatgttggcgaatctgttgaataagagcggagtgaacagcgacgggatctgctttgacaaagatgcgaggactgcgttggcattcgttacgctgaaggcggatgggcaaagggaattcatgttttatcgatcccctagtgcggatatgttgttgaaagaatcggagttgaaattggatctcattaagcaagccaagatattccattatggatccataagtttgatatcggaaccctgcaaatcagctcacatggccgccatgaaagcggctaaacaggctggggttttgctttcttatgaccctaatgttcgcttgcctttgtggccttcccctgaggctgctagggatgggattaagagcatatgggatcaagctgattttgtcaaggttagtgatgatgaggtggaatttctgaccaaaggagaccctaaaaaggatgatgttgttatgtctttatggaatgacaacttcaagttgcttattgtcactgatggaccagaaggttgcagatacttcagtaataaattcaaaggaaaggtgaacggctacaaagtgaaaaccgtcgacaccaccggagccggcgacgcttttgtcggtgcatttctacaagctgtagccaaagatccaaatctcttcaacgatgaaaataagctgaaggaggcactggtgtttgcaaatgcatgtggagcaatttctacaactcaaaaaggagccatcccatcccttcctgacaaggctcaagctgaaaatctcatcaaagaagccaaatgatgttctttcctttttttctttctagaaataattaaactttttagtttttttttttttttgctttagaaggtgtcggatgcgtcacaccgcccatccaaagtaaccttatctaggtagtttcgggtgataaataagatgccttgatgcttttttcccaagttactattctgattttatttttctatcttctat

SEQ ID NO: 4794 - DNA, 417 bp, Gossypium hirsutum
  Clone ID: GOSHI-09MAY01-C91232_1
gtttcattcctcaaacacaacctacatgcatatcaaaggaacaccagcctctatatcaatcctttagggtctctttcactgccctgccaaactaccatgcttcagggtgatgacctacctgcgagaatgtgcccaatcttgctggggaggagctcagccggtctaaaggatcctgtccgtatcgtccctgctttcttacttattgaaatggggcttccaaatctcacgtcatttctcaaaggaaaaaaatgaaaacaggttcatagactgaataaatattgactgatttctgacctctcggccttatcttcgattggtaaatatagggctttgatctatcttaagtagcgtaatctaacttatatcaacctaataacaaaatgcgagggaaaggacaactttaatagaggctctcgt

SEQ ID NO: 4795 - DNA, 582 bp, Gossypium hirsutum
  Clone ID: GOSHI-09MAY01-C92872_1
gcctcaattcttaaatcctttgcaaatacatgcatacatacatccatatatatataatgcaacaagacatgagctcctaatttctaaattaaaaaaggtaagcatttctttcatctttttcgcacttgtaagaagtgccaatcactcaataccattactgaaagttgatgaaaataaagaacaacaaaagttgccccccactgcccttcattcatctgcccgacttactactctcctttttcatgtactcccaccagggaaagtgcaaccattatagcttgggttgctagaaaaaagcatggctgcttgtgagaaatcacagctcgatggatcccggccagaactttgataatagagattcatcgcatatgctgcatgtgctgatagtgtatttggctcgaaacaagaccctcccggttggattggactacaatctatgccatgtgcacaagcataatccaaacttgcctgcaattcggaatctgtaacatctttctttggaacacaccaagatgctttctttggctccggcgacggtgccactgctgacggcgtcgctggtgtcttctctgttgcgggact

SEQ ID NO: 4796 - DNA, 457 bp, Gossypium hirsutum
  Clone ID: LIB3828-019-Q1-N6-D4
cgcatcaattctgtcaaatcctttgcaaatacatgcctacatacatccatatgatataatgcaacacgacatgagctcctaattttaaattaaaaaagtaagcatttctttcatctttatcacactcgtaagaagtgccaatcactcaataccattactgaaagttgacgaaaataaagaacaacaaaagttgccccccactgcccttcattcatctgcccgaattactactctcctttttcatgtactcccaccagggaaagtgcaaccattatagcctgtaaagtgccaaatattcatataaaatgagattaacaattgtattcgcacagtaaaaagcagaggtccactttaagaaatatgtacttgggttgctagaaaaaacatggctgcttgtgagaaatacagctcgatggatccgggccagaacttgattatagagatcatcgaatatact

SEQ ID NO: 4797 - DNA, 891 bp, Gossypium hirsutum
  Clone ID: GOSHI-09MAY01-C92542_1
gtttttggccacaatacctcttgatgcccatcgtgcgcatcgtcaaaattgattttaacgatatcactagcatttctatctccccaaatgtcccatagtgcacaacagaatagtcgacagtggtaatggggtaatgatcaaaaacccaggtaagccattgtataaaatccatattagtagctattaaaatatttgggaatgataatgctgtccagacttcaactaaaacaaggcatttgcggaatagatgatcacttgtttcagctcctcctctacaccggggacaaattgtgttattaactagcttcctatgctgcatgttaactagtgtaggcaagtagttccatgatatcctccagattgtgattttgatttttgtagggagattttcgagccagagttatttgtaaaagttcctatagtcgatttgtaaagcataagctctaggattataaccataattttgtaatagtttgtaggcgctacgaaccgaaaattttcccgaagattcaccactccatacaagaaaatcatcatggggttcttgtgccaacgggatacaaagaatcttttcagcatctccctccaaaaaggtattagcccaatacaatctttgaacccatgccccattcatctacatccaaagcagaaagtcagcaaattttcatatctaaaggaaatccccaatttccgttgagtatcatttgagactaagatacctctgcgaatgggtttctacacatctaattagattctgaggcgataaaaaactccattaattttagatctaattactcctcctaaagtaactctaatgcctataaatggagactttgaagaagcattgtaatcatcccattgatcaataaaatacattatctattgcttctc

SEQ ID NO: 4798 - DNA, 760 bp, Gossypium hirsutum
  Clone ID: GOSHI-09MAY01-C92412_1
ctcaattcttaatctgaaggacagtagctctccccatgccctaattttccacaaataaagcaaaataagcttaatttctcatatttaaaacgagcataagtagtcatagccttcccaaattggatcttcttcttccgtttcaatggtgcatttacatccagacaaaccctaatgcgcatatacgatttttgccccaaaagtgggttattagaatcatactcaataaactttccacagaagttacctaactgcacaaccatcgattcagatatcagtcctggaggtaaatcatggacctgaacccaaaattcagtggagtttaactccattactgccgggttatctccatacgatattctcttcaataaaagcagatggttatcaaaaaaccaaggagttcccacaagcacccgtacaatgtcaacttcatgaaaaaattggaataaataccttttttccccaatatcagtaatacagatcccaccaatagggtgccaaagatctgccatagtattccttaacgaagggaaatgaaccacactgtctgttaaacaacgccccacaagacacaattgcgaaaagttttccacagccggaccatcctcatggattgcttcttcctcatcatcaactagcctcagattggccaacacatcttccattataaaacacggcacccgagaaactgatcagcaaaaggaatcaagaccccacactgtaccctgtcaacgcaaaatatagcactataccccgacaacac

SEQ ID NO: 4799 - DNA, 567 bp, Gossypium hirsutum
  Clone ID: GOSHI-09MAY01-C92762_1
agaaaaaaggaattgacggtttacattaatctccatacgttttcagtttcataaatctcacactaactttgattttggtattaaataagtgtacaagtaattttacccccagtcattccatgaaattctggtaatgaagttcaatgagcaaaatggttagcaaaatttaatgcctacatgttggtataccatggaatgacagaatgcaaatgctatgttgaagatctctctgctctaaccaggtggacggcaagctgtttaggaacatgtaaggaaatcaaataggctacctcctcataccggcaggccaagtatcaaaagacctgtcctgcctacccggggttgaataagtatacagtccccattggcctaaagtataagcggctcctcaaatcccttcccctgtccgttgcaaaactcttcgaagctcgtctgccattccttgcaataaaacaggtttctgaaggattgcattcattcctatttgtaggcatctctcccgcacatgatcctcagcactagctgtcaatgctataatcaatggccaattacggctgcgaaacttaa

SEQ ID NO: 4800 - DNA, 596 bp, Gossypium hirsutum
  Clone ID: GOSHI-09MAY01-C92072_1
accaaattatatttattcacttattctcataatgaaagtacatgacatagttaataatgagatcacagacaactagtgcttcttacatgaagggaacaccaatttatttagtttaatttaattaagtatgcaacatacacaaatcttcaagcttccatggagttgtggggtttttctcaattcaagtggtgagaggttcttctttggtatcatattggatgttgtagtaattagcaccagtgaaagtgttaccagtgacatcagttgtgacaacggtcccattataaagagtgtctttttgagtgaatacgaagggaacatcacacgtgccatgcgtcatcgatagatacaccgtcaccttagtcatcggtggcacatgagcttggtggttaacttccatcacggtggtcgttgtctttgtctctccccactcgattcctgcttcgagtttggcagatatttcgacacccgctttaccgattaatggaacccctacttcgaaggttgctttggtttcaaggcctaacgtaaaatgagctagccaagtactggtactggtctctgtataagaaagtttcacatcgagtgtgttggct

SEQ ID NO: 4801 - DNA, 487 bp, Gossypium hirsutum
  Clone ID: GOSHI-09MAY01-C92012_1
aaaaaaaaataaacaaattaaaattgtcctaagtccatttacaaataataggcccaaacaaatgtcccaataacagatcaagcctaacccaaccaggctaaaacccagacaactcaattaaaacccgacctagttacaatggcccaatgcccaaacggcccaggacacttttgaacagaaaccctaggatttctttcccttgcgccgcagccaacagtttcgtactggcctccagcatagcccagcgccacacgtgcgcctccgttctttcatgctctacgcccacgaacggtttctccacactcgccaccctccagctgtacctacaatagacttgcaaatatgccatgggtttcctttttgcttcgttgcaatcaaagccgaaaaggggtttcaaggctgaaaaaccatccctcaaagcttgaacgcactggttgccatttatggaggtaaatcggtgtttgaaggaggggatttagggtttgcc

SEQ ID NO: 4802 - DNA, 574 bp, Gossypium hirsutum
  Clone ID: LIB3828-014-Q1-N6-A11
cactgaaacaatcaatatgatttttagttcatgcattatagcaagcaaagtttacaaccaacatgggttttaatggagaacaactctacaatttacctaatgttgatttccatagaattatattgaatggcttcccaaagagcatgtaaatcatcaaatggttccgggcagcggagtaaatataaatgcttttttatgacaaaacatcatgcgaccaaagtgaaatgcttatatcagatagaacagggtattcagacggattgtaaactattgagttgcaaaacttcctgtaggcattgaacagcagcctcgtagtttaagaatcccatgaaccaaaattcatgggcatcaacagaggtaacttggatgtacttttcagaagcattcactttgcttgttgatggatttattgcttttagttgatgtaatgggattattaccttataatagctccattcagtctgggtaccatttttatatgaaagaggactatcactgcaatatgcaagcttttctgtagatacatatagaactcccatgacaggacctgctgatgtagataagtaacatgcaa

SEQ ID NO: 4803 - DNA, 570 bp, Gossypium hirsutum
  Clone ID: LIB3829-004-Q6-N6-C1
agttcatgaattatagcaagtaaagtttacaaccaacataagctccaacataagctttaatggagaacaactctacaatttaactaatgttgatttccatagaattatattgaatagcttcccaaagagcatgtaaatcatcaaacggttccgggcagcggagtaaatataaatgcttttttatgacaaaacatcatgcgaccaaagtgaaatgcttatatcagatagaacagggtattcagacggattgcaaactattgagttgcaaaacttcctgtaggcattgaacagcaccctcgtagtttaagaatcccatgaaccaaaattcatgggcatcaacagaggtaacttggatgtacttttcagaagcattcactttgcttgttgatggattaattgcttttagttgatgtaatgggattattaccttataatagctccattcagtctgggtaccatttttatatgaaagaggactgtcactgcaatatgcaagcttttctgtagatacatatagaactcccatgacaggaccagctgatgtagataagtaacatgcaaaacaatcct

SEQ ID NO: 4804 - DNA, 647 bp, Gossypium hirsutum
  Clone ID: GOSHI-09MAY01-C93562_1
gccctatgcgagtcattggcaaagtcaagtcgaagttcttgaatatttcagagacatgtcaaaaagaaatttcagttagtgcttcagtttaccctgccttgttacacactagtttgcagttgaagaattattcggagaaaggcaagtgatccaaaaggaggattttgcttttgcttcgataagctgaaatggtatttcaggagaggctatataaatgtgctgtggatagccatgactgggtaagagctgggttagaatgaaacaaagggaatgtatggatggaggcggtgggtagaatgaagaacctgagaaaggtatataagcttacaagcacaaatgcatgtcttgttcgatggccaacagtctaaaggagacccaaaaagaaacctatcgatgcactttacacaagaatggcacttggttctcgaatcttgaaatctaggatacctgtctccaacatcaatggctagtttctcaatttgtaaacttagcactgaatacaaaacttacgcatcagaactgtacttaaaaaagcgtaatgtcaaaaatagcccttattcttattctttttcttttaagcacttcagcctccaatttggatggaaaaactgacgtgtctgttagctagcaaaaatcaaaaaataaaa

SEQ ID NO: 4805 - DNA, 773 bp, Gossypium hirsutum
  unsure (1)..(773): unsure at all n locations
  Clone ID: AI055173.1
atattcccaaatatcctattaagtagatatgtgtcacgggtatagcccagggcttgaacaataaaaatcgggttaaggaccataactgttaacgaaccacatttcaagcatgttaacatatgcggttacagtgtctttgaagggagtcctacatgcgggcaaattcgggacgggttgaaccttataacccaaaaatagtaccctaataaccttcaatgttcctcccatggttttcacttgcatatcaacaacagcagcagcatcanaatcaattaattcaccaccaaaaccagccgttgatgttttcattgaacagcanatataatagcccagcgccgggggagcttttttttcaaagactaggtgttggtggtggtgtgaacatgcaagggtcggatgcttcgtcacaggttccagcctctagaacatcaaacttnggtcatcaatgacaataggagtaaccctaggctcatgttttgagattaatgagagggacataaagcagaatgttaggtactgacttgtcttagggagaaattaaacatttgaccaatgtaaatattttccttttttttatttatttctttttctttttatgccaatccaattccaaacgtttggagtggggggtttttaatttatagcgattaaattaatggggggtgaaggattgttgttttcaaaaaccaggggcctactgctatggtaaacccagtttcagcaattttataatattagctatcaaagttttttcaaaaaaaaaaaaaaaaaac

SEQ ID NO: 4806 - DNA, 627 bp, Gossypium hirsutum
  Clone ID: LIB3825-008-Q1-K6-H9
ttcgaaaattttctcctatatttttatctgcttttttgcgccctggacatgagtgagaccatgtctactcccactgactggccgcagttttacgatcatgctctttctaaccaggaaataccgaaccgcgttcgtgttttgacggccgaatcggtgttcggcgaccaaggttccgacaccgccgtcctcaccactccaactgtctcctccagcagcgctcctgtaagcttgttagggtcgggacgaggtgggggtttgagcggtggtcatttgagccccgaagggcgcgtcgggaagccagtccgaagacgatcaagggcttcgaggcgaacccctactaccttgctcaacacggataccaccaattttcgagccatggttcaacaattcactggcggtcccagtgctcctttcgcagggggagctcctcaccatggcggaccaaatttcgggttcgggttcggaacccgtcatcaaccccataatagtaaccctaataaccctctcatgcttcctcccaccggttttcacttgcaatatcaacaacaacagcagcagcatcaaaatcaattaattcaccaccaaaaccagccgttgatgttttcattgaacagcaatgataataac

SEQ ID NO: 4807 - DNA, 961 bp, Gossypium hirsutum
  Clone ID: GOSHI-09MAY01-C93692_1
gggcagcaacaactattcatgagctttaagtaataatacaagggtaattcactcaatcacccactaccgagctatttggcaaataacaactattttatatcatataccaattggcattgcatctttaggaaacaaaatcctgcaccggtactggagttaatttttgcatacactcaaaccaccttttcctttagctcggcaatcggaatataaataaccgattcttcatgtacccgctgccaccttttattcaacttcctcgctttcctactttctaggcctaataatggttgcttcatgttctcaagcctaaccttagccctacaaagtctttccatctccaactcaaatgcttctaacccaccaccccctccaataatcttcaccctcttctccttcccccacttctttttcacatttaaaagcttctttaatatcacatcgtcactcaactccttactcaccttgtcgctgtttgtatgtgaaacaattgagagtccattatgcggacttctatctacagtggtgcatactgactttgagtttggactctttctcaattttgctttcaatctctttggtgtccgtaccaaagctgcttctgacatatcttccaatgccatgatttcagtatcccttcctctttggagcttccacttcaggctccttggggactctaggagaagagctctgaaggtgatctgctctctctacctttctgctttttagtgccaagtagcgggcattcttgaaccatttatttaccctctctggctcaaggcctaattcctttgaaaggttctccctgacgaatctagatggaagttcattctcagcaaatacctctcggagtttctctactgcagtgggaggaattctgaaaaaggtcgcctgctcttcaggtctgaaggtagctgtcttttcacttctgtggtttcaatgttaagaaattttgtctcac

SEQ ID NO: 4808 - DNA, 600 bp, Gossypium hirsutum
  Clone ID: GOSHI-09MAY01-C93152_1
acagccaaaaaaacaaataaaatatattaccatagaaaaaatatatatgtttttctacaaatattacagagcaccaacacatgtgatgcatggaagaagcttataaggtttatggggcaaggcaggcagggtgagtcagaatccgctcttaactttaagtggttctactttagatgtgttaagccgatgatgtctttgtcttaaatttccaatggatgatccatttccacatagaccttcttccctctccatccattcatccgtcattttttgctgatagtatcgaagtgccacaaatagcatgaatgcggcccaaatgcgagcaagagtagaacataggttccaaaccagggtgaagaggaccattgccacggcctttttatgtgtgcatgattcccatgcatctcgaaaccgtccaatccaaaactttccgtatgcagttaattggtgagaataagaagtgcagagttttagaacaatgaaaacgccaaagaaaccgagtttagccattttccagatggttatagagctgccacacctggccaaaacaaacagcagcactgccatcttcattgttggtgaagaggaccattgccacgg

SEQ ID NO: 4809 - DNA, 439 bp, Gossypium hirsutum
  Clone ID: GOSHI-09MAY01-C93072_1
gatagaacagtacacaaagtaatccaaaagagaatctgggtacaccgggaagattgcatcggtaacatcagttttatagttttagggactccagtttcactaccatgatgccaactaaaggatgaacaacttgtgcaccgattaacattatatacaccagagagggcaaaaagctttaccgtagatcctggttacgcaccgtttcatcgttcatgatttcagaatcctttctatggcagctatatagtactcctttggcatggtaccaacaacagactctttcctctctccgtttttgaacagtaacaccaccggtacggccataatgttataaacctctgcaactttggggtcatgggcaaaaagggttttgagagtgatagaaggcgcattgcgacgaagcttaaaggacccatttttcaaaggaaaggagatgtcc

SEQ ID NO: 4810 - DNA, 775 bp, Gossypium hirsutum
  Clone ID: GOSHI-09MAY01-C93362_1
cggccgcgtgggcgcctacttgcatgatgtccaggggtgtggcatggtcccaatgatgtttcctggtgttcaacaatacatgccaacaatgggaatgggaattggaatgggcatgggcatggatattggaaggccaacgatgccatttacaaatgttttggctggctcaccattaccaacaccagcagctgctgctcatctgggtccaagatttactatgcgaccctttcatatgccaccaccggctctggctccagctccagctcctgatccatcaagaatccaaccaaacaatcagtcagacaccatgttaaaccggcttggtgtacaaaacccaaaccagccttgtgtcccaaactttgctgatccttatcagcagtataatattggtcttcacccgatgcaattatcccctccactgaatcaagcgatggcccagccaagttctagtaaacccagtaccagtaagggagctgataatcttgaaaatcacccatcaggtgacatgacaagatagcactaaaaggatttacaagtggtggccggccagcatcaactactctcaggctgcaagcagattctattatctgaatcctggtcgcaagtgctgcttgcttgtgtattcctttggacttccataacatgaaaacattgaagaaagagctcctgtgcattacaggttgacaattctgtttgggatcactcagggaaaggttcttaccttttctaaaaagttttgttagtgtaagagaaccttcttgtctgagaccaactt

SEQ ID NO: 4811 - DNA, 267 bp, Gossypium hirsutum
  Clone ID: GOSHI-09MAY01-C93282_1
tcgctttacgcgcgaccgtaagcttttcgtcatcacatcaccatgagagtccaagtggaagaagaagcgtatgagaagattgaagagaaagcgccgaaagatgaggcagagatccaagtagacagtgaaatctgtgggttctgttttagcttttggtttactttcttatttcgatcttttgaatcggtgttaatccagcagtggatggtttttagatttttaaattgttgagaacagtttactgatttctatagaatgggtattttt

SEQ ID NO: 4812 - DNA, 802 bp, Gossypium hirsutum
  Clone ID: GOSHI-09MAY01-C93202_1
gcttgtggtgatgggcgggtgggacccggtgagttacgatccggttactgacgtttttatctacgacttcatgactcagcaatggagacaagggaaggatatgccgtcaaaaagatccttctttgcaatcggagcatgtttaggtcgggtttttatagcgggcgggcacgacgagaacaagaacgcgttaagaagcgcgtgggtttatgatttgagaatggacgagtggagtcagttgggggagatgagtgaagagcgagacgagtgtgaaggagtggagattgaggaagacgagttctgggtcgtgagtgggtacagaacggagagccaaggtcaatttgatgggagcgccgacgtctacgggttaaaatcggggcagtggaggcgagtcgaaggggtttgggaacctggtcggtgcccgagatcgtgcgtggggatggggaaagatgggaaattggtgaattgggcagagttgagcccagcggttcgggtcggagcatgtgggatctcgctgggaaggcgggttttggttacggggtcggggtatcaaggtggacctcatgggtattacatggtggaaatgaaggaagggcaacatagtaaattggagaaactcgatgtccctgatgagttctctgggtgtgtccaatcaggctgctatgcagaaatttgatgcagtaggcataattttgttctatttttcttttaatacgagtaattcaactctcttgcagagaaaagctgttttatttttcatttttccagaagagtgtaaaattttgaaaaaatatatatttgctct

SEQ ID NO: 4813 - DNA, 691 bp, Gossypium hirsutum
  Clone ID: GOSHI-09MAY01-C93232_1
caagtttgatctcctactttttcttctctgggatatctgttttcatagtgatatcaactttgggatttcatttcttgctgctatcttcccgcttttcagcttcaaatcgaaggttcttctctgcttagcttacagaataaactttccgattagagaatcaactcttttaccacaagattctttcttggtggttggatgctactgcttaaggttgagtctgagaactgctttcttctagctgtaggaaagtaaagcgattctgtattgggaacttttgggcaactaaattcgtatcgatcataaagaggcagagagttggttttgtaggattatggattccgagagatagaccaaaagcaagagattcggattggcttctgatgatggagaaaagttcataatatgtgggtctgaaattcccgaggttgtcaaagcaacatacttttagttgagaattgttgataactcattgagattcagcttttgaccatggaaaaacagcagagttttaaacaagaacctcctcaaggactcctggagaagcaacaaagttttaaacaatctgaaaaacagcagagttttcgcggtgttatgacagaaaaacaaccacctcaacggctcctggagaagcaaaaaagttttaaacaatctgaaaagcaacagagtttccgtggtgtttcaagtgagaaac

SEQ ID NO: 4814 - DNA, 660 bp, Gossypium hirsutum
  Clone ID: LIB3830-002-Q1-K6-D6
tgacaacaagcctggctcttccgccgaagttgactacaagacaaaagccggcaccgcttggagccattcctatctcaaccagaaaccatggcatcccctctcctaccctaaccaacgccgcaaatggatcgctgagcagacccatgcccagcgcgtgcgccgtgccgatgaagtcgctcgcgagtatgcccaatatcattaattctttcgccagacggctctaatttccaaaaaagagaaggaaaaggtggagatgatgaaagctgttagctttatgtatgttcgtccgcctggttataatgctgaaagtgccaaagcggccgagattgctgatgagaggaaaaaaactgatcataacaacgtatccgatgatcattctaccgatgtgccttccacagcaatgcagccggaatctttgcccggtggaggtgctactactcaagagaaacggaaatcaagacctaaagatgtttttggacgttctttaccaacagaggaagagtttgaagttcttaaaaacgctccacggctggagactggtgttcctggtagggttaaaccatttgctgttgaagtccgtaatgtaaaatgtcttagatgcggaaattatggtcaccagagtggtgatcgtgattgtccattggaagatgctataatgcc

SEQ ID NO: 4815 - DNA, 374 bp, Gossypium hirsutum
  unsure (1)..(374): unsure at all n locations
  Clone ID: LIB3829-023-Q6-K6-A4
cctagtgggagagatgaaagctgttagctttatgtatattcgtccgcctggttataatgctgaaagtgccaaagcggccgagattactgatgagnaggaaaaaaactgatcataacaacgtatccgtatgatcattctaccgatgtgccttctacagaagagcggcgggaatctttgcccggtggaggtgctactactaaagagaaacggctggtgtagatggtcagttgtgggttttatgtccaatacttttccttatgcagggtttcgaggcatatgttggagtactactgctcaagacagcatttttttgggttgttcctgaatggcagataatttttgtggcatacttttggtttgtatgggctgttggg

SEQ ID NO: 4816 - DNA, 877 bp, Gossypium hirsutum
  Clone ID: GOSHI-09MAY01-C88752_1
gttagggttcctagtttttttaatggttatgatattattgcaggtcaagggagacaatctgttaggccgaatgccggagcaagcccgtattttggcgcaaatatgccatctgccatgggtctacattattggccttcctctcttgggcttgttggtgctcataaaccgcccacctcatctcatggtgttggacttttttttaggctggcacctatggatttgattcttggccaatcttctaggccgaatgccaattttgttgggcttgaaaatgctagtaattttttggcacaaaatcatgggtccaatgtgccatggtgcactaaatgaaagtgtgtgttcatgacgttgatgcctcgccatgtgttgtgttgcctcatttccctaattgtcatgcatcttattatttgaccacctctaggtccaattccaatactacttaatatgggttaaattttgataatgaaaactcgtatattcctatgcttgtagggaccacatcttggtgtcctgactttggggatacacatcatgtatgttggtaggctaccactttacacgagtccatcccatactcagatcaagaaataccgaatccgaacctagaccaagggaaagctaagcaaatcgactaaatcgactagttgccacattttgtaatccgagtgctgcctatctagcttaatgatcaacggaagttagagatatcgatcacactatcaatcgaagcattcggtatagtttgatttaaatttttgaatatggcatgtatagggaactagacttgtgttttgtgttggtttgggataaattgtaacaccccttactcgagaccgtcgctggagtcgagcacgaggcgttactagacttatcttaa

SEQ ID NO: 4817 - DNA, 158 bp, Gossypium hirsutum
  Clone ID: GOSHI-09MAY01-C88632_1
gtaaagatctgttcctcctcccctgccaatgaaaagcttgaaaggggttgaactttttgaattaaatgaaatggcattagtgctgcccaagatgctgtaattggtatacattttaattttttatgaacaaaaggggttgtggggctgcctttctttgg

SEQ ID NO: 4818 - DNA, 816 bp, Gossypium hirsutum
  Clone ID: GOSHI-09MAY01-C88172_1
cagtgagagccgcaaagaggaatctgtttgtttttcaggaagcaaaggattcttgctttgagtttgataatctgctgctgtttagcctttcaatggctgcttttgttggggcattgaagaagctttctatctgtttgattctttggctcaatactctcccttttcttcaaggtggcagtgattattatgaattcaaatacccattcatcaaaagggcgagttcattttgggcatcatcatcatcgttctcatcatcaaacacagacgaagcatcatacgattacataatagtgggaggtggcacagcaggatgtcccttagcagccacactgtctcaaaacttcagtgtgctggtgttggagagaggaggcgttcccttctcaaacgtcaatgtctccttcctcagcaacttccacatcgccctggcagacacgtcccccacctctgcttcccaaccttttgtttcaaccgatggtgtcatcaatgcaagggctagggttctgggtggtggcacttgcatcaatgctggcttttacaccagagctaactcaggtttcatccggagagtgggttgggatgaaaggctagtgaatgagtcatatccatgggtggagaagcatattattcaccagcctaaactagcacaatggcagggtgccttcaaggacagccttttggatgttggggtgtcaccttataatggattcacctacgatcatatccatggaactaaagtggaggtacccttttcgaccgctttggccgtcgccatactgcagccgaactgcttgcttctgcaaacccaaaatgcttact

SEQ ID NO: 4819 - DNA, 583 bp, Gossypium hirsutum
  Clone ID: GOSHI-09MAY01-C88052_1
aatatcttccttctccccttctctccatccccttcactcaatacttcaatctttcccccatgccagatttatatatgtatagagaaatatgagcttcttgttgaagatcattaacatcagcatcagcaccaccccatagcatattgcactgttccatgcattgtcatcaagcatgacatgcaaccatgcatatgttttggcatccatgtgtatatcatgtatgtgcctggctccctgtatgccatccgcagaacctatcgaacaacgatggcatctgtgaatggcgtatgaggagtcaagcatatatttctattttctacatatatatctccatcagtatacctcttttgcaggctttactgttttaatctttttgctttccaattaaactgaagggcttcaaggtacttcattttcctcatcctcatcttcatcttcttctttaatcttaatatctggtattagggttggtttcttcttctttgatatgacctggttttcctttctgcagagagacactaatttcttaagcttcttgcagtctgcagataggtgaaccgggtcccttcctgttttattaatt

SEQ ID NO: 4820 - DNA, 983 bp, Gossypium hirsutum
  Clone ID: GOSHI-09MAY01-C88012_1
gcacatgctgagaacaaattgccattcgtacggcggaaaaaagttcgaagctttggcagcacatgatgcctttgttgaaaccagtggagctttgaacaccatagctgcatccctaatgaagattgcaaatgacatacgcttcttgggaaggttttattttatttcatttttttatgtagaaatattattattgtgatagtttcaaacattttgccttgatccagtggtcctcgatgtggccttggtgagcttattcttcctgaaaatgaacctggcagcagtattatgcctgggaaggtgaaccctacccaatgtgaggctcttactatggtctgtgcccaggttatgggtaaccatgtggctataacagtaggtggatctaatggccactttgaactgaatgtgttcaagccattgatggctagtgcactcttacattcaataagattggtgagtgatgcatctgcttcctttgtgaagaactgtgtgaagggaattcaagcaaataaggacagaatttcaaaattacttcatgagtctctaatgctagtgacatccttgaaccccaaaattggttataataatgctgcagcagttgccaagaaagcacataaagaaggcagctcattgaaggaagcggcattgaatcttgggatgctcacagaagaagaatttgaaagtttagtggtgcctgagaaaatgattgctccatctgattaagtcgaattaccaaataaaattcaacactcaattcttttttgtccatgttctgattttggaatacattaggatatctccagatatttatgttcataaattatttagtttcgatttgagacacccaaataaaattgacttaagcatcaaccaattaagatagagttatcgtatcatgacttggatccagttatttaatattcttttgtaaacaacacagataagaaatgcttatataacttatataaattgaaccaattaattat

SEQ ID NO: 4821 - DNA, 799 bp, Gossypium hirsutum
  Clone ID: GOSHI-09MAY01-C88282_1
ttttatctccaagaaatcctggaccttcaagatgctaagcagaagattgccagggaaattaggtttaaagatggtgcagtccttgcttttgctaataaacttaaggaggcggagcaggttctcgatgttctagttgatgattattccagttatcggaagccgaagaggttgaaattggaggataatggtgtgaaggatgctgctgctgctgatggtgattcttgtaccactacagttgcatctcgtttgaatttgtcagatattttgtcctatgcacatcggattagttacactacttttgcacctcctgagtttggcgccggacaagcaccgcttcgtggggcgctcccccctgcgccacaggaggagcagatgcgtgcttctcagctttataactttgctgatctcgatgttggtttacctaagacagccgagactaaggagaaaactgtcgaggctatcattgagccaccgcctgcacagcctgcagataccaatccgctggctaatttggctgcccttcagggcttgcttccaccaaattttacagttccagcaggctggaaacccaatatgcctgtggagttgccagccaacttgccagtgccaccaccaggatggaagcctgggacccagtgccactacctcattggactccttgtctatacctaggatggaagggccgaacatgcggcctgtccacctcagtttgcataagccacctgagccaattcaggtgcgacatggtgagctcgacattcttgatccagagatgatagcagtgatatagtagtgatga

SEQ ID NO: 4822 - DNA, 684 bp, Gossypium hirsutum
  unsure (1)..(684): unsure at all n locations
  Clone ID: AW186705.1
ggagcacaagtattaagcactcaatggaacaacatttcttcacaatcctttcagcctttcctcgagtatgttgatgatcctacctcaaacaccattgatgtccgcgttgagtaaaatcagaaggtaactctcaactgggtctttctcttgaattctcttctgaaatggaaggaaaaaagaagttgcttcttgcatcccaggaaacaaaccaattctctagcaaatttgatgaaacgattgtcctacatcaacctacaaaatcagacacggccccaggatgggttatacaagagagcagcatttcaatgaatggatacacattaacagaaatccgcgccatatgctacaggaaacaaccagagaacagtgaacataaatcagaagctagatcaaaaaccacccaggatccagcagaatactttgctgtgcttggacacattagcatatcaacttcgatacagaacacagaatttcctccatcaacttcctggatcgtcaagggtaaggatgtanaatggggaggttctcaaggttcaaaaaccccccttcttaaaatcaactggaaattgaaaaatggatggagtacccgtttccccagatacaatagctatgttgagaaactaatanaacaagccgtgagacccccgggatgaaagctagagacccgtgctctagcaccacctg

SEQ ID NO: 4823 - DNA, 633 bp, Gossypium hirsutum
  unsure (1)..(633): unsure at all n locations
  Clone ID: LIB3543-051-Q6-K6-B6
ataaaccttctttgntattagtgatggaatcttcattaactatacatggaaggaggcctaccctaagctttcagcaagagttgctggtgatagaaagtttgatgtctatttggggatagatgtatttggaaggggaacatttggtggtggccaatggactacaaatgttgcacttgatgtgataaagaaggatgatgtctcagctgccgtatttgctcctggatgggtttatgaaacaaaacaaccccctgattttcagactgctcaaaatcgttggtgggctctagttgagaaatcatggggaattgtacaaaattatcctaaagtattgccattctactcaaattttgatcagggtcgtggtaatcatatttccatcgatggagcagaagtattaagcactcaatggaacaacatttcttcacaatcctttcagcctttccttgagtgtgttgatgatcctacctcaaacaccattgatgtccgcgttgactgtagtgaagtatcatttagtggaggaggaaacctcacatttaaaggaactcttgaggccaaagcttatgtctcaaccanactctntttaggagaagcttttatgggtggcttgcctgttcgtttcacatattctgtaaa

SEQ ID NO: 4824 - DNA, 617 bp, Gossypium hirsutum
  Clone ID: GOSHI-09MAY01-C89762_1
ccccgcgtccgccccgcgtgcgggcggcgggcgcaaagtcacaaaggcttcattaattggctgcaaagctctcatctctctttgaccatgtcgtcgattaaaaccattaaggtcagcaatgtttctttacaagctactgagcgagacatcaatgagttcttttccttttctggggggggagaatatgtagaaatgcagagtgacaatgagcggtctctaattgcctatgttaccttcaaggattcacaaggagcagagactgctattcttctttcgggagcaacgatagtcaatctgtctgtcagcatttcgttagctccagactacaaattgcctactgctgcttttgcaccgcctcctccaatacaaaaccaaactcctgctggtgctgattcggcaatgcgaaaggcagaggatgctgttactggcatgcttgctaagggctttatattgggcaaagatgcagtcaacaaggcaaagagcttcgatgagaagcaccggttaacatcaacagcctcatccaaggtagcatcttttgacaagaaaattgggttcacggagaaggtaagtgctggtactagtgcggtgagtgggaaaagtagggaagtggataaaaa

SEQ ID NO: 4825 - DNA, 492 bp, Gossypium hirsutum
  Clone ID: uC-gsflnu33B115g05b1
ttctttggcttcattaattggctgcaaagctctcatctctctttgaccatgtcgtcgattaaaaccattaaggtcagcaatgtttctttacaagctactgagcgagacatcaatgagttcttttccttttctggtgatatagaatatgtagaaatgcagagtgacaatgagcggtctctaattgcctatgttaccttcaaggattcacaaggagcagagactgctattcttctttcggtaattcaactgcatactattaataaatgctataatacgtgacatttttcgtggaaatggctgcttctggtttctttgttcataaccatagtaaaagaaatttgcagcgcgatttttgtcttgccagaccgtgcaaatattgaaaaatctttgatttttatgactaaacagtaataacaaccattgactttatatttttttggtatcttttttgctgctatctttttttaaactgaatttatcttatcttttatt

SEQ ID NO: 4826 - DNA, 904 bp, Gossypium hirsutum
  Clone ID: GOSHI-09MAY01-C89082_1
atctgatctaacccttgaaatgctgctaaaatcacatcggttccgtagggaaatcttggtttccctgaaaactggtctgcctgattatcttcgggtagatgacagaattccatcttctaatttagctgagatctttctgaacctacgatgcagaaatctcatgtgccagacttctctgcctgcggaagattgtgagtgcaaggcttgctcaaagaagaatggtttttgtagtgcttgtatgtgtcttgtatgttcaaaatttgacatggcgtccaatacttgtagttgggttggatgtgatgtctgtcttcattggtgccatgtttgattgtggattaagggaatcttatatcaggaatgaacatactgcagctgaggtgcaatttcattgtgttgcttgtaatcatccatcccagatgtttggctttgtcaaggaggtttttcagaactttgcaaaggaatggacgcttgaaactttctccaaggaacttgaatatgtcaagagaatcttttccggcagcagagacttgagagggaaacgactgcatgaaattgctaaccagatgcttgttagattggcaagaaagtctgacctttccgaggtttacagtcagataatgagcttcttgactgatgctgattcttccaagcctgacaatacaactgttttgtctggaaaagaacaagaagtcaaaggagtcaatggtatggctggaccatgtcaggatgctacaaggctcaaaccagtttattccgataaagcccttcaattggaaagcgcttctagcttgcttcctggtttccatgttgaccgaactgggctgtctgagaaacgcctttagagtcagagttggagaggagtggtcagaaagcaccatttttgcccggaattgatagctttgta

SEQ ID NO: 4827 - DNA, 895 bp, Gossypium hirsutum
  Clone ID: GOSHI-09MAY01-C84972_1
caaacttgtttctctttaccatttccagattccataaaacattcctactctttcttttttttgctctattttccctgcttaattttaatctgcgtctttccacaattgggtttctcttgttttagcttttccagccttttacttctttttttaagtgagggttttgggtatttaacattttttaaaatttgggttccttcagttttggtgggtttttgttttgctttttccgtaacgatggtatgagaaatttttagggttagaagaagagagaagatgggattaggttttcaggaaggaaaggtgaagtcttggaatacgtgcaaatcaaaggaaaggaagaagaagacaacagtgaaaaagaagatcttgatgatgaagctgctgtggaagaaacagggtgttgggttaagttgagattcattggaagctgcatttcttcaagatccaaagttgatagttctggtagtgggaccagcaccaattatgatagcaaatctgcctatgatacaagtaaagatcaaccggcagctccagttgtctcatccacaaccactagccatgctgaaagtagttcatctacatccaaacttgaagatgagcttaaagttgcatctcggtttacggaagttcacatttaaatgatctaaagtgggcaacaagaaacttcagacctgagagtcttcttggtgaaggtggttttgggtgtgtcttcgaggggtggattgaagaaaatggaactgctccagtaaaaccaggaactgggcttactgttgctgttaaaacactcaaccatgatggcctccagggacataaagaatggctggccgaagtgaattatctcggtgatctcatacatcctaacctggttaagcttattggttattgcattgaa

SEQ ID NO: 4828 - DNA, 538 bp, Gossypium hirsutum
  Clone ID: LIB3582-032-P1-K1-C9
cggacgcgtgggatttaatgtttgggtcagatattaatttggttaattgggtcatgggctaatagacttttattgtattggtttattattgttttttaatttttagtttcttggttttctaacgggcccgggcaaaatgggcctattacagttgcccctctttgctcattgtcgtgcaacgagaatagagcaaagacttcaaatagggccaattttgcccggttatgctgaatctcgactgtaactttagggaaataggcttggtgacttaaatctgttccattgccaatacatggagataagattcgccagcctcgatgctccacaactacttagggaaataaatcttcaatcttcagtctactttcttgctacctcaggaagataagactacaattgccaacctactctcttgctacctcagagagataaggctagtggctaaaatctgttccattatcgatacatggagataagactcgccatcttcgatctgttccgctactgcttagggagataagatctttaatcttcagtc

SEQ ID NO: 4829 - DNA, 407 bp, Gossypium hirsutum
  Clone ID: uC-gsflnu33B109b04b1
tctgtttccggcgatgcgccccggtcggatgtggaacggctagtgttatatccatgggtacctaatggaacagattttagccactagccgtatctctctgaggaagcaagagagtaggttggcaattgtagtcttatcttcctgaggtagcaagaaagtacactgaagattgaagatttatttccctaagtagttgtggagcatcgaggctggcgaatcttatcttcatgtattggcaatggaacagatttaagtcaccaagcctatttccctaaagttacagtcgagattcagcataaccgggcaaaattggccctatttgaagtctttgctctattcttgttgcacgacaatgagcaaagaggggcaactgtaataggcccattctgcccgggcccgttagaaaa

SEQ ID NO: 4830 - DNA, 2190 bp, Gossypium hirsutum
  Clone ID: GOSHI-09MAY01-C84842_1
gtcgacccacgcgtccgagttcgagtcccaaagccacagtgaaagagaagagaacaacatatactcgataacatttttatagaggcagaaaagatacagtttttttggttggagaaggttgtgaaaaaagagtaatagattgtgttgataaaagagatcgtcgtcatcatcatcagcaccatcatgagtaattggttggggttttctctgactccagaccttaggatcgatgaaagctttggcagagaagaccatggaggtttcccttctgtcatgcctttgcgttctgatggctctctttgtgttgttgatccttttcgtcgctcttctattgctgccgatgaagattggagatatgaaaatggtattggatctgcaactgcaaatgagcagggtcccaaacttgaagatttcttgggttgttactcaaactctccatctcaggagaccaaagcttattgtggaacacacgaaaaccaaaacactgttcctagtcctactagaatcaacgtgaatgtagcaccaaattatagcagtagtggggatgcggaagctgcagagaatttcacaaatccatcgtctttcatccaaacttaccgaaattacaacgaaaaccctcaaaccctaatggctggtggtcacagcctccaacagtgtgacccaaaccctaaccacaaccaaaggagtggcgtgcaccatgttccttttgagagtgcaacttcagtttcaggattcaaatcctggttgagacaaactccatttcctggtggaaaagcttcgggtaatgaaacaaataataactttaactttcaggcactctctcttaccatgagcccaacctctcgaaatgggttccctgctatagcaccattggaggtggttgataaccgtaaacgacctgtcggaaagaacctcaccagggaatcagttcctcgcaaatctattgatacttttggtcaaagaacttctcaatatcgtggtgttacaaggcatagatggaccggaagatatgaggctcatttgtgggataatagctgtagaaaagagggacaaacaaggaaagggaggcaagtttatcttggtggttatgacaaggaagaaaaagcagcgaaggcttacgatttagctgctctcaagtattggggtccaacaactcatataaatttccctttgagtacttacgagaaggagctggaagagatgaagaacatgacccgtcaagaatttgttgctcatttgagaaggaaaagcagtggtttttcaagaggagcttcagtgtacagaggagtgacaaggcaccatcagcatggaaggtggcaagctagaataggaagggttgcgggaaacaaggacttgtaccttggaacatttagcacacaagaagaagcggctgaagcttatgatattgctgcaattaagtttaggggaacaagtgcggtgaccaattttgacataagtaggtatgatgtaaagagaatttgctcaagctctacacttattgggggcgaacttgcaaaacgctctccaaaagacactgcctccattgctcctgaggactacaattcatgtgcttcatcagcatctcctcaacctcttctagctataccaagcggtgaagcatcagatgaattggcggacatggtttggactgcaaattcagatgagcaacaacaacatcaaagtactaacacaaataatgatgcatccttggcaaactcaagtagccgcaattcctctaacccgcaaagcccgaaaggctccattggtttagctagtgataagtttggcattggcggagattactctcaccacggctacttctcattaaagggttcaaaatacgaagatggcaacagtgagactgataattccaatgaaaatcggctaggcaatttgggtttagttcataagatcccaatgtttgcactttggaacgagtgagatagtgaatttcacaagaatttgagacacttatcagcgatagagaagtttagttttagtttcttcactaaagaaaactggttagaaagagggtaggatatgtaacacaggatatcatggaattcaatggtctttaattagtgctttaattccgaatgaaattaactaactgttctctaccttatcaaaatgtctaatacaaagatgaggcaattggtttgttaaaaaaaaaaaaaaaagggcggccgc

SEQ ID NO: 4831 - DNA, 746 bp, Gossypium hirsutum
  Clone ID: GOSHI-09MAY01-C84752_1
ttgcttaagctctacgttttttgcactctcgttgttcgccgagtgtactcgtcggagacatgtcgccggagagaattataatcgatgcaaaagatgaacctcggttacagttcatctttcctttcgttgacaacaagcacttccttccttcctcctatgttgcaccagaagctagagagaacaaaataatgaatgataagagtgacatatatggaatgggtctgattttaatagaattattaacgggaaaaactccggccgatgctgattgtaaagtgcattattcaagcatggcggagtgggctcgttattgctactcagattgtcatcttgatatgtgggttgatcctgttattaaaagccaagcatccatcaacaaccagaaccagatcgttgccgccatgaatttagctctccattgtacggccggcgaccccactgctcggccgtgcgcggctgatgtattcgaaaccttaaaatctgctttcagaacaagttcttgcctcccaagcttaaattttagttcgcctgtttagggtttaatttctaataatatagcatgattttgttcagaaattttattttatttttgttctacgcacctggtttctactgtttttcttttgtcactcaaatgttttatttgatggtatgaatatacttttactactgagtgtaaaaaaaatgtagattaactaaataaatgccattatatgatggtgtaaatcttttaaagatcttggttt

SEQ ID NO: 4832 - DNA, 874 bp, Gossypium hirsutum
  Clone ID: GOSHI-09MAY01-C84612_1
gcatagacgtcgacaagcaaggaaatggatgaggagggcagctgatcgcggtcatagcaaagctgaattaagaacatggacttgctgtattctctgaaggggaaatgatgaaagctgtaatgtaccttgaacttgccacacgttctggtgaaacagctgcaactcatgtcaaaaatgtcatccttcagcaactctcatcaacttctcgagaacgggcgctccttcttgccgacaatcggcgtgctgcgccttcatctcgctaagtatatcaagaatacttactttagcctatactcctgtaattgcctcattccctcatgattgtctttatgctagatgacagctctaagtatatagatgccctaactgttttccttttgcttccagcgtctttaatcctgtctcaacatcctatatgatttatctgattgctttttcgccgcgaggaagtgaaattcctctagacctactacttttaggaaggtgcagctacgttaggtcacagcctatgttacttaaaactcaggtgtgattgttagatatcaaatacagatgtgatcagctttttctaaggtttttatcttaggaatggttatatccgcacacttgtgatagacataattgtagaacccgagttcttaagaaaaaaaagtcaagtcggtacaatataggtcccaaccattaagttattgcctcacccgtatcttatagttcatcaggttatctgtttcaactgtttgtatttctttatgttttgctgttctgtttttccttaatgggggtagagactgaagataaaagaaattggcttctgacgtttcaagtgcttggttgtatatttgaatgagcaatgggaaaacgtgttacgagtttt

SEQ ID NO: 4833 - DNA, 864 bp, Gossypium hirsutum
  Clone ID: GOSHI-09MAY01-C84312_1
cccacgcgtccgatttacgaagattacaactaaaaccctcatcaagcagagaccccaaaccaaaacaagagacagagatgggaaaagcagagaaagaacagctgaatcgggctctcactgcccacctcaatactatccatgaaactttgcaggtgttggatcaaagtcccccttctaattctatggagaaagttacctggtctcaggttatccagattggtgaacaagtttccaagcaagctactattgctggaatgctttggaatggggaatcacctcaagctaaagaagttgcggagaacgtgaattcatatttcaatgtgttgcagggcttccttttgctttcccatggaagtactgttggtgctggcccaactctctcctcaagtatccatgaatccgtgaagcacgttgttgattgcagttttaggttaatgaaggaagatgtctcgttatatggatctcacaataaggagaaaaaactatcgatgcctcagattgttggagcagtatgggaggcatgttctgctcttaagaaggtccctcccacaaatgtaacagcgatcgggcgagcaatgacgcaagtagcagtttccatgaaggatgtacttcgtgagataaatgagctcaagcctgcttcctccaaccctggggatgaaacctgtgataacactcctagcaaaacagaaagcaagcctgaaaatgatgacatgagtgatgatgatctaggcagcgacttgtcacctgaagaaatgaaagtagctcaactagctcatggggttgtgtctgagacacttgtggttataaaggaaactatccgcacaatcaccggtatgcttaaacttgaaaccccaatgacaatgt

SEQ ID NO: 4834 - DNA, 643 bp, Gossypium hirsutum
  unsure (1)..(643): unsure at all n locations
  Clone ID: LIB3543-060-Q6-K6-D9
accccaacaagtcgtggatccttttgttgtgggggggggggggaatttcaagcttcctttcttgttttcgttacaggcttcagaaagttgggattttgatggtaatgtgggtgttgtgttgacggctatcctattattcagctttcgttcccatggatttctcttttgagggagttgcacttgatccatcaaaatgtagtaaattgagtatggatgaaaagagagaactagtctatgaattatcaaagaggacaagtagggcctccgaaatgctacaatcatggagccgtcaagagattttacaaatcctatgtgctgagatggggaaagaaaggaaatatactggcttgactaagctgaaaattatagaaaaccttttgaaaattgtagccgaaaagaattcaggggatcatgagagtgtaatggatcctgaaatgcaatcctccccaacaattggtcagagaacagccaaaaggcagaggaaagctgatcatccttgtcgactgcctgttcctgtcaatgattttgcaaccaacaatggtggcgatgacatgaccaatgctatttattgtaaaaactcggcttgcaaggccagcttgagacaagaagatacattntgcaagaagtgttcctgctgcatttg

SEQ ID NO: 4835 - DNA, 501 bp, Gossypium hirsutum
  unsure (1)..(501): unsure at all n locations
  Clone ID: LIB3585-036-P1-K1-H9
ggatccttttgctgtgggggggggggggaatttcaagcttacttccttgtgcgttggggagaaaaaaaaattagttggcgtaccaggcttcanaaagttgggattttgatggtaatgtgggtgttgtgttgacggctatcctattattcagctttcgttcccatggatttctcttttgagggagttgcacttgatccatcaaaatgtagtaaattgagtatggatgaaaagagagaactagtctatgaattatcaaagaggacaagtagggcctccgaaatgctacaatcatggagccgtcaagagattttacaaatcctatgtgctgagatggggaaagaaaggaaatatactggcttgactaagctgaaaattatagaaaaccttttgaaaattgtagcccaaaagaattcaggggatcatgagagtgtaatggatcctgaaatgcaatccttcccaacaattggtcagagaacaaccaaaaggcagaggaaagctgat

SEQ ID NO: 4836 - DNA, 739 bp, Gossypium hirsutum
  Clone ID: GOSHI-09MAY01-C84272_1
cctgaattaatggtattttatactggacttatatcttgcctctaattcggaaccatttgcttcaactatccttcgcgtttcatccgattcaaactctctacactcccaaccgtagcagaagaagttttgatatataagccatctttttgaagggtttgatattgctctgaagagatgcttgtgtctgctctacttacatcagtgggaataaattctggactttgtgtattattcttcacattgtattcaatattgaggaaacaacctactaattatggagtttatataccacgcttgattgctgaggggagctctaagcggagaagtcatttcaacttagaaaggctaataccatctcccggctgggtcaaaagggcatggaagctatctgaagaggacctcttgtcaacctccggcttagatgctgtggtctttatgcgtgttataacatttagtttgagagtatttttgtttgctggggttattggtatatttgttcttctccctgtcaattgctccggggatcagcttcacgatattgattttgctgatttgtcaaataattctttggacgtgtttaccatttcaaatctaagcagtggctcaaaaaggttatgggctcactttacgctgtgtatcttgtcactgcatttgtttgctatctgctctattatgaatataaatgtataactggaaaaaagataaacttttttcacttaaccaaacctcagcctcatct

SEQ ID NO: 4837 - DNA, 582 bp, Gossypium hirsutum
  Clone ID: GOSHI-09MAY01-C85822_3
tgatgctattgctgccgagtttgcctttggcagtaacatgacagggttagtgaagccttgggaaggagaaaagatccacgaggaatgtgtagctaatgatctcgaacttacacttggaaattcaaaaaccagatagagcttcataaagagaatgagcatcacatcaagcaaacactatcagaaagagggcgagaatataattatccatgggacttcattaaagcttcgtcatttagatcggaagttaaaaattttcaaatcaaaatctgagatttctatgtttcggtcgggcaacaaattttcgagttagtacgatgactagaagaagcacctattccaatctccaatcccattaatctcttttcaagctcgagagaatagctctaattcctatgaatttgcctcttttaagtgcatgcacttcattcctctatttttcatattccgtcttctccaagttagcaaacagcatcaacaatggtactggctgatttgtaagattgtggctttctgattgaaaaaaatggtttttgactgtctgaattcttacatatttgcttatgaaatgaccttttccttttt

SEQ ID NO: 4838 - DNA, 1124 bp, Gossypium hirsutum
  Clone ID: GOSHI-09MAY01-C85822_1
gttgtcatggtggcttgtgtgttagctactatgtgtatgaaatgaatttgctcatacttaaagataggggataccaatggtgaggtccatattctatgcaatcagcttcttgcaagaactgtgttcatggatcccatgaaaattttcacctatgatcattggggatgagaaagtagggaaagggtctttagagaaatgtgtattttgttatttttgctccgacgtgtagagctgtttcagtgattttgtgttggtttttccatttctgcagggatgtaaaccagtggatcgtatggacataatgggaggttctgcatcagctagtccatgctcatcatatcacccaagccctggttcatcttccttcccaagtccagcctcatcccattacacggccaatgccaatggcaatgctgatgccaattccctaatcccttggctcaaaaacctttcttctggttcatcttcagcttcatccaagctcgctcaccatctcttcatcgcaggtggttccataagtgctcctgtcactccaccacttagctctccaacttccagaactcctcgaaccagaagtgattgggatgaaatgaacgctggcccaacttgcacggggaagcgcttttcttacctgcctgcatccacaccaccaagtccaagccgtcaggtttttcctgatccaggttggctttccagacttgaaataccccaaagtgggccaacatctcctacgtttagccttgtctcccgaaacccgtttggatttaaagacgaggccttataggaggaggttcacgaatgtggactccagggcagagtggcacatgctcacccgcctttcctgaagcgttgatcaaacatcagatgttcccatgtctgatgctatgctgtcgagtttgcccttggcagtaacatgacagggttagtgaagccttggaaggagaaagatccacgaggaatgtgtagctcatgatctcgaactacactgggaaatcaaaacccagatgagctcataagagcatgagctacatcagtacacttccgaagagcgagacttatatcaggactcataaagctgcatagatgaagtaaacttcaacaaactggattatgtcgtcgcacaa

SEQ ID NO: 4839 - DNA, 583 bp, Gossypium hirsutum
  Clone ID: LIB3829-029-Q6-K6-A11
aaaacctggaaaaataatattaaaaggccgccaaatccttttgttttgtttttgtttttttttcttttttcatctcttcgtttgtttctcgagaaattacactcccggattccgtgaagttaatcgagttgccggcgttgctttgaggaaggtatcgaagcatgacgtcagggacgagaatgccgacgtggaaggagagggagaacaacaagcggagagaaaggaggaggagggcgatcgcggcgaagatcttcgcgggtttgcgaatgtacggaaactacaagctaccgaagcactgcgacaacaacgaggtcttgaaagcactctgtaacgaagccggttggaccgtcgaagaagacggcaccacttacagaaagggatgtaaaccagtggatcgtatggacataatgggaggttctgcatcagctagtccatgctcatcatatcacccaagccctggttcatcttccttcccaagtccagcctcatcccattacacggccaatgccaatggcaatgctgatgccaattccctaatcccttggctcaaaaacctttcttctggttcatcttcagcttcatc

SEQ ID NO: 4840 - DNA, 525 bp, Gossypium hirsutum
  unsure (1)..(525): unsure at all n locations
  Clone ID: uC-gsronu33B168g08b1
ttgtgaaaatgaaggagaaaaaaaaggtgatcctgggattcctttttttgtgacgagatttcaaaagcgtgtagggatagggttttaattaattaagcttgtaataaaacatgttagaatagttagcgtgttagcatggtgtgcttgtgttgtgttaacatatcctatccaaggatgtaaaccagtggatcgtatggacataatgggaggttctgcatcagctagtccatgctcatcatatcacccaagccctggttcatcttccttcccaagtccagcctcatcccattacacggccaatgccaatggcaatgctgatgccaattccctaatcccttggctcaaaaacctttcttctggttcatcttcagcttcatccaagctcgctcaccatctcttcatcgcaggtggttccataagtgctcctgtcactccaccacttagctctccaactttcagaactcctcgaaccagaagtgattgggatgaatgaatgctggcccaacttgcacggngaagcgcttt

SEQ ID NO: 4841 - DNA, 1147 bp, Gossypium hirsutum
  Clone ID: GOSHI-09MAY01-C85452_1
cgcaacagggagttggttgaaaatctgagcaagccaagtagtaattcaaaagaattgaactttccatccaagtattcccagtcattttttgaacagtttttaacttgtctttggaagcaaaatctatcttattggcgaaacccccaatacacagcagttaaattcttctacaccgttgtcatttcgttgatgcttggaacaatatgctggaaattcggttcacaaagggagagccagcaagatttgttcaatgcaatggggtcgatgtatgcggcagtcctcttcattggtattacaaatgcaactgctgttcaacctgttgtgtccattgagagattcgtttcatacagagaaagagccgcgggaatgtattcaggcctagcctttgcatttgcccaggttgctatcgagttcccttatgtatttgcacagtcggtaatttattgttcgatattctactctatggcctcatttgagtggactgctttgaaattcatttggtacatattctttatgtactcaactctgttatacttcaccttctatggaatgatgactactgctgtcacaccaaatcacaatgtggctgctatcatcgcggctccgttttatatgctttggaacctttttagcggctttatgattccccacaagagaattcccatttggtggagatggtattactgggcaaatcccatagcgtggagtttgtacggcctcgtggtttcacaatacgctgatgatgaaagggcggggaaattatcagatggagtgcactcaatgcctacaagacagttactggaacaagtgttcgggtatcgccatgatttcttggtaatagctgctttaatggtagcctttttcgtcatcttcttcggagtgattttcgcttttgcaataaaagccttcaacttccagaggagataacaatctgtgtgcccaacaatgaacttgtcctaactcctaactacgcaaatggagaatgcaataaaatctgtagatactgaaaatatataatttatatatttttttattgttttgaacgataataataatagctatagtcttggatttatactattactggatgtattgataccagataaatctatatgctttattagtgaagtgaataaaaatgaatatt

SEQ ID NO: 4842 - DNA, 538 bp, Gossypium hirsutum
  unsure (1)..(538): unsure at all n locations
  Clone ID: LIB3582-055-P1-K1-A8
gaaagaaaaaaaaaagggagtgtgaggacagagcgatttccggtgggactccggccaaggtccggccaccggagcctcgctggcgccggcgccggccactgtacacggtggccgtagaggtaagatttttctctttttttcgttttttgtgtttttgttataattttgtacttgttttaatatgtatgtgtgangaaaaagaaacaaaattgaaattaaaatcaccctggattttgtatttcggctctctgattcgtgatgtttgaatctgactttgcactatttgtttgcttttgatgttattcttgtattatttcaataaaaatccaacaaccacaaagctttttaatcggcctttttgtagccattttggttacactatctatatctatcttctgctgtgtgtcttgtttgtgcaggtggagcagtccggtgacagagggtaagtagggagagttggtggccatggcatgggtgttgcggcgctgaggtgactttgtcgatgggggtaggtggggtaggttcggcgcaaggggaa

SEQ ID NO: 4843 - DNA, 318 bp, Gossypium hirsutum
  Clone ID: uC-gsronu33B058e02b1
tataaaaaaaaagagagtgtgaggacagagcgatttccggtgggactccggccaagggtccgtgccaccggagcctcgctggcgccggcgccggccactgtacacggtggccgtagaggtggagcagtccggtgacagagggtaagtagggagagttggtggccatggcatgggtgttgcggcgctgaggtgactccgttgatgggggtaggtgggtaggttcggcgcatgtgggaaggttagggtttcagtttctgaaaccctaagtctatagttgggcttctgagtttgggttgagtatatgggtataggttactt

SEQ ID NO: 4844 - DNA, 605 bp, Gossypium hirsutum
  Clone ID: GOSHI-09MAY01-C85172_1
gatgatatcgcgttactcgcagaacgggcagctttcgagtgcgttagatatgtttttaacgatggagagagagagtagagttaaaccgaatcgagtgaccattgctagtgtgcttcctgcttgtgcaaatcttggagcattggagattggagaaaggattgaagcttatgcaagagacaatggtttgcttgacgatttgtatgctagcaatactatcctccaaatgcatgcgaggtgcggttaaatcgaactggcgaaaagggtgtttgatgagatcgggaagaggacaaattcgtgctcttggaattcaatgatcatggctttagcccttcatggaaaatcgatcgaagctctcgagcattacgaacaaatgctgcatgaaggaactgcaccggacaatgtcacattcgtgggagttctcttagcatgcacgcatggaggattggttacaaaaggacgagaacttttcgaatcaatggccaaaaactacaacatcaatcctaaatggagcattatggatgcatggtagacctcctaggtcgagctggagcattgcaagaagcttacgatcttataaaaaccatgcctatgaagcccgatgctgt

SEQ ID NO: 4845 - DNA, 647 bp, Gossypium hirsutum
  Clone ID: GOSHI-09MAY01-C86912_1
tcaagtgtgttccctttcttactcgaccaaacaaagaaacccacaccataaaccaagacaaaacaaggcaatgatgcaatttagattggcaacagcatcatcaagatcgtatttggcagtgtttacagcccaaaaacaggttcagttccgaagatttgcctctggagcagccattaaaggaagaacagctgaccctactattcactctggagaacttgaagctggacctgatgttcacaggggtgaacctcagggtatagaaaatcatccagatgaccatggagagaaagaactcaaaccctgttccgaaacggatccggtaaaacaacccaagctgccgtataaatcttctccgaggctgaagatttcgccagtgaatcatcctttggaacccaacgttcaacaaaggcgtacggctactagcggtgcagcactggacgacgtaagctgcgtggggatggacggtacgcctttgccggagagcaaagaggaggaaaggggaaagagagaggaaacgatggatgacaaggagtattttaagcatcacaaggcttccccgttgtcggaggtagaggtggcggatactcggaagccgatcactagagcgactgacgggacagcatcggaaacggaacatagtaagggag

SEQ ID NO: 4846 - DNA, 701 bp, Gossypium hirsutum
  Clone ID: GOSHI-09MAY01-C86862_1
tttttttttttttttttttttttttttttcctaaacggggtatccgtcaaatcttgccattttgaacgatgatattgttctcaggtacaggttacagtctggagcaggctttgacaattggtaaggcactaaagggtttcttacaaactctgttacatatgcaagcgtctaggaggggtaggaacggtagggtgattgggtattgtgtcgtttggtcccagatcatctatggggggccgctgcttatgatgatttgttgcagactggtaagccattgctaaggctaatgcgatgtgatcatggttaggaggagcgtatatgcccgtgttgactgtggttcgtctccgagtaccagttggaggtggattaggtatgtttttgaagccagtcggaacaacaattactggcaaacctacgagatttccgatgcatactcgctcccaatccgttgcatttccaatgaatgcatcaacattgaagttttctttcacttcttggattaactttccacgagctctttgtgcctgcaaataatctacagctgaaactacacgtgcaagacgtaactcaacaggccattgatcttgagcttcataatcatcatccttcccagatcgttgccattcatcaaaatgtgctaacatgtcaacatccatcgtgaaatttaggatgccttgaacagaatcgacagtgtaattcag

SEQ ID NO: 4847 - DNA, 579 bp, Gossypium hirsutum
  Clone ID: LIB3827-001-Q1-N6-A9
tcgcgatctagttgacatgttagcacattttgatgaatggcaacgatctgggaaggatgatgattatgaagctcaagatcaatggcctgttgagttacgtcgtgcacgtgtggtttcagctgtagattatttgcaggtctgttttttactctctaattattggttgatattatagtttggatgaaatcatacaacttttgaaaacattttctaatgagctattagaagacacgtacttcttttactttcaatttttgagtaggaaaaccggaaacagtcttcaaagatatggagatttatgatgtgggacatcagcaggaatgcatggaaatcggggatttaggtctaaaagtagcccgtctgatcatttagcactggagtggatagcgcttaatccgaaatctagagagaaaagatagaatcatttttcattttttctcgtgatgttttttcccctctattttcactatttttataaagttccacaggcacaaagagctcgtggaaagttaatccaagaagtgaaagaaaacttcattgttgatgcattcattggaaatgcaacggattgggagcgag

SEQ ID NO: 4848 - DNA, 564 bp, Gossypium hirsutum
  Clone ID: GOSHI-09MAY01-C86532_1
aaacctccctatggctaaaggggattgggaacagagaaaggatccgggaagatatagaaggttctgctgataatggaaatgctgaaattggtgacgaccgacagcaattacgaccatctagttcaaaagtgcctgtaattgaaagctttgaatttgtatcacccaatttagataccgagacactcgtcacacatcaaaagcgtgacaaacaaagagcaaacaaggcacaacctctgaaggttgtttcatcagaaaagtcatcacttcaaccaagtaccagtgcaaagaatatgaatgtgaaccaagagagaaaaactgtagctgtaaaaatatctgaggaaggcgcaaagtcaaccaagcgacccttgctcccagtactgggtaccgagaaacgtaggagactacactggacagctgaagaggaagatatgttgaaggagttggtccataagttctcatcgcaggtaaacaaaaacatcccctggaggaaaattttggagcatggtcgtcctgttttccactcaacccgtattccagtcgaccttaaagacaaatggaagaata

SEQ ID NO: 4849 - DNA, 531 bp, Gossypium hirsutum
  Clone ID: LIB3583-004-P1-K1-B8
cccacgcgtccgaaacattcacatacagttgtagggttaaaggtcgagttgtgcaggttgctggaagagaaaaaatcagctgttctcaggttaaaaatcagctgattcgaatcagtatttgggattatatttttaattcacacttatcttttctttttttatagtaattgatttttttatagatttttaatttttttaaatagaatttaagagagacatctgaagtaatttgggggagtcttcgttttacagattaatgtatgaaaaagagaatatagtttaagtgaaagtaaaatagtaaattaatcacctactttttttttctgactcgcatatatatacatatatatatgttatatggcaggtgaggaaagaaaaattaggagacagaattacagcacttcaccagcttgtttcaccatttgggaaggttcatggagactatgcgagttttgggtgatgagatctgctattgtgctaaagactttgtgtaggcgtcttatcttaagtggtgaggtctgatttcatttt

SEQ ID NO: 4850 - DNA, 514 bp, Gossypium hirsutum
  Clone ID: uC-gsflnu33B101d08b1
cccacgcgtccgcccacgcgtccggttacaaccagtttctggattattatcggctttactagtaaaacaggttacagaggtttcacaaacaggttacagaggttacagaggttacaaccattgctgtacctttgagattattgggttttgagggacgataatggggaagttagaaggaagatatcagcagtgtcaaccagagctcacaccagaaaatctcatcaaagttcttcttttaagctttctccaggtgaggaaagaaaaattaggagacagaattacagcacttcaccagcttgtttcaccatttgggaaggttcatggagactatgcgagttttgggtgatgagatctgctatcgtgctaaagactatcttagtatccacaagttatttgctactcgtgctgatctttagcgaactgtgtacacccactctaaagtgaagttgtgtaggcttcttatatgaaatggtgaggtctgatttcatttttattcaggatccttgtgagtact

SEQ ID NO: 4851 - DNA, 938 bp, Gossypium hirsutum
  Clone ID: GOSHI-09MAY01-C86792_2
cttttccttactccccccagttccctgttggaacaatgtcaacatcaatgacgggtggtggctttggagaaagaaaacagcgaggaagccagcacaagcaagctcgagaaagggtgcatgagaggaaaggtggtccagaaaacgctctctgcacttacaaaggtgtgaggcagagaacttggggtaaatgggttgctgaaattcgtgaaccgaatcgtggtgctcgtctttggcttggaactttcgacacttctcatgaagcagcaatggcttacgatgctgccgcacgtaaactctatggctcggatgccaagctcaatttgcctgaattatgtgccaacaaccctcagtctcaaccttcttcagcagctaatcctcagatggctccgatggtgaattaccaaccccaaaacgtgagcaattcaggtatgagtatgatcagttcatcatcaaataacccaactattagggtcaatgacatgacaccaataccagtgtacaacaatgactcctcagtaatgccttctttccccaacgagagcattgatcttcaagggaacatggatgcaaagtttggacagattactgaagatggaattgaggggttctgggaaaatatgaacgccaacttgcctcttttagacgactccatttgggctgaaactgctatgtctttggaatttccaatgatgggtgatccaggcagtttcgctagcaaccttatggaagcaactggttgggacgctttgcaatccccatggtgcatgtaaattttaaagctaaactaagctaagcttaactagatgctgttaagataaatggaacgtcaaagtcataagaatactgtgcataaatgtgtatattatatagaatatatgagtttcctactgtctacactctatatccatgaaaactacatagggtgttttctgtggttt

SEQ ID NO: 4852 - DNA, 615 bp, Gossypium hirsutum
  Clone ID: LIB3826-001-Q1-K6-H5
ccttacttccccccaggttccctgttggaacaatgtcaacatcaatgacgggtggtggctttggagaaagaaaacagcgaggaagccagcacaagcaagctcgagaaagggtgcatgagaggaaaggtggtccagaaaacgctctctgcacttacaaaggtgtgaggcagagaacttggggtaaatgggttgctgaaattcgtgaaccgaatcgtggtgctcgtctttggcttggaactttcgacacttctcatgaagcagcaatggcttacgatgctgccgcacgcaaactctatggctcggatgccaagctcaatttgcctgaattatgtgccaacaaccctcagtctcaaccttcttcagcagctaatcctcagatggctccgatggtgaattaccaaccccaaaacgtgagcaattcagtaacgccttctttccccatcgagaacattgatcttcaagggaacgtggacgcaaagtttggacagattacagaagatggaattgaggggttctgggaaaattgaacgccaacttgcctcttttagacgactccatttgggctgaaactgctatgtcttttggaatttccaatgatggggtgatccaagccag

SEQ ID NO: 4853 - DNA, 1303 bp, Gossypium hirsutum
  Clone ID: GOSHI-09MAY01-C86762_1
ggtgattgaaggatgaatagtggcggtggtggaggtggtgggggggctgagagtgccggtgtggggatggtagcaatgaggtcgtcatcatcatcatcatcaccatttacagtgtcacagtggcaggagctggaacatcaagctttgatctttaagtatatgatggcaggtttgccagtgccacctgatcttgtgctccctattcagaagagctttgagtccatatctcataggttctttcaccaccctaccatggggtattgttccttttatgggaagaaggtggatccggagccaggacgatgtaggaggaccgatggcaagaaatggcggtgttccaaagatgcgtatccggactcaaagtattgcgagcgccatatgcaccgtggccgtaaccgttcaagaaagcctgtggaatcacaaactatggcacagtcattatctactgtgacatcattgactgtttctggtagtactaccagtggtggtgggactgggacggcaagcttccagagccttccattacatgcctttggtggtacgcaagtcactgctttggcaaccggtcagtctaattatcatgtggagtcaatcccctatggaatcccgaggaaagattataggtctcaaggaataaaacccgacgcgggtgggcatagtttcatctctgaggctttgggaagcaaccgggacacatggcctctaatgcaatctagagtctcttcatttcctcagtcaaaatccgatggcaacccggtcttactgaatgattaccctcagcattcgtttttcagcgatttcaactcgggagaaactgtgaagcccgagggtcaatctcttcggccgttctttgacgagtggcctaaaaccagggacacctggtcagctcttgaagatgacagatccaaccagacctcattttctacaacacagctatcgatatccattccgatggcatcatctgacttctccacaactggttctcattctccacacggtgagtttcaaactccatagttgatcctccgaaacccacatttgaattacgctgcagatggttgaatgaacagatatttgggatttcctggaaccccgatcggagaaaaggcctggaagtgttctagctactgactagtattgtactctttgatgattttgcttcagcatgaatgtgtgtagtgtcagtacactgtaaggtttagggttttggtataaaataaaacaaaccctagcaagtaactggaaaaaaaaatcagacattgcagttttaatggaatgaatgaaagagcatcatttttctgct

SEQ ID NO: 4854 - DNA, 828 bp, Gossypium hirsutum
  Clone ID: GOSHI-09MAY01-C86642_1
gagaacttcagcgagaattggagcaggccgaatctggactaaggtcttcaaggcgtgacttcccttcatgtcatagtagtaggccacgggaaaggtaccgagaaagggaaaatgggagatcaagtaatgaaggaggcacacgaactagtagcagtttgcaatctgaaactgcatcaatggctgcgatgccaatggttctgtctggatcacggtcgttttctgggcagccccccaccattttacagtctcgtgaccgcacagatgaatgtagcagcagttatgaagaaaatctcgatggaagcaaggactctggagatacaggtagtgttggtgatccagagttagtatcttcattcgatggagggcaacctggtggtttcgggccatcccaacgacacggatctagagggagcaagtctaggcaggtattagagaggcgagacagggatggtcgacgcgaaagcaagtgggaaaggaaacattcttgaccaaattgcctgggaaatggcgaggtttatatgagccaaagtgaccattacatggaagggttatttgttgtgcaattgtacatctccctgtaaatttaaaaaggaattgcaggaaatttacaggccagccatcgttgaatcctgaggtgattccggttcatgttgtacttctgcttctcagtgttgattatatatgaactattgttgtagcttctgcctcaatgatcaaaaataatttgtcgacaaggaaatgtagttcaacatttaatttcatagataggggcatatttatattattgtgaaatttatgctactattgtttaaaaaaaaaaaaaaaaaa

SEQ ID NO: 4855 - DNA, 738 bp, Gossypium hirsutum
  Clone ID: GOSHI-09MAY01-C86252_1
gtgatggaaacaacactgctggtggcggggggggagggtgaagcatacagggatcttcaagggtaagggaggggggaattaaaaaaaagaaagcttcagcggaccaaacaagtcccaagagacaggtttgatgagtgggaagaggcatatagacttgagcgcgagcaacaaaaaattgatgaaatgtttatgagagaagcattgctggaagccaagaaagctgctgattcttgggaggtgcctgttggggcagtactagtgcagcatgggaagataattgctcgtgggcgtaacttggtagaggaattacgggattcaactgcccatgcagaaatgatctgtatacgggaagcttcgagcatactacattcatggaggcttgcggatacaacactttatgtcacacttgaaccatgccctatgtgtgccggagcaatacttcaggcaagaattgacactcttgtgtggggagctcccaataagcttctaggagcagatggtagctgggtaagactgttccccgatgaaagaggaggaaatgggtcagaacagacagacaagccagcagctccagtccatccgttccacccaaatatgggaatcagacggggggtattggcatccaaatgtgccgacatgatgcaacattttttccagcttaggagaaagaataagggagagaatgcagagcagctctcatcatcctcatcatcttgtcttcccataacaacaagtcag

SEQ ID NO: 4856 - DNA, 648 bp, Gossypium hirsutum
  unsure (1)..(648): unsure at all n locations
  Clone ID: LIB3584-008-P1-K1-H6
caccatcttctaatatattaggaaactgggcctgcgtgaggagttatttactttgacctcacaggaagnaaaaacatgatgagnagtagnctttgagggtagccccttcaggcaaggaggttgtacagtcatctctaccgttaccggccggaagcacaagaacatctcttgttgtagaagagattggggggggtggtaaagttgataccaagggaagtggttcagtaagggtgatggaacaacctgttggtgcaagattagctgaagcatcagggtctcaaggtaaggagggggaattaaaacaaagaaagctncagcggtaccaaacatgtttttttttttttttttttttttttttttaggcatatagacnngagcgcgagcaacaaaaaatngatgaaatgtttatgagagaagcattgctggaagccaagaaagctgctgattcttgggaggtgcctgttggggcagtactagtgcagcatgggaagataattgctcgtgggcgtaacttggtagaggaattacgggattcaactgcccatgcagaaatgatctgtatacgggaagcttcgagcatactacattcatggaggcttgcggatacaacactttatgtcacacttgaaccatgccctatgtgtgctg

SEQ ID NO: 4857 - DNA, 993 bp, Gossypium hirsutum
  Clone ID: GOSHI-09MAY01-C86272_2
aatgtagctaatctgcaggcagcatgggatctcccgatgggcattttttaagatcaatattgtcaaccgttccctcactaagctaaagcatgttattgaatctgtccaaggtgctgatgaagcatttgatttaacttcacttgccacaagttcactcccagctgctgtaggttccatttcatggacaaccggtttgaatggttcccatcaacaaaacttaacaaattccaaaccttcctagcctgaagttgacaaaaacgatttgcccacatgtgatatgccaggaagtaacacacaaggtttggcggatgatcagttgctgggagggaggacattgatccaagaacaacttttccctcaccataatgggctttcaccaagcttggataatggggcaaacagattcaaaacagggagtggtgcgtggggacgagagcgctgggacacctacttctcatggatcatgccaaggtagccctgcaactgaaagtgccgctactaaggatccacttggtttcagccacgaccaatgctcccccaaattggccttccatttagaggaactgaatatatgggggggggggtcaatgcctgaagcccctgtgacagcagaacctcgagaaccatttggaggcatgttagtggaggatgctggaagttcgaaagacttaagaaacctatgtccaatagtagcagaaatcggtgccgatgaacgattaccagaatctagttggacaccgcctcaatgttccgatctgggtatcaagcacacaatgcatacattcactcagacaacaccccatgtaacagcgcggcatggaatgaagagtgtgaccattaaggctacatacagggaagatataatcagatttcggatctccttaagtagtgggatagtggaactgaaggaggaagtggccaagaggctgaaactggagggggtacttttgatatcaagtatttggatgatgataatgaatgggttttgatagc

SEQ ID NO: 4858 - DNA, 593 bp, Gossypium hirsutum
  Clone ID: uC-gsronu33B038h03b1
agaatcttatgtccaatagtagcagaaatcggtgccgatgaacgattaccagaatctagttggacaccgcctcaatgttccgatctgggtatcaagcacacaatgcatacattcactcagacaacaccccatgtaacagcgcggcatggaatgaagagtgtgaccattaaggctacatacagggaagatataatcagatttcggatctccttaagtagtgggatagtggaactgaaggaggaagtggccaagaggctgaaactggaggaatgtctagatgtttcaagatcatcaggcagcaatatcattcgattatcagttcacgacacgatggccaatttagggagttcctgtgagagcactggagagttgtgattatgttgggtatatatatatatttaaagtgtaattcttatagtcagtcctagaatttaggcgagtgaaactgaagattttgtttccaatagctttctcaagtgtaagaaacttagaaaaaaacttccatgaatccaatttgttatctttgctaatgaataaggacgttttatttgtattcttacaactttatttctaatgcatcaggaagtctttgt

SEQ ID NO: 4859 - DNA, 349 bp, Gossypium hirsutum
  Clone ID: GOSHI-09MAY01-C87952_1
ttataatattgggagtgatcagcttcttggggatgttgttcacgtttttggttccggaatcgaaagggaaatcactggaagaaatgtcgggcgaagttgagcaagaaaatggaaatcaaacccagggtggccaacagagtagtactgagattcgaattgcccaagcttaattaagcaaggccctgtaagtaattagtaggaaagtttgaagtgacattaggggatcttagttaattatgtccccccccagcattgcatctttggatattgcttgcactttgtttctagttttcttattttggctcccttttcaagttaatggaatgtctcttttttgagttttccatgt

SEQ ID NO: 4860 - DNA, 505 bp, Gossypium hirsutum
  Clone ID: GOSHI-09MAY01-C87572_1
ttttctttctcatttgaaaaaccctagatcccctctcatccatcgattcccatcccccaaacaatcacctgcacatcatgcctagaggacgagatttttagcctcaaggtctccccctgacttcgatttcaacaaagtagagggtgacccatggcgcatttaccaggtacgggtgctgtgctgacgtacggaggcacaggcgtggctgctagagggtatggaggctggggctgctgtccagttgtggcgcatctgctgctagggttaaggtttgccaaaatttggtttagtatttgggccgtttgggctaattctgcgtattgggctttaattggttattgggttgttttgtactaaagacttggactgtagactattgatttggtttaattatttatttatttgttgtattttatcttgggtttctagtgggcccgggcaaattggcccgtttacacatatgtatgaaagtttttaatttagaagaaattttatggctgatttt

SEQ ID NO: 4861 - DNA, 744 bp, Gossypium hirsutum
  Clone ID: GOSHI-09MAY01-C87732_1
ccgggtcgaccatgcgtccggaatgtaagcctttgcatgccttctttacagcttcctgagcctcatcttcacttgtagctataggagatttcttgaaggttgcatgaacatagctggtagaatttccaaaagataggatcaggcaagcacctgtggtgttgacttctaccgaacagacttccagtccagatttcgtcaaagctgcaagtaagacattttgatcaagtcttaataaagtttgaagaagtacccgtaactgaattctgaatgcaatttttgagaaaccaatgcttctagaggagctggacagaccaaatgagagttcaacaatgatggaagcgatttgatattcgcagcagcagtggcagccactgcagttgctcagttgctgggatgcagtgggggaaggcgctaaaacctggcacagcagaggctgagtagtatgcttctgtttgtcaccatgccaactaccaagatctttttaacaagtggggctctgctgatagtttggtggtggcctattcactatggctgaatggcacaacttattagtgcttgtaatttcataatcttggaaaaacttaaatttctttgttactagttctgatgatcacagtctgctgagaaggggattttgaaggcataaaagaaagagtatatatatgtatatgaactaaattaagcatgtatcccattaaataagtacccatatatataaatcgtaaagtatgaatttacgtaaaa

SEQ ID NO: 4862 - DNA, 876 bp, Gossypium hirsutum
  Clone ID: GOSHI-09MAY01-C87722_2
gttaaaactgaatgctcattgggaagtttgtaaatctggtgaggatgctctcagaggggtcaatttgaacactgcaggaagcatgaacagtgagcagacctcatttttaacagctgatgaggaatctagggcatctgtagatctcgaggaaacagaaaagttcccagagatctttcagacacttaaagagtcttttctgaaggctttcaaagtaatggatagggatcttagaacgcatgccagtattgattgcttctgcagtgggacgacagctgtaactttggtgaagcagggtccacatattgtcattggaaatgttggggactccagagctgttttaggtacaagggacaaagacaattcacttattgcagttcagttgactgttgatcttaaaccaaatcttccagcggaggcagagagaattcgaaaatataaaggtcgtgtctttgctcttaaagatgaacctgaggttgcccgagtttggctaccaaacagtaatgcacctggccttgccatggcaagggcttttggagatttttgcctcaaggattttggtctcatctccgtgcccgaaatatcttgttggcgcctgtcagaggaggatgaatttatcgtcttggcgacagacgggatttgggatgttctttcacaagaagtgatagatattatagaatatgccccagcttgttcgtctgctgctcgaaccttggttcaaacagcagttcgagcatggagatacaaatatctgacttcaaaagttgatgactgtgctgttgtatgcctcttccttgattctaacttaagcaatttatcttatgcttccaatacctaggaaaaagtgcagctaacttcaatggatcacattaacaatga

SEQ ID NO: 4863 - DNA, 694 bp, Gossypium hirsutum
  Clone ID: GOSHI-09MAY01-C87722_1
aagaatgatgctgttggtggcctagatcttggaatcatttctcaaaacaacctattttactgttttcaaatgctaatgccaaagtgcagccagccccaggggacccagttgaggatggggatggggaaagacaataatctcaatgtcttaaccagtgtggaccggtctgggactgttggaagtggcaaagttgttccaggagggaatggagatttagatttagatgtagatgtagatgtagactgctctaaggaggacgaaatgaattcagaaataggaacagattggtcagcccttgaaggagtatctcgtgtcaatacccttttcaatctcccaaggttcgatcctggaaagtaatgttctgatgcaggaggttcaaagccaggcttcgacatgagaaagagtggaaaagaggggcattgatttggtttggtttggtttgatgttaaaaaatggagcaagcagacccggctgtattagtgtgtctgggaaattgtcctttctatctatagtctgttgggtagaattggaatttttgtaaatccagctctccatctcattattattgttattgttaatttgtgttccaccttcaactgttcatgtgtgaattgttggttaagtcattgtattatgctgttaaatgtttactttgtgacaatgaaatgaagcctcattatccttaatagatttc

SEQ ID NO: 4864 - DNA, 497 bp, Gossypium hirsutum
  Clone ID: uC-gsronu33B090a07b1
ttttcgcgtccgctctaaggaggacgaaatgaaggcagaaatatgaacagattgggctgcccttgaaggagtatctcgtgtcaatacccttttgaatctcccaaggttcgatcctggaaagtaatgttctgatgtaggaggttcaaagccaggcttcgacatgagaaaggttcggttactactactattactttgagatttgctgagataaattattgtaatatttatattcatttttctacagagtggaaaagaggggcattgatttggtttggtttggtttgatgttaaaaaatggagcaagcagacccggctgtattagtgtgtctgggaaattgtcctttctatctatagtctgttgggtagaattggaatttttgtaaatccagctcttcccttcattaatattgttattgttaaatttgtgttccaccttcaactgttcatgtgtgaattgtttggtagtcattggattattgttttaaatgttacttttg

SEQ ID NO: 4865 - DNA, 484 bp, Gossypium hirsutum
  Clone ID: uC-gsflnu33B016f06b1
gggggagcattaaatacacagctgttttttcacttgtcaatattatggttatataccactagcggtccaaggaggggacacccattcatctttaagtaccgttatgaaaaaaattcaatgctactaaagtgctggacagggagactaatagcaactctactgttcgtatatcgggccagagctttcgctgctatgaagcttggtgactactgtaccgtagggtgtaatatggactttagacgctgatgcactggcacagattgttttctaatcctatacaggagctttaatatattctctgatgtttggaaagtgcatacagattcaatggaccaagttgagaatgggaatgagaactacaatgatatcaatgtcttaaccagtgtggactcgtctgggactgttggaagtggaaaagttgttccaggagggaatgaagatttagattaagatgtagatgtagatttagactgctcaaaggagg

SEQ ID NO: 4866 - DNA, 440 bp, Gossypium hirsutum
  Clone ID: uC-gsflnu33B016f12b1
tttggccttgccatggcaagggcttttggagatttttgcctcaaggattttggtctcatctctgtgcctgaaatatcttattggcacgtgtcagagaaggatgaatttatcgtcttggccactgatgggatttgggatgtgctttcaaacaaagaagtagtagatattgtagcatcttgtcgagctcgcacatctgccgcacgagctttggttgagacagctgttagagcttggagatacaagtacccaacttcaaaagttgatgattgtgctgttgtttgcctattctttgattcaacctcaaacaacctatctactgtttccaatgctaatgccaaagtgcagccagtttcaatggaccaagttgagaatgggaatgagacagacactaatctcattgtcttaaccagtgtggaccgttctgctactgttgcaagtgg

SEQ ID NO: 4867 - DNA, 703 bp, Gossypium hirsutum
  Clone ID: GOSHI-09MAY01-C87012_1
ggtgacctatttacctaactagctttttttttacctgtattttgttgtatagccaagtatctcagttggaaaggttgtaaattcacaagatggagctaggtcagaaactttgcagaagccagtgatgaggcatgtgttttttggaccttctattttctttatgcaaattatgatctctttatgctgttctttttttttttttttgatttatttatagcaggttgagtttgaagtcaacggcataatgtgttgtagatgaggcgtcgggagaaacatttgttgccccaaggagtaaggccagtacacctcagtaagtgtcccattatttgctggcttacattatggttttacaggtataccgagtgtgagtggacttggcagcatgttcgatccgtgcggtggagagctgcgttgtttggcttatacttttaggtttggttgtggtgttttgggttttatttttagctttggaggagagccaagaagctactaaagtgcctctggttctttgtaagactttgccatctctgttttttttatatatatatttgctacttaagtgttgtcgcatgcttcttgcctcccattcaagaatgaacaactcttcatcaagaaaattgtaaatcaaactggagtgttgccgtgtaacagttagacctttttttttcttaatcttatgtaattctatgtacacttgagatac

SEQ ID NO: 4868 - DNA, 1065 bp, Gossypium hirsutum
  Clone ID: GOSHI-09MAY01-C87212_1
attttattccacaatttttgcttgttgatttggctttttggcttgattacgccttgattttcactggactaccatccacagaccaaagtgtcgtccgccagcgccggatctgtacctttgtccatcgtcacagataagtcttccttctccccttgtatgctccgatctaccaaaaaagaagaacaagaatttttagtatggccatattgccacaataaaagcataccgtgggaagagcttcaaattccactctttggatccggctgttgatcgagacttgtgaggtaagtggcttttccagatctaccgacatcgccatcctagcaaattggcctcttgctccactatccgtcttgaggtctaatttcatcacttttccgaccaagcttcctatctcctctaaaatccttttcttatataggaagcccgacaatcctaggaatcggatccaggccataatcatgctaggaaagggtttcagcggatcaaactggatcgtccatggctgaacgggtaaatagtgtccaaacattatctaggggccttgagtcaaagctcgactctgctttggaaacggacaaggaaatatccgttctcgatgtccattagtctaaacgattgagagggtttccaaaggctacaaatacaattatgaagtaccccgtagcctatgttccgtcccaacaacttgacaacaacagtagtctacatatccctaaccaaaatattccgtaaacactccgagaagactatggcggggattccattaatagaggaccgaagaatgtcaccatcttcaattacaaggtctccatcgaaagaaccatcaccagattcagatccattccttcccaaaagcttctctttccaagaaacttctctcattggaatcgtgttacgtccattgaatcttcactcaccactttaaacctgacctttttggtgttacgttcctcagctgggataatttcggcatcagttcggtcatcggttaagaaaattgatgcttagacaaaaatttacaatttaccaactctagtttcaaaacagctattgttattgatt

SEQ ID NO: 4869 - DNA, 1021 bp, Gossypium hirsutum
  Clone ID: GOSHI-09MAY01-C80912_1
cgatattctccatcttgggttccctaatgaatcatcattttgttgcttcaacagtatcaaatgggaagcatgattgacgtgtgcggaataagaaggtagaaagatgctaaaacaggtctttgttaggggggtcaagaggagatttcatttaccaaaaccatttgaaacatggcggaatgccccaaaagagaaagcagagtgcgtcgtgatcggagccggaatcgtgggactggcagtggccagagagctttcgttgaaggggaaagaggttttggtcctggactctgctcccaccttcggaacagccgccagcagccgcaacagcgaggtcatccatgccggcatctactatccttccaattctccccaggctcgtttttgtgtgagaggaagaaaattactctatcactactgctctcagcgtgggatacctcataaccagatcggtaaactcatagttgccacaggtacttccgagattccaaagttaaatcaactgttcaatcgtgggattcaaaatggggttgaaaatcttcggatgttggacgcttctgaggctatcaaaatggagcctgaattgcactgtgtcaaagctttgctatcccctgcttctggcattctggattcccattctctgatgctgtctttagtgggggaggctgaaactaatggcgctaccttctcttacaacactgctgtcattggaggtcatcttgaaggaaatcaaatggtcctccacgtttgtgaaaccaaaacacttacaaactgggatggaaacactccattgcaaccggacctcctacttatgcctataattgtagtcaattcttcaggcttgagtgctctcactctggctaagagattccatggtctaaacacagctatcatccctcctgcatattatgctcgtggctcctactttatcctttcaaatgcaaattctactagacatcctcctttcaagcacttgatatatcctgtaccagaggaaggtggtctttaagtgcatgttactctggac

SEQ ID NO: 4870 - DNA, 605 bp, Gossypium hirsutum
  Clone ID: GOSHI-09MAY01-C80882_1
cccagcgtccggttgttttccccccctttcgacagcttcaaattccatcacccttttttttttttttctctttttaacataaattgcccgggcttttctttaatcccaaacaaatagagagattatacagtaaagggtttttgtttttgtaattagagatgtcagctttttcttcaatgcattctccttcatattcacattcattcatttgttcttcatcaataaatgaaaagaaaaaccaacgggttgttttctcttcttttccgagattttctgttccggctaatgctaaggtgtttcttcaatgccaagcaaattcgcatcaaaatgctgtcctcatgcaagatggtgcagtggcgacaaaagtgtcaccggtggaaaaggaaactcctattgagaaattgaaaagtgagttgttgtcagttacttcttcaaatgaatgggatgaaaaggccggttttgatatcaatgaaaacgagtcaaccgtcagtatcacggtggtcggagcttctgggggatcttgcgaaaaagaagatattacccgcactttttgcactttattacgaaagctgtcttcctaagtttaggtttttcatctcataagt

SEQ ID NO: 4871 - DNA, 638 bp, Gossypium hirsutum
  Clone ID: GOSHI-09MAY01-C80782_1
caaaaatctgaaaaatcagttcccacacctccatattttagtaacactaatcatacaaaagcagggggcaaagtataattatagaaaatcaacccataattaaatcagtaatgcataacataccaatcatactgaaccacagcatcaccagtagcaggatcaaaacgatgcgttctagcttcgacataccctctagcaaacctaaatagtccactaccgccgatcaccggcatttccctcacctttgaaaacaccgtgttcctccccaatatcgttatcgtactcccattatatttcccttccataaaagcaaaattcatcgccatcaacaatcctatttcttgttgtgacgccgccgagtaaaacccttgtgctcttcccaccattttcgaacttaattcacgtcccatcgttaaaggatcgtctattacactgatcataccgaacgccgtcgttgaattccttgatgggaaaaccaccggaaccgccgtcgcgtttttcccgccaacaatgtcgtgccagtatagcctaaagtggctgagcttttccttcttcatccccaacaccttcttgtccatggatctcgcgaagctactgccgtttccagctaaagctgaaacgatgaaaatggtgaaaaa

SEQ ID NO: 4872 - DNA, 577 bp, Gossypium hirsutum
  Clone ID: GOSHI-09MAY01-C80712_1
cccacgcgcccctgataatttcgaaagaggttttcgattacgctgatcgaaggtaaaattagtgtgatttgaaaatttttaaattttttatgtgcttttttttttttcgttttttgtttgatctgttgtttggttggtgagaaaaggaaattaaagtggtggaaaacgaatttgaatttattaggtttacatgtatgaggagtaaaaacttcttttcatccattttctcggtaagcaaacgggaatttgatcttaaagatccttaagcttacaagtcaaaagtttcatctgttttcctttttttttttttgcttgatctgttgttggttggtgaaaaagtgaaggaaaagttgcggaaaatgaatttgaatttattaattgatgtaacattaaaatataaattttgatgttacgtttacattgtatgaagtagtaataagcttctttttcatccctttttctcgattaaataaacgggaatttgatcttaaaggtctttaagcttatatgattatgtatttgtaaagtctaaatttcatctggttttctttttgggtttgatctggtggttgggttg

SEQ ID NO: 4873 - DNA, 747 bp, Gossypium hirsutum
  Clone ID: GOSHI-09MAY01-C80662_1
cggacgcgtgggcaatgcctcacctccacgctatcttccccttaccatctaattctaaaccctttcaacattctaatattttctcgtcttcttcatcatctttttcttcttccgcgccaattcgacgtcgtttgccaaggactttctctccctcaaaacatcctaatctcaaacgtctcacctctcgcatcgtccaactcactcgccgcaggcagctgcatcagatattggaggaaacagagaatgcgaagagagaatacgggaaattgaacactatcgtgatgaacgcggtgatggaggcttgcgtccattgtggagatgttgatttggctctcaacatttttcaccaaatgactcaaccccacagttgcggcgttgatactgttacctatgctacactactgaaggggttaggtcgggctcgaagaattgatgacgcattccaattactcgagtcagtggaaaagggcactgctgcaggcaagccaaaattgtcaacacagcttatctacgctcttttgcatgctttaattgaagcaggagaccttcgccgtgctaatggtcttcttgcacgatttggctttcttcttcgtgaaggagggagttcttcaatattgacttacaatttgctaatgaagggatacataaacacagggtgtccacaggcagctataaacctgcatgaagaaatacaactacttgggctggagcctgataggctgacatacaatactctcatctttgcat

SEQ ID NO: 4874 - DNA, 826 bp, Gossypium hirsutum
  Clone ID: GOSHI-09MAY01-C80142_1
caaaatactatactctaaatcaaaggaaaacaaattgcagcggttgtgattctcaggttggataactttctcagtctccaatcctaatttttgaaattgcaacaatgatctctcgtacacgcaatttaatctcgaagctccccctccgctgcaattcatcttctttcttcatctctccgcctcctttcaaccctaagttcatcacttccacaactttcggttccatccaatcccatccctctccctctctctcaaccctaaaccaaatcgcttctcacttctactctgttagatcactctcatcgtgttcttgttccaaacccaaagcgctgcttaacttcaattgttcctcaattgaacgaacccaaagtgtactacttggtcccagatatctttcaacaatttcttcttcttctagccctggcccaaaatccgacgatgagaaatcacacaccagtagcagtgaatcccatccgagtcaaaaccctgatttcaagcaccaagaaatcgagggaccaactgtggaacgtgatttatcatcattggcaaatgagacaagagaggctcttgaagcaatgatgaagaacatatatggacttagtaaagcagtggctgttctgggtctggtccaccttggtcttggagcttggatatcctatgcttatggttctggagcacacccattaggtgaggtgtccgttcaaagtatcatggcatttgggttcccttttacgctggcgtttatgctacggcaatcagtgaagccaatgtacttcttcaagatctgaagaacgaagtaggctcaattcttactcttactctacag

SEQ ID NO: 4875 - DNA, 759 bp, Gossypium hirsutum
  Clone ID: GOSHI-09MAY01-C80172_1
acatcattatcgaaccagtttcaagtcgtctcccttctaactcccattcccaccttcccttttcctttgaaaagaatgtctaaaaggtaaaacaaaacctcatcattagacgtaaaaccaaccggataaaaataacatggttgcttttcccctcgtttccaccttttttctattattttctttcactttcttccctcattctctcgccggtttcctagctcaaccggttcccggttcggttccgatgagccgttaaagcctggaggctactcatccccaaacacggtccccgcatgccctgctcaaacccaagctcaaatttgccggcttgacttgtcagccgagctattcggcggtgtcaacgacgcctgtggccacaacctggacagaggccgctgctgtcccgtcttagcagcgtggctgtttgcagctcacgcctggtatgctttggaggtcacggctcctgctccagcggaatcggagttgccggagcagcccatgaggccggacgattcgcaaaagtgtgtgaactcgttacaagacgcgttgttaagtaagcgcgtgaggattcctcaaccaaacgccagttgcgatgcgattttatgtttttgtgggataaggcttcaccagattagttccttgagttgcccggctgcgtttaacgtttccggccaccaccgaaatgcaacacccactgctgctgtgaagaatttggagaagaattgcaggaactctacttatgctgggtgtaccaaatgc

SEQ ID NO: 4876 - DNA, 744 bp, Gossypium hirsutum
  unsure (1)..(744): unsure at all n locations
  Clone ID: LIB3828-005-Q1-K6-A11
cttccctcttctctcgccggtttcctagctcaaccggttcccggttnnnnnnnnnnnnnnnnnnnnnnnnnnnnnnnnnnnnnnnnnnnnnnnnnnnnnnnnnnnnnnnnnnnnnnnnnnnnnnnnnnnnnnnnnnnnnnnnnnnnnnnnnnnnnnnnnnnnnnnnnnnnnnnnnnnnnnnnngnnnnnatnnngggggnnnnngggggggnngngnnnnnngttttccgatgagccgttaaagcctggaggctactcatccccaaacacggtccccgcattccctgctcaaacccaagctcaaatttgccggcttgacttgtcagccgagctattcggcggtgtcaacgacgcctgtggccacaacctggacagaggccgctgctgtcccgtcttagcagcgtggctgtttgcagctcacgccaggtatgctttggaggtcacggctcctgctccagcggaatcggagttgccggagcagcccatgaggccggacgattcgcaaaagtgtgtgaactcgttacaagactcgttgttaagtaagcgtgtgaggattcctcaaccaaacgccagttgcgatgcgattttatgtttttgtgggataaggcttcaccagattagttccttgagttgcccagctgcgtttaacgtttccggccaccaccgaaatgcaacacccactgctgctgtgaaaaaatttgggagaaaaattgcaggnaactctacttatgctgggtgtaccaa

SEQ ID NO: 4877 - DNA, 834 bp, Gossypium hirsutum
  Clone ID: GOSHI-09MAY01-C80112_1
attctccgggtacgaccccaccgcgtccgcggacgcccgtgggccggaccgccgtgggttcttttacccatcccctgttaattttacttctcaaaaatggcgtgagccctcaagtgtgggaatggtctgtcttttgctagtctcgtgcatggttgtgccgagcttggccaaagattacactgttggtgacacctctggttggacaactggtgtagattatagcacatggactaaagataagaccttcaaagttggcgatagccttgttttcaattacccaacaagccacacagtggatgaagtaagttcaagtgactacagtacatgcacggtgggaaacgcaatcacaacagataacagtggagcgaccaccgttgctctcaagaccgccgggacacattacttcatttgtggtgtggtgggtcactgtgcgaatggaatgaaactttcagtcaaagtggagtcaggttcatcggcagcaccatctaagtcgccgtctaagtcaccatcgtcttcttcgtcatcctcgccggcttccaccgataaaccatcgaccggcacaccatctactacaactacaacaactaaagccccggactcctcatcctcatggagtctctccccatttatggctgttgtcacaacttgtcttgcgttgttggttttggtcatttcgtaataagctttcggcaaagagtgttggccagccatggtcaggatagaggcagtgctgctgatcttatctttgtcccttttcttattccttttttatcatattgttggtggtgaggatcattgatatcttcatgaatgagatggttgggctttcatggc

SEQ ID NO: 4878 - DNA, 812 bp, Gossypium hirsutum
  Clone ID: GOSHI-09MAY01-C80042_1
cccagcgtccgaccttatctcttgaaactggggtggggactcttcaagctgggtgtctcggccatttctcctcttgttcacattgaatatgggtgaaaactgctccctctaggtggctctgccatgaacggagacggtattgtggaatggaggactgtctttgaggctaaaaactggagatcgtcggtgcccaccaccaaacctgaggcttatttggagtatttaccgtcaaaagctgcatcaaaataaattgctactctcgcatttctttcttcctgtctctatcttctactatcgtttgagcagagaaaaaaatcgacattgtttgctgttacccatggtgaagacccaaggcattgtatgaaaacatggttgctatcttcttctgcatttcgacaccgagggcaggaaatatctacagccactcttttgaatcttagatttgttaaagtaggaataaagttctaggaaatacgtcatatagtgatagcaattttttatgggagatgtaaattgcatagctttctgtaaaaaatttttgtttcggcctgtataaaataagcactaggatccataataacctcttgtaataggttgtaggcacttctgactgaaaattcgcaggaatgttctcctcgccaaacttggaaatcatcatgttcttcttctgccggaggaatttgcaaaatcttctgtgttgtatccgcttgaaagaattgtcattgattctctctgtcaactctcggtacccaccggtcgttccaaacagatacatgatctcccctaccgacttgccaacataagctatcttt

SEQ ID NO: 4879 - DNA, 1252 bp, Gossypium hirsutum
  Clone ID: GOSHI-09MAY01-C80062_1
agcagtcatttgagagaattcttttccttgtggagtatgcacattggttctatgaggacaacacagtggaaaaaaatccatcactgaagtcattgaacctaaaggagttcacctctttattgtttaacagctgcgatgttttaaggccttatgttgctcatatagatgatatttttaaggatttcactgattacaaggttcgagttcctgtaactggggcaattattttggatgaaacatatgaacggtgcatcctagtgaagggatggaaagggacaagctggagtttcccacgtgggaaaaagaacaaagacgaggaggaccatgcatgtgccattcgagaagtcttagaagaaacaggcttcgatgtttcagctctcctaaacaaagatgaatacattgaagtaatatttggccagcagagagtgcggctctatataattgctggcgtaaaggatgatactccctttgccccacttacgaaaaaggagatcagtgaaattgcatggcaccggattgatgatcttcagcctgcaactaatgaagtaatatctcgtgggatcactggcctaaagctttatatggtggccccattcttagcatctctgaaatcatggatttcaaagcatccgtccccactacctcctagaccagttttgcctctaaaggggcctctatttggaaagcaaagaacagttccataggaagtaactcaatgattgtagagagccaatcgaataagcttcaatccgatgctaagccgcctgatactggtcctggaaagagcttcagaaactttagatttgatacggcagcagtattaagagcattggaaggtagcttttctacctgaagatcagaccaagttcttactgtgacgtcctttatgttggtataggtgggacttttggttgctagaacttgttcacctgtaaaaccaaacagcatcatcgccccaatcggttgtatattcttgtggtcatgtcggggtttgtttgacatgtaaattctgtatagaaaaagacacctttggtggcaatgtatgctgtggtcttgttcattgttatatgtaagtcaaaaactggtgattggtgaaatattaaaatactatagtcccctttgtacggctaaaaaaaaaaaaaaaaaaaaaaaaaaaaaaaaaaaaaaaaaaaaaaaaaaaaaaaaaaaaaaaaaaaaaaaaaaaaaaaaaaaaaaaaaaaaaaaaaaatcgcacaacccaacagtatgcgca

SEQ ID NO: 4880 - DNA, 342 bp, Gossypium hirsutum
  unsure (1)..(342): unsure at all n locations
  Clone ID: LIB3585-049-P1-K1-C8
ggacttttggttgctagaacttgttcacctgtaccaacataaaggacgtcacagtaagaacttggtctgatctgcaggtagaaaagctaccttccaatgctcttaatactgctgccgtatcaaatctaaagtttctgaagctctttccatgaccagtatcaggcggcttaccaccggattgatgatctttagcctgcaactaatgaagtaatatctctttggatcactgncctaaagctttatatggtggccccattcttagcatctctgaaatcatggatttcaaagcatccgtccccactacctnatatacccgatttcctttttaaaggagttctttat

SEQ ID NO: 4881 - DNA, 654 bp, Gossypium hirsutum
  Clone ID: GOSHI-09MAY01-C80372_1
cgcccacgccgtccgggaagtttcttctcatgaaaagaaactcggaaaaaccctaactttgcttctctcacgctctccatggagttttggggtgctgaagttaaaagtggacagaactttgaggttgaactagaggatgatggcaataggatcttgcatctttcacaggttgcccttggtgaggggactggtgataacaagaaagaaaaaggaaaggaaaccatttgtctctatctgaaattcaaaaatgagaagtttgtggttggaacactttcccaagagaaatgcccccagatagcattggatttggtattgcatgacaaatttgagctgtcccatacagggaagaatggcagcgtatatgtcactggctattatgttgatacatctcaaggtagtgatactgagtctgaagaggatctccttgaacctacaatgaatcttgtaaagtcagagcctccagcatctgatcctactacaacaaagcaggttaagattgttgaacctaaaaaagacgacgatagtagtgatgaggatgaagaggatagttctgctgaggatgaagagtccagtgaggagcaggaacctcgcatgctggttaatggtgagaatgatactgatgatgctgacagtgatgaggatgatagtgatgaa

SEQ ID NO: 4882 - DNA, 535 bp, Gossypium hirsutum
  unsure (1)..(535): unsure at all n locations
  Clone ID: LIB3585-054-P1-K1-H6
aaccgtaaataggaatttagtgnngntntncatggagttttggggtgctgaagttaaaagcaggacacatcctnnnggttgaactaaaggatgatggcgataggatcttgcatctttcacaggttaggggtaagcttacccgcaacttcaagcacctcaaccttgatttcnnnncnntnnggctctatatacacttcaaaaatgagaagtttgtggttggaacacttgtctacgagaaatgcccccagatagcattggatttggtattgcatgacaaatttgagctgtcccatacagggaagaatggcagcgtatatgtcactggctattatgttgatacatctcaaggtagtgatattcagtctgaagaggatctccttgaacctacaatgaatcttgtaaagtcagagcctccagcatctgatcctactacaacaaagcaggttaagattgttgaacctaaaaaagacgactattgtagtgatgaggatgaagaggatagttctgctgaggatgaagagtccagtgaggagca

SEQ ID NO: 4883 - DNA, 646 bp, Gossypium hirsutum
  Clone ID: GOSHI-09MAY01-C80252_1
tttatatttcaatcagccatctcctcctctaaatatgcttagacggtgtcggtgatctcctcctccgctcagattttttagccttcgattttttttatttccttttgttctttaaagatccgtttcactggttttcggatatatttttttgcaccgaatccgattcagatcggataaaaaatggcagcatcgagacgattacgtgatctccaatcgcagccgggtaacaagacttgcgtcgattgcaatcaaaagaatcctcaatgggcatcggtttcgtacgggatcttcatgtgtttggagtgttccggtaaacaccgtggtttaggtgttcacatctcgttcgtccgatctgttactatggattcgtggtctgagatccagatcaagaaaatggaatcgggtggcaacgaacggcttaacgcctttttggctcagtatgggatccctaaagaaacggatattgttgctaagtataatactaatgccgcgagtgtttatcgagatcggattcaagctttagctgaaggtcgtccgtggcgggatccaccggttgtgaaagagaatctcaacggagtggtagtggtggtattaggaagccgccgttgagtagtggccgtggtggtgatagggaaagtaattttgc

SEQ ID NO: 4884 - DNA, 1480 bp, Gossypium hirsutum
  Clone ID: GOSHI-09MAY01-C80222_1
cttctcttggaagcacttcctgactcaaatgatactaaatctgcaaagttagttgctcagaaatcaaaaggaatgcgtcgcatttccttttccctcacaaaaattactggtgctgctgcttcagatgctgtggctaatctttcacaggaactttttaaagcatttaaaggcttgcaatatctatttatgaacaagagcgctgtttgcagttgacaaaagtgatatcagttgaaaaggaaaagaatgaaatctttcacagccaattggagctaaattcaaagaggcaaaagttacaaaaagcgataaattcattagataaagtagatttgacaaatggccaaaatcctccaggcaaacaggcagctcagagtcctggcccaacaaaagtgactaaacgtcctgtacctacacatcgcagggcaaaagcgaggggcatcattttgcaggatagtgaaaacgaaaaggatagctagaagatctgtgcactcttgtcaagtttggcatatcatacagcaaatcttacaatttcactaacgttggcatttactatacaaaggtaaagttttcacatttatacaaaagaatgaagcttttagtattttaggatgtttgctgcattgctaggctcctcctgctgtatctcagttatgttacctttaaatattgtgctcttgaacaacttttagatacttggcctcatttcacggtcaggattgtatatattagtatatttctaaccttctattgattgtactggaagacttgcatatttgacccataaagatttctcgcatggtaagtttgtaagtagcaaaagcagtcaagaacccttttttctttcaggtgtgattttgggctacaaagcagggttaatcctcttatttttgaaaacctcacctttccatgttaacagtctctgtttatttcacagaataatttttggaaaaccttgctttgagaaagccttaattgtaaagagatgaaaggttttctttttgagtaacatagcacgagattctctttagctcagctttattaacggggatttgagatgacgaaaattgaagcacttccatttaccaattgggatcttaaatagggaagattttgggaccaactatggcgataatttcccatggttttgatttgcatttacattttttaggacagattcttgggacatgcttcaatcatgcctaattttgatcttagctgcaatcaaatgtacatgtactttacctacatgcattggggagaaaataggagataaggatattagcaatggagataaggataaagcacaaggattatgagggaaacaataagagagttaaaggtaagatagcaattctaaggctgaggcttagctttctcggccagggaggctctaactgcatcgaagagtaatggcatcaacttctgattggaaacaatgatgccagtatccagatcaagatacttccctggaaaaaccaatgct

SEQ ID NO: 4885 - DNA, 719 bp, Gossypium hirsutum
  Clone ID: GOSHI-09MAY01-C81842_1
ggaacccggcgaccacgcgtccggcaacggtactcaattcttctctcgcacggccatttgctgcccggctatctgctctgcaaatatccgactatctcgttagggattttggatctcaaccataggtcaatcatggttcttctacaatcagacccctttcttaatgaacttacgagcatgtttgagcgaagcactgagacaggctctgtttgggttactcttaaacgatcatctttaaaatcgaaggctcaaaggaacaaaatgaagactgctgaacaacccattgaatatcgatgccttgttcgtgcaactaatggaaaaaagacaatttctacttcggtgggagcaaaggatcaccagcgtttccaagcttcatatgccaccattcttaaggcccacatgactgccttgaagaaaagggagagaaaggacaggaaaaaggctgcagaggataagaaagaaggtggttcaaagaagccgaaaagggcttgaagggctttactctttccattgccttcaagctgtcatcatcacctagaaaatgcttaggttctttgttttttctttaaaaaaccaaaatgaaatttctttcaatttaagctcattacagtgattacacttggaattttgcttgaattccccttaggtgtgacttcaatggttccttcttttattttcaataggttgataaattatatgaatttacaagagattttggt

SEQ ID NO: 4886 - DNA, 572 bp, Gossypium hirsutum
  Clone ID: AI728175.1
caacggtgctgtcgccgtctttcactctcttacggtgttgaaacccgtttggattcaacgatcttatcgcatgacggacctggtttcttgtttggttactgagaaaattttcgttgccttttaagagcgttattattctttcgcttacgtttgatgtaaaaggaacgccaaagtgatctgtctccctctctctagagagttcggatctagaaacgaaccgtatggcaccattgccggccgatcaaccctgcgaatctcatgccagcggtgctgtggctgactcgcaacggtctttacctactccgttcctttctaaaacctatcagctcgtcgataattcatccgtcgatgatttgatttcatggaacgacgatggatcaactttcatagtttggcgcccagctgagtttgctcgtgatttgctccctaagtacttcaaacataacaatttctctagcttcgttcgtcaactcaatacatatggatttaggaaggtagtgcctgataaatgggagttcgctaacgattgtttcaaaagaggtgaaaaaggacttctccgagacatacagcgc

SEQ ID NO: 4887 - DNA, 590 bp, Gossypium hirsutum
  Clone ID: AI728806.1
catttactccaaatcccacaatcttctacaaataataaaaacctaacacgttctgcaacggtgctgtcgccgtctttcactctcttacggtgtcgaaaaccttttggattcaacgatcttatcgcatgacgaacctggtttcttctttggttactgagaaaattttcgttgccttttaagagcgttattattctttcgcttacgtttgatgttaaggaacgccaaagtgacctgtctccctctctctacagagttcggttttgtgtaaggttcggatctacaaccgaaccgtatggcaccattgccggccgatcaaccctgcgaatctcatgccagcggtgctgtggctgactcgcaacggtctttacctacaccgttcctttctaaaacctatcagctcgtctataatccatccgttcgatgatttgatttcatggaacgacgatggatcaactttcatagtttggcgcccacctgagtttgctcgtgatttgctccctaactacctctaacataacaatttctctagcttcgttcgtctactccacacatatggatttatgaaggtattgcctgatagatgggatttc

SEQ ID NO: 4888 - DNA, 537 bp, Gossypium hirsutum
  Clone ID: LIB3585-011-P1-K1-G6
cttttaatattattctgaaaccgtctccgtttctgtgcttttgaatgatctatataagatttgatgttgaatttggtaaacttaaaaagatgttttcagctctatgcatcgaagatatttttttgtttcatttgtttattttctttttctaacactctctcggctgccaatcagagcgttattattctttcgcttacgtttgatgtaaaaggaacgccaaagtgatctgtctccctctctctagagagttcggatctagaaacgaaccgtatggcaccattgccggccgatcaaccctgcgaatctcatgccagcggtgctgtggctgactcgcaacggtctttacctactccgttcctttctaaaacctatcagctcgtcgataattcatccgtcgatgatttgatttcatggaacgacgatggatcaactttcatagtttggcgcccagctgagtttgctcgtgatttgctccctaagtacttcaaacataacaatttctctagctttcgtcgtcaactcaatacatatggattt

SEQ ID NO: 4889 - DNA, 676 bp, Gossypium hirsutum
  Clone ID: GOSHI-09MAY01-C81232_1
ctgcattcgagaaagtagtttcttttttttctttttcatccaaaagaaggtaagagacaagaaaaatgaatagttcatcaccagcgaattcatcaatatcaactacagcaatcgttggaggaggaggagcaagtggtcgtactaatgctgctttggaggattcccatttcccttctgatcttatatccattcaagaccgcaaagatgaggccatgctcgttttaaaatctgatttgatggctgcactcaatgaagaggttaaatcattggatgaagataactggaagtttgaaggtcctcgttcccgcatccacctgatatcaagaccaggtgggtttctacagaagcagatggagtttacaaaaaactgtagcacagccccgaaaaaatgatttcagatttcctgagactggaccttacagctaagagattggctttactcagacaacttcattatatctgtatattgctgaatttcactatgaaatcatgcacacatgtgaagaattacaagtatttccttctgactgttattgttaaacaagacagttttgcctttccatttttgagattttaatatcttaaatgctcatgtacgtagcacaagtccattgcggtgtggaattcgattcagattctaagttacagtaaagaaaagcaggatcaatcttccatt

SEQ ID NO: 4890 - DNA, 641 bp, Gossypium hirsutum
  Clone ID: LIB3543-041-Q1-K6-G11
gcgttcgcggttctctaatcacagcgatgatgtggtgggctcttcatgggataagactgtgagattgtacgatgcaagcgcgaacgttttgcgaggagagttcatgcacggtgggccggtacttgattgttgcttccatgatgattcatctgggttcagtgctagcgctgacaataaagttgggagggtaatgttcagccatggaaaggaggaaatattaggtagacatgatgctcctgtacgttgtatagagtattcttatgcagcaggacaagtgatcacaggcagttgggacaagacattgaaatgttgggatccaagaggtgcaagtgggcaggagcgtactcttgtcggcacatacccacaacctgaacgtgtttactcgctatctcttgttggaaatcgtttagtcgtggcaactgctggaagacatgtaaatgtatatgacttgcgaaacatgtctcaacctgaacagcgaagggaatcttcattgaagtatcaaactagatgtgtgagatgttatccaaatggaacagggtatgctcttagttcggttgaagggcgagtggcaatggagttctttgatctctcagaggccagtcaagccaaaaagtatgccttcaagtgccatcgaaaatctg

SEQ ID NO: 4891 - DNA, 640 bp, Gossypium hirsutum
  Clone ID: LIB3582-060-P1-K1-B6
aaagacaccatgttcaatccaaaaccctaagcctctagcgaaagttcatttaagcgctctaggagacaagcgagcgatgacatatgaacacccgtcaccgctaccagagcgagagctctctcaaccctacgacggacggaatctcgaacctgcggtagtctatcacagctataatctactactatcttcatgggataagactgcgagattgtacaatgcaagcgcgaacgttctgcgaggagcagttaatgcacggggggcacggcacattgcattgctgcttatcataggaagattcatcgtggaatgcagatgactgagcgtaagcacaatataagtatagtgaggatatatgctacaagccatgggaaaggaggaaatattaagtagacatgatgctcctgtacgttgtatagagtattcttatgcagcacgacaagtgatcacaggcagttgggacaagacattgaaatgtagggatccaagaggtgcaagtgggcaggaacgtactcttgtcggcacatacccgcaacctgaacgtgtatactcgctatctcttgatggaaatcgtttaatcaaggcaactgctggaagaatgtaaatgtatatgacttgcgaaacatgtctcaacctgaacagc

SEQ ID NO: 4892 - DNA, 481 bp, Gossypium hirsutum
  unsure (1)..(481): unsure at all n locations
  Clone ID: uC-gsflmaxxa055g08b1
ggtgataaggaaataggctccttncctgcaacaccaagaactggttcggcagcacctnnnnngccgatatcggctcctccttcccaactgnnttctccctctcttactcgatcaccgcttcgnnncacggatgatcacatacaacctgcaagcaaaaccccaaaaagttcaaccccaaggattagaaccccacgttttattactcctttgggaagtccaattagaagggctttttaagcttaccaggcttgaccctcaatgatgcttggcttcccatcactgagtcaaggaatggaaatgcctattacgctgcaatttatactctttgttcagggattggtattcaagcccttgtgcttcctggtgctttcacgttccttgggtggtcttggggaatcataaacctgactggggccttatatggcactttacaccctatcttacctggccacctccatgatttcctgaaactggattgcgt

SEQ ID NO: 4893 - DNA, 336 bp, Gossypium hirsutum
  unsure (1)..(336): unsure at all n locations
  Clone ID: LIB3583-033-Q6-K7-B2
cggtaccggcctcccggtcgccccgcgtccgcaccgcagcaaaccccaaaagttcaccccaagnttagaacccccgttttattactcctttgggaagtccattagaaggctcttaacttaccaggcttgccctctgatgcttggcttccctcactgagtcaggaatggaaatgcctattcgctgcatttcatactctttgttcagggattggtattcaagcccttgtgctccctgttgctttcacgttccttgggtggtcttggggaatcataaccttgactgtggccttnatatggnagntttacaccctatacttactggtccacctncatgaa

SEQ ID NO: 4894 - DNA, 525 bp, Gossypium hirsutum
  Clone ID: GOSHI-09MAY01-C82192_1
gcagaatccgacagaaaacaaattcaaaatcaataaaagcatctaattgacagtgaggacggcagttccgttctaaaccgaaaactctgtaatccaaacgcagacgttcccttctttttcttattttcaacaaatatggtttttattcttgctaatgttaatactccaattatgtgtttcttctctttgtgagttctccccagatttctgaaaaccccgaaatcaaaaaggtgttttctttttgtttgtttgttcacatcttcatccaaagcaaccatggcggcgtctgatcctcacgcgcctctccttcgtccgcgtcaacctgatggctcggctgctcgccctgtatcgttggcgcatttattggggcgagccacgggacggcgtggcgcttccatgctggttagggagacagcggcacgtgagttggaggagcggagggccgactgggggtactcgaagcccgttgtggcactggacatgctgtgaatacagcgttcgtggtggtgtcgtagtgatgttgat

SEQ ID NO: 4895 - DNA, 797 bp, Gossypium hirsutum
  Clone ID: GOSHI-09MAY01-C82162_1
cccacgcgtccgcccacgcgtccgcggacgcgtgggcaaaaaaaaaaaaaaaaagaaggaaaattcaggtcaaactgcgacaaccccaaagacgggagaaattccaatttgatttgttaattcagttctcggacaggtaaaactgaaatcaaacaacgaggagagatggatgagaatggaaaagtacgcccgaattgtgctaatgctgctaatccctaccatgtatgtggtgcatattgcctagaaaagattgctgatggcaagggatataaggaaaaggataaaaagatattagataaccgctacggtataaaagaagttgtgcgtaacaaaaggactgatgatggagggagatcgcaaccaaattgccctaaagcaccgaatccttaccacgaatgcaatgataattgcacccagagaagttccaaggccaatattcagggagttagaaaggaatccgataatcacaacggtataaaacaaagtgagcttaaaaaaaagaaaggtggcgagggaagagtgcaccaaaattgcggaaaggcatcgaatccataccatgaatgtgatgaaaattgtttcaacagaagtacagaggccaaaaaagaatcaggtgccaaatttattgatgattccagaagctttgagaggaaaaagaagggatctgagtctcagcctaagtcccctcgagcacttgagattacccctgccctaggtgcaatttaccatggtgaccccaactcacttcagtctcatttatatagggagaagttggaagcagagaatgccgagtcctttcc

SEQ ID NO: 4896 - DNA, 592 bp, Gossypium hirsutum
  Clone ID: GOSHI-09MAY01-C82042_1
cgtccgcccacacccccgctggggggggggttctgatatttgctggagccgggggacaccgcaatgaagttttgagtgtggatttccatccttcagacatttatcgaattgcaagttgcgggatggacaacactgtaaagatttggtcaatgaaagagttctggacttatgggggagaaatctttctcttggacggatcttccttcaaaatttccaacaaaatacgtacaattccctgtgttcttagcttcagttcattcaaattatgtggactgtaatcggtggcttggcgatttcattctgtcaaagagtgtcgacaacgaaatagtgctatgggaaccaaagatgaaggagctatctccaggagagggaacggctgacatccttcaaaagtaccctgtcccggagtgcgacatctggttcatcaaattttcttgcgactttcattacaatgctgctgctatagggaatcgagaaggcaagattcttgtctgggtactgcaaagtagccctcctgttctcattgccaggctatctcatgcacagtcaaaatctccaattagacaaactgccacgtcctttgatggaagca

SEQ ID NO: 4897 - DNA, 979 bp, Gossypium hirsutum
  Clone ID: GOSHI-09MAY01-C83912_1
ggaaagtattgcatggtcaattttgatcatcgctcttgcctggctacttatgatcttactctactgcgctcaccccggtggtccagcttggggaaaatataggttcaaaatttgttcctctctttcttctcacgctaacaagccaattccagggcctagagggttgcctctatttggcagcatgaaccttatggccagctccctgcctcaccaccggattgcatccgctgctgagacatgcaaggctaagaggctcatggcctttagcctcggagatactcgtgttattgtcacctgcaactcggatgtagcaagagagattcttaacagctctgtatttgctgatcgtccagtgaaagaggcggcgttcggcttgatgttcaatagagcaatcgggttcgctccttatggagtttactggcgaaccctgaggagaatcgcggctacgcaccttttctgtcctaagcaaattaaaggtgcagaggatcagaggcgcgtgattgcctctgaaatggtcactttatttgctcacacctctaaccaaagctttcacgtacgccaagtcctcaaacgagcttctctaaacaacatgatggcttcgatattcggacgaaaatataagttagattccatcaatactgaagttgaacaacttggagatctagttgatgaaggctacgatttactgggcacatttaattgttctgaccatctcccttggttggtagattttgatcttcagaaactcagacttagatgctcaaaccttgtccctaaagtaaaccgctttgtcagccggattatagcccaacacagaggaaatggtattcaggggaactgatactgtggcggtgctgattgagtggatactagcaaggattgtgcttcatcctgaggttcaatcgagggtccatgatgagctcgacaacgttgttggcagatcacgtgctgtggacgagtctgatgtagccaaaatgat

SEQ ID NO: 4898 - DNA, 589 bp, Gossypium hirsutum
  unsure (1)..(589): unsure at all n locations
  Clone ID: LIB3543-037-Q1-K1-B11
gtcgacccagcgttcgcggncgcgtgggttactggcgaaccctggaggagatcgcggctacgcaccttttctgtcctagcaaataaagtgcagaggatcagaggcgcgtgattgcctctgaatggtcactttatttgctcacacctctaaccaaagctttcacgtacgccaagtcctcaaacgagcttctctaaacaacatgatggcttcgatattcggacgaaaatataagttagattccatcaatactgaagttgaacaacttggagatctagttgatgaaggctacgatttactgggcacatttaattgttctgaccatctcccttggttggtagattttgatcttcagaaactcagacttagatgctcaaaccttgtccctaaagtaaaccgctttgtcagccggattatagcccaacacagaggtagggctccaacaaactctaaaattcgagatttcgtcgatgttttactctctctccaagtaccgataaattatcagactccgacatgatcgccattctgtgggaaatggtattcaggggaactgatactgtggcggtgctgattgagtggatactagcaa

SEQ ID NO: 4899 - DNA, 564 bp, Gossypium hirsutum
  Clone ID: GOSHI-09MAY01-C83412_1
gcggaggcaaccaaccctaatgaattacgagatgcaagcctctggttaagtcaacaaacccctaacgccgaaattcgttaaaagtgtgatgcagggcaaaaatctacaccgtaaattttgctagctttcgaactcctgaaggggtctgtggaagctaccgcgaaggaagctgtcatgctcaccactcatatgatgcttttaataggctttgcttaggacagaacttctgcacaccgaccgtagctcctgaaatgtttgcaggagacccgtgtcctactgtcatgaagaagctctcagcggacgtcatttgcagctgatggagctcatcagaaagtacatgaaataaacatggttcttcattgttctttctctcaatccaacatgtcattctgcactttttcgggttattttgggtcaataagcccacaatccccagatcacaacaccaaccatttgttctggcattcccaggtgaagttggacaaatgcacaacactcccccggggtataataagctcttatataaattgggaaaaatgattggagataagctctatgtatata

SEQ ID NO: 4900 - DNA, 806 bp, Gossypium hirsutum
  Clone ID: GOSHI-09MAY01-C83662_1
cggacgcgtgggggaccaccctacctcttggatgtggtgtttaccttgggccggatattggtacaacacctcataccaaacggctacgcaaatgacaccttttgaagtgtagtatggtcgctcccatctacaatagcacggtatgttaaggacgacagcggtcaccctctcattgatgctcagttactcgaacgagaccatgttttacagctgctcaaaataaatttagcccaagctcaggcttggatgaagttctatgctgataaacatcactgagatatcagtttcaatggcggggactgggtatatgttaaattgcaaccttatcgacaatcttctatacgggtgcagcgccattcaaagctcggtcacagatattttggtccatatcaggtcctcaaacgtgttggtccagtcgcatatgagctcgacctgccttctacggctcgtatccatcccgtctttcatgtgtctatgctcaagaaatgcctcggacaccctgaccagcaagtcactcctttggatttggtcgattccaccagctctattgacttgtaccccattgcaatcttagatcgtaggcaagtacaacgagggtctgccaccgtaagacagtgcttaatccaatggaatggcctgaccattgacgatgctacttgggaagataacgagaaactgcaccagctttaccttgctttccaccttgaggacaaggttcatcctcgatgaggagggtactgttctgaacccaaatgctgctgagggccctgctggagagtacattgcccaaaggaactaagagttga

SEQ ID NO: 4901 - DNA, 907 bp, Gossypium hirsutum
  Clone ID: GOSHI-09MAY01-C83092_1
cccacgcgtccgcccacgcgtccgcccacgcgtccgggagaatctagttgcatgggcacgtcctcttctagcaagcaaagaaggattagaaacaattatagacccgtctctgggttccgatgtatctttcgagagtgtggccaaggtagcagcaattgcttccatgtgtgttcaaccggaggtatcacaccgacctttcatgggtgaggtcgtacaggctttaaaactagtatgtaatgaatgtgatgaagcaaaagtaggctcgagaggtactagtcaagacgatatctccatcgatatggatggtaaggttggtactggctcggaacagttaagcgatcccttgcaaagccattattcgattcccaactatgtctcgggtcttgataccgagagaggactatcagtgtctgatttgtttagttcatcagcttgattccggaggcaatcatctgagtcgtttaggagacactgtacttcgggtccattgagaacggggagaggcaatcgtttctggcataaaatgcaacaattatcacggggcagcatcagtgaacatagtgctatgatcaagttctggtcagattcacattaaaaccaatgtcacttgccctttgagttttgaatgtcgaatgacaaactgacggcacctgctccgcatgcctgatgaaaaatgttgtgctggtttcggaactgggaatttaacatggtaaactcttgtgctgcgagattcttaacccgaaaccctgagtagctttcgttacgcagctgatcgatgaagcatatagagccaaagtattcttttatttttcgtgttttttttctgatagggggaagagtttcatatgatcatcctcacactccaaatttgtacagttgggtttgtgtttttcacataaggaattaa

SEQ ID NO: 4902 - DNA, 564 bp, Gossypium hirsutum
  Clone ID: GOSHI-09MAY01-C83022_1
ttttttttttttttttttttttttttttttttttttttttttttttggctaaggcatgtaaatgccgaaaagaggttggaggagtggaaagcggaggaagaacagagaaagttggagaagatcgctgaagacttcataaagaagaaagcaaaaactgggaaaaaaggagttggagatggagaggccgagaagtacgtagagaagtacagagagcaatcggcgaggtgcgtggcggtggttgaagagtccgttagggcggcctgccaaaatggaaaacggaagacagtgccgggaggagctgaccccaaaagattgaagatttggatgggaaagaggaaagtggatgagagtgatagtgacagtgattatagcagtgaggatgaagattatgaggaaaatgagaaatctgtacttttgaacaatgggaatcattcagattctagtaagggagctgaggggagttgtcgttcacttttggggggaaaacaggatatacacttttcaattggagtctcaattggtactggttctgaagaaaaaaaggaggttgttctgcctccaacc

SEQ ID NO: 4903 - DNA, 354 bp, Gossypium hirsutum
  Clone ID: GOSHI-09MAY01-C83352_1
ggcgatggaaatcccgagtggaaccatacggtacggtttgaagttagcgacgacttgcttcgggattgcgataaaatatttgttcactttgatctgcgccacgaaggatccatgtttggggacaaaacgagtcggggaagttgtggttcctttactggatctgatccaagagtccaataatggagttgttagatttgtgacttaccaggtacggactacggacggcaaagcatatggagagttgaatctctcttttaaggtgtgaatatttggaagatgagggttcaaagtggaaaccccgcgagcctgataactgctatccctatgtatcatcactcccccgcgcctgagcct

SEQ ID NO: 4904 - DNA, 717 bp, Gossypium hirsutum
  Clone ID: GOSHI-09MAY01-C58951_1
ggagactaaactcccaatctcaactatcttacaatacatctcttcctcccgcttttcgactccgacccaacaaacacacacaaaagctcaccaggcgtggagaaaacgactgtcgtttcgctctcctcctccttttcttgacttcaattacccttcacacaaaagcggaagtcataaccctaactcccgacaccttctccgacaaggtaaaggagaaagacacggcctggttcgtgaaatttggggggccttggtgtaaacattgtaaaaacttggggacgttgtgggatgagttaggaaaggcagtggaaggagaagacgaaatagagattggagaagttgattgcagtgtaagcaaacctgtatgcactaaagtagacatccattcatatcccacgtttaagctcttttatgatggcgaagaagttgctaaatatcaagggaaaagggatgtagaatcgctaaaagcatttgctttggaagaagcagaaaaggcagcagaaaaagcacagctagacactgataaagagttataatcattcaaaaggaatggaactcccgagcagaaacagggtactgatggtcgtttactaggggatgcttaaattttgacggcacccccaacctacacatgttatttgcttttctggattttgtcactgatctgatgttcttttttaatgcttaaaacatgtctgaatttgagaatttttaatc

SEQ ID NO: 4905 - DNA, 372 bp, Gossypium hirsutum
  Clone ID: LIB3149-057-Q1-K1-B7
gtcaggcgggattacccgctgagtttaagcatatcaataagcggaggaaaagaaacttactaggggatgcttaaattttgacggcacccccaacctacacatgttatttgcttttctggattttgtcactgatctgatgtttttttttaatgcttaaaacatgtctgaatttgagaatttttaatctttagtaaaacaaaccaaattttccataaaaggaaaagaacagtaccagagattttcaggatctgattttgtatttgttttataatattctaagtaaagcttgtacaaaaatgaaattggataacttcaaatttggacaaggtggacggtctaaattaatttaaatttttaaatatttcatatggt

SEQ ID NO: 4906 - DNA, 596 bp, Gossypium hirsutum
  Clone ID: GOSHI-09MAY01-C58371_2
aaaaatattttcgctagattctttaatccattaagatatcatgggcaaaggtccaggtctgtacactgaaatcggcaagaaagccagagaccttctttacaaggatttctaagacaaatggctttatatccccaatgtggggaggtgttattgtttggaatccccttggctgtttaaaggattcagaattcaagcccagtgccaagaacataattcccatacaggaccttgagaatatgtttgaagtattcattgggcaattccggcaactatttggtttcaaatctttgaatgtttacacgaatgcatcaggcgattggaaccttctgcctagtgaaagaggttttaccgagtgggaattggacgtcttgtcatggcaacacacgtgttttaatcttcattcatgtgctacgacacttggatctcttttaagattggttcaatcactgccaaggatgattatcaaggatgagataggaaaacaggtaaagctttctcttgaagcagcaaagctggcactaagtaatgcctctagtggagtgtatgaatctttagctgcttcattcagtcaggcaaggttttttggagaggatgcc

SEQ ID NO: 4907 - DNA, 621 bp, Gossypium hirsutum
  unsure (1)..(621): unsure at all n locations
  Clone ID: LIB3543-044-Q6-K6-G3
aaaaaaattttcgctagnatctttaatccattaagatatcatgggcaaaggtccaggtctcttacactgaaatcggcaagaaagccagaggtattaaaattacgaattttaagctttcaatctgtaattttatgtctacctttcggaaccttttttctttttgttttggattttagaccttctttacaaggattatcagactgaccacaagttcactctcaccaccagctctccaactggagttgctattacctctgccggaacaaagaaaggcgaactctttttggctgatgttaacacccagctgaagaataagaatgtcacaactgatattaaagtggatacctactccaatctgtataccaccataaccgttgatcaacctgcacccgggctgaaagcaatctttagcttcagagtccctgatcagaggtctggcaaggttgaactccagtatttgcatgaatacgcagggataagctcaagcattggattaactgcaaaccctatagttaacctttcaggtgtgattggaactaatgttcttgcactgggaactgatctctcgtttgacacaaagactgggaatttcacaaaatgcaatgccggtttgagcttctc

SEQ ID NO: 4908 - DNA, 637 bp, Gossypium hirsutum
  Clone ID: GOSHI-09MAY01-C58321_1
ctttatccttctctcaaaggccgaagaacagttccaaaagggaaggaaagtccacagcggagctaaaaaccacaacaccagagcagatatggcccttcttagctgagttctgcaacatagacaagtttttcccttcagtcgatacatgtcatcgtaaggaagggactccgggtcagcctggtctggtccgttactgcgaaagctcgaccagctgggccattgagaagcttttaaccatcgaccccatcaaccactcgctaagctacgagatcgtcgaaaataacatggggttcaaaggctacctcgccaccctgaatgtgttggcggttgaaggcgatgggtgcaagatcgaatggtcgtttatatctgacccaattgaaggtatgaagttggaagattttgtttcttatttggataatacactgctattcatggcgaagaaactggaagatgctgtccgggctcaaatctagatgttggaaattgttggtttttgttgtgtgttttagaaagtgttgtgttttctaacaataataacaacgatgaagcttctaagttaatgttggaccacgaggtcttgtctggtttgcacatgtgctaaaacatagatgtcgggttctccattttgtttaatctt

SEQ ID NO: 4909 - DNA, 781 bp, Gossypium hirsutum
  Clone ID: GOSHI-09MAY01-C58261_1
gcactggatatgtctaagcaagtcccccaaggtaacaggtttaatatgcaagattatatacgtgaagattgtggaaagctaaaaaataaaattatggttggagcacatcattctgctcgagattcacttcactgcaagaaagtttggggggccataggagctggacctgatgataattttattaagtcatctggtgcgacatggtcaagtgaaggtagtgtaaatttgggtgaaactgatcatgagcacagcaaggttgtcaaatcaagaaactccagcctcgcaacaaatgaggactttcatgtggaaaaacaggatgaatgcttgtcactgaatgctctgcatatgacgaaattggaatttatcctaatagaaatcctaccttgaatgggagttctctttctatgattagttggaagtctagttctgataatttctcttgctatgatctcagcaatacctcctcttcaaatcatggaaatttgggatcctcatcgacatcagattctgaagatgccagtcaacagtcagcagggagagatacttcactttacacacaaaatggcttcagtgagtgtcaggtgaaaggaaaggataaaaagcaggatgttagtggaggggttgctccagaaagccaggcattgtttggacattcacctgatggtcgagggaacaaggtatcaggaaatctgctgacaaaagctgctgaaaattttgaagatggaaaagcaactgctcttacgagttctcaacatcaaagcatgtctacatcaatgcaaaa

SEQ ID NO: 4910 - DNA, 504 bp, Gossypium hirsutum
  Clone ID: GOSHI-09MAY01-C59911_1
atctttgggatgggcatctcgacccctcgctcggtacccacgtttggcccccaaatcctgaagagggaaccagaaccagcgccccgccgcggggcgggccggccagcgcacctcctgagggtcacaccgacaaatctgaagcgggtttgccagaggagtgtacccgtctccctggcctgggccaccgggtccacagggatcccatttccggccctacaccccgctccacgatcccatacgggcgctgcagctgtgttctgcaggctgcagggacgcgctgagacgaatccccggacgaggtgatggctgggccggcggaggaggcgggagcccattgtcccgagggcctgtggcctctgcccccgcaggtgtcaccaagagtgacctacacacgagtgagcccaggacgggctgaggatgtcaccttcctctaccacccctgtgcccaaccctggctgaagctccaggtttgccttttggcctatgcttgtatggctaaaccct

SEQ ID NO: 4911 - DNA, 457 bp, Gossypium hirsutum
  Clone ID: GOSHI-09MAY01-C59551_1
attctgcctctcaatcttggataggagtctgaatttccgccgtgaccctgctactgatgtggcccgcagaaatgaccccaaatatgttggccgggtgctgagtgccatgatcaatagcaatgatgacaacggtgtgcttgctgggaattggagcggcacttacacgggtggtcgtgacccaaggaactggaacggcagcgtggagatcctcaaggactggaaaaaatctggcttcagcccagtccgatatggccagtgctgggtctttgctgggaccctcaacacagcgctgcggtcttgggggattccttcccgggtgatcaccaacttcagctcaactaatgacacagaccgaaatctcagtgtggatgtgtactacgaccgcatgggaaaccccctggacaagggtagtgatagtgtatggaatttccatgtctggaatgaaggctggtttgtt

SEQ ID NO: 4912 - DNA, 560 bp, Gossypium hirsutum
  Clone ID: GOSHI-09MAY01-C59531_1
atccgccggccgcccagatctccacctgccaccccagagctgggacagcagccgggctccggcactgggagggagaccccgccgtggcctcttctgccacccacgcccccacccctggcatggccgaccagctgacagaagaacagatcacagaattcaaggaggccttctccctgtttgacaaggacggggacggctgcatcaccacccgcgagctgggcacggtcatgcggtccctgggccagaaccccacggaggccgagctgcgggacatgatgagcgagatcgaccgggacggcaacggcaccgtggacttccccgagttcctgggcatgatggccaggaagatgaaggacacggacaacgaggaggagatccgcgaggcctttcgcgtgttcgacaaggacggcgaccgcttcgtcagcgccgcggagctgcgacacgtcatgacccggctgggggagaagctgagtgaccaggaggtggacgagatgatccgggccgcggacacagatggagacggacaggtgaactactaggagttcgtccgtgtgctggtg

SEQ ID NO: 4913 - DNA, 467 bp, Gossypium hirsutum
  Clone ID: GOSHI-09MAY01-C59481_1
atccggacgccggagcccgagccccgccgagtcccctcgcctcatgcgcccgcgtgcgatccgcgctcctccgtcccaccatggctcggggccccggcctcgcgccgacaccgcttcggctcccactgctgctgctgctgctggcggcggtgaccggccacactgccgcacaggacaactgcacgtgtcccaccaacaagatgaccgtgtgcagccccgacggccccggtggccgctgccagtgccgcgcgctgggctcaagcgtggcggtcgactgctccacgctgacctccaagtgtctgctgctcaaggcgcgcatgagcgcccccaagaacgcccgcacgctggtgcggccgaatgagcacccgctcgtggacaacgatggtctctacaacccctactgtcacccatacggccgcttcaaggcgcgccagtgcaaccagacgtcggtgttctggtgcgtgaac

SEQ ID NO: 4914 - DNA, 382 bp, Gossypium hirsutum
  Clone ID: GOSHI-09MAY01-C59411_1
atgccggatcgccttcgccgccgcccgccgcctcgcgttagctcccggcccgtcctcgcccccgccttcgccaccgcctcggcccgcagagctcgccctctccccacctgcagatatgtccgagtccaagagcggccctgagtatgcttcgtttttcgccgtcatgggcgcctcggccgccatggtcttcagcgccctgggcgctgcctatggcacagccaaaagcggcaccggcattgcggccatgtctgtcatgcggccagagctgatcatgaagtccatcatcccagtggtcatggctggcatcatcgccatctacggcctggtggtggcagtcctcatcgccaactccctgaatgacgacatcagcctctacaggagc

SEQ ID NO: 4915 - DNA, 468 bp, Gossypium hirsutum
  Clone ID: GOSHI-09MAY01-C59781_1
attgtatgtggaggtgcggtacagtccgcacctgcttgccaattccaaagtggagccaatcccctggaaccaggctgaaggggacctcaccccagacgaggtggtggccctagtggcccagggcctgcaggagggggagcgagacttcggggtcaaggcccggtccatcctgtgctgcatgcgccaccagcccaactggtccctcgaggtggtggagctgtgtaagaagtaccagcagcagaccgtggtagccattgacctggctggagatgagaccatcccaggaagcagcctctttcctggacatgtcgaggcctaccaggaggctgtgaagagcggcattcaccgtactgtccacgctggggaggtgggctcggccgaagtagtaaaagaggctgtggatatactcaagacagagcggctgggacacggctaccacaccctggaagaccaggccctttatgacag

SEQ ID NO: 4916 - DNA, 586 bp, Gossypium hirsutum
  Clone ID: GOSHI-09MAY01-C59111_1
gatgcttctctacgattgtcctgcagagggctgccggcaaaaagtgcatactgctcaattatgcaggggatgcagtctttgcatattacggtgtcttcagtgtggtcggtgcattaatgacagcgagtacgaagaaacgtttagtctggagtatctttgctcagattgttgtaagcaagaaatagcaaaatcccacgacaggccagataggatgattggctcgtccagtttacctgaaactggcagctgtcatcttcatggctagactgaaatatttcacattttctgttctctactcccagttaaggtgtcgtgttatctctcttatattttaatctgctaatagtgtcaaccatcttgggtcctcggagccaaaggttcagtcacattcccacagaagagctgaaaagacaataaaatcttttgctgcacgcattgtccaagagaaataatcttggttgggtggttttcgattgacacgtcaatgctgccaagaataaggtggaaatcatgaatttgccgacatgaaaatagattccccaaggaagcactcatctattcatatcgttaaacgagaatatttctg

SEQ ID NO: 4917 - DNA, 691 bp, Gossypium hirsutum
  Clone ID: GOSHI-09MAY01-C59071_1
cccagcgtccgtgtttgtgaatccttcagaccttatatgttcaggttatattggatattttgaacatagaagaaaatggagagattggggccgggaaaatcgagagggtcgcaacacaggtagggagcttactctcaggctctggtctacaaagaagcgagtcagaaccactgcacctgattccttctgcccatcttactattaatttgcgtcactctccggatttcaaacatgctcacggaattcaccaatggtgggataatggttttattggtctgtcagaactacacgagtacaggccttttgtaacggatgagaagtatcttctaagataactgcatgaggaaaagttacatcacttacttacattggtgtaagacctcagggagattgtaattgacttcctatttcccgtttaccatgaagacataaaaccgatttgtcttcatagagcaaacaaatgtcgtagggcttgaagcagtgcagcttctaggggttatgtctttgtaaggcagaggagctttgatagacttgaaaaccatggttggtcatgttggtctattgcttcggccttcacattgtatttattccattcaatacatttttatctatcaatgaatctgaaagaaagaataatatattggaattgtattatacctttcaatgaaatggattgcagatgtttatcact

SEQ ID NO: 4918 - DNA, 418 bp, Gossypium hirsutum
  Clone ID: LIB3149-060-Q1-K1-A5
cccacgcgtaccacacatgtacaatccttttttaacttatgtttaacatctccaaagataattgcatagcggagagttacatcacttacttacattgatataagacctcagggagattgtaattgacttcctattacccgtttaccatgaaaacataaaacccatttgtcttcatagagcaaacaaatgtggtagggcttgaaacagtgcaacttctaagggttatgtttatgtaaggcataagatctttgatagacttgaaaaccatggttggtcatgttagtctattgcttctgccttcacattttaattattccattcaatacatttttatctatcaatgaatcttgaagaaagaataatatattgtaattgtattatacccttcactgaaatggattgcagatgtttatcactt

SEQ ID NO: 4919 - DNA, 1545 bp, Gossypium hirsutum
  Clone ID: GOSHI-09MAY01-C59031_1
cccacgcgtccgagcaggagagatttgcactggagcatattgctaagtgccagcactcatctgttagcaaacttaacaataatagtcaaattgctagctgggatacaagattcgagacaggtacaagaactgccttgctgcaacctttctctcctattgtgattgcggcagatgagaatgaacggatcagggtatggaattatgaggaagccaccctcctcaatggttttgataatcatgattttccggagaagggaatttctaaactttgtcttttgaatgagcttgatgacagcttgttgcttgttgcttcaggtgatggaaatatacggatttggaaagattatacactcaggggcaaacagaaactcgttactgcattttcttctattcaaggtcacaaacctggtgtgcggagtttgagtactgttgtggactggcagcagcagtctggatatctttatgcatctggagagatatcatctgtcatgatctgggacctggataaggagcaacttgttaattcaataccatcctcctcagattgcagtgtctcggcattggcttcttctcaagtccatgctggtcaatttgcagccggttttgtggatggttctgtcagactctatgacgtccggacacccgacatgctggttcgcacaaccaggccgcatacccagcaagttgcaagagttgtgggtattggctttcagcccggacttgatcaaggaaagattgttagtgcttcccaggctggtgatattcagttcctcgatattagaagccaaagagatgctgaccttacaatcgatgcgcaccgaggctcacttacagctctagctgttcatagacatgccccgataatcgccagtgggtcagcaaaacagctaatcaaagttttcagtctaaaagctgaacaactcggcaccattagataccaacataccttcatggcccagaagattggttccgtaagctgccttaccttccatccctaccaagtgttactccccgccggtgccgctgatgcctgcgtttcaatctatgccgatgacaactctcatacaagataaacgtataaatccttccacaatttcccaaaatctggaggcagatcccggtgaatgaaaccgtcttaggcccaaatttcatggaaggtcagtgatccaagttaatagttgcaaaaaattattcgagttcggatcattgttcgagtgtttcgggatatactgctgccagatttacaattcccctatgggtgttattggaaattcaggggtataaacagagatatatattgatttcattagcccccggtcccacgtttatctttgcatatatatatacggggggtttggtgggggtggctttggcagataatatgttatatatatatatataggtgatgcattgtaaatattttccttggttttttttttttcggttccctttatttcatggttttcaatgtgtcgaaattgtaaaggctacaacatttgccattgtcataaattttaagtattgcaagcagattggtttatggtc

SEQ ID NO: 4920 - DNA, 875 bp, Gossypium hirsutum
  Clone ID: GOSHI-09MAY01-C59251_1
gctccttcagctcccatggcaaactcaatggtccttgtttcattgatggctttaggcctcttgatggcattttcaacgacgactcaagttgaagcagccgccagggcattttttgtatttggcgattctctggttgataatggcaacaacaattacttagcaacaactgctcgagccgattcaccaccttacggcattgacactcctacccgtcgccccactggccgattctcaaatggcaaaaatattcctgattttatcagtgacgcacttgggtcagagccaacattgccatacttgagccctgaactcaggggagaaaagctgcttgttggtgccaactttgcttctgccggtgttggaatcctcaatgacactggcattcaatttgtacgtcatcaaaattctctttgacaaggctcaatccccaaaccccaatatatatatccatagtttccatggcaatgtgacagtgtaggaccgcccatttagcctaattctttattgaagtgatgataaattggcagataaacattataagaatgttccggcaattacaatacttccaagattaccagacacggttggctgaacttgtcggaaacgatgaagcacagcagattgtaagcgacagtcttgttctcatcacagtcggcggcaatgatttcgtcaataactatttcttgattcccttctccgcaagatctcgccagttccttctaccagattacgttacatatctcatctccgagtacagaaaaattctaatgagactacatgatttaggagctcggagggttctggtaacggggaccggaccttggggtgtgttccggcggagagggcgatgaggagcccaaatggtgaatgtgccc

SEQ ID NO: 4921 - DNA, 528 bp, Gossypium hirsutum
  unsure (1)..(528): unsure at all n locations
  Clone ID: uC-gsflmaxxa003h08b1
tttttattaaagctccttcagctcccatggcgagctcaatggtccttgtttcattgatggctttaggcctcttgatggtattttcaacgacgactcaagttgaagcagccgccagggcattttttgtatttggcgactctctggttgataatggcaacaacaattacttagcaacaactgctcgagccgattcaccaccttatggcattgacactcctacccgtcgccccactggccgattctccaatggcaaacacattcctgattttataagtgatgcacttgggtcagagccaacattgccatacttgagccctgaactgaggggagaaaagctgcttgttggtgccaactttgcttctgccggtgttggaatcctcaatgacactggcattcaatttataaacattataagaatgttccggcaattacaatacttccaagattaccagacacggttggctgaacttgtcngaaacgatgaagcacagcagattgtaagcgacagtcttgttctcatcacagtcg

SEQ ID NO: 4922 - DNA, 545 bp, Gossypium hirsutum
  Clone ID: GOSHI-09MAY01-C54811_1
tagatcttcttcaatctaagctgctcggagacttaaaatggctcgcaagaagatcagagaatacgattccaagagacttctcaaacaacacctcaaacgcctcgctaatatcgacctccaaatctgttctgctcaggtgactcaatctactgatttcaccgagttaacgaacgaacaaccatggctttcgtccaccagattagttgttaagccggatatgttgtttggtaaacgtgggaagagtggcttggttgctctcaatttggatcttgctgaagttgctgaattcgtcaaagctcgcctcggcactgaggttgaaatgggcggttgcaaagctcctataaccacattcattgttgaaccttttgtaccccatgaacaagagtattacctttcaatagtctctgaaaggcttggttttaccattagtttttcggaatgtggaggtattgatattgaagagaactgggataaggctaacaccatgttccttacaaccgagaaacctatgaccttggagacatgtgcacacgtgatagctacac

SEQ ID NO: 4923 - DNA, 338 bp, Gossypium hirsutum
  Clone ID: GOSHI-09MAY01-C54451_1
accacgcatccgtacggagcttgtgttcatattcacatactccttcttttcattcttgttcttcatgacagtgggtcgatgcagtgtctcggaggatacttgactcgaaattatccaccaccaaagcgggattatggagggagtgcacttgatcgttccaaaggcaacaaaccaaactgtattcttccatgggacgatggctcctgagagtctcatgaatgggagcgtgctggaagacggtatgtaccgggacgggttggggctaccatctgcttcctagcgtcacgtgagggatattactatccagaacgattcttagagtaaatttgaggagataa

SEQ ID NO: 4924 - DNA, 782 bp, Gossypium hirsutum
  Clone ID: GOSHI-09MAY01-C54791_1
tttcgtaatcttcttcaccagcgtcatcggcataactaccccggtcctcctggcccgttttttcaaggaaaacccgtgtacgacaaggcaattctaataatcaagtgcttcgctgccggagtcatcctttcaacctccttggtccacgtcctccccgacgccttcgccgccctatccgactgccaggtcgcttctcgccatccctggaaagatttccccttcgccggccttgtcactctaatcggggctctgctcgctctttttgtggacttaacggctagctcacatgtggagcatggtcataaacccagtggagactatttaccggtgggaacgcatgatgtaacggtgggaaaaaaagtgggcaacacccatagtgatttgtcgaacgaggaattagtgaagcttaagcagagactggtttcccaggttttggagattgggataattttccattcggtgataatcggggtgacgatggggatgtcccaaaatcagtgtaccatccgacctctggtcgctgctctcgcctttcatcagatcttcgaaggcatgggcctcggtggctgcattgcacaggcaggtttcagaatggggacagtggcgtacatgtgcttaatgttttcggcgacgaccccgatgggaatattgttgggaatgatggtgttttcggtgacgggatacgatgacagtagccctaatgcattaataatggaaggtatattgggttcattgtcgtcgggtattctcatctatatggctttggtcgatctcattgctgc

SEQ ID NO: 4925 - DNA, 427 bp, Gossypium hirsutum
  Clone ID: GOSHI-09MAY01-C54241_1
tttccggttagaccggcgcgtccgcccacgcgtccgctcgagatgggtgggccagcccgatccgacccaataaccttttatttgattcgggtgcgatcgactttgccggttcaggtgtggttcacatggttggtggcattgcagggttatggggtgcattaatcgagggtccaaggattggccgattcgatcgagctggtcgatctgtggcgttacgtgggcacagtgcctcattagtagtgctcgggacgtttctattgtggttcggatggtatgggttcaacccaggttcattcttgaccatcatgaaagggtatggtggtggtggaggttattatggacattggagtgccgtagggaggacagctgtcacgacgacattggccgggtgcacagctgctcttacaaccttgtttagcaagagact

SEQ ID NO: 4926 - DNA, 391 bp, Gossypium hirsutum
  Clone ID: LIB3165-034-P1-K3-H1
cccacgcgtccgctcgagatgggtgggccagcccgatccgacccaataaccttttatttgattcgggtgcgatcgactttgccggttcaggtgtggttcacatggttggtggcattgcagggttatggggtgcattaatcgagggtccaaggattggccgattcgatcgagctggtcgatctgtggcgttacgtgggcacagtgcctcattagtagtgctcgggacgtttctattgtggttcggatggtatgggttcaacccaggttcattcttgaccatcatgaaagggtatggtggtggtaggaggttattattggacaatagtagttccgtagtttttttctatatttaccttcttcattttccgttctctataattttaattacata

SEQ ID NO: 4927 - DNA, 449 bp, Gossypium hirsutum
  Clone ID: GOSHI-09MAY01-C54231_1
caatctttcagaaagagagaggcaaagagaaaaaagagagagggtattacatatattcatctaattatacaaataaagatggctcttcacctttcctgggtttccgtttttggcgatctcggtactgaaatatatattcatatgcccttcttgtttgcgtattttaatattcactaacattacattatattgtttttaattaggcgtcattgtttcatttatggtcgccttttctcccatgccagcattttatcaaatctataagaagaaaacatcagaaggattccaatcattaccctatgtgatatcgctattcagtgccatgctttggatttactatgcacttcttaagaagaatgaaatgcatctaattatcatcaacattttctgctgtttcattcaaagcttttacattgtcacttacgtttactacggtcgaaagaaggaaa

SEQ ID NO: 4928 - DNA, 505 bp, Gossypium hirsutum
  Clone ID: GOSHI-09MAY01-C55821_1
gcacaaaaaaaaaaaggagaaagaaagaaaatgtcgatgaccccttcgctctctcgtcttcactcgccgttcctttgctgtccactcaaacactcaactccgtcattatccatcaaatgtggaaggaatcaccggtcgccgccatcttatccttgcatcagagccgttgatcttgatcagagcacaatagtagcagtgtcggttgggcttgtcagcgttgcggttgggattggcattcccatcttctacgaaactcaaatcgataacgctgcaagccgagaaaatacccaaccatgcttcccttgcaatggctccggtgcccagaggtgtagattttgcatgggaagtggaacaattaccgtagagctcggtggcaacgaaaaagaagtctcgaaatgtgtcaattgcgaaggaattggttccttaacatgcactacttgccaaggtagtgggattcagcctcggtatcttgatcgcagggaatttaaagatgatgactgaaagt

SEQ ID NO: 4929 - DNA, 394 bp, Gossypium hirsutum
  Clone ID: LIB3165-047-Q1-K1-H5
atgttgataacagacaggggaaatgtgaactatgcggaggaatcggatcaggcaaaccggtgttgggactgcgacgtcaaggttcatgaagctaactttcttgtagctaagcacacccgaaccctcctctgccatgtctgtcagaacccaactccatggctcgcctctggtcaacacctcagccctgctgtctccgtttgcgagtcatgtgtagccaacaaaaatactacttgcgaaatgacgacggagcaggaggagtcatcggagggagagtatgaggatgaagaagaagattatgacggcgatgatgatgaatgagggggggaagaggaagatgatgctgaaaatcaagcggttccatggtcagaggtttcttcttctttctcgatgttaa

SEQ ID NO: 4930 - DNA, 289 bp, Gossypium hirsutum
  Clone ID: uC-gsronu33B121f07b1
tctagctaactttcttgtagctaagcacacccgaaccctcctctgccatgtctgtcagaacccaactccatggctcgcctctggtcaacacctcagccctgctgtctccgtttgcgagtcatgtgtagccaacaaaaatactacttgcgaaatgacgacggagcaggaggagtcatcggagggagagtatgaggatgctgccgacgctctttcctttctcttttctactttcttttctttctcttctcactccctctctctctctttttttttctctcttatcccttct

SEQ ID NO: 4931 - DNA, 680 bp, Gossypium hirsutum
  Clone ID: GOSHI-09MAY01-C55661_1
attcatttctattttctctctctgctaactctgccttgaagaagatttagagcatacagtttgtgggttggtgaaaattggggaatggaagctgcggcagaagggctgtggggactggcggatgagtttgagaagatgggagagatagggaaggcggtgaagtgcttggaggcaatctgccagtctcacgcttccttccttcccatcgttgaggtgaagactcgactccgcatagccactcttctgctgcgccactctcacaacgtgaaccatgctaagtcccacctcgaacgctcacaattgctccttaattccataccttcatgcttcgacttgaagtgccgaacctactcactgctcagtcagtgctaccatctcgttggggctatccctcctcagaagcagatcttgtacaaggctcttcaccttacttctgcggcggctcccgatgttttcggccaattatggtgttgcaacttcaattctcagctggccaacgctctgattattgaaggagactacacaactcaggctccactttaaaatcaagttatgtttccgccactccaatttgctctccggagcctcagatgttccttgttgcttctatcttgcttttcccctccctatgcctttgggataatccaactggccatcaagttgaaccaactcctcccatc

SEQ ID NO: 4932 - DNA, 602 bp, Gossypium hirsutum
  Clone ID: GOSHI-09MAY01-C55621_2
gtgtttttggggctatgatggggagttaatggaggaaagcaaagttggctcttggcttgaacatgtgtttgtatgtacctcaccaaaaacttgatgattcatcaccatcatcgtccattatgcatcaccctgttactgctaatgttccttcaaggtgttcttcagatgctgttcctctgtctccttcacccaacgactgtcgccccactactcctaccccttcctcttccggcctccgcctctccaaatccgtccctaaatcttccaagaaaacctgttcgatatgcctgacatcgatggtactagggcaaggccatgccattttcacagcagaatgctcccattctttccactttcactgtatagcttctaatgtaaaacatggaaatcagatttgtccagtttgcagagcaaaatggaaggaaataccctctcagaggcctgcttctcatcttcccaatggaaaatcaagaatcaatccagcagattggccccgggatgacgcctgggctgttaaacgcctaccttcccctaggttagattcaactaggcacgtttcttcactattccaacctctgagccaggaatctttgatgatgata

SEQ ID NO: 4933 - DNA, 800 bp, Gossypium hirsutum
  Clone ID: GOSHI-09MAY01-C55621_1
tagtttttggttgttaatccagcttccagggataacacacattgtggtgaattaaatgttattcagagcgtacatgttaaagttgtatctgtctttttaatatagcaattgttttagctactgaaagtatttcagacttggtcgtgttgttttctcccccgcctccgcctcgtctccctggagaacctgttcgatatgcttgacagccatgaaaccaggccaaggtcatgcaattttcactgcagaatgctcccattctttccacttccactgtataacttctaatgtaaaacatgggaatcagatttgtccggtttgcagagcaaaatggaaggaaatcccctttcagagtcctgcttcagatcttcccaatggaaggtctagaatcaacccagcagactggccccgggatgatgcgtggacaactgtggtacggcggctaccttcccctcggttggatccaactaggcagatttcttcactctttcatacttctgagccaggtacttttgatgatgacgaagtactagatctgcagcatgagacaactgaagaaaatgtctttgccaaggatgctgcgaagaataactccattggtgcaatagaagttaagacatatcccgaagtttcagccgttccaagagctaacagtcacaataactttgccatactaatccatctcaaggcttcccacacaagtggagggctaaatagcagaaaccaaactatattttccccctcaactcaaaattctcgtgccccagttgaccttgtcactgtcctttgatgtagtggtagca

SEQ ID NO: 4934 - DNA, 405 bp, Gossypium hirsutum
  Clone ID: GOSHI-09MAY01-C55261_1
cccacgcgtccgggaaaaggtggtgggattggcaaaggaggaggtgttggtggtggaatcggaaagggtggaggatacggaggtggcgtcggaaagggtggtgggattggcaaaggaggaggatatggaggtggaattggtaagggaggaggccatggaattggtggtgggatcggcaagggtggtggagtcggtggaggaattggaaagggtggcgggattggaaaaggtggtggatttggcggtggtgccggaggtggatatggcaagggtggtggttttggaggtggagttaagtgtggagctggaggtggaaagggtggtggttttggtggaagtggtggtggtgagaatggacaccattgatattacaagcttgcgatgcatgcatgcattgatcaaaat

SEQ ID NO: 4935 - DNA, 706 bp, Gossypium hirsutum
  Clone ID: GOSHI-09MAY01-C56591_1
gtttgtttgtgtgaattttctgagaaagataaactgaggttgcttcctatgtgtagccatgcttttcatataaactgtattgacacctggctcttgtcaaactcaacatgccctctttgtagaggtacccttttcactcctgggttttcaatggagaatccagtttttgattttgatgacttaagggaagatgaagggtgtgttggtaatggtgaaaatggatatacccctagtcaaaaaacagtggaaatggaagaaattgttgttgacaaaggggttttacctgttaggcttgggaaattcagaaggataaatggtgaaccagatgaagcaggtggtgaaaccagtagcagcaacttagatgcaaggaggtgtttttcaatgggttcttatcaatatgtgctggccaagtcagatctaagggttaccctctctggtggtcaacaacaccatagccatgatattaagcattcatcagctgaaagagatgcagaagagaaaaagatcagtaatatgagtaaaggtgaaagcttttcagtttcgaagatctggctttggtctaagaaaggcaaattctcaacttcatcagaatcccaaactggtatgacatcttctcttaactcagacttgccatggctgaagaaaacacatgaacaatgaaagcttattatgcttttagttcttatgtcacatgtttcttgttctg

SEQ ID NO: 4936 - DNA, 491 bp, Gossypium hirsutum
  Clone ID: LIB3543-001-Q1-K1-G8
cccacgcgtccgcggacgcgtgggcggacgcgtgggcttacgcagactatcaatgtcaattgggcctttagcaatgggcccagtactggagccttcaaaagaaaaaatttacgatctgggcgatcacatcgctcgaggagtcccaggagaagatactaacttgtttagctctatattgagggcggattataacaagagaagatggtgttgaaatttaatttactgaaaacccggatttgtatttgttttcggctgatgagtgatgtcttattcctcttatggtggctcaaatctgagcggtgattgcgcttggttttacggtgcggctttttggcgtttgacgtttgacaatttgaagtaatgcttcttgctaattgtaattttttttattgtttctatgatatactgagacatctttttgttggtaacctatatacatttggaattatgtaaggtttttttttttaaattctgacgtagtgtttggccat

SEQ ID NO: 4937 - DNA, 312 bp, Gossypium hirsutum
  Clone ID: LIB3149-016-Q1-K1-F12
gattgtgcatggtttaacggtgcggctttttggcgtttgatgtttgacaatttgaagtaatgcttcttgctaattgtaattttttttattgtttctatgatatagtgaggcatctttttgttggtaacctattaaaaaaaaaaaaaaaaaaaaaaaaaaaaaaaaaaaaaaaaaaaaaaaaaaaaaaaaaaaaaaaaaaaaaaaaaaaaaaaaaaaaaaaaaaaaaaaaaaaaaaaaaaaaaaaaaagggggcggcccttttaaaggacccaattttacttccccgggcttgcaaggtattagttttttttt

SEQ ID NO: 4938 - DNA, 951 bp, Gossypium hirsutum
  Clone ID: GOSHI-09MAY01-C56761_1
ctctacgacccctacaagtgccccttcatcgagggtgaattcgactgccaaaaatatggtcgacctgataacacgtatctgaaataccgatggcaacccttctcctgcagtctccccaggttcaatgggctgtatttcttgaggaaatggagaggaaagaagatcatgttcgtgggtgactcactcagcttgaatcaatatcagtctttgacatgtatgattcaggcctgggttgcaaattcccagatttcatacatcaaacgagatggccttacttcagttacctttctgggttatgatgtgaatataatgctgtatagaacgccgtaccgggttgacatagtgaaccagaagtatggaagagtgttgaagctggactcaatcaggggcggtgattcatggaaaggagtggacatgctgatctttaacacgtggcattggtggacccacaccggaagaacccaaccatttgattacatagaagacggtgggaaaacgtggaaagacatgaaccgtatggttgctttttacaaaggattaacaacgtgggctagatgggtgaaccgcaatgtggatcctttgaaaaccaaggtttttttccagggcatttctccaacccattatgagggaaaggattggaacaagccaacagagtcctgctcgggacagacacaaccattcttcgggatgagatacccaggaggcacacccatggcttgggttgttgtgaagaaggtcctgagtaggattaagaaaccggtgtttttgctcgacgttaccggactctctcagtaccgaaaagatgcacacccgtcggcatacagaggcatggacggcgggactgactgtagccattggtgccttccaggtgtgccagatacttggaacagtttactttatgcagctgttttttagtgaatttaggcaggaagatggaaaaccatttgtttt

SEQ ID NO: 4939 - DNA, 474 bp, Gossypium hirsutum
  Clone ID: uC-gsronu33B157f06b1
ggaaaactcggaaagacatgaaccgtatggttgctttttacaaaggattaacaacgtgggctagatgggtgaaccgcaatgtggatcctttgaaaaccaaggtttttttcacagggcctttcttcaacccattatgagggaagggatcggaacatgccagcagagtactgctcctgacagacatccccattcgtcgggatgagaaacgctgcaggtacacctatggcttgtgttgcagcttaggtgttccatccgaattggttattgggacgcgctctgtagcggatacctggttgctggtgggatagctgttaataacccagcactgtttgcattgaagacatcagttgtagcctttccttgtgatcaataacattacttttttgccagtcagctgtttattcaccggaagcttttgataatcttactatgtacaggaaccttaatgattgtatagaaattctttgcgcaaac

SEQ ID NO: 4940 - DNA, 667 bp, Gossypium hirsutum
  Clone ID: GOSHI-09MAY01-C56691_1
tttgattgccaattctggtaatgatttgccggttattgatcttacgagaatatcacaagagctcgcctacctggcaagtgatgcagacctagttattttggaaggcatgggtcgcggaatagagactaatctttatgctcagtttaagtgtgattcactcaagatcggaatggtaaaacatcctgaagtagcccagtttctcggaggacggctatactgattgcgtttttaaatacaatgaagttttgggttgataagaagtcattcaagaccatataaaaagtgccactcaggtcagcttggaacattataaagctctcaaattaatttaataatgaaatgtgaaagctagttgcatgcccttccatttttatttctacacaaaatgcatgtaaactaggggattggatgatgaagaaactcatgcaggcttgagctaccatcatatttatattttcatttttataatctgatgaaatttgaataccttgaaggtagagtaacatgtaacaattgattcaattttctttgagcattttttttggatttttttaagtgttcacataagtcaaacttggaatattttcataaaataataatgataaaatttagggacgataatggcgtcagtccctgttatggtttcaaaaaaaaaaaaaaaaataat

SEQ ID NO: 4941 - DNA, 509 bp, Gossypium hirsutum
  Clone ID: GOSHI-09MAY01-C56601_1
tataatttaggaacaagcctaaaaaaatatatttaatttaatttttacatattttcttaagtactaaattaagtgacaccagataaatatttatagcagacgcagtataggttacacggtaaccatccccgattctcttgtcttgagcccctcccctggggaaaaaaaagaagaagaaggaaccaccttgatggctactttggcggcggttgcagctcgtaggatagcgactgtacctcgaacaccacctccctgtcaagccgcttctctcattacccgccggggtcttgccggcgctgcagatcaccatggacccccaaaagttaattgttggcaagaaccaatgaacccagctaattggaaggaagagcattttgttatcgtctctttaactggttgggggctggttttctatggcggatacaagttcttaactaaaggcaaaggcaagaaagaagagaacacagtggaaacggcaaaaaaaatgaggttggagcttttaattttta

SEQ ID NO: 4942 - DNA, 246 bp, Gossypium hirsutum
  Clone ID: GOSHI-09MAY01-C56101_1
ttacaatgtgtttgatctgaagtgttttgagtgaaattgatgagatatgagagtgggagaaggatgaactctgtattttgttgtgtggtgaagtagctaacttctgcaattagtttgtttattcatatgcttagcatatggtaatgtaatctgcagttgcttcttattcacaaggttgaagcaaggtatcgttttctatttatcttgatttaaaattagagttatatcaataaatatagttttttt

SEQ ID NO: 4943 - DNA, 429 bp, Gossypium hirsutum
  Clone ID: GOSHI-09MAY01-C56341_1
aaagcagttgtgcattagtgcaatcagtttagctatcaaaggggattttggggtcccggtcaccccatgctgtaaattttgttggagagtctgctctaggttcctgtgtgctttgcttgcgtttttgtctttattctatatagtgcggaattgccgacataccaagtccagccggcttctagctatgccaggatggccgatgagagggaaattggaagttttcaaacatacattttcgatgatcatcatggttggcatatcatatggattatggaatataaaaatggagacgggagcatttggacggtgatttcaggtgataaaatctatgaaatttttttcatatgttaaatttttattttattatgaatgtaagcatggttgttgaatcgagtcactttttgttgcagtaaaaaaaaaaaaaaaaaa

SEQ ID NO: 4944 - DNA, 563 bp, Gossypium hirsutum
  Clone ID: LIB3829-005-Q6-N6-C4
atattaacaaaatatatattaacaacatatttagggtttgaaattcactgcagatgaaatatatgaagcatcattgagatgtcatacattgaaatccttaatttgcaaataatagatgaaccccgcactgttttatctccaaagaactattccttagtttcgacccataatgaagagggtagaatttaaaggaagcctcattgtaaatgcacttgtttgatgcctggctttcaacgaactcccaaactttgaaatcatcatataagaggaacatgtgatcccacccaaacattcggtcttcatggtttagtactcccaccccccaaagggagaatgaacaagtaaggtcatgactgtcgccattataggattttagatgacattcacatctaatgccaaaattcctaccattataacgctctgggaatgaaacaacgacggaagcaacaaaagatggaaagtttatccaccactctgaaggcaattggatgtttatggaagatcctaagctcttgaaatcaaaccattccgggatttcacttccggggacgcatgtaataaac

SEQ ID NO: 4945 - DNA, 409 bp, Gossypium hirsutum
  Clone ID: LIB3149-004-P1-K1-B1
tcgcagcacttcagtagaggaagtctcaaacattgagaaggttttgaagcaagcagtgttttgtaaatccttgggtttgctatttacgaactgtttcctactggatcaaaaagctgtgcgcaatcctgaaacaccaaagttggaaatgccatttgagcaaatgttcactgtactaaaagattatcatcaggcacccccagaaagtaaaagaagaattaagatgcgtacatgcgtccctggaagtgaaattccggaatggtttgatttcaaaagcttaggatcttccataaacatccaattgccttcagactggtgctctaataataactggataaactttccatgtttcgttgcttccgccgttgcttcattcccagactcttataatggtatggaatttggcattaac

SEQ ID NO: 4946 - DNA, 409 bp, Gossypium hirsutum
  Clone ID: GOSHI-09MAY01-C57911_1
atagtattttgtttttttgttttttacaaaaacatccttcctccatttcagaccaaggaagggaaagcaatgaagccagtctttaccattatatcggcattattacttgccgtcatcgccaccgtcaacagctgccctccgtcagacagggcggacgctgttagcattcagagcagctctccacgaaccatacgtaggaatcttcgattcatggactggcacggattgttgccacaactggtacggcgttagctgcgacagtgagtcacaccgagttgccgacatcagcctccgtggtgagtcccaagaccccattttcgaacgagctcaccggaccgggtatatggccgggtttatctcaccggaaatttgcaagttgacccggctttcaaggattactatagctgat

SEQ ID NO: 4947 - DNA, 473 bp, Gossypium hirsutum
  Clone ID: GOSHI-09MAY01-C57881_1
ctttctctttggattttctgacgcgtttaatgcgtttccttccctctctttaaagctcttcatttccctgacaatccatttcaaagacttttcttttctctctcaatttttgtatttttcaacgtccttggtgttaaaatcagttttattttctctccttttttccagttacttccctcggttctttgttattttctttcatttttgcctctttttttccatacggatcgtttcaattttctttcttgttcttaatccaatttattggttaaacagacaaaacccagattacattgtatttgactcctttcttcctatcaactgcctgaccaagtgacagattttttcattcattaaaaaggatgttaggtttaaagaaatctccattgaagaccgctaagcataattcagttgatcctgcacgtgtggccgcttctcgttccaacccctttgattctgatgacgagtttgac

SEQ ID NO: 4948 - DNA, 390 bp, Gossypium hirsutum
  Clone ID: LIB3272-049-P1-K1-G9
cggacgcgtgggtttttttgtatttttcaacttccttggtgttaaaatcagtttgattttctctccttttttccagattacattgcatttgactcctttcttcctatcaactgcctgaccaagtgacagattttttcattcattaaaaagaatgttaggtttaaagaaatctccattgaagactgctaagcataattcagttgatcctgcgcgtgtggccgcttctcgttccaacccctttgattctgatgacgagtttgacaataagcaaacccttaaaccttcaagaaggacttcttctgaacctactttgagtccaccgaattttggggccaatcctcttgatgacaatgaggggaaagtgaactcttcttcttcatattggcaaag

SEQ ID NO: 4949 - DNA, 628 bp, Gossypium hirsutum
  Clone ID: GOSHI-09MAY01-C57491_1
aaagggcaagggaagcttcctgcattcgcgttggacttatcagtcacaatagcattaaaggaatattcagtttcgtagcctaaagataaagaaatttgtgaaattatcaaattatttccgatttccgatttctgatttgggaatttctcgtttttgatttctgattgtgaatcagagatgggtttaggcttatcagtcttaatagctatgaaggcaacggcatggatgttattatatctcttcttcagtagatttgggttcacagtgttggcaataccattgttgtatgcatcattgatttcatggcttgtttcaattgcttctcacccttcaatcgatcttcccatgcttttgggcaaaaacccagatgggactttcccaattttgtccactatcatgttctccccatatctgtattttaatagagctttttcaatggcgagaaggttccttactggtgacgaaccttactctcaaatatgtgagggtttatatgttggtggttggcctgcttcacctcgtttattgccgcctggtaaccctgccattattgattgcacatctgaattcccaagaataaaggagttcaagggtcattcatatttatgtgttcctacttgggacacaa

SEQ ID NO: 4950 - DNA, 652 bp, Gossypium hirsutum
  Clone ID: AW187937.2
ggcatatggagaatgatgcaaccactactcgtagaagatcggaggtttcaagctcaacattcaatttcactcaatttcaatggtatcttagtcaaattgatacaaatgcttgccaagaggatctttggtttaattcagttagtattcttgaatctgattcggacgatgatttcgtcaacattcatggagtatgcacatacaaggggaagatttagtcatcaacttaagggaactagatataagggcaatgaattgaaagatttagcgatccaccaagaatgagatacatgcatctctctatgtggatgggtaacctatatctttgatttgaggcatagtttgatgacagcataacttattgctaaagttatacagccacgttgtttgcatgctgaggactagttttgacgtttaagatttcagaattgagatggatttccagcttggaggatgtatagagcctggagaaggttatgataaataatgtgcttgttgttgcacttatattaaatcttgtacccttttttgcaaaattgttgtcttttgaaatatctttaagattaaggaactatactaaatgcggtcacaaaacttatgtaattctaatatagaatgtaaacaattttcttatgtaaaaaaaaaaaaaaaaaaa

SEQ ID NO: 4951 - DNA, 365 bp, Gossypium hirsutum
  unsure (1)..(365): unsure at all n locations
  Clone ID: LIB3149-034-Q1-K1-G4
gcaaccactactcgtagaagatcggaggtctcgagctcaacattcaatttcactcaatttcagtggcatcttagtcaaattgatacaaatgcttgccaagaggatctttggtttgattcagttagtattcttgaatccgattcggacgatgatttcctcagcattcatggagatggttttccatcagtgagcaatgcaattgggaatatatcaagtgggcagctgcttcagtatgaaagttcgacgtgcttcatggacggcaagtgcaaaaacgaagaataccatgaaggttatttaaagacagatggaggtaaaatgagcanagatgaacctaaaggaacaagatcgatgtctcacattagtag

SEQ ID NO: 4952 - DNA, 396 bp, Gossypium hirsutum
  Clone ID: GOSHI-09MAY01-C57181_1
gtgagcatgcaggtattgactttgttaggctgccatgcaagcatttctactgctggaaatgcatggaaacttattctaatatgcatatctctgacgccaccataaccaagctgcaatgccctgaagctaaatgtggtggtatggtccctcctgctttattgaaacagttgcttggcgatgaagggtatgaacgatgggaatcccttatgctacagaaaacacttgaatcaatgtcagatgttgcatattgcccaaggtgtgaaacaccttgtatagaggatgaagagcaacatgcacaatgctccaagtgcttctttagcttttgtaccctttgtagggagcgccgtcatgttggcatagcttgtatgacaccagaaattaagcttcgtgtcctgc

SEQ ID NO: 4953 - DNA, 441 bp, Gossypium hirsutum
  Clone ID: GOSHI-09MAY01-C57141_1
tccgatttgttggaggacttgactcagatgttagtgatgatgatcttaggcaacctttttcccagtttggtgaggtcatctccgtaaaaataccacccgggaaaggatgtgggtttgtgcaatttgcaaacagaacgaatgctgaggaagcaatccagagtttgaacgggatgaccataggccagcagactgttcgtctttcttggggtcgtactataggaaacaagcagcagtggaatggaggacatcattgagggcaaggcgatggtggttatggctacggctatgctgcagcaccaaatcaggatccaaacacgtatactggggctgctgctactggttcttcttaagaggggtgcatgacaatcatgaatggcttgtaatctgaacttgcaggacaagttttcaagttaatcagattcattaattaagtaggatggg

SEQ ID NO: 4954 - DNA, 437 bp, Gossypium hirsutum
  Clone ID: GOSHI-09MAY01-C57171_1
cctagacctcttccctcatttaaccgatcctcaaaagaccaatccctagccgccgtactatcgccacaaacagtggccgacggtgaataaatctctccctttctaacctcatttagttcaagatctagcaccttcaatcacaaagcataaaaaagaaagcctcaacctctgttggatttggttttaatggaggaaaaactccgacggtataccaaagcctcaacctctgttggatttggttttaacggaggaaaaactctgacggtataccaatcagttcaggttcgattgacgaggagatggtcatacggaggtgcacgtggtggcgcgcatgaaggtcttacggcactggtctagctagggttcgctaaaatgtttttaggttttgggctgaaattttgggttagggttagattagtttaataatcgggctttgg

SEQ ID NO: 4955 - DNA, 708 bp, Gossypium hirsutum
  Clone ID: GOSHI-09MAY01-C57301_1
caatggcagagatggtaagcagtgggtttcaagaaactactctactgaacatgcaatgcatcagaagatgattggttgcatgggtgataatggagcagaatccggctctattggtgcaatagcatatggagatttgcagtctttgagtttgtcaatgagccctggttcacaatcaagctgtgtgactggttcacagcaaatctcaccttctggaactgactatgctgcagccctggaaaccaagaaaagagggcctgagaaggtagatcagaagcaaattgcccataggaaatccattgatacctttggtcaaagaacttctcaatatagaggtgtcacaagacatagatggacgggtagatatgaagcccatctatgggacaacagttgcaagaaggaaggacagagcaggaaaggaagacaagtttatttagggggttatgacatggaggagaaagctgcaagagcatatgatctagctgcactcaagtattggggaccctccactcacatcaatttcccattggagaattaccaaaaagaacttgaagaaatgaagaacatgacaagacaagagtatgttgctcacttgagaaggaaaagcagtggattttcaaggggagcttcaatgtccagaggagtgacaagacatcatcaacatggaagatggcaggctcggataggaagaatcgacaaggaatccataac

SEQ ID NO: 4956 - DNA, 762 bp, Gossypium hirsutum
  Clone ID: GOSHI-09MAY01-C57211_1
tgattattcaacgaaactacatgtgatcctggaagtcctcttaaaggcaatggcacggtcactaaacttggaggagaaccagtttttgcaacaatatggagaccaagcaacaatgcaagcaagatttaacttctatcctatatgtccaagaccagatcaagttcttggggttaaacctcatgcagatggatcagtaatcaccatgctgttgcaagacaaagaagtggaaggtcttcaagtcctgaaagatgatcaatggtttaatgttccaatcatacctcaagctcttcttatcaacgttggagatcaagcagagataatgagcaatgggatattcaagagcccagtacaccgagtggtgacaaactcagagagggagaggattactctagctgttttctgcattccacatcctgatcaagagattcaaccagtggaagagctcatcaatgaaactcatcccagattatacaagaaagtgagattatgtcagtctctactttcaatactaccagcaaggaaggagacctatggaagcagcactgatttgaggttcccccatactacattttcttttggcttgttctcagaagcggcatccaaaacattaagcgatgaaaccagtgtgtaaaattataaggaaataaagaaacttcacattgatattgaggataatttgtagggcaatggatggctccttactaccaattgttaagcccttcaagcaaaatttaaatgatatcatcatcaagtcttcatgtc

SEQ ID NO: 4957 - DNA, 827 bp, Gossypium hirsutum
  Clone ID: GOSHI-09MAY01-C50931_1
ggaggttccattcatcggaactacgatctcctcctccgacaccgactccacatcgtcggcgaagtccaactcccagtgcgccactgttgattagctctcccaggtgttaggaaagagtaccttgcacgagtcatttctcatccacaagccctctcccagtgtgaacacacgctcaccaaactcgggctcaacgtcacgcgtgaagctgtcgatgacaccgccggagccgcggagtacatagcggccaacaaccttcgtgacaccgccgccatagcaagcgcacgcgccgctgaactttatggacttcaaatcctagccgatggtatccaagacgattcgagtaatgtgacgcgcttcgttatgttagctcgggagccaatcatcccgcgcactgaccggccattcaaaacgagcatcgtattcgcgcatgataaagggacgagcgtgcttttcaaagtactatcagcgtttgcgtttaggaatatcagtttgacgaaaatcgaatcccggccacaccgcaataggccgatccggttggtagatgacgccaacgttggaaccgccaagcatttcgagtatatgttctacgtggatttcgaagcgtcgatggcagaggttagagcccaaaacgcgttggccgaggtccaggagttcacttctttcttgagggtattgggcagttacccaatggatatgacgccttggtgcccttccagcggagattaacaaaacctatgaaaggtaaaaataaaaaaagggaatggtttgcacaaaaggatattgtgaaatcaattttatttacccttatttttttgggatcatgagaa

SEQ ID NO: 4958 - DNA, 609 bp, Gossypium hirsutum
  Clone ID: GOSHI-09MAY01-C50811_1
cccagcgtccgaaatcccatagcagtgaaggatctccgatctctccttgcgaaccccacaccttcgtgtcgccttccattaacaataacattcagtatatggcaatgacaagagaaggaaggacagtaggggctagtaaccctttgtttgtttggtacgaaagatggaaaagtggaaccatcggaaaagatctttcaatctaacggttaaccgttggactaaaagtaatttctgtcatgttccttctctaccttccctaccaaacaaggcctcagcaaattttattttatactgcaactgctacattcttcatgccatctaaagactcgtttagttaattagttgacaaagtttcagaaccaaatgcacttgtttatactagttttctgagaaatacagaaacctgtgtttacaacagaaatccggaactagctcatgctgccaccctctgcaaatatgggattcgaattttggcatctgtaatattttctgttattcgtagactatggtgtcttttgtactaatattacattatatgactcccttaattctgtgttatgttgaaatcaatattgtgaagtttggctttaaaaaaaaaaaaaataatta

SEQ ID NO: 4959 - DNA, 844 bp, Gossypium hirsutum
  Clone ID: GOSHI-09MAY01-C50821_1
ccatttttcatgtcatccaaatcccactgcaacggtgagagtgagagtgaaagagaaagcttaggttccacgctgctaaattataagcgaaaatggtgaatttcatgctgaagatctctgccgacctcgaaaacctcactaacctccagcctcagggcggctgtgacgatccttcctttccctatctcttcaagctgaagtgtgggaggtgtggagagttgagtcagaaggaaacatgtgtgagtttgggcgatactgttcctcttctacaaggcaagggaaccaccaatcttgttcagaagtgcaaattttgtatgagggaaggaactgtaacaatgatcccaggcaaaggtcgaccgctgactcaggaagactgtgaaggcggaaaatttgcacctttgatgctttttgactgcaggggttatgagcctgtagggtttgtatttggcgttggctggaaggttgaatctctggaaggaactaaatttgaaggtattgacttatctggagacgacttctctgaatatgatgagaagggagagtgccctgtgatgatatccaacctccgttctacttttgaaccggtgaagtagagtaatactgcacactgttttagtaaataaaaactgacaggtcaccatgaagtgaggtcgaaaccattgaccggaatacatgttggcattaagctattatatcctaaggtggtctgatgtgaaacattacagtttggtgcatgtccgtggatacactggcaatggttttactgattagtgaatcacgttatgctgtacttttatggttttctcagttttcagaatgattgcactaggtgcaatcacttttc

SEQ ID NO: 4960 - DNA, 616 bp, Gossypium hirsutum
  Clone ID: GOSHI-09MAY01-C50761_1
gaagctgatagcatgaggcttcaaaaattagctgcccaggctaaagctttccgcacaaatgatgatgatgacgaggatgactctgatgatgactttagtgacgatgaagaactacagtcaccaatcgatgaagttgacccgtttattttctttgtcgatattgtcaaggctatgcaagctgcggatcctatgaggttgcagaaccttacacagactctggatttccattatcaagctcttgcaaatggtgtagctcaacatgctgaacagaggagagcggagatcgaaaaggaacaaatggagaaggcatcagtcgctgccgctccaccatcatgagttcagtttcgaactcgatgttcatccataattttcattcattcagaaatggttattttatgaaaccaagatttgtttccacttgcagtccattcaagtcattcattggttcatacggtcttgaaggtgatcaaaaccccaaaaaggtcaaggttcaaatccatcgagattttttgtgtataaagtactcttcatccgcaaaacacggggttagggaactccgagtttgccagttttggctagtctggtgagtccggcccaactcatccatcaagttctg

SEQ ID NO: 4961 - DNA, 280 bp, Gossypium hirsutum
  Clone ID: GOSHI-09MAY01-C50011_1
tcggcaagccttccgcaaggcgtccgtttagatcgcgagcgggccgcccttttttttttttttgggtttttttttttttttttttttttaaaaaataaaatggactttttttatccttccccataaatgaaaagcttattagtaagaggaagggtaatccttacatttcgtttcgtaaaacttgtaccaacatcaaactttaagctgattaaaactgataaatttagactaagaaagtggtctttgatgggcagagtgaatagagagaaggaggaaaaga

SEQ ID NO: 4962 - DNA, 632 bp, Gossypium hirsutum
  Clone ID: GOSHI-09MAY01-C50021_1
gatttttgtgtgtttttatgggggtttttcttctttcattatctggaaaaggcgaacgatagtattgggattgccaaagagtcactgaattgattggcaaaactccattggtatatcttaacaaagtggtggatggttgtgttgctcgcattgctgctaagcttgaaatcatggaaccctgttctagtgtcaaagacaggattggttatagcatgatcttagatgctgagaaaaaggatcttattacccctggaaagagtgtcctcatcgaacctacaagcggaaacactgggatagggttagcgtttatggctgccgcaaagcaatacaggcttatcattacgatgcctgcttcgatgagtctcgaaagaaggatcattctccgagcatttggagctgagttggttctcaccgatcctgccaagggcatgaaaggtgctgtacaaaaagcagaggagatattagccaaaacacctaatgcatacatgctgcagcagtttgaaaaccctgcaaacccgaagatccactacgagactactggacctgagatatggaaaggcacgggaggtaaaatcgatgcacttgtttcaggcataggtaccggtggtaccataacaggtgcaggcaaatat

SEQ ID NO: 4963 - DNA, 748 bp, Gossypium hirsutum
  Clone ID: GOSHI-09MAY01-C50391_1
agatctcctatgctgcggcagagtacaacgaatggcctttcttccgggtaacgatcgatttggttgaaatggtcttcgcaaaaggagatcccgggatcgccgccttatatgataatctccttgtttctcaagaactatggtcattcggagagcggttgaggactaactatgaagaaactaaaagccttctcctacaaattgctgggcacaaggatcttctcgaaggtgatccgtacttgaagcaaagactacggctccgagattcatacataacaacactaaatgtctgccaagcctacacactcaaacgtatccgtgacccgagctacgatgtcaagttccgtccacatatctccaaagagatcatggaatcaaacaaatccgcggatgaactcgtgaaactaaacccgacgagtgaatacgcccccggtttagaagacaccctcatcttgaccatgaagggtattgctgccggcttgcaaaacacgggttaaaccccacttcggctaactcttaagtcgatttagtcccgagaataagaattacacacattgacgacgggttaaaaaatgtggatgatgctatttaaattcctagttacagtgtttattgttgcaccaaaacttattatattatatgctttttaaatattatgtaagcaatctggccaatatatatataatgtaagcaagtcttggtttggttctaattatagccacttatgtggcaatacattcacccaactatt

SEQ ID NO: 4964 - DNA, 664 bp, Gossypium hirsutum
  Clone ID: GOSHI-09MAY01-C50361_1
tcctcattcccctattttgaggtgccagaaccaaatattgttgaggtgaacactgtgaagaaccacgaaaaaacaggcgatgttcccatggggactgatattgagcctcgccatcgccacagcctatggacaggcctacgaaaatgtaaagccacttgctatggtggaaaaggtgacccgactccacttttactaccacgatattcccgttggaaatattgctactacaacctagatagctcacgcttacaccaccgataatttcttttccccgtccccatttggaagcttgtctgcaatgaatgatcccctcactgtagggccacatctaacatccacggtcattggcaacgcccaagggacgtacatagcattaagtcacgaccctgccaagttcactgcagtggttcatgctgattttggatttaccactggcaggttcaatgggagctccttcaggttgttctcacgatatccccccacagattatgttcctagccccgacaccattcgtgaaatggcaatagtgggagggagaggtgcgtttaggatggctaaagggtttgctatattgcgggccacttcttcgaatgccacgacacggaatgctagtctcgagttcaatgttactctgtatcattactaaacccaatcgcagaatact

SEQ ID NO: 4965 - DNA, 856 bp, Gossypium hirsutum
  Clone ID: GOSHI-09MAY01-C50281_1
gcagacagcattgcaaagtccgatgatgaggctgttgctcctgagctgagagcatttgttcaagaacactggtcggaggcagctttcttggatggattaaagcaagggcaacaacattacatgaagctgatgaggattttgaagaggggggaatctccaatttgcttaagggatctgccagctcctttgagggttgtaattgcatacatgccactgtacagggaatgtgttgaggtgggtggtcgtctgttatcgcaaaggctgagggggcagcttgttgaagctgttcgaatgcttggaggtgggtctttagaagaagtaagtcaagccggagagcttctagctactttggagcatcaccttcctccatttttggttcgtgctcccagtgttggttagacctcttggattttcgcatgcccttgaccctatattatcccatgtgccatacgtaataatatcattttagcagttagtacgtcacaaagcttctaagtttgtcaaatttccttccatcgtgtgatttgcagcgcttcttctatggcacgtatatcatatagtaggtatagatatgttgttcatctataatgcaagacagagagcaactattttcgcaaaaagggttgatataaatatatactatgatgggattgtattattatcgttatatatgtaatcctaaagtactgtaatgtactgatatctccacctccccaagagtttttgtgaaccagaaataaaatcctcttttccccagtccaggtgtagggggggggggggggggggggggggggggggggggggggggcggccgctcctaagaagcttcccaaagccttacgtagcgcggtggcca

SEQ ID NO: 4966 - DNA, 910 bp, Gossypium hirsutum
  Clone ID: GOSHI-09MAY01-C51961_2
ataaaaaatgcatgtaaactagaatgcgtgtcagcgagggcgcgctcttggtgccacctttctcctcccttcctaacagcttctatttctctctcaaaagactcagttaggatcgcaagctgaacctttaattatggttatgcagtatgtgggagtgtgattattaagaagaagctcccttgattaataatggctggttttataatgcttttccccaagatggtaaaggcagtagtttccttcaacgtgaatatcttctggaaagcagtactttggactgttgctattgcatctcttcctgtacgagtgttgactgccttgcagagggaaaggatgctggaacagcatctacatgagattcagtttgagttggagactcttgtttgggacaggaaggagcttgaggaccatctccaagcagctgttagagaaagcagaattatggagtcaatgttaattgaacttgaaggggaacatgacaaggctattgccaggattgaactattagagggtgagttgcaggatttaaaggatgaaaaccttcggctgaaagaagttcaaggtaaagcggcaagcagttatagaggtcatgatgcgacaaataaagaccaaagtctgaataccgttgatgataatcatgtcgttccctacagtattgcatcatgggtttccaattataaggggagtggcatctccttccaggagctgatggtgaacagagaagtatgggaaggtaagagcaagagtactactgaaatgatcaatttcttaaaagcaggccctgcaccaagcggatccgtggaagtattttcaccccgtgttcaaaatttggaagttgacactgttatcgaacaacgaaaagaggttgcactttcacagacactttttagtgcaatattatcactcttgg

SEQ ID NO: 4967 - DNA, 1150 bp, Gossypium hirsutum
  Clone ID: GOSHI-09MAY01-C51961_1
ggtaaaggcagtagtttccttcaacgtgaatatcttctggaaagcagtactttggactgttgctattgcatctcttcctgtacgagtgttgactgccttgcagagggaaaggatgctggaacagcatctacatgagattcagtttgagttggagactcttgtttgggacaggaaggagcttgaggaccatctccaagcagctgttagagaaagcagaattatggagtcaatgttaattgaacttgaaggggaacatgacaaggctattgccaggattgaactattagaggttgcaggatttaaaggatgaaaaccttcggctgaaagaagttcaagtattgcatcatgggtttccaattataaggggagtggcatctccttccaggagctgatggtgaacagagaagtatgggaaggtaagagcaagagtactactgaaatgatcaatttcttaaaagcaggccctgcaccaagcggatccgtggaagtattttcacccggtgttcaaaatttggaagttgacactgttatcgaacaacggaaagaggttgcactttcacagacactttttagtgcaatattatcactcttggttggaatgattgtctgggaagctgaagatccttgcatgcctcttgtggtggctctctttactgttgttggcatgtcacttcaaagtgtggttcagtttttcttcagtataaagaacaaacctgcttctgatgcagttgccctattgagtttcaattggttcatagttgggacactcagttatccagcactgccaaaggttacccgtatgctggcaccactgaccttgagcctcgtggacagaatagcaagctggcttggtatctcattcaactagcttttatatcccatggagtacccattgagatgcatatatgtgtgttttccatagattgtaaggtaaaggtttttatcatattttctttcttgtttctgttttttgttccggatttgacctcaacatttcgacaagtttgtattaccatgtaaacttgtatgaatatgtcatggtggacagggcagagttgtataaggaaaatagcttctttttttttaaatacagcactagtttgttttgttttgttttgttttcttctccccttataactccaatttctcc

SEQ ID NO: 4968 - DNA, 394 bp, Gossypium hirsutum
  Clone ID: LIB3146-036-P1-K1-H5
gagagagaagatagaaagattgagcgtgagttacgtcgccgtcgtgctcaagctcaggctggatatgataaggcgaagaagcacgagcaatcatacttcagacgaaaacctggaggcatgcctggtgggtttccaggtggaatgcctgggggttttcctggaggtatgcccggaggtatgcctggaggtatgcctggaggcatgccgactggcatgcctgatggcatgccgggtggcatgcctggtggcataccataagggatgcctggaaatgctgaatattagaagatattgcatgatcccgaattgttggcgagacttagtgagccagaaacaatgcgtgttattcaagacgtgatgtgcactcgtgctagacgtgcaaagcattaaacaa

SEQ ID NO: 4969 - DNA, 390 bp, Gossypium hirsutum
  Clone ID: LIB3149-053-Q1-K1-C5
agattgagcgtgagagacgtcgtcgttttgctcaagctcaggctgaatatgagaaggcgaagaagcaggagcaatcatcctccagtcgaaaacctggaggcatgcctggtgggtttccaggtggaatgcctgggggttttcctggaggtatgcccggaggtatgcctggaggtatgcctggaggcatgccgggtggcatgcctggtggcatgccgggtggcatgcctggtggcatgccgggtggcatgcctggaaatgttgattttagcaagatattgagtgatcccgaattgatggcagcatttagtgatccagaagtcatggctgctcttcaagatgtaatgaagaatcctgctaatcttgcaaagcatcaagcaaatcccaaggtgg

SEQ ID NO: 4970 - DNA, 661 bp, Gossypium hirsutum
  Clone ID: GOSHI-09MAY01-C51891_1
acgggttggtacaagaagatgggagaaagaatatggagtccttggttcattaaattcattcattctcgtggcccgcgtccgatctacacaaaatttccagatgagaaatcacttagcgtctcccacagggatgctggtgtgagctatggaaaaacagctgggccagattctcaactattagatgaaaattctcttgattctgattttccggaaatgaaatctttgagtactatgaagaagtatgatttctgtttcagagaagtagtttctggaagaattgtatggtccttgaatgatcttggatctattcttccctctgtgcagaaaaaggaagctgttctgcttgtcagcctatttggggtgtcggagacagttactagaaaccttctttgccattttgagaggctaaatatttggaattacattttcatcggtcctgcaactgactttctgtttcatcttgctcaagggggacatcctgtgattgatgcagatggatttctcgaagatatcaaatcattcaaatcactgagaattcaagagtcaaatgctaggcttatcaaagagattctgttgaaggcttatgttgtcaaaaaggcttagaattgggttataatacttgcgtggtggatggaacatggcttttattgataatgatttt

SEQ ID NO: 4971 - DNA, 766 bp, Gossypium hirsutum
  Clone ID: GOSHI-09MAY01-C51811_1
cacccacctcctttttcccttcctcaaatgcttctctgctctttccctcccaaacaaatccggtccgtcactctccaccccaatcaaatggctgatcctgaatcccccactgctaaggactctgccgcaccaaccacggagccccaccacacccaaacccaagtagacgacactgccgccaaactcagcaacctcacctttaaaatttggccccccacccaacgaactcgtgacgccgtcctcaaccgtctcgtcgagacgctatcctccgaatccgtcctttccaaacgctatggaaccatcccaaaggaggaggcttccgctgcggccaagttgatcgaggaggaggctttctcggtcgccggcgcatccttctccaccgacgaggacggcatcgagatcctccaggtgtattccaaggaaatcagcaagcgtatgctcgacactgtcaaagcccgagctgctgctgccactgactccactccttcaggttcggcggaagtagactcgaataacgtgggaactgcggttggtgaggaggattcgtcctcgtccgtcaaggctgaggattgagtttgagtattcttgtttctcacattgtctctttagggttctttttttgcccagcttgataattggtattgctagggttttagtagatctgtttctactgactataaatattgcgggatgcttaattgcttatataccatgataataatatctgtaatggtatttatcaatatgttgtggccttttttttgtt

SEQ ID NO: 4972 - DNA, 813 bp, Gossypium hirsutum
  Clone ID: GOSHI-09MAY01-C51831_1
tttagtttctgcatcatcatatccacttcactgtgttgctacactgtctatacactgaattactggtatggaataacatgctttgatgcgaaatttccaatatacaatcatgataaattgtattaatcatcacatcctgctcagcaaaatgtattttgcctaaaacaagtaaaaaagatgtgcacatgtataattgtgagaagttttacttgatgttcccacatgacctagcaaatttttacttttctcatggaatgggtattaaggtgacaatcaaaacacacaataatgaaccttaaatgatggtcatgtgtaggttagatattcgtatgcttattattgctgtgaacaaagaaactggtcctggcaggtttgtcagttgatggagatttacaaggagttgaacgtctttatggtgctatttctgctcatatgtggcctggaatggttctgaaatctggtgatatgataactgaaccttggcttcctgagaaagaagattcatcagaggaagagcctggttatcagtttgaatatgaagtgttatctgcaggttcagctgaaccaggggatgacattgttgaagaatggatttctgcaagtccggctaacacattcctggatagagggaaatcagttgatgtgggaaattctggttcagattgtgttcaaggaaacataaccagatgcgaaaaggacgagtcacatacctttcccagaggttctgctttaggggagaaaattgacagaatggaacccaatgctgaagaacctggtcgagcttcagcttcagaagtagatgatggcccccat

SEQ ID NO: 4973 - DNA, 278 bp, Gossypium hirsutum
  Clone ID: uC-gsronu33B074e06b1
atcagtttaatatgaagtgttatctgcaggttcagctgaaccaggggatgacattgttgaagaatggatttctgcaagtccggctaacacattcctggatagagggaaatcagatgttgtactctccattcttctttcatattcttttcttcctctatctctcttttttcctatctctctctttttcttttttcctcactctaccctctttttatttcttcttctctctctctcttttctcttccccttctccatcctccttttattttatcttatct

SEQ ID NO: 4974 - DNA, 563 bp, Gossypium hirsutum
  Clone ID: GOSHI-09MAY01-C51541_1
ttcttggaggggcttgagaacattctgaagggtggggaggctgataaggaaatggggatgaacggtggaatcaatctatatgcacaaatgatagatgagtgcgatgggttggataaaattgaaaacctgcaaactcatgacaaccatgagatatacgagaaggctgtgaagatcttggagagatactgggctgaagaggaagaagatgaacagaatatccaagatggtgggaatgaaaatcagcaaggctttaattgtggggtgaaccagcagccaagtgttccacctggtggcttcaaatttggttgaagtgtttttagtttgggaattggggccctagttttgtaggtctactacattggtcgcaatgaaatttttaaaagacttgttttttatgtttttgcaatttggtgggtgggtgccaaggggtcagggtttttgttctggcgcataggcttttgctgtgtctggttttggtttattttggaatgtgttgaaagggtttaaactttgatttgtatttctatatttacataggaaaaatattccttgtggttgtggtc

SEQ ID NO: 4975 - DNA, 678 bp, Gossypium hirsutum
  Clone ID: GOSHI-09MAY01-C51471_1
cttccatctcttccctttccttttccccttcgccgccccaccttttcgccaccgcctactccacttccgtttccctcttctccccgctctccctctccgacggcgatgtttcaccttgcctccacaatctcctccttctccgacgtcgtttcttctattgccttccgtaacgacggcctcctcttagccgcttccgatctctccggtctcatccaggtcttcgatgtcaaaacccggaccccgcttcgtcgcctccggtctcatacccggccggttcggttcgttaagtacccggttctggataagctccatttgctatctggtggtgacgatgcggtcgttaagttctgggacgttgctggggagagcttggtattggacttgatgggtcataaggattacgtacggtgcagtgattgtagtccggtaagtcctgatttgtttgttactggttcttatgatcatactgttaaggtttgggatgttagggtagagaattcgaggtcggttttggaagtgaatcatgggaaaccagtggaagatgtgatttatttgccttctggtggattgattgcaactgctggtgggaattcagtgaagatatgggatttgattgggggagggagaatggtttattcaatggaaagtcataataaaactgttacatcgatttgtgta

SEQ ID NO: 4976 - DNA, 1095 bp, Gossypium hirsutum
  Clone ID: GOSHI-09MAY01-C51411_1
gcgttcgcccagcgtccgggtgagcataaagcagaagaagggaatgctgagaaaaaaaaaaaaccgagcggtgaatgaaattaagttgaaagctaatgaggtcaaagatggaggcaatgataagcatttgaagatatctcaagattcagatagcggcgaaggtacgatgcggaatagcaaaggtgggaagaaaaataagaaaagaaagaggaatcaagtccctcgcctccggtttgaagcaacggctgataagttagctagcagttctaaacggcgggagcgcaagaaaaagtattttgaagcaaagaagaaaaaacataagagtgctagaacagaagagaatctagagtttcctggaagagagcacgtaaaatttggagatgtggttgaagctccaccaaagttggttacagtacccaagggatcaacggccttacttgatgcttcaaaggagaggcttaggttacaggctattgaggcttataggaatcgcaaaggatggagctcaagaccaggggggcctcaactacctccagtgactgcatgaaatttcattcaacactgtttctacttcaagtgtatgcatccattgacattgtccatttgtttaagctggcttaactataagctgtccacttctatgagtgatcatcctgctggtgattctgagcttcaattttgttaaagatgatatgttttttgatttagttttattttttttactttattattttctgtctttatttatttttttactatttttttaaatttttatagttttattttcttgttctttttttttattttatattttttttcttcattattttattattttttattatttttttttcatttatttgatatatacttcttttattttttatacattttttctactagtcttatctgtctattatttgatcttttttatatattcttttttttttttttttattatcttatctattttttttttttgtctttttatttttttttatcttatttcctattaattttatttttttttttttatgttatctatatctattttgctatttttattttattatatattttttcttttttctattt

SEQ ID NO: 4977 - DNA, 412 bp, Gossypium hirsutum
  Clone ID: GOSHI-09MAY01-C51191_1
gttcttgacaatttggacgaaaaccagcacacatttcttttacttaagcgccttgctcttgagggggacgtaagctgccattccgcacctttttgtgtttattgtatataagataagcatgtgcacacgcacgcacgcgtgcacacacacacgttgcatgtcacaacaagaagtcgcattttgaacaagaaagagcaacctattcatagcatcaaaattgcatttttataacttctgtatcatccgtataagaacaaaccaagatggggaatgaaaagagaaatctgatgatgatatagggtctgctctgcagtttgggttaaaacgatcttttgacagtaacacacgtgtttgaaatttcatccgctttactttgaaactgacatgccagtgtgctattttttttctgatg

SEQ ID NO: 4978 - DNA, 820 bp, Gossypium hirsutum
  Clone ID: GOSHI-09MAY01-C51181_1
gaaaaacacacacttgacattgtgttggcttaccaaaatcaaaatggcacttcctttagggatgatttctgcactagtggtgttcctagtggctcttactagggttcaactctcaaattgccaacatctcaatgccaaaatctcctgcttcgactgccctcataattatgacttctcaggcatccaagttgcagtgaagtgtgagaaagtgaagaaactagccactgcgaccactgaagaaaatggttctttcaaggtccagcttccatcaggcatctcaaacactaactgccttgccaagctcctaggtggaccaaaccagctatacagcaagaagaaaaacctggtgtccaaggttgtcaaggtgggacatcaacccaacacttacaccctctccactccactggctttctccacttcatgcccttcggcatccattgatgctaaatcatgtggagctcaaaaggggatcggttcatccaagaccgtcgatctgccactacccccggagtggggacttgcaccatccagctattatgttcctttcttccccatcatcggtatcccttgatgactatctcagtggattagagacagtgtaatagcagtaattaatgtcataagtatttgtgagaaagacgtgtgatatatatatttatatagttcttcgctgctatatatataataatatagtttgtgagtgcagactcgtaagattttatgtaatttctattaattatgtgtattaattaaaagtggagagtttgatgtaaaaaaaaaaaaaaaaaaaaaaaaaaaaaaaaaaaataaatttggggcg

SEQ ID NO: 4979 - DNA, 841 bp, Gossypium hirsutum
  Clone ID: GOSHI-09MAY01-C51171_1
ctggtctgtggcttttgcatgcctcaattcattgcctttgggtttgcaaatgaggaagccttgttggtgaaaagaaagacacaaaacaaaggagcttggtcttaattagaagaccagaagctcacggattacattctaaaacatggtgaagggctgcttcgttgtggaaaaagttgtcgactgagatgggtaaactacctgcggcctgaccttaaacgaggcaattttggtgaagatgaagaggaccttattatcaaactccatgctctccttggaaataggtggtcactaatagcaggaagattgccaggtaggaccgacaacgaagtgaagaatcactggaatattcacttaagaaagaaacttttgatgatgggaattgacccaaacaatcgtcgttcgcttctatctcctacattaaccaaatccaatgcatccaacgactccagttctgcatgccaaccctttaatccagcaactgcttcggagactatcagcagtacttgtttacccgacctcaatctggatcttaccatcgcccctcccctttcccatcaaaacttggcacttaattaattttaagtctatgatgtgatatttccatcactattctactgcttaattaatttcattctttgatcacaataacacctactatgcttataagccggttagaatatgtttgcgagttagagctcaaaaatcctggctggagtctacttaagtgggatacactgcatgtctagccacgaatctagactatatctctaaaatcgtggcctatcaagaatatacttttcatttcttttcctgctgaaactaccacttgcagttgattatg

SEQ ID NO: 4980 - DNA, 695 bp, Gossypium hirsutum
  Clone ID: GOSHI-09MAY01-C51131_1
gaaaggctccaaaattgttgaatcccaagcgaggataacatacctacaaccaataacaagagaggtcctttgagtgcggatttcttcggttcagcttgctatacttttcagcatgggcagtttcgtaagctatatttcgatctaactcgagttgatgctcgtttggacttatcttcactctcatcttttgccaaaagaattttccagagttctagtgcaaacaaatctctatcatcccccagactaaatttgatacgtccacgcgtccgcccacgcgtccgagtgtttcgagtggattcaaagttgctgctcgattctaaagctgggaaactaggccctcatatcgaagatgtcatatacagcttgagctactcgttgaggcttctgcgttccggaaaagttgtagcttggtattctccaaagaggaaggaagggatgatagaattgcgccttttcgaattttaactcatcttctgtcatcctatcattggttttgttcagaatttctttttctaatcatatgattatcctagttagaggctgatgtgaaatctcgcagctgaatttacagcttcatttccctttttttgcccaattcccatgttttgtaggcctttatggagcttcatagttaatcccaaatccaaaccctgcatgttaagtttgtcttctcccttttatattcaacaattgag

SEQ ID NO: 4981 - DNA, 675 bp, Gossypium hirsutum
  Clone ID: GOSHI-09MAY01-C51381_1
ctttgaaattgaattttttttttcaaattatccataaagcaaaaaatcaattgtatttgaaatttgaaatcaaatggcaacttcaaggccttattcatctcattccacggctccatcggcgccggagctgcctccacagtcatacgaccaccaccaccagccgccgccgccgccgccgcagcaccagagctattacggacagtacccgacgccgtctccgccgccttcgtcatcatcaagttatgggccgagtggtggcggatttccagcaggaacatctccagatgttataagaggcgtttcaaatggtagatagggatcgaagtggattcatcgatgaatatgagttgcagcaggcactgtcttcaggttaccagaggtttaatcttaggactataaggctgcttatgttcttgttcaagaatccttatgattcactcagaattggtaagttgatttcttttgtttttttgttttttaactattttcaacataaaattgaagaaattatctgcataaattgagacttgaatcaaagaattaatggtcttaaaatcactgtttaccacaaaactcattgattgaattgaactgccatggtgctattttatttatttgtttattttattgtgcttaaatgcaaagctatcagattcaaatttgagtatgattgca

SEQ ID NO: 4982 - DNA, 414 bp, Gossypium hirsutum
  Clone ID: GOSHI-09MAY01-C51201_1
cggacgcgtgggctgatctgtctcctccactcagccatcgccatatcaagcggcgccttcatgatgttccgtatgaaagaaatctacaccttcacgcacgggatcgaaactgcctccaagctcctcggctccaccccacacgaccaactcctgatccggacctccgattcgttctccggcctgctcttgttcaccatcgggttcttgctcttcatggtctccttcgttgaagacaccgatttccagtccttcttcgccgccggctgcaccttcttgcacgttttcatggccgtgtggaggttttggttcgagaccagagtggaggatttggcttgggattgtattaggcaaacggttggcgatattttattggctctttcttgggtttcctttttggtttactcttggagagaa

SEQ ID NO: 4983 - DNA, 1064 bp, Gossypium hirsutum
  Clone ID: GOSHI-09MAY01-C52991_1
aaagcaggagctatgttgaagaagattcccctttatcagcacattgccaaccttgctggaaataagaccttggtcttgcctgtacctgcattcaatgttatcaatggaggttcccatgcaggcaataaactagcaatgcaggaattcatgattctacctgttggggcatcttctttcaaggaagccatgaagatgggagtagaagtatatcatcacctgaaggctgttataaagaagaagtatggacaagatgctaccaacgtcggtgatgaaggtggctttgctcctaacattcaggaaaataaagagggacttgagctcttgaagacagctatatcaaaagcagggtatactggaaaggttgttattggaatggatgttgctgcttcagaattctatgataacaaggataaaacctatgacttgaatttcaaggaggagacccatgatggatcgcaaaaaatttcaggagacagtttgaagaatgtttacaagtcattcgtgactgattatccaattgtctccattgaagatccatttgatcaggatgattgggagcactatgcaaaaatgacaagtgaaattggtgaacaagtgcagattgttggtgatgatctccttgtcacaaattctaagcgtgtggagaaagcaattaaggagaagacctgcaatgctcttttattgaaggtgaatcaaattggttctgtaactgaaagtattgaagctgtaaaaatgtctaaatctgccggttggggagtcatggcaagccaccgcagtggtgaaaccgaggatactttcatagcagacctttcagttgggttggcaacaggccaaatcaagaccggcgcaccgtgcagatcagaacgtcttgccaagtacaaccagcttctgaggattgaagaagagcttggagctgctgcagtttacgcaggagcaaagatcagagcaccagtagaaccatattgatggtttctttcttatgttgcaatcggcttttcattgtcttttgctctttgccttaaaactagtaaagcacaaagtggatgattttgcaatgttttact

SEQ ID NO: 4984 - DNA, 563 bp, Gossypium hirsutum
  Clone ID: GOSHI-09MAY01-C52971_1
ctagttctagtcgcgacggccgctcgcgcccacgcgtccgcttcttcattcgaccaaacctaagtcctcactcaaccatcgcctcgcctccgtaatcagcaaacggagtcgcacgaaggcctaatcgaccctgttcgaccatgaatccgagggttttgccattcttaagcctcacaatccctatttgagcttcgatttcttcaaagcaaacaaggattcgagggcctttatcacgataagtatcttccctctcctttatttttgtttttttactcctatgataacgaaaatcaaagagataaaagcaaaatgaaaaagaaaaatgatctttcaaattaccacttgaaaacagtcttttattcaccctttttggtaccgatttgtatgcgtaaatatgcgtgtatatttctgccaaaaaaaagatcccatttacatcatttttctggctttttatagctgatttacatcataaataaaataaaaattgtattttcttgctgtcatttattggcctatttttctggtatcatttctggtgatcttctcgcaggctcattggagat

SEQ ID NO: 4985 - DNA, 387 bp, Gossypium hirsutum
  Clone ID: LIB3196-041-P1-M1-E1
atcaacaccaaaacctagcttcctcccgtctcattcggccgaacgaaaaaacccttcaaccaccatttcgcctccgtaatcagcgaacgacatcacacaaaggcctaatcgaccatgttcgatcacgactccgagggttttgccactcttaatccacacaatccctatttgagcttcgatttcttcaaagcaaacaaggattcgagggcttttatcacgataagtatcctccctctccttcatttttgttttttactcatataataacgaaaatcaaagaaataaaagcaaaatgaaaggaaaaatgatatgaaattaccacttaaaaactgctctttattcacactctttagaactgatttgtatgcgaaaatatgcgtgtatctt

SEQ ID NO: 4986 - DNA, 529 bp, Gossypium hirsutum
  Clone ID: GOSHI-09MAY01-C52961_1
ccaatccaatatccatcaatcgattcaactcctatcaatatgccttcccggggtgctgaaaacttagctgctaatgctggtcaaacaaaggaagatgggggcccttcttcatgcacgatatgtttggatgctccatcagaggcagcttgtgtcccctgtggccatgttgccggatgtatgtcatgtttgaccgagatcaaagcgaaaaaatggggctgccctgtttgtcgtgccaagatcgagcaggttataaagctatatcgtgtttgattgaattttgcatctgaaatttgtgtaagctgtaaatgattttccagtgatttctggcgcggtggagaagttatatttcctccttatatttgaaggccatgtgggcgcctgttgagtttttgggtaaaaatatttaaccatatatcttttaaaagaaaatcacatttaatatatagttgcaataaaagagtttgtattttccctaaaaaaaaaaaaaaaaaaaaaaaaaaaaaaaaaaaaaaaaaaaaaagggcggcgg

SEQ ID NO: 4987 - DNA, 401 bp, Gossypium hirsutum
  Clone ID: LIB3827-001-Q1-N6-A12
ggggaaatacaaactcttttattggcacttttttttaaatggattttctttaaaagatttttgttaaattttttacaaaaactaacagggccaatgctcaaataaagggaaataaacttccacgccccgaaatcactgaaaatcatttaccggttacccaaatttcagatgccaaattcaatcaaacacgatttagctttataacctgctcgatcttggcacgacaaacagggcagccccattttttcgctttgatctcgttcaaacatgacatacattcggcaacatggccacaggggacacaagctgcctttggtggggcatccaaacatattgtgcctgaaaaagggcccccatcttcctttgtttgacccgccttagcagctaagttttcagcaccc

SEQ ID NO: 4988 - DNA, 289 bp, Gossypium hirsutum
  Clone ID: GOSHI-09MAY01-C52931_1
ttcttcctttaagtaacaatggagtcgcggttgttgtcacgcgcttccaccatcgccggctggcctcagatcaggccgaagctttcgcgagactctctcagtgtttcgtttgcttcggctaagcctatcggagccgtcggagaaggcgggaacgtgatatgggggagacagctaaggccgtcgctgttgctcgagagctcgctggccaataaacgggagattttgaagacggttctagcttccgcgtcgtcggcggccgggggaggaagcgattccgccgggtgaggga

SEQ ID NO: 4989 - DNA, 429 bp, Gossypium hirsutum
  Clone ID: GOSHI-09MAY01-C52521_1
aaacacagtaacattaccaatggcaaccctgtctagcgtgaacctcgtaaccccaagaaccatagccaatggaccagacgccccaaccctcaaggtcccatgccttaaccggccttggaaaagggtatccccaatgaagctgcgtgtcgggcctgttagagctgcaccggatggaatatcggagaaggtggagaaaagcataaaagaggcacaagagatgtgttcggatgatccggcgagtggcgagtgtgtggcggcttgggacgaagtggaagagctgagtgcggcggctagccacgctagggacaagaagaaagacgatgatcctttggagaattactgtaaagacaacccggagaccgatgagtgtcgtacttatgataattgaaaatgtttggttttttttctagtttcttagattatagttgg

SEQ ID NO: 4990 - DNA, 741 bp, Gossypium hirsutum
  Clone ID: GOSHI-09MAY01-C52471_1
cggacgcgtgggcggacgcgtgggtttgaatcaacctttgctaagcctaaagaagctttactcttctcagttgggatttgcaagatggagagaacgcgtggcttttggcagttgggagatgatcttcggggactagcaaaagtcgcagaggatcacaaatggttgatggctgcatcgaaactggctgaacagacgaggacaaagggtgaacgcatgaacaatctggatctttccaagggtccagctgaaatgaggacaagggataaattcgggttccaggaagacagcaagctcgagaaccttaactttaatgtgttgaacttggactctaaggttggggataatgtaagcaaaagttctttccaaaatggtatgtacaatatgaatgctgtttaccagaaaaataacagtattagccttggaaaccctactggcaacaaatatatgagcaacaatcagagcaacaaagatgtcaacaataacagcagcaccaagaataacaacaatggcaatgagaacagtaatgcaaacaatgccgttgacaaaagattcaagactttgcctgcaactgagacactcccaagaaatgaggtgcttggagggtacatctttgtttgtaacaatgatacgatgcaggaagatttaaagcgccagctatttggcttaccaccaagatacagggactctgttcgggcaattacacctggcttgcctctatttctctataactacactactcat

SEQ ID NO: 4991 - DNA, 619 bp, Gossypium hirsutum
  Clone ID: GOSHI-09MAY01-C52781_1
cgactgcttcgttaacgtgagtactcttcatttttcttgaaacacctgtgtttgacaatccgacactgagccttcatgacgataacggttgtgatgggtcggtacttttggacgataactcgacgtttataggtgagaaaaccgcggttccgaacaataactcggcgagagggttcaacgtcgtcgacaacatcaaagctcggctggagaaagcgtgtcctggagttgtatcctgcgctgatattctcgccattgctgctcgtgattcggttgttcggttagggggtccgtcatggaaggtaaggttgggaagaagggattcgacaagcgctagcagaagtgccgcaaatgcctctattccaccgcccacctctaatctaagcgctcttatttcaagcttctcagctcaaggcctctcaataaaaaaccttgtagcactttctggttcacacaccattggcctcgcccgctgcacatcatttcggtcacacatttacaacgactccaatatagacccctcctttgccaactcgttgcgacggatttgcccgagatgcggcaacgatagtgtgctcgccccttcgaccgtaaacaccaacttgtttgataactatactac

SEQ ID NO: 4992 - DNA, 432 bp, Gossypium hirsutum
  Clone ID: uC-gsflmaxxa014c12b1
ttgtagactgcttagttaacgcgagtactcttcatttttcttgaaacacctgtgtttgacaatccgacactgagccttcatgatgaacagggttgtgatgggtcggtacttttggaccgataactcgacgtttataggtgagaaaactgcggttcctaacaataactctgtgagagggtttaacgtttgtgacaacatcaaagctctgttggagaaagcgtgttctggagttgaattctgcgctgatattctcgccattgctgcttgagattcggatgatcggttaggggggcctgtcatggaacgttatggtctgtaagaagggttttcgcatgctttagtataaattgctcttaatgtcttttatttaccaacaacttcttatttaagagcttttatttaaagcttcttaactcaagggctttcaataaa

SEQ ID NO: 4993 - DNA, 400 bp, Gossypium hirsutum
  unsure (1)..(400): unsure at all n locations
  Clone ID: LIB3493-012-P1-M1-E3
cccacgcgtccgtttgcattaaccaacatggctttgtttcgttcactgttactaattattttgattgttgctgtttcttcatgtcaaaccaatgcccaactctctcctaattactattcatccacttgcccgcaagctttgtctattgtgaaggccgaagttgcctctgctataaagaacgaaactcgcatcggagcttcgttgctgagattacatttccacgactgcttcgttaacggttgtgatgggtcggtacttttggacgataactcgacgtttataggtgagaaaaccgcggttcctaacaataactcggcgagagggttcaacgtcgtcgacaacatcaaagctcggctggagatagcgtgtcctgnagttgtatcctgcgctgatattctcg

SEQ ID NO: 4994 - DNA, 587 bp, Gossypium hirsutum
  Clone ID: GOSHI-09MAY01-C52151_1
tttccgctttcgcgtccggagctctacaaaacagggatgggggaaaccacatttgaaaagttggcaatgacatgttcatgtctctgcacaagcaatggagaagcatttcctggttgggacacacttctgaaagttggctgcaaactcggagaatgcagaattattctgtgtgaagccggtgataggcacagggtgcagaagttgcagctcaattttcccagtgatgatgttgcttttgcactgaaagatagcaaggatctgccatggttggccaagtacttatgattctacaagcctgcaattatatttcaattcttaaacatatagctacaggttttgaaccaattttcattataagatcctccttatatttaaatcacagtccttgcaatgttttagcttatgatctttggaagaggagattgttccaatttgaggcattgttacttttcattatgaaaaatgctgatatgaactgaaacatttttctaattgttatttatatatacattctgaaaatggtttggccaacaaaaatattttttttttttttataaaaataaaaaatttttattttacaatttttt

SEQ ID NO: 4995 - DNA, 438 bp, Gossypium hirsutum
  Clone ID: GOSHI-09MAY01-C52101_1
cggacgcgtgggggctttatagccgaaaagaaattaaaagagaaaaatacaaataatttcctattggctgccattctcgctgctgttttttgtttcctttcgcaggtacaggtgcgtggcttgtgtacgaggctgtactggcgtacaagggttgttgacgtggaggcacgagcggcgttggggctgtacggcggctgagagctgtggcgcaaagagagagaaccctaatggtctaaagttgtaattttttgggcctatcgggcctgtatttgggtcttgggtctttaatcatgtaacttggactgttataagacttgggttttatatttatttattttgtatttattttgggtttcaaaggggccgagcaaattggcctgtttacaacattgatagcaataaatctcttacatgaattatatctacattttcgaattt

SEQ ID NO: 4996 - DNA, 1107 bp, Gossypium hirsutum
  Clone ID: GOSHI-09MAY01-C52271_1
ctttaatcctccttgctatcgaactctaccaagtatgggaccccccaaaggccgtggtggtggtggtgggtttaggggcagaggtgatggggggagagggagaggaaggggtggtggtggtggtggaagaggtggcgataggggaggcaatggcatgaagccccgtggtggtggccgcggtggaggaagaggacgtggtggtggaagaggaggaatgaaaggtgggagcaaggttgtagttgagccccatagacacgagggagtttttgttgccaagggtaaagaagatgctcttgttactaagaatatggttcctggtgaggctgtctacaatgaaaagaggattgctgttcagaatgaagatggaaccaaagttgagtacagggtttggaaccctttccgatccaagttggcagctgcaattcttggtggtgttgataatatatggattaaacccggtgctaaggttctctaccttggagctgcttcgggtaccactgtttctcatgtatccgatgttgttggtcctaatggagtggtttatgctgtggaattttctcacagaagtggtagggatttggtcaacatggctaagaagcgaacgaatgttatacctatcattgaagatgctaggcatcctgctaaatacaggatgctagttggcatggtggatgtgatattttctgatgttgcgcagcctgatcaggcaagaattctggctttgaatgcatcatatttcctgaaggctggaggtcattttgttatttcaatcaaggcaaactgcattgactcaacggtccctgctgaggctgtattccagagtgaagttaagaaattgcaacaggagcagttcaagcctttcgaacaagtcactctcgaaccatttgagcgtgaccatgcatgtgttgttggcggctaccgcatgccaaagaaacagaaagctggtgcagcctaatgtttggagctagcccggcgttttaatcttatggttcatgtcctgatggatgttgggtagagtttgagaaagatagtctaatgtattttcttctttgttggttgtacgagtcaatctaatatcagcttctgttggaatatcaacttatatgg

SEQ ID NO: 4997 - DNA, 698 bp, Gossypium hirsutum
  Clone ID: GOSHI-09MAY01-C52221_1
atcccccgtctctctctgaatctctctcctgaaaagcaaattaggccaaaagaaagccgttctaagaaacgatgtcgtcttcgtcgtcgttcaggaagtcctcgtgcctttcacggagattctcgggatcgagatcattggccaaaacggcagcgctagcaacggtctcgccaacggtgaaccagtcggagatttcttcttcttcgtcgtcgtcgtcgcagcctacgccgctggcggaggcggaggcggaggcggaggaggaagggcaatcgtggtcgacgatgctgccggagttgctacgtgagatcatggagcgcgtggaggcgagtgaagatcggtggcctcagaggcaaaacgtcgtcacatgcgcctgcgtttgtgggaaatggagagaacctatgagagagatcgttagggcttcttcccccggaagccgcaagatcccttttccttctcgtcttaaacggtcagctccggatcgttttccccaccattgtttttatcgagcggtgcagaaagaactcggattctcgcttggtctgtcgcttacgccatccttccggcgagaagggagatttctattggctgccccaagatttccacttggtgtgcacatcgaattatttaggcccttggattgcaaggagttgggctcttttccggtgatgcatttcgtccggaggtgctttttctgatgt

SEQ ID NO: 4998 - DNA, 568 bp, Gossypium hirsutum
  Clone ID: AI732056.1
gaaagccgttctaagaaacgatgtcgtcttcgtcgtcgttcaggaagtcctcgtgcctttcacggagattctcgggatcgagatcattggccaaaacggcagcgctagcaacggtctcgccaacggtgaaccagtcggagatttcttcttcttcgtcgtcgtcgtcgcagcctacgccgctggcggaggcggaggcggaggcggaggaggaagggcaatcgtggtcgacgatgctgccggagttgctaggtgagatcatggagcgcgtggaggcgagtgaagatcggtggcctcagaggcaaaacgtcgtcacatgcgcctgcgtttgtaaaaaatggagagaagctatgagagagatcgttagggcttcttcccccggaagcggcaaaatcacttttccttcatgtcttaaacagcctggtccaagtgattttccaaaccattgtattataaagcggtgcaaaaagaactcaacattctacctttttctctctcttacgccatcctccccgaacaggggaaatttcctttgggcgccagaaaatatccaaatggtgtccatattgac

SEQ ID NO: 4999 - DNA, 479 bp, Gossypium hirsutum
  Clone ID: GOSHI-09MAY01-C53811_1
gtcagcacaagcgatctgactatggtcttcctgaagataaattcatttttgcatgtttgaaccaattgtataaaatggatcctgaaatctttaacacttggtgtaatattcttaagcgtgtaccaaatagtgcactttggctcctcagattcccagctgctggagaaacgagactgcgagcatatgctgctgcacaaggggtacagccagagcaaataattttcacagatgttgcaatgaaacatgaacatatcaggcgcagtgctttagctgatctctgtctcgacacccctttatgcaatgcacatactactggcacggatgtgttatgggctggtttacctatggtgactctaccccttgagaaaatggctacaagggttgctggttcactttgtctcgctactggtttgggggaggagatgattgtgaacagtatgaaggaatatgaagaaagggctgtctcgttggcattaaat

SEQ ID NO: 5000 - DNA, 604 bp, Gossypium hirsutum
  Clone ID: GOSHI-09MAY01-C53491_1
cccggttcgacccagcgttcgccccgcgtccgttcttctctttttttggcctcagaccctgaatttcgattgttaattatcactgttctgcaatggcgtcaggttcgaactggacgccaaagcaaaacaagttgttcgagaacgctttagctatctacgacaaggatacaccagaccggtggcacaagctagccagggctgttggggggaagaccgtggaggaagtgaagttgcattaccagaaccttgtggatgacatcaagcagatagagtctgggcacgtgcctttgcccccttacaagaaagctggaggaacaaaggatacaacaatttcatggacgatgaagaaccaaggatgaggaatctcaggctttagtgaagtatgaaccagaaatagcctgtagaatatcaacctttcaataaaaggaaatgcaaagcagcaaacatataaattattgctcttaatttcgtttacatttcccgctcatatatatatatatgttttttgtgtgcttgaatgtaacaagcagccacaacgttcctatacttgcatgtatcaagtatgaaattatagcattggtgccttgtttttattaatgttacc

SEQ ID NO: 5001 - DNA, 865 bp, Gossypium hirsutum
  Clone ID: GOSHI-09MAY01-C53451_1
ctacaccgtaattatgatttactcctccggcataggctacacatcgtgagggaggtactgttggtggttaaccattgcctcttggcattgcctggtgttgaaaacaggaagtgaaacgtgttttaagccatccccaggcacttgctcaatgtgagatggcacttaccaaaatgggcattgttagagtcagtgctgatgattctgctggtgctgctaagatagttgcttcgagtggaagaagggatatgggtgcaatagcaagtgctagagccgctgcattatacgggcttgacattcttgcagaaaaagtccaggacgaggatgacaatgttaccaggtatttggtactcacaagagaacccataattcctggaactgacaggctttataagaccagcatagtttttactctagaagaaggtcctggcatgctatttaaggctttggctgtgttctccctaaggggtattaatttgtcaaagatagagtctcgaccacaaaaagggcgtcctctaagggtggtcgacgattctaacaaagggagtgccaagtacttcgactatcttttttacatcgactttgaagcttctatggcagaaaaacgtgctcaaaatgctttggaacatttacaggaatatgccagatttctccgagtcctcggttgctatccgatggatgaagttctatagatggattaccccctgccctccaagggagagtacattttgtcaatatatttatttttctgtcaaaccacaagatggtgacggctcaacccccacaggcaatgtacatacaagtcctgctgaaaatggatgaagagtttactggaacatgttgaaagcttactttattaattcaaatt

SEQ ID NO: 5002 - DNA, 318 bp, Gossypium hirsutum
  Clone ID: GOSHI-09MAY01-C53681_1
agatcactcgggcaacggcatcaagtgttcggagcccattgactctgatcttcggatccagcagcgtgagcttttagagtccattgtgcaactgcttcccggccgagaaaagctgcctttcccgatccacttctttgtgttgcctttctccgctgtgcaattttttctgaaaagcctccagtgctttgcaggaacgaggcggagaaaacggatctcgctcatattggagcatgttacggttgatgatctttttggtcctgtcttttcacatatgaatggggagagggctcttcgatctgggccgcgcgtggaggatca

SEQ ID NO: 5003 - DNA, 580 bp, Gossypium hirsutum
  Clone ID: GOSHI-09MAY01-C53181_1
gagatatgaagactcttggcaatggtaatgtgagtgtcatccattctcctcttgagcaactgataatcgtcagcagctgttctaccaaggaccgaagggaaaacctctctagatacgaggaataagaagacgaagaggatctttggaaggaaaatcaagtatgcatgcaggaaggctcttgctgactgtcaaccgaggatccgtggaaggtttgcgaagactgaagaatccaacaactcaaagaggcaatagctgttgattaatcaagcaagtcccaagtaaaacaggaatgaagtagctagattgaatgatgcaatgctaagaaaagaaagttttcgagtagtggtgtcaacttcgacatatataagcctttgtggagatcatcttatgacattaaaatgctaaataaaccataatccagctcctcagaaatagttccatgttatttgctgtaatcatccccactataatggaagtggccagttaggattgtacatagtgtttgttcaataaaatggcatagctgaaatttgtacttgttcatatatgtttttaaaagataagtagtttttaatgttat

SEQ ID NO: 5004 - DNA, 912 bp, Gossypium hirsutum
  Clone ID: GOSHI-09MAY01-C53111_1
gaagtgctcaataaatgttttggccatgacacagttgaggaacctatcgttgctgtggaaagtgaggcatctgcaacaaatgatgcatggtgcaattccacattagagggacttaaagaagcttcaccattgagcttgaaggtgtctttgagatcggtacgagaaggcagatttcaaacccttgaccagtgcttggttcgtgagtatcggatgtcccttcaagggatatcgaagcgaatctccaatgacttctgcgagggtgtcagagcacgagtggtgcacaaagactctgctccaaagtgggaacctccaagcttagaaaaagtgtcggacgatatggtggatcagtactttgcacccctcagtgaatctgagccaaatctggagctccccacaaaacagagagaagcatttaactagttgctatggttagccataagttggaaaaatacatggaatcttattctgctaagaaaagatacattcatctatgatggtcgagaaacggcagtttgcacattattttgtgctttcaaaatttttgcgacttaaaagatgatcaaacatatggctgcaataaatagagcaagaattaataaaaacagattatacaacttgtgcccagttcttcaatcttcaagcaatcttggtcgttatttattcagctttatcggccttgtgagtgctcactaattgcatttgcacgtcctgagaaaccggtgaatgctccccgtattccattgagaaatcaccttttccctttctcagtttccggattcacttcttcagagcatgaagatgaactattagacgaattccctggccccccagacccgattggaaaaaatcgccttcccatgctatcagcagacactggatctataccgctagctatgaaaaggtaaacatccc

SEQ ID NO: 5005 - DNA, 529 bp, Gossypium hirsutum
  Clone ID: GOSHI-09MAY01-C53381_1
tcatgcaacattcctggtcacagaagcactactgatcagatagctatcaaatccagacacccctatctctgcatttacagcctaactgcgtggagtttcagaccatcaaaaagaaatgttgccttgtgtgggaagtaaagcaaccctcctttacagcatccataggaatatttcttttggcaacttttccaatttatctctttttaaacacacaaaaaggccttttgtttttgaagataaatccaatctcctcatccttagctatcctgtgtgaaggttctttccatttctcagtctgcacataatacaagagatggagaaaccttaaattttaaatacccttttgcctggcagcattacttggtgctctttatagaagaagaaagggcaatctagtactaagcattttcatccttgcattgtttttatgctttgtgtgagcacagtaaattgtgcccaggtcaagcatgtggacacacatgaatatttaccatattttatttggattggtttttagttacagtgtatg

SEQ ID NO: 5006 - DNA, 608 bp, Gossypium hirsutum
  Clone ID: GOSHI-09MAY01-C53341_2
gtaaaagggtcgtcagctcccaagccttccattgcttttaagcccaatgatgtacgcaagaccacccaacttccttcagggggcaaacttgctttcagcttgaaacagaaatcaaagcttgtggcacctcctgttaagttggatgcagatgaggatgaagaggaccaagatgcgggcgcgcgggcggacgcgccggttaaaaagcaaaaattgggtcgatcagattcctctgaacaagcttcgaaacaagtggatgttgcaccaacttccccaagcgatctcactgtgaagaaagttgccgacaaacttgctagttttgttgccaaaaatggaaggcagtttgaacatattactcgtcaaaaaaaccctggcgacacacctttcaaattccttttcgatgagagttgttctgattacaaatactatgcataccgccttgccgaagaggaaaaagctcttttagagaataaggaagaacaaactcctcaaagcggcatttcagcttctaagtccacaagcagctctagtagggcagctccgcagcaatcaagttatcaaattcctgcctctgctttgtatgagaatgaggaacctaaatcttcacggaa

SEQ ID NO: 5007 - DNA, 586 bp, Gossypium hirsutum
  Clone ID: GOSHI-09MAY01-C53341_1
aatatgttgtgttgctgttggtgactagtggtcctcaaggaatttacatgcttaggttgcatgtcagatacatttccaactagaatgagtttatgatttatgaatgtttgaattactagtttattgtgcctgcggttaagttctcaccgacttaaatagaggtctagacaaaaattcctcctttctcttatcataaagaaattttttatagttgtctaggttaaaatagtccccttcataaactgctgtgatttatgaagtcatctggccatcttctctgatcttaaagtggtggatgaagagggcaaaacattcttgaatatttcttgtctcatgaatgcagcttatatcttaattaccaatcaacattggtggaaagagatgttcaatgaaagatttggaatatgtggcacgcctgctacaagagtaatttgcattctcttcttcatgctcttggtattaatcagttttataagtgatatgcagcaccaacttccccaagcgatctcactgtgaagaaagttgccgacaaacttgctagttttgttgccaaaaatggaaggccgttttgtacatattacccgtc

SEQ ID NO: 5008 - DNA, 474 bp, Gossypium hirsutum
  Clone ID: LIB3585-016-P1-K1-A4
cggacgcgtgggcggacgcgtgggcggacgcgtgggcggacgcgtgggtgctttcagcttgaaacagaaatcaaagcttgtggcacctcctgttaagttggatgcagatgaggatgaagaggaccaagatgcagggaggctagatgacaaaccagttaaaaagcaaaaattgggtcgatcagattcctctgaacaagctttgaaacaagtggatgttgcaccaacttccccaagcgatctcactgtgaagaaagttgccgacaaacttgctagttttgttgccaaaaatggaaggcagtttgaacatattactcgtcaaaaaaaccctggcgacacacctttcaaattccttttcgatgagagttgttctgattacaaatactatgcataccgccttgccgaagaggaaaaagctcttttagagaataaggaagaacaaactcctcaaagcggcatttcagcttctaagtccac

SEQ ID NO: 5009 - DNA, 847 bp, Gossypium hirsutum
  Clone ID: GOSHI-09MAY01-C53301_1
cggccgcgtgggcttggcaggtacaagagtacgttgaagctgcaacattcttcaaattctgccaaaccggaactcttttgaatcttgatgagataaatgctagtttactgccactgagtgatccatctctcgagcctttgcaaattaacctccttgactatctcttagggctagcagatttgactggagaactgatgcggttagcaattggtcgaatatctgatggtgaagtagaatattctgagagaatatgccagtttgtacgtgatatttacagagaattgactcttcttgtcccacttatggatgacggttctgacatgaagacaaagatggatccaatgctccaaagtgttgtgaaaatagagaatgcatgctttagtgttcgtgtgagaggatcagagtacattccacttctagggtccagcgatccaagttctttcttagtgggagtatctgatgtggaattatgaaattgttgactggaggagatgtttcctgctcaagattcaaaggtttgggagtaggtgaggaaatgtttgcgccgatattgaagatctttgaggcatttttggaccgcactttgttaaagttgatgtaactaacttgcatgctagactcttcaaattcttcatgggattaaaaatcatctatcgtctctttgagatctttcatatggccattggctatctgctcattttagttgatgggaagttgacaatggagctgagaaatagaaaacttttgaaagatgtgttgacagaataaccaatttaggattctgatacatccattgttttctgtgtgagaacatgtttgctttataaatgcaaaactaggcttcttt

SEQ ID NO: 5010 - DNA, 565 bp, Gossypium hirsutum
  Clone ID: GOSHI-09MAY01-C53291_1
tttgtttggagtcggaattacaaaactttgacatcctatggtatttttgtcccacatgtcacagcttcaaattcgcctcgaaacccgaggttcaaaaatgctgggaagttcttagcattatccaagttttaaccatggcaagcaatgctagctctcttcaaggtgtcttaatcagcattgagaatgctcctttccttttagagcaaggatttgccgtaaccaatgcagtgctcgatgctttgagcaaagctggctacggtaacaagacagatcagaaagtcatgattcagtcaagtagtagctcggttctaatgaagttcaagagtcaaaccaactatgatctcgtttacaaggttgacgaagatattggtggtgctcaaagttcaacgattgatgacattaagagttttgctagcgctgtcgtcattagcaaggattctgtatttcctgaaaattctgcattcatcactagtgctacgaatgttgtaccgaggctaaagctgctaatctctctgtatatgttcaaaccttcagtaatgagttcacatctcaagcatgggacttc

SEQ ID NO: 5011 - DNA, 581 bp, Gossypium hirsutum
  Clone ID: GOSHI-09MAY01-C53231_1
gaaaaatatattccaaactttcggcggagccggtgacttcactttcttaagggcatttatacatcacaaaaaggtagctgttgagtcatttggacggctagtaaaggctctgaactgtggtttcaatcctccatccaatcaaactttgcgtataattgcaggcagcggattcctcatgggggattacaatcgcacccctcatctagttggaggaaatctctacccttttaagctgaaggcaaatgaatatgggggtactatagtcatctaaatggtaacccgggagacagtcccttttggttgcttagcttagtccgcatgttattctcttaatgtcatatattcatccaaccttatattcccatggcatggtgactctcgaggaggagggaaccttttgactattattgagagatcataacaaatggaagaacaaattgatttggtggggaaggcatttgcggatcattactaccatctctttgataatgatcggcctgcattggcttctctctacaagccctcctccatgttgacctttgagggccataagatacaaggggttgaagacatcactgcta

SEQ ID NO: 5012 - DNA, 920 bp, Gossypium hirsutum
  Clone ID: GOSHI-09MAY01-C48911_1
cttaaagcaaatagctcccattaaaattaaagcaggaaacaaaaagaaaggaaaaaaaggagagaaaaccctagatttaggggagatagggtcattatcgtcatttcacgctatgaatcggcgataacgggggcgggtcatatcaacggcaaaataagagaagaaaagagatgtacagaggagagagagccgccggtggttccaaaggggaggtaggttcggtggatcggaaacggatcaacgaagcgcttgataagcaactggaacgatcgtcgccgtcaacatcgagagcaatcaacggcaaggataagtcatcgcagtcccttcaaatggggaagcatccacctgatcattaccgtgactcttgttctgcttctctacctaaaccgaacgcctccggtgatgaatctgaaactgacagtgaagagtcggatgttagtggttccgacggggatgacacatcttggatctcatggttttgcaatctacgtggaaatgaattcttttgcgaagttgatgatgactgacatacaagacgattttaacctttgtgggctaagtagccaagttccttactatgattatgctcttgatttgattttggatgttgaatcttctcacggagatatgtttacggaggagcaaaacgaattagttgaatctgcggcagagatgctttatggtctgattcattctcgatacatattgacaggcaaagggattgccgctatgcttgacaagtacaagaactacgattttggaagatgccctagagtttactgctgcggacaaccatgtcttccagtcggtcaatcggatattcctcgatcaagcaccgtaaaaatatactgccctcgatgcgaagatatcttctacccacgctccaagtaccaaggcaacaccgacggtgcctatttttt

SEQ ID NO: 5013 - DNA, 426 bp, Gossypium hirsutum
  Clone ID: LIB3165-047-Q1-K1-F6
aaaaaaggagagaaaaccctagatttaggggagatagggtcattatcgtcatttcacgctatgaatcggcgataacgggagcggttcatatcaacggcaaaataagagaagaaaagagatgtacagaggataagtcatcgcagtcccttcaaatggggaagcatccacctgatcattaccgtgactcttgttctgcttctctacctaaaccgaacgcctccggtgatgaatctgaaactgacagtgaagagtcggatgttagtggttccgacggggatgacacatcttggatctcatggttttgcaatctacgtggaaatgaattcttttgcgaagttgatgatgactacatacaagacgattttaacctttgtgggctaagtagccaagttccttactatgattatgctcttgatttgattttgg

SEQ ID NO: 5014 - DNA, 659 bp, Gossypium hirsutum
  Clone ID: GOSHI-09MAY01-C48851_1
ccgtatcctgaaaatgctggacaaagcccaagaaggcccactaagagagagcattcgccaatcatggttcgctggtattggccttggcacatcaacaagcctaacaacttgtacttgggccttagactcttggtatggtggaaaacttatgtcacatggctacatcactgcaaaggctttgcttgaaaccttcatgatcttagtaagcacaggtcgagtaatagccgacgcaggaagcatgacttctgacctcgcgaagggctcagatgcagttggatcagtctttgctatattggatcgatacactagaattgaacccgaagaccctgacggttacaaacccgaaaagatgacaggccatgtagaacttcgcgacatagacttcgcgtaccccgcccgaccagatattattatctttaaaggcttctcactcaaaattgaagcaggtaaatcaacagcattggtaggacaaagcgggtcgggtaagtcaaccatcatcggattaattgagagattctatgatcctcttgagggagcaggtaagattgatggtagactatataaggtcatcccaccttaggtcgctaaggaaacacattgcactcggaaggcaagaacccacattattttgctggtacaattcgagaaaacattgtata

SEQ ID NO: 5015 - DNA, 220 bp, Gossypium hirsutum
  Clone ID: GOSHI-09MAY01-C48421_1
cccacgcgtccggtcgagaagttggctaagaagcatggatgtagccctgcacagttagcacttgcctgggttcttcatcaaggggacgatgtagcaccgattcccggaacaaccaagataaagaatctcgatactaacagtgattcactaaaagtaaagctcacaggagaagatttgaaagaaatatctaatgcggtcccgataaatgaagtagctggtg

SEQ ID NO: 5016 - DNA, 524 bp, Gossypium hirsutum
  Clone ID: LIB3585-064-P1-K2-C2
gtggtaatgatgttaacaactctttttcttcttgcttgttcagcctgcaaacacgaaatggcgagaggagaacacaacaacgtgacgctggggatggtgagggattcattgataaggcaagaagacaccattgtttacagtctgatagagagagcaaggttccctttgaaccctcccacctacgacccttcctacgcttccatccctggcttcagtggatctttgcttgagttcttcgttaaacaaacagaggccgtacaagctaaggctggtagatatgataatcctgaagagcatccattcttcccagataatctaccaccctcattggtgcctcattacaagtaccctgaagttttgcatcctgcagcaatgtctattaacataaataagctcatctgggacatgtacttcaacaaactgctaccatcgtttgtctctccgggcgatgacgaaaactatgctttgaccgctgctcgtgatctcgagtgtttacaagcttattttagaaaattactattgaa

SEQ ID NO: 5017 - DNA, 429 bp, Gossypium hirsutum
  Clone ID: LIB3135-042-Q1-K1-B1
cccacgcgtccgattcttcccagataatctaccaccctcattggtgcctcattacaagtacgctgaagtaattaattacctgtgtttctcttctcgatttttctgaaaaatcacaatccggttcaattataatccggactaataacttcaagtcaaacaggttttgcatcctgcagcaatgtctattaacataaataagctcatctgggacatgtacttcaacaaactgctaccatcgtttgtctctccgggcgatgacgaaaactatgctttgaccgctgctcgtgatctcgagtgtttacaggtatttaacaatctcttatgaacgctgaagatatgatattagaaaagtggctctaaaaatgcattgctgatccctttaggctatctctagaagaattcactatggaaaacttgtagctgaagtga

SEQ ID NO: 5018 - DNA, 1181 bp, Gossypium hirsutum
  Clone ID: GOSHI-09MAY01-C48021_1
gggacacacagctgaaacagatgaacatcaagatgggttcccaaaaacacctcgttcttttgttatcagtgcttttgattctcaattcccttctcttttccggtgccgatgaagatcactattacgaatttattttgcaagaaacagagattacgaagctatgcagcacaaaaaccatattgacagtgaacggcagttttccagggcctcagattcgggttcgaagaggcgacactgtttatgtcaatgtccacaatcaaggaagatctgctgtttcctttgattggcaaggggttgaggatccggttgatggttcaaacgagttgatccagcctggtaaaaacttcacttacgagatcgaattagacgatgaaatcggaactttatggtggcatgctaggagtgcttgggctaaagctaccgtgcatggcgcctttgtcattttaacggccggccgatgaagagtatcctttccctacacctacgtcagatcaaatcattatattcggagaatggtttaaacaagagttaacggaagctaatgaaaccattgctgctggccaagcagacggttacacaatcaatggccgtcggggagaaacatatggatgcagtaacgatacaacatatctgctagaagtggcttacgagggtctttaccttcttcgtttaataaatgccgttgccaacgaaacaatggtgttcgccatcgcgcagcacagtttcacgaccgtcggacaaaacgcgacatatgcccaacgctctttctcaacttctcttaccttagcaccgggccagacgctcggcgttttgctcggcgcaaacccaaacgtcggccagtattacatcactggctcaaccttcctctggcaggcataataccccccgagttctacagtatccccccggcactggggtttaatttagttacttggcttttgggattccattgggatagttggtttatgaatagacatcatagggctacactttatttatataattcatgcccttacaatctgtggggaaaaaatggtttctttaaggtgtctgtgacaatgattgctgaggaaggcatatgtcttaaaaaaaatactgggggcggcatttccttggttataatggcgtttattaattatcttaccgttgatcgtgacttgatattatctaccttcctgtcg

SEQ ID NO: 5019 - DNA, 657 bp, Gossypium hirsutum
  unsure (1)..(657): unsure at all n locations
  Clone ID: AI054473.1
aaacagataaacatcaaaatgggttcccaaaaacacgtctttcttttgttatcagtgcttttgattctcaattcccttctcttttccggtgccgatgaagatcactattacgaatttattttgcaagaaacagagattacgaagctatgcagcacaaaaaccatattgacagtgaacggcagttttccagggcctcaaattcgggttcgaagaggcgacactgtttatgtcaatgtgcacaatcaaggaagatctgctgtttcctttgattggcaaggggttgaggatccggttgatggttcaaacgagttgatccagcctggtaaaaacttcacttacgagatcgaattagacgatgaaatcggaactttatggtggcatgcaaggagtgcttgggctaaagctaccgtccattggcgccttgtcattntaccggcagccgatgaagagtatcctttccctacacctacgtcagatcaaatcattatattcggagaatggtttagacaagagttaacggaagtaatgaaaccatgctgctgccaagcagacggtacacatcaatgccatcttgagaacataggagcattatgatcacatattgcataaaggttacaggtctatacttttcgtaaaaaagcttgtcattatatggag

SEQ ID NO: 5020 - DNA, 982 bp, Gossypium hirsutum
  Clone ID: GOSHI-09MAY01-C48211_1
gcgttctttccccacagctcattcattgagtttgcgtttgcatttttggtaaatgcgcaggacccgatgatcataaaaggagtgttcaggagatatgaaagatggaacccagtgcatccgacggtgggtgcgttttggggtatgggaataggcattggttgtggtgttggatggggacctgggttcggccccgatgtcgttggttatgttggagctggctgtgggattggtttcagtgtgggtataacccttgctggtgttggcattggtctccctgcaaattccttctttcaacttccataccatggtctcttctatactctctcttttcccattgcctattgaaatcttaatttgtgttgatgtattttcgcttccaaaattccagcttttcaaagaaccagaacccgggcactggatcttgtctctaccaaaattacacctgctcttgcctcctatagaattgcacctcctcacctctccgaccttcaaagagaagccactacaagactctcaaccatgttgccttcacaaactatctctatttgggaaggtgtagaaagatttagcacccgctttttccatcctcgcaaaggtttaaaagattaggtgctttatatacataacgtcatgtgaatgtgagagattgcaaattatatgatggagaaaatggcagtgcatttggtaggatcatggcaggcagaccatttgcttctagatgataatgctaacgcgaggaagatagaaaggaattgttgcctggggcccaagcccaagataagattttgttttcatttctctccttttttttcattccaggcaggattcgtagtttggagagatgatttcattttagttttcaaggtaaagagtactttcaagttgtaaacttaaccgtaatcagggtgtcctacagtgttttgaggttgcaactagctatgaatcggatacagtaaagaatagtaggccaatgcgttttgtt

SEQ ID NO: 5021 - DNA, 438 bp, Gossypium hirsutum
  Clone ID: LIB3135-042-Q1-K1-C9
tcgcccacgcgttcgcccacgcgtccgcttgctggtgttggcattggtcttcctgcaaattccttctttcaacttccatacaatgcttttcgaacagccagaacccgggcactggattttgtctctaccaaaattacacctgctcttgcctcctatagatttgcacctcctcaccttcccgaccttcaaagagaagccactacaagactctcaaccatgttgccttcacaaactatctctatttgggaaggtgtagaaagatttagcacccgctttttccatcctcgcaaaggtttaaaagattaggtgctttatatacataacgccatgtgaatgtgagagattgcaaattatatgatggagaaaatggcagtgcatttggtaggatcatggcaggcagaccatgtgcttctagatgataatgctaaacgcgaggaa

SEQ ID NO: 5022 - DNA, 932 bp, Gossypium hirsutum
  Clone ID: GOSHI-09MAY01-C49991_2
cagcaatggcggctcctctctttcccgccattttcactggtttcttcttcttcgtcttcctcatctctctcacgtcgcaagatcaactaaataacaacgaccacaacctcttgatccgtgaattggatgacgccaagctaaagctctctcgtttgggaacgcgagaagcttctcgaagacatgggaaaacaagatcacttatctgcagtctgttatatccactcttgaggatgattcattacttgctgatgaaaagcttaaggctctagaagaggagtaggcctcgttctcctaggtacgtttgctttgggatgcttcgagaaagaacaactttgaacttcatgttttggaatcagaagcacaggacactgaagatagggtggaagctgttaatttaaaagttgaaaagatggcagaagttgttacagaagaatggattcaaattcaacatcttgagcaggcgcttcaacttgcacaaaggagggcattgcaagatcaaaagcaaagttgcaaggtttcatcaaacaagaaatgcgaagaaatgaatttactgcagcctttgtcaatgatgaatttgtattctttctggcttcggcattgattaccttccctgtactgggtgcttggatggtgctgtcatcacagttcagctaggtcaagaaatctcttccattgcagtttatattctcttctgtcatctagaatatagaatctgattccgcacagctaaaaggtgaaagatgagttgggacacgcacacaccacacacagggacaatctgcgtataatcatcacatcagcagtaaccaacgacacgagtttattccagtgtccagattaatacaatatgatatgtacttttgaaatttgcagcctgagagttttcacgctcgaaaattgaaatagttaccatcaggcttgctagctgctac

SEQ ID NO: 5023 - DNA, 441 bp, Gossypium hirsutum
  Clone ID: GOSHI-09MAY01-C49991_1
ttttatcttttaacgcttcattagaaagaaatttcttggtactctcaaggaacgcgagaggcttctcgaagacatggaaaacatgatcacttatctgcagtctgttatatccacgcgtacgcatgattcattacttgctgatgaaaagcttaaggctctacaagaggaggtacgtttgctttgggatgcttcgagaaaaaacaactttgaacttcatgttttggaatcggaagcacaggacactgaagatagggtggaagctgttaatttaaaagttgaaaaggtttgatggtcagaggatgctgatggtgattgggactgtgtgcaaactttaggtgaatctagcaggtactaagcctagaactctttctatttggtctgtttcaattcatttcttggtcattggattggctgatatgtacttttatatgtacctattaa

SEQ ID NO: 5024 - DNA, 341 bp, Gossypium hirsutum
  Clone ID: LIB3146-010-Q1-K1-H2
cccacgcgtccgcccacgcgtgcgcccacgcgtccgcccacgcgtccggagaaaaacaactttgaacttcatgttttggaattggaagcacaggacactgaagatagggtggaagctgttaatttaaaagttaaaaaggtttgatggtcagaggatgctgatggtgattgggactgtgtgcaaactttaggtgaatctagcaagtactaagcctagaactctttctatttgttctgtttcaattcattttcttgttcattgtattgtctgatatgtacttttatatgtacctattaagtattgtggtgatgtctttgaaatttgtattataccttaaagat

SEQ ID NO: 5025 - DNA, 305 bp, Gossypium hirsutum
  Clone ID: LIB3146-010-Q1-K1-F5
cttggtcgatcataaactgtgtacaagcatgctgtgctgaagtagaacttatttttaggcttggtactcctgattgtgatttggaatttggataaaataaattagatacagaataggaaagcttacacttatttggagcctttctatacttgaggttgtaatattattattattataatcaatggtttcaaacactcctttttcatcaggaaagaatatagataagaatgaaccacctacactgtggctgtgaatgaggtataatttttgtatgcattatgcaagctcactttttaacctttaac

SEQ ID NO: 5026 - DNA, 268 bp, Gossypium hirsutum
  unsure (1)..(268): unsure at all n locations
  Clone ID: LIB3146-018-Q1-K1-D3
cttggtcgatcataaactgggtacaagcatgctgtgctgaagtagaacttatttttaggcttggtactcctgattgtgatttggaatttggataaaataaattagatacagaataggaaagcttacacttatttggagcctttcgatacttcaggttgtaatattattattattataatcaatggtttcaaacactcctttttcatcnnaaaaaaaaaaaaaaaaaaaaaaaaaaaaaaaaaaaggaaaacaaaaaaaaggatccaaa

SEQ ID NO: 5027 - DNA, 453 bp, Gossypium hirsutum
  Clone ID: GOSHI-09MAY01-C49911_1
cccacgcgtccggcaaaaaataaaagggaaaaacactctctgctagggttttcttaacccatcatcgcgccgccgctcagcctccatgccccgatttcgacggagaagacgccggatcgacgactccggcgaccaggtatggaggctgttggggagtgcgcacgctcgtgaaggcgcgattcttgcggaagagactctggctcctagtcgtgcggtgactggagttgctggtagcgacggcttgctgcctggggcttcttagttttgttaggctagggtttagtttgggcttacgtgggtatttagtttgggcttgtttattggtttgggcccgggcatatttggggcttgtacacaactcattaacatataacaggacaaaacaaatatataatataaaatttatataagccttttaaaatgaatttgacttgtcacgtggcaagttttggc

SEQ ID NO: 5028 - DNA, 687 bp, Gossypium hirsutum
  Clone ID: GOSHI-09MAY01-C49851_1
cccacgcgtccgaaaagagttggagctaatcttaaggagtctgaaatttatgatcttatgcaagcagctgatgttgataatagtggcacaattgactacggggagtttgtagctgctacgctgcacctaaacaaaatcgagaaagaagatcatctatttgctgccttctcctactttgataaggatggtagtggttatattactccagatgagctccaaaaagcttgcgaggagtttggcatagaagatgttcgccttgaagaaatgatccgagaagttgatcaggataatgacggacgcatcgattacaatgagtttgtggcgatgatgcagggtggaaatgttgccggtgctggtaagaaaggcctgcaaaatagttttagcatcaagtttagagaagcattaaaattttagtacaggcaattgcactagttcttgttccttttttattttcacctttcaagtttttgagggaactgaggtttgtatagtaagaagttacctattgttctttgccaagaacagccatgtctttgcatggcgctttggccattttcttccaccttttttgctattaaattatgttccatcatgtcgtatactttatacagaacgaatctatgtctttaatttactacaaactgtcgttttgctacgtgttaaaaaaaaaaaaaaagagaataataa

SEQ ID NO: 5029 - DNA, 1194 bp, Gossypium hirsutum
  Clone ID: GOSHI-09MAY01-C49861_1
gttatttgacaggtaatgagtgttaaagcacttggtattgcgttgaagttaaccttttcaggaacgaatcagcttgtatatcctcagacatgggcctttactttagttgtgattacttgtgtgcttacccaaatgaattatttaaacaaggtaatgaattatttaaatgaatgtctacagttgcccttttttccgttcgcgtgggtttgaaatggcccttcaaagaaagtaaacaagggaggatatgttcagtgtgagaaaaagatgcaaagagaaaaagagattgtaaatatgtcatttttatccaaagtctatttcgtttcatctcaaacgttgcttatcaacattcttgtttgtggtgttcttaattgttaatttaaacattaaatcagttgaaatttatctatttatgctttcttgctcccggaatcattgtgtccttaattttgcattgcttgctgatttaaaatttttgttttgcacttcaattcttttttatttttaaaatttattttatcttcataattgcaggcgcttgatactttcaacactgctgttgtttctcccatatactatgttatgtttacatcactgaccattttggctagtgtaatcatgtttaaggattgggatggacagagtcctactcagattctgacagagatgtgtgggttcgtgactatcctttctggaacttttcttcttcacaaaaccaaggatatggctgatggtccaggtttgtcaacatctttgtcaatgagatcattgaagcatgaagaagacgatggcttcggtgaaggcattcctcttaagcggcaggatacatagagaacatatttaattgaaaattaaggtcaccactgccattcctacaaagctcaaaaatagctactggggagagacccgttagatgccaacttgtatttttattgaccgactttagtctgtgctattcattatttggagacagttggaggtgagatttttctttggctcttacccccttctgccttcaagcatgagactgtagattgaagctttcgccttgtatacaggaaatatggcctatgtaatgtaatgttgagcgcagtggctatacatggcgttatcttttgctttgttctgccatcaatgtcaattgggcggggattctcaccctgggaacctctgaaaggaatcaaatacgatatcagt

SEQ ID NO: 5030 - DNA, 360 bp, Gossypium hirsutum
  Clone ID: LIB3146-009-Q1-K1-A3
gcacttggcatagccttgaagttaactttttcaggaatgaatcagcttgtatatccacaaacatgggcctttactttagttgtggttacttgtgtggttactcaaatgaattatttaaacaaggcacttgatgctttcaacacagctgttgtttctcccatatactatgttatgttcacgacactgaccattttggcgagtgtaatcatgtttaaggattgggacaggcaaaaccctacgcagattataacagagatgtgtggatttgtgactatcctttcaggaacttttcttcttcacaaaaccaaagatatgggtgatggtacaagtttgacatctatgtcaatgcgacaattaaag

SEQ ID NO: 5031 - DNA, 731 bp, Gossypium hirsutum
  Clone ID: GOSHI-09MAY01-C49551_1
cgtccgcccaaacatccgggggctctgggcaagagcctgctattcacccaacatctttttcgtagaattgaatctatggatgatgttgctgcatataataacgaaaaggagactgcctcaaattgatcaaaccaagccagttggtgtaccatagtattttggacaacaaaagtggtggggggggggagttccctaacgttgccacctcatttctcaacaagcttagactagaattgtcatcagctgtttcggagattaacttggtttctcaaagcacgcaaagttctaacgaagatgaaggaagtccacagagaagggtttctcaaggagaaccaaaagatgataatatcagaccgcaggggcttttattcacacccaaaacattagacatttcagatacaggcacatcttttacattcaacatggattcatctttctctcaaagagtatcaatgaacgaaagcccggcactgcattcactgcaacagagattaagttccagtgaagaacctgatagtcatatttcctgtcaattaaatctaactctggcatcttcttcattgcaagtcaataaaagtccgatcttaactaggatgtcccaaccaagttgggaaatcggaaaagtctccgagtcaaggtctaatgccaacagtaaagactctgattctagacctttccatagcagaagatacatgattgatggggaaacaacattatcgtcatcgaaagat

SEQ ID NO: 5032 - DNA, 526 bp, Gossypium hirsutum
  Clone ID: LIB3543-052-Q1-K1-A2
ataccaagggctgcctcctactataaagtccgttctacggtctagactgcaatcatttcagctaaaggaagagctaactgtcccacagataaaagctgaaatggagaaaacattgcagtggcttgttcccattgccactaatacaaccaaagcgcatcatgggtttggatgggttggagaatgggcaaacaccgggtaacttctgaatttagatgctttttcattcctcgatgtttaacactttttgttactcagcttttgttttaaaattttcaggtctgagatgaatcgtaaacctgctggccagactaacttgctcaggatcgagacactacatcatgcggacaaggagaaaactgaagtttatattcttgatctggtagtgtggcttcaccaccttgttactcaagtaagggctgggaatggtggaatcagatctcctgttaagtctccaattaggtctgcaaaccagaagacagttcaactatcaactcagaagcagtccccatcatcgatgttaactgtc

SEQ ID NO: 5033 - DNA, 329 bp, Gossypium hirsutum
  Clone ID: LIB3135-058-Q1-K1-H5
aaaaccttgcagtggcttgttcccattgccactaatacaaccaaagcgcatcatgggtttggatgggttggagaatgggcaaacaccgggtctgagatgaatcgtaaacctgctggccagactaacttgctcaggatcgagacactacatcatgcggacaaggagaaaactgaagtttatattcttgatctggtagtgtggcttcaccaccttgttactcaagtaagggctgggaatggtggaatcacatctcctgttaagtctccaattaggtctccaaaccagaagacagctcaactatcaactcagaagcagtccccatcatcgat

SEQ ID NO: 5034 - DNA, 258 bp, Gossypium hirsutum
  Clone ID: LIB3135-058-Q1-K1-H11
cgcgtccgtgaaaaagcttgttcccattgccactaaatctttccaaaaaaaaaaaaaaaaaagggggaggggggaaaaggaaaccaaaaaaaggaagcaagggggaagggacatgggctggcctagcttggcttgctttttatcgagacactacatcatgcggacaaggagaaaactgaaagtttatattcttgatctggtagggtggcgttaccacctatgtccttgcataagggctgggaatggtggaatcacatc

SEQ ID NO: 5035 - DNA, 622 bp, Gossypium hirsutum
  Clone ID: GOSHI-09MAY01-C49401_1
ttccacgtgtccgcccacgcgtccgttcatggtcaatggcttccctttggtcaccatggggaaacttgttcatgtttttaatggcttatttttcttcactacccttatcttcatcatctcagcaatatttacatgtacaatactcaactatatcagctgcaccggcattccttccaagtgcacctcttgcttcttctccaagtttaccccctgacattgagcctttgttccctactccgaatggtgtggcaccttctcctactcattcgtcgatgcccacaattccttcaagccccagtcccccgaatccggataacatcgtggcccctgctcctggtttcgcattttcaccgtctaacagccctttgccgtcatccacttcggtttatccgacttcagctcgagctttaaaaccaacattggttcttggtttgctagtatttagtatattgcagaagctctctggtgtgtgaatttctgctgatggcattgttccttatagcttcactctcttctttttatgttttctatatatttatttttgatattgttaatcatgggtgttgactattatatttaattcaaattattagtatgaaaaaaaaaaaaaaaacccttccca

SEQ ID NO: 5036 - DNA, 361 bp, Gossypium hirsutum
  Clone ID: LIB3196-064-P1-M1-C9
tgaagcgatagtcatcttcttctaacccaaacgataatttctacttcctaaatccccaattacagttgccttttttccctaattttaccaattatttagttcctttcatccaaaattttgatcctagaagaagtcgaatggcgtcaagaacagttgccaaagatataataactcttcgaggctcagcggcaatcgtcagcgagttttttggatatgcagcgaacaggtaaagatgagcggaagtttatcccctcccctttaattatcctttttatttttatgaaactattatttttagatttagaataaaaagagtggtgattatggttttctatagcattttgtacaatcgaggagttta

SEQ ID NO: 5037 - DNA, 304 bp, Gossypium hirsutum
  Clone ID: LIB3146-007-Q1-K1-H5
aattacagttgccttttttccctaaatttaccattatttagttcctttcatccaaaattttgatcctagaagaagtcgaatggcgtcaagaacagttgccaaagatataataactcttcgaggctcagcggcaattgtcagcgagttttttggatatgcagcgaacagcattttgtacaatcgaggagtttatccagaagaaagttttgccaaagtgaagaaatacgggctcccaatgttgcttactcaagatgaaggtgttaaatcgttcattaccaatctaacagctcagctttctgaatgg

SEQ ID NO: 5038 - DNA, 417 bp, Gossypium hirsutum
  Clone ID: GOSHI-09MAY01-C49691_1
ttttgattccatgagtgccggaaaaaaatcaaagagtatcgatgaagactaggggtaaaaagaagagctacagagacggctgccaccaatcaaatatgacacaaacagaaacctaaagacttgctatagaaagcagacagagacgtgctagggtagaagacttatgtggatactgtggttttttgactatggaacctttaatgatacatattccatatacaaaacaaacactatttcgaatgttgcttgaaaatgaaaatggataatacaattggtaataaaagcaccataaaatttattttatactgaggatgacctgattcagaaatttgctactggtgtctacatggttactgcattgtctcttgccatctaatacccgacccttgcagctgcaccacacatggttcatcaatg

SEQ ID NO: 5039 - DNA, 730 bp, Gossypium hirsutum
  Clone ID: GOSHI-09MAY01-C49661_1
cggtggatcactggcaaacgcgatgtaaattcttaatgcaaatcattggatccgtatccgaagctgtaggtccaaatagaatcgcagtccgaatttctcccgcaattgatcacctcgacgccactgactctaatccgctcaacctaggcttagccgtgatagacaggcttaatgagcttcagctgaaattggggtcgaaactcgcttatcttcatgtgactcagcctcgttatcatgcctatgggcaaaccgaatcaggcaggcacggtagtgaaaatgaggaagctcatttaatgaggactttgaaaaggagttacgagggaactttcatgtgcagtggtggattcacaagggagctcgggatgcaagcagtggctgagggtgatgccgatctggtatcgtatggcccgctttttacaccccacccagacctggtttttaggttgaggatcaatgcgccattaaatcgatacattaggaagacattttatacgcaagaccctgttgtggggtacacggactatcccttcctggtagtacaatcacgactttgtatgtgcaatggctgtgctgttgaatatatgttaaaattatgtgtgaaataggagagtctaatttgatatcaaacctgtgtcttggtttttgtacacaattctgggactaccctaagctcacctgctcagatgtaacgaaacaaaattattataaaatccatggaatgtagtggaag

SEQ ID NO: 5040 - DNA, 419 bp, Gossypium hirsutum
  Clone ID: GOSHI-09MAY01-C49621_1
tttaaaaaaaaaagaaaatcctctgaaagaggaatggggaaggggctttcagcgctccgttgagcttccgtctccgacctttcacgcgcccacgcgccgccaaatacggtggctcagaaggctaaaaaccttcgttattctgggtaaaacacaggttaatggcgcaatcttcggcggtgggtcatgatccatgcgccgattgcggcgtggcatgggaactggaaccacagcgctgatggtggctactagaacggcgtgattcgaaaaggcgcgtctttcgggatgattgcggcgcctagggtttctgaaaccctaggcttctctttattctgctaatatcttgggcccgttgggctctgtgtactttgggttgagggtggaaatgggtctgctgggtggttgggtttactgggttattg

SEQ ID NO: 5041 - DNA, 759 bp, Gossypium hirsutum
  Clone ID: GOSHI-09MAY01-C49191_1
tgtgccaccgtcagcgtactatcattcgggtggttggaggctaaatcctaatttatacgaggaaggcaaggtgtgccttagccttctaaacacatggacaggcaagggaaacgaagtttgggatccatcgtcttcaagcatccttcaagtcctagtttcactgcaagggttagtgctaaatgctaagccatatttcaacgaagctgggtatgataagcacgttgggacagccgaaggagagaaaaattcgttggcgtacaacgagaatactttcttactcaactgcaagtcaatgatgtatctaatgcggaagcccccgaaggactttgaacaactcatcaaagagcatttcagacaacgcggctattacatacttaaagcctgtgatgcatacatgaaaggctgctggatcggttctataactaaagacgcctctattagtgacacgaacaatgcagactccaattcatttggtttcaagttgatgttaggcaagattgtgccgaagctgttatcagcacttaatgaaatcggagctgattgtcaagaattcaagcatctccagcagtcgtgatgtcgggtttctaaagacattaaaaaaactcaatatcccccatcaaagcaaaacaaacgtcagtgctggaattttcaaatgtaaatatacaacttcggtgaaacattcttctttcctgtttttttttctaaaaaaaggggcttatcaacatattacgagctggatgcactttcttggagcaaaaa

SEQ ID NO: 5042 - DNA, 553 bp, Gossypium hirsutum
  Clone ID: GOSHI-09MAY01-C49171_1
aaagccgtgaatgtaagcggaccgaacgctgatgatatatccggggtggattttccggcgacgatggtggtggtgggtggatttgacccgttgaaagattggcaaaagaggtactatgaatggttaaaagcatgcgggaaagaagcaacattgatggaatttccaaccatgattcacgccttctacatattcccagaattgcaagaatctggccagttaatattgcagatcaaagatttcatgaacaactgttgcagtaaaccccaactcccacaacaaaattgaccatttcagaaggtattagtatccacatatatatatttaaaaaaatgtgtgagttgagaggtgaaagtaatagttcttattaggctgtctggttatctcaatttgcaggcactaagatattcttagcaaccttcatttcccaaatccacttggtaatttgctttgccttttatttttatttggttgaatggaagatttttatagaatttggtgaaatttttaataacataaattaatttcacttgaacaaaaaaaaaaaagatgatat

SEQ ID NO: 5043 - DNA, 497 bp, Gossypium hirsutum
  Clone ID: GOSHI-09MAY01-C49091_1
gccacgcgtccgaccacgcgtacgccttcaccccctccgccatactactatcactcaccttgcccaccagtgaaatcacctccacctacaggctatatttacgcttctcctgcaccacctactgactattgagtctagaaagatcaaccacaagaccgcaacgtccatgttctagttgctcaaaaagaatcagagaaggcacccaggacagaaaacttggccatgaaagattttcaagtccattgaataagagtttggacattgcatgtgggagctacacatttcgatagtccaagccatactgcttccaattctgtggtggccatcttacacattctcttaatttgttcaagtggcttgggaagaaagcttgagagtcaacttccctagtggctgtttaattatcggtcaataacatccttaattatattggttttcacctaattcaattgtgcacagaaatgtgtaagcgtttctatatattgtgggcatgcatt

SEQ ID NO: 5044 - DNA, 1197 bp, Gossypium hirsutum
  Clone ID: GOSHI-09MAY01-C49081_1
atttttagcaaccgattggctagggtgcgcctagttgtagataccaattttgtttgtcattaagtaaatgtgattcaatggttgtttcaattggcccttctaatttttacgcttttaattttggctatgaacacatggttccacttaattgatattgagaggaagaatataaaacttggatctttctggcaggctgttttaactcggacctacactgcaaagttttcaaatttctacatttctcgttttctgaatttttattcaaataatttcatggctgtttactctttacattggaaaatgatgagcacatggagttggtcagagtcagagtttaagtgctgtatttctgccaagtgacatcagaagaataagatggtctgctgatggtgaccatttctattacgtttgtttgttgcagaagcctattccacaaatgtcaggtggtgactgtcgcagcaaacatctacggcatcgatcagagaggccctcccctccgcgttccttacaggaccatgaagcacctccccgccctgcaaagaggaaagctgaccagcatcatgaccttgaacgtgattatgactatgatgatcgtgaccatggtcgtgatcgcgaacgtgatcgccatcatcatcatcatgatcgctccgagtcttccaagcattccctcgaacctgcaactaaagccacttcctcgactgctactgcaggaactgataagaagccaaaggcaagtgtgttttctcgcattagctttcctgaagaagaaattagcaagaagaaaaggaagatatcttctgatgcacctgcatcttctggccatcacaagccatcctccaatggatatgattacaagacatcttcctctgccaagccagtttctgctacaagtagtggtggcgggagaaagagcagcagtagcaatgctgtagactatgagtcgagtgatgatgatagacatttcaaaaggaaaccatcgaggtacgagtcatcaccgccgccatcggccgagtgggaagaagaacggaggcactcaagaggatcaagggaacgggagcgtagcagctatagtaaacatagatagtatgcactacctttgcaccgttatgatactctttttaagtcctaatggagggatttgtggggaaaatgatacattttttttggctttgtactttgctagtgtctttaataatg

SEQ ID NO: 5045 - DNA, 662 bp, Gossypium hirsutum
  Clone ID: GOSHI-09MAY01-C49041_1
ggggtacatatgtgagaggcattgcggcagattacccacaaaacaaaaggagaatcaaacgaagacaaagtgaagagaaggaaatctgagcaaaaattccaagaaataacgaaagtaatagttgtactgcataaggctcttaaatgggggataacaaggaattgacgccgtcaaagtatgacatgaacgcaaaatgggacgcctgcatcgatctcactctccgccgcttcgtttattcatccttggctggcgcttttggtggcctccttttcttcaagagtccagtgactcgatgggcatctgtagcttttggtgctgggattgggattggatctgcgtacactgattgttctagtctttttggtggatattctccgaagttggctcctcctaagcttgatgatgctcctgcacccaaggagcaagtggagtgagttgatgttgttgaagttcctctaagattatatgttggtgggtaaacaattaacttgttgcaccaaaagtttgttatggatcacattatcttttattatgtaatctatcaaatgagtaaacacaatttgaagcggaaaaataaaaacaaatacttccgttgcagtcctgcattttgcgtgattattgttgagagttggacttgatttaaaaaaaaatgatattatata

SEQ ID NO: 5046 - DNA, 675 bp, Gossypium hirsutum
  Clone ID: GOSHI-09MAY01-C49021_1
tagtcagaaaggtaccaattcctcacctcaggtatgggaaatacagaatcaggatatgatgattcgcttcaaactgacttttggcatcaaccttcttatgaaccttcttccctagcaggaagttcaatggatcgaaactatcaacccaggcagcaagccccgcttatacctgacaattttagttctttggatcaggttatttcagcattgagagaggcaggacttgaatcatccaatttaatacttggtgttgacttcactaagagcaatgagtggacagggcggtattcattcaacagaagaagccttcatgctattgggagctcacctaatccttatgagcaagcaatatctataattggtcgtactttatctacttttgatgaagataagttaataccttgatttggttttggtgatgcattaacgcatgataaatacggttatcagcttttatcctgatcaccgaacttgtcatggtttagatgaaactttagcacgatattaagagattggtccgcactaatagtggcaggttgtgatcataattcttctatttgtcaattaataaagcatttctaggcatacaccattgggttacatactatcctgtcttctaattctttgcagagaaatgtcttagttctgattcattcctttatttctgaatattaa

SEQ ID NO: 5047 - DNA, 541 bp, Gossypium hirsutum
  Clone ID: GOSHI-09MAY01-C49291_1
ccggaccggaagggccggctcgagccacgcgtacgccacgcgtccggcttttgatattctttaattattctttccttctttctttctcttttccgcccattctctgcattcattctgcttctttcctgactttatttctgcatttttgttgggttgccatgtccaggtgactcatctccatccccgatctatttccgcttccgtaatatccagggagcaaggagtccccctcaataatcacctgctttaagcccagttcgtgacccacttggactgcctgaaggcatgcgatggcttcagccgcaaaactagaacaaatgttgcatcgaaatttattttgtaaaaaccctctttcagaggccaccatctctcagattcaaggctcaagccgtccatatagcccataaagcgcagatgaaagttctacttgcttccgttgtgctgttcagtagggtccagtcacgaaaaacatgctcccgggtcttcagcccttgcttgtacctctgacaggaagcctcaggtattaaacgcttagcttctt

SEQ ID NO: 5048 - DNA, 389 bp, Gossypium hirsutum
  Clone ID: GOSHI-09MAY01-C44921_1
atcgcctattcatcttcactagatggtgctcttcgagcctggaggaatttcagccccaaaatctttcctcaactttgatttcaacgaagaaaggagaagaaatccatggcctgttcgcacggttcggttgtacggagaagatgaccctggtgacgtggaggccgcacgcggggatctcacgtgggaagccaaccctctggccattccagtgtattccagaagcttctggcgctctcaggctgctgagcttctttttgggtcctgttgggcctcgggtttgggctatttgtaaactgggttagggatgtgggtttagtatttggattttgaaaattgtaagtggactttgtggactattttagtcatggactttattttaatttatttgg

SEQ ID NO: 5049 - DNA, 739 bp, Gossypium hirsutum
  Clone ID: GOSHI-09MAY01-C44891_2
tttccaaatgacttgttccagctccaggatcactgagctgcaaaatgaatgacagaagtcattgcagagagcacttgatacaagattgtatcttcttctatatggtatcagtaatgcagctcctagcgggaaacctgtgtggcatttttccagaaaaagtttatgattcagaggagacgttgcgcaagtgtgcagagtctgccttagcattcgtactcggagacctctctcacacttattttgtcggaaatgctcccatggggcacatggttatacagcagatggagaatgtgcctgaaccatttaagcgattttttttcaagtctcaagtgattgataccaacaagttcaatatccagaagtgcgaggatttcgtttgggtgaccaaagatgaactcttggagtattttcctgaacaagctgaattttttaagaagttgattatcagctgatggcaaactgcttcattcagtttccaagccatacaggtctttcatataacccaaatttgtggtttacttgtaactttgcagtagtgtccaagactagaaaaccaaacatccgaacgtgactcaattaggcaaaaataacgaaaagtccattggctaatgatggattgaattgtccaatactttttcttatgttggcgactattgatgcatggtcttgttttattttattacatattcctctcgaaaaaaaaaaaaaaaaaaaaaaaagaaaaaaaaaaagggaagac

SEQ ID NO: 5050 - DNA, 703 bp, Gossypium hirsutum
  Clone ID: GOSHI-09MAY01-C44891_1
cttggactgtctaaattagggaaaggtgattaccaaattgactacgttccagctccaaggatcactgaagctgacaaaacgaatgacagaaagtcattgcagagagcacttgatagaagattgtatcttcttttatacggtgacagtaatgcagctcctagcaggaaacccgtgtggcattttccagaaaaagtttatgattcagaggagacgttgcgcaagtgtgcagagtctgccttagcctctgtactcggagacctctctcacacttactttgtcggaaatgctcccatggggcacatggttatacagcagatggagaatgtgcctgaaccatttaagcgattttttttcaagtcacaagtgattgataccaacaagttcaatatccggaagtgcgaggatttcgtttgggtgaccaaagatgaactcttggagtattttcctgaggaagctgaattttttaagaagatgattatcagctgatggcaaattgctccattcatgtaactttgcagtagagagtttacatcagaagttcaagccgagactagaaaaccaaacatccgaacgtgagtcaattaggcgaaaataacgaaaacctcattggctaaggatggattggattgtccattacttttagtttcttatgttggcgactattgatgcatgatcttgttttattttattacatattcctctc

SEQ ID NO: 5051 - DNA, 634 bp, Gossypium hirsutum
  unsure (1)..(634): unsure at all n locations
  Clone ID: AI726256.1
cccgtctctggaggtgttgtagctgcagaagctggttcacttactttcatggttggtggctctgaagatgtgtatcttgctgccaaatccttactcctctcgatgggaaaaaacgcaattttctgtggtggaccaggaaatggttcagtggcaaagatatgcaacaatttggcaatggctattactatgcttggactgtcagaagctctatctcttggtcaatctctaggaataactgccagtacactgacaaagatatgtaactcttcaagtgcacgctgttggagtagtgatagttataatccagttcctgctgtgatgcaaggagtgccttcttcaaggaattatagtggtggatttgcatccaagctcatggctaaagacctataccttgctgctgcatcagcagaaaaaattggtcaaagatgtccactgacatttctagcacaagacatatatacagagatntgcaacgatggtcatgaaactgaagacttctcgtgtgtgttcnagcattattactctggcaagggtgaacgcaattaagttcacttgtgcaagtataanaannaaanatgtttgagcttggtanccaaatgcatcggatttcatccgaataattcatggtggactt

SEQ ID NO: 5052 - DNA, 431 bp, Gossypium hirsutum
  Clone ID: LIB3148-028-Q1-K1-D11
gttttcaatgcatagctgctttctgttaggcaagaaatctggtggaggggagagggtgggggaaagcttaattcatatatatatgttctcaagagcatgtgaggccgggctagttttatcaagagtgagttattcttcgaattgggataattcgagaactggtttactgttggtgaatttcccataggtatgctccacaattctaaaatatgctcaatgtgacagtgatagttataatccagttcctggtgtgatgcaaggagtgccttcttcaaggaattatagtggtggatttgcatccaagctcatggtaatcaggtttctttgcctatattcatatctgtatagataaaaacttgcttcacatttatcatgcttcatcacgttgtataacgcactggaagcttgtaagttatttaggctgaaatagc

SEQ ID NO: 5053 - DNA, 543 bp, Gossypium hirsutum
  Clone ID: GOSHI-09MAY01-C44561_3
gttagacacggttttggctggattttttccatatattgggaggatcctgggaagccatatatccatacggttgtgtcggagcaacatagcttcaaatttctttgtgccttgttggctgagaaagaaagattcatatatgaagcttcgtggagagaaaactggacgcaagggtcatttggctgttacaacagaggtttttcaggtcgctccttccctttgcatggttgaacttcgaaaatctggaggggataccctggaatttcacaagttctataataatctctccactggactaaaagatattatttgggatacgacctctgaaggaaaatcgggcgaaaacagtgctgcggcaggctcctcgtaaccgacccgacgacaggtgtttcccaaaatgcgcatttggtgctattcaaaggggaattcgttttatttatttatatttttgtgttggtttgaatgcttgtaataaagctgtgtatacttacatacattaatgttttgaaaattgtataatataatttgtttttctttttctttttt

SEQ ID NO: 5054 - DNA, 689 bp, Gossypium hirsutum
  Clone ID: GOSHI-09MAY01-C44561_1
gcctttttgagaataggggattctcgaaccttgttgtcgaacggcgagaagaagggcctgtactacctgctaccatgaatgcctttgatcttatctcgacatctcagggtctcaacctcagtagtctgtttgagaagcaaatgggccttgttaaaagggaaacaagattcacatcaaaacgtcctgctaatgagataatctcgcaaatagagagagctgctatgcccttgggttttgatgtgaagaaaaataaccacaagatgaagcttcgtggagagaaaactggacgcaagggtcatttagctgttacaacagaggtttttcaggtggctccttctctttgcatggttgaacttcgaaaatctggaggggataccctggaatttcacaagttctataataatctctccactggactaaaagatattatttgggatacgacctctgaaggaaaatcgggtgaaaacagtgctgcggcaggctcctcataaccgccccgacgacaggtgtttcccaaaatgcgcattggttgctattcaaaggggaattctttttatttatgtacgtttttatgttggtttgttgaatgcttgtaataaagctgtgtattcaatacataaaccccaatgtagatacttacatacattaatgttttgaaaattgtataatataatttgtttttctttttt

SEQ ID NO: 5055 - DNA, 605 bp, Gossypium hirsutum
  Clone ID: LIB3543-054-Q1-K6-B7
gcgagctgatgttagtcttgatgatgtggatgccattttcaacgaatcaagtgattctcggaaccttgttgaactgtgtgaagaagggtctttcgtacctgctactatgaatgcatttgaacttatctcaacatcgcagggtctcaacctcagtagtctgtttgagaagcaaatgggacttgttaaacgggaaacaagattcacatcaaaatgtcctgctaatgagataatctcaaaaatagaaaaaactgcaatgcccatgggttttggtgtgaagaaaaataactacaagatgaagcttctaggagaaaaaactggacgcaagggtcatttggctgttacaacagagatttttcaggtggctccttcccttttcatggttgaacttcgaaagtctgaaggggataccctggaatttcacaagttctataataatctctctactgggctaaaagatattgtttggacaactacagacagaggaaaagtggaagaaaaggatgggtgtgctgctgggtcttctccacccaatgacgggcattcccagtcgcaatgcgctatccgttgatttctattgggcgaactgtcagtcaccggcggctatt

SEQ ID NO: 5056 - DNA, 523 bp, Gossypium hirsutum
  Clone ID: GOSHI-09MAY01-C44491_1
gcaggttttagagcaggcatggtatatgaagccagtctttgctatactcattggaggcattcttccatttggggccgtttttattgagctcttcttcatcttaacgtcaatttggctgaaccagttctattacatcttcggcttccttttcatagtgttcgttattctaggaatcacttgcgccgagataacaatcgtgctatgctacttccagttgtgcagtgaagactaccattggtggtggagatcttacttgactgctggctcctctgctctctaccttttcctttactcgattttctacttctttaccaagttggagatcacgaagctggtctcaggcctcctttactttggctacatggtaattggttcatatgccttcttcgtcctgactgggacaatcggcttctatgcgtgcttctggtttggtcggaggatctactcttccgtcaaaatcgactaagatgagtatatagaaaggacacagacctatgcgaattacagactggatgaggggaaa

SEQ ID NO: 5057 - DNA, 374 bp, Gossypium hirsutum
  Clone ID: uC-gsflnu33B063g10b1
tctctaagctggtttcaggcatcctttactttgggtacatggtaattgtttcatatgccttctttgtcctaacagggacaatcggattctatgcttgcttctggtttgttcgaaagatctactcttcagtgaaaattgactgagatcaagaatgtagaaaggggatcagacatcaaacctatgcgaattacgggatggacgagacaatgatacagtacagaaaattttatttctgatcgtctctacagtcttcttttattttgctgaatttgcgtgttgtaggcttggcctgttattttatgtacactgttatgtaccgtactgttttaagtagtttctccaatgagtaaaatttgtgatctagtcttgtagat

SEQ ID NO: 5058 - DNA, 445 bp, Gossypium hirsutum
  Clone ID: GOSHI-09MAY01-C44421_1
cggtccgacccacgcgttcaaaatgcgtcaatccagcttccatggggttgcatttgaggaacttgtgctatctaggcctggagaacaacaggctcaacgggaaagtacctgaggagtttgggtttctggagtttgtgaatgaaatcaatttggaaaacaacaatctaagtggaaaacttcccttttctgctaacttcactgctaaagttggtgaaaagttaaggttaaaaggcaatccagaactgtgcgttgatgagaaattgagccatcgtgaaagcgttggggaactgaagaaatgcagcatgccagacattcccaatccagtcctcttcattggggtttctcattctgggctgttatcatcttcatcatctttccttgttttattgctgttttggggtctctggatccctttggcttgattgattatcatcaaagcgcatgg

SEQ ID NO: 5059 - DNA, 379 bp, Gossypium hirsutum
  Clone ID: uC-gsronu33B136b10b1
tctcttacgcgtccgctgatcgataccctcccattaatggggctttgtattagtttttttactgacaggcattgtccgttgatggacgaacaacctttttcgagaaatttagtaaattattttaatcggccttggtggggtttattgcatgtttagctctttcacaactgtgtaattattcaatgtcatttactcggagattacaaccacaatattaaattatgattgcaattttgcgatttcataaatgggaaataataatgaagttaaaactatttatgtaaaaaatataacaatttggatttgaaacttgagaatgatgtgcaaataaaaaaaaaactgggttaataataaaaaggggtggcctcttttaagaatc

SEQ ID NO: 5060 - DNA, 338 bp, Gossypium hirsutum
  Clone ID: LIB3148-030-Q1-K1-F10
ctttttcgagaaatctagtaaattattttaatcggccttggtggggtttattgcatgtttagctctctcacaactgtgtaattattcaatgtcttttactcggagattacaaccacaatattaaattatgattgttattttgcgatttcatcccaaaaaacaaaaaacgatcaagaatcactaagagtggaagataaagaataatcttgtaataaaagacaggggaattctgaataataaaaggacaaacccctcttcatataaatgcaacaaccccttatactttttaaagcaaaaacaattaaaatttttggggggccccctttaaaaaaaccaaa

SEQ ID NO: 5061 - DNA, 683 bp, Gossypium hirsutum
  Clone ID: GOSHI-09MAY01-C44771_1
gtcaagcgtggccttaaacaagcggtttataactaaagagcaacctctttctaattatctgaggggaatcgaaaagcgttgttccttcatacctcaacctcatacccaatctaaacaagattgctggttgtataatgatgggaagtcaacctcatgccttgcgtttgtcctcgaaatgtacaaggaggcaagactttttgatcccattgctgactctattcaagtcaccgaggttacgataaaagatgcgtatactctaaggtttttcgagaataattctagccggctgccaaagtggtgcaatgatgcagacaatgtaaagcttccttactgtcagattctggggaagtaccgaatggaactgcctggatttaattccatggacccatacccccatatgaatgaacggtgtccgtctaagcctccaaagtactccaggccaccaaactgctagacagcctcgcttctgctatttgtcgttttgtcattatgctggtagtcaccgttagttcatcaattgttcgggtcaattgtatgcaagatgccccaagaaattgtgtagcagtatcagttgtaaaaatggtaatcagactaggagtggagatttctggtatcaactgttatagatatgatagaaaatggaacattgatgctgataaaactatgaaagcctttttttagtc

SEQ ID NO: 5062 - DNA, 537 bp, Gossypium hirsutum
  Clone ID: GOSHI-09MAY01-C44601_1
aaagatgttggtgttagaatcagtgctgaaggggatgaaaacgcacgtcacctacctaaatatcacccggctgaccgatttcagaaagaatggccacccatctatctaccggaaacacccaaagcaaacattaccggaagacgaaagagtagcccccctaaaatcccaggactgcagccattggtgccttcccggtgtgccaaattcgtggaacgagcttttatatgctgagctgcttgtaaaagaaaacaaaatgcggcaacatcaaagaagagctaggtaaaatgaaccccatacaaacttaaaaagagttttatttcattgtgaagtccgagaaactaaagaaatgggaaaagaaaaagatgtgcgagaaaatcatagtttttaattttttattttttcccactacttctaaattatggaagtaaggtagtaaaggcaaagctctattcttggagagatcaattttatgcttgtaataattgttactttgtttatagtataatatgaagtatagaggatggttttcttagcctc

SEQ ID NO: 5063 - DNA, 687 bp, Gossypium hirsutum
  Clone ID: GOSHI-09MAY01-C44191_1
cccacgcgtccgcgtatacatcaaatgttcatgatgcaatccttccagcggaaacaattgagtgagtctggtcatggtgtgtcagatgagcatgctatttcacttctaactgctaaggcacgcaggccattgcatattgatggggtggctcatgctgctgcaacacaaatccagaaaaagtaccgtggttggaagaaaagaaaagaattcttattgatccggcaaagaattgtcaaaatccaggcccatgttagaggacaccaggtgaggaaacagtatagaacaatcgtctggtcggtgggtattctggagaaagttattctacggtggagacgtaaaggaagtggtttgcgaggatttcgacgagatgcaattaccaaggaacctggtccacagtgcacgccctcgaaagaggatgattatgattttcttaaggaaggaaggaaacaaactgaggaaaggctgcaaaaggcacttactagggttaagtccatggctcagaatcctgaaggacgaggtcaatatcggaggctgctgaccttggttcaagggattcgtgagaacaagcttgtgatatggttctgagcagtacagaagaagcaggtgagggtgaaggagacggtgatgaagactttattgatatcgagtctcttttagatgacgaaaatttcatgtcgattgcattcg

SEQ ID NO: 5064 - DNA, 386 bp, Gossypium hirsutum
  Clone ID: LIB3148-039-Q1-K1-C6
gaaaggatgaaggccacaaaagaaacaagggaaatatttgggaggtttttttataggttccctgaaggtgaatctgctgcagatgtttttgatcgagtttccagtatgttcttcttcatcaccagttttgctttctttttaatggaaacttggcattttttgcttaggagggtgctttgggaatcaagtttccattgagaaaattggttattttgaaatgggtctgtactgtttgttgcttttgtttaaaagaaatacttctcggaataatataatggcttgttttgaaaccttgaaagcaaagaacttccgagaaaaactgggttcttgttttgattatggtgaaacgaatgaaacattgaactgcatatacaagactctggtct

SEQ ID NO: 5065 - DNA, 363 bp, Gossypium hirsutum
  unsure (1)..(363): unsure at all n locations
  Clone ID: LIB3148-022-Q1-K1-E3
gtgagggaagagtgtaggattagagaacaggattttgggaattttcaggtggaggaaaggatgaaggccacaaaagaaacaagggaaaaatttgggaggttttttataggttccctgaaggtgaatctgctgcagatgtttttgatcgagtttccagtatgttcttcttcatcaccagttttgctttctctttaatggaaacttggcattttttgcttaggagggtgcttcgggaatcaagtttccattgagaaaattggttattttgaaatgggtctgtactgtttgttgcttttgtttaaaagaaatgcttctcggaattcatttancaaagaaaaccaaactcaacttgaaacaagatta

SEQ ID NO: 5066 - DNA, 630 bp, Gossypium hirsutum
  Clone ID: GOSHI-09MAY01-C44131_1
atgtgcttcaaccctctgctggtgtttcaatgatggcaaagccccctttcctcgacaagacactgaagctgagccattcacttaaggacactaatagtggtgaaaaggatgctgcctatgaagttaagctcaatgatgcaaccatcagggaagccattgccaagaccacaggcttgtgcgtcaacagtggctcatggactggaattcctggctactgccgcttcactgttgccttggaagagagtgaatttgagctagcattggcttgcttagacaaatttaaaagcataattggtaactgaattttgatatcattacctaccttctagttcatcactttcacaacaaagccataatggaaaaaaacccattccttaccataggaacattcttcataaagctgtagttacagcaagctgttaaaaagacgggtgtttaaagaaagttgttcctcctagaagttgattcttatttgctctggctattgctttatagccataatgaaaaaatcattccttaccatggaaacattcttcataaagctgtagttacagcaaactgttaaaagacaggtgttcaaagaaagttgttgttttcaaaataaaatttttttattaaataatttatatt

SEQ ID NO: 5067 - DNA, 753 bp, Gossypium hirsutum
  Clone ID: GOSHI-09MAY01-C44391_1
gtttactggggttcgtcttggttggactgttgttccaaaacagcttctgttctcagatggattccctgttgccaaagacttcaaccgtatcatttgtacttgctttaacggtgcatctaatattgcccaagctggtggcttggcttgcctttcacccgaagggctcgaggccatgcaagaggtgatcggcttctataaagaaaacaccaaaattatagtagaaacattcaactcgcttgggtttaaagtatatggaggaaagaatgcaccatacgtgtgggttcacttccctggccgtaactcatgggatgtgttcagcgaaatactcgagaagacccacattgttactacgcctggaagtggtttcggacctggcggtgagggtttcatcagagtcagcgcatttggtcacagggagaatgtcttggaagcttgcagaagattcgagcagctttacaattgaatctaatagcatttgaccggttacctcggtttcagacccgagaccaaaggccgtatgcttctatgatttttgttctcaattccgtaatattgcttgtaatatctcgtcagattctatgcttagaaaagactagtaatgcttcttatttatcctgtaacattcactgaaaactacctttttatttatataaataaccgcttgtattcgccaagcaaataaagcaagaaaaatctcgatttttccaaaaaaaaaaaaaataaaaaaaaaaaaaaaaaaataaataaaataaa

SEQ ID NO: 5068 - DNA, 799 bp, Gossypium hirsutum
  Clone ID: GOSHI-09MAY01-C44341_1
aaattacagtgagaagcgacttcgtgatgcttatgaaaggctcaagaagagaggaattcctctagcttcgaaccaagtgaattacagtctcatatacaggttacctgagcagaatggagtaaaagctgcttgtgatgagcttgggtcacgttgattgcttattgtcctattgcacaaggtgcccttaccgggaaatataaaccagaaaatccgccatctggacctagaggccagatttacactccggagtttttaactaagctccaacctctccttatcagaattaaggaaataggagggaattatgggaaaactccaacacaggtggtactcaactggttaatagcacaggagaatgttgtgccaatcccaggagccaaaaatgctgcacaagctgaggaatttgcaggtgcccttggctggagactaagcaacgaagaagtggacgagctacgctcactggcatcagagataagtcctgttatcggttttcctgtggagaagctgtaattctttttgctccaattaaagttgacttaattcttgaatgttaaacatagaatgaataactcatattctagtattggttcctttgatcctcatcgtttggcccattggtcaagggtgtttattctcatacccaatttatgggatcaaataatgggaattgtctactagtggtgtgtgggggaatgatttctaccaaaaaaaaaaagagagttatggttcctctctctccccaccctggttgtaatagtaccatgtaatgtatgtatatctttgtggcagtccagtccag

SEQ ID NO: 5069 - DNA, 863 bp, Gossypium hirsutum
  Clone ID: GOSHI-09MAY01-C44311_1
tcgcccacgcgtccgcacaattcttctctagtggttggcttggggatgggcagtggattgtgccaataacattttgttgtgggtcatatgacaagaagaaaagctttttgttgcaaactaagtccgcccggtatgaccgggccggccctccccctcctaccaataaaagtgcttggataaagcttaatgtggatcagactgggttctatagggtgaggtgtgatgaggagcttgccgctagactccgctatgctatagaaaacaaatacttgactccaactgacagattcggcattcttgatgattcatttgcactttgtatggcacgccagctgcctttgacttccttgcttaccttgatgggtgcctacagagaggaacttgactataccgtgctgtccaacttgattagtataacatacaaggttgggaggattgcagctgatgcaagacctgagctaatggacaacatcaatcaatttttcattaacattttccaatattctgctgagaagctcggttgggatgctacacaaggtgagagtcatctggattcaatgttgagaggagaaattttgactgcgcttgctatgcttggacacaaggagacattgagtgaagcaagcagacgatttgatgcattcttgaaagacagaaacacaccactccttcccccagacacaagaaaggcagcatatgtagctgtcatgcagacagtcacctcctccaatagagctggttttgactctcttttgaaagtttatagagagactgatttaagccaggagaaaatccccattttagggtcattgccatcttggtcccgatcaggggtataatttctgtaaagttctaaaagtttt

SEQ ID NO: 5070 - DNA, 354 bp, Gossypium hirsutum
  Clone ID: LIB3149-021-Q1-K1-C2
attttccaatattctgctgagaagctcggttgggatgctacacaaggtgaaaatcatctggattcaatggtgagaagagaaattttgactgcgcttgctatgcttggagacaggagacattggtgagcagcagacgattgatgcttctgaagacaaacacaccactctccccagacacagaagcacttgtagctgcatcagcagcacctctcaataactggttgacttctttgaagttatagagagctgattaagccggagaaaatcgatttaggtcattgcatcttgcccgacaggataattcggaagtctaagtttattgctctgagtcgcagcagaccttgttgcctgctg

SEQ ID NO: 5071 - DNA, 868 bp, Gossypium hirsutum
  Clone ID: GOSHI-09MAY01-C44281_1
cccacgcgtccgcccacgcgtccgcccacgcgtccgcaaaatcagaccccgtccgagatgggcttccttttcctatcatttcagggatcttccccagctatttttcactctgatacagaattatataatttgttttgaagtattttgaatttcctacaagcaacgagagatgcaggcatcaagggcaaggttgtttaaggaatacaaagaggtgcagcgaggaaaagacggcggatcccgatattcagcttgtttgtgatgattccaacatatttaaatggactgctctaatcaagggaccatctgagacaccttatgaaggtggagtgtttcagcttgcattcgctgttcctgagcagtaccctttgcaaccccctcaagtgcggttcttgacaaaaatatttcaccccaatgtgcattttaagacaggagagatctgccttgatatattgaagaatgcatggagtcctgcttggacacttcaatctgtttgtagggctataatagccttaatggctcatccagaacccgatagccctcttaattgtgattctggcaatcttttaaggtctggtgatatgaggggattccagtccatggcaagaatgtacaccagacttgcagccatgcctaaaaaagggtgaacttaaatggtgtaatgaacagtcttaaactgtaagcgattcccctgttgtgctttccaaataacattcaagaatgtctccagtttttctgatcccacatatagattatagaacaaccttgatgtttatggatctagattacccataaatcattatcctaaagaaattgaattgtgttttaaagccctaaataacattattgcaatttctattctagtttgttg

SEQ ID NO: 5072 - DNA, 522 bp, Gossypium hirsutum
  unsure (1)..(522): unsure at all n locations
  Clone ID: AI725949.1
gtcatcaaaaccaaaaagacccaccaaagaagtttcctttttctctcttcttcagctctctgtcttgttgatatataaatatagaatctttcttgaagtatctctgaatttacggcaagcaacgaaaaatgcaggcatcaagagcgaggttgttcaaggaatacaaagaggttcagcgagagaaggcggctgatcccgatattcaactagtttgtgatgattccaacatatttaagtggcctgctcttatcaagggaccatctgagacaccttatgaaggcggagtcttccagcttgcttttgctgtccctgagcagtaccctttgcagcctcctcaagtgcggttcttgacgaaaatatttcatcccaatgtgctttttaagacaggagagatttgccttgatatattgaagaatgcttggagccctgcatggacacttcagtctgtttgtagggctataatanctttgatggctcatccggaacctgatagcccacttaactgtgattcaggcaatctta

SEQ ID NO: 5073 - DNA, 357 bp, Gossypium hirsutum
  Clone ID: uC-gsflnu33B111f03b1
cccacgcgtccgcccacgcgtccgcccacgcgtccgcccacgcgtccgtgcatggacacttcagtctgtttgtagggctataatagctttgatggctcatccggaacctgatagcccacttaactgtgattcaggcaatcttttaaggtctggtgatctcagaggataccagtctatggcaagaatgtacaccagacttgctgccatgcccagaaaagggtgaacatttatggtgctatgaaccgccttaaaactgtaagagtcaattatcgtcagcaatttacttttgccttttaaacttcattgtagaaattcaagaatatctcttacttttctgatccaaaaatatcagttccc

SEQ ID NO: 5074 - DNA, 335 bp, Gossypium hirsutum
  Clone ID: LIB3272-043-P1-K1-D5
ccaaaatcagaccacgaccaaaataagcttccttttcctatcatttcagggatcttgcccaggcatcaagggcaaggttgtttaaggaatacaaagaggtgcagcgagaaaagacggcggatcccgatattcaacttgtttgtgatgattccaacatatttaaatggactgctctaatcaagggaccatctgagacaccttatgaaggtggagtgtttcagcttgcattcgctgttcccgagcagtaccctttgcaaccccctcaagtgcggttcttgacaaaaatatttcaccccactgtgcattttaagacgggagagatctggcttgatata

SEQ ID NO: 5075 - DNA, 316 bp, Gossypium hirsutum
  Clone ID: GOSHI-09MAY01-C44251_1
cggacgcgtgggtgaagagcctgaaaatgaagacgaagacgaagatgaagaagaatcgagtcagccaccaaagaagaggaagaagtaatcatttacagattctaagactttttttcggtgttcaacttcaataattcaagcctaagtttcctaagaattaagaactgaccacagtttttacctaaacttataacatgtgggacaagtcacgagagttaatggcttctaatttagttcataaatgctctttacagagaactttgaacctttataattttgtgttactttattagaaaaaatgaaatcgcattatggc

SEQ ID NO: 5076 - DNA, 507 bp, Gossypium hirsutum
  Clone ID: GOSHI-09MAY01-C44261_1
tcgctttgatttcatgagctccatatgatccataaagcgtagcaaaacatctgacactgttccttagttccttttgcaaatacccattacttgtaaggcattactggaatacatagaagttgtcctcttccccgaagccacatcgagggcatctcacatttgtggttattcgcttgtatcgtaggttggctagtgtaggaatatagttccaggatatccgccagacagacagtagagtttttgatggaagttgtaaatcccataactttctctagaattctttaaaatcagtctgtaataagttattagaaattaaatcaacttcttgtaatagtttataggtgctccgtacagagaactctccggtcggtttacctttccaaacgcgcaagtcttcactgtccgtttctgcaagtggtatctccaaaatttttttagctatatccgattgaaaggttcaatccttggaatccaccgatctgtccagatgaaaacattgtttctttt

SEQ ID NO: 5077 - DNA, 494 bp, Gossypium hirsutum
  Clone ID: GOSHI-09MAY01-C44231_1
aaaccaaagaacccgtaaacaggagcaattagctgctaaagttgccgcatttttggagcctggagtttctcttaagcgtgctagagaagggaaagagagcaatgccttctggcttgcacttggagggaaaaaaagttataccagcgaaatagaatcttctgagaccatccgggtatccccacttgttcacattctctcttaatagaaaaaggaaagtttgaggtggaggaagtctacaatttctctcaggatgatctcttgacagaagatattttgatacttgacacacgtgctgaagtgtttgtttgggttggtcaatgtgtagatgtcaaagaaaaagaaaatgttttcaaaattggtcaggaatatatagacagggcttcatctctatacggtttgtctccgaaggttccactttacaaagttaccgaaggaaacgaaccctgctttttcacaacattcttttcatgggatcccaaccgagctactgtgca

SEQ ID NO: 5078 - DNA, 616 bp, Gossypium hirsutum
  Clone ID: GOSHI-09MAY01-C44221_2
tatggctagaaaccttgaaatccagatcgaagataagaactcaaaattcccctaggaacttgtggctattgttacccaaacttcccttcaacagaaaacgcagtgttgaagttgtgattgaaaagaaacccaacggaaaacagttgagcgaggagaagaaaacaactaataagccagctgatgaggtgaagttttcggagcctcggccggctgttccaccgcctttgacgcttgaggccgaccagacaggaaggacttccaatcgtgtaattctctggcaggtatatgccattggtggtttctttttactgaaatggatttgggctagatggaacgaaaggaaagagatgggatccaagaaggaagcgtcggacgatgacgaacagccacctgcggtggatgactcccaatatgtgtgattctctctcgattattgttttactaaaccaagaccttatcgttttttctgtacctatttttgcttcgttgttgcttgttgtagttggaaaaaaatacaatttcatggttttgtgtgaaagaaaagggaaagtaaagtttgaatccaatgaatgagttacaaaataatacaatcatcagattgaactccttatttcgc

SEQ ID NO: 5079 - DNA, 565 bp, Gossypium hirsutum
  Clone ID: GOSHI-09MAY01-C44221_1
gttgacgacgcaaataacaaagaagctcagagcaaaagtaaaaatcctttagaacccagaaattttttctcaatgttacccaaagttgagttcaaattcccttcctttgaccaacaatcggaaaaaccagatgcttcggttgaaaaagaggagcaaattgaaattgcgaaaccaccatctgttttcatgggaaaccgccggaaaaatcctccgccgttggaattcgaggcggaggagtgccttgggagaacttctaatcctatagttctctggcaggtatatgccattggtggtttctttttactgaaatggatttgggcaagatggaacgagaggaaagagatgggatccaagaaggaagcgtcggacgatgacgaacagccacctgctgtggatgactcccaatatgtgtgattctctttcgatttttggtttactaaaccaagaccttatcggtttttctggacctatgtttgcctccgtggtgcctggtggaggtggaaaaaaaaaatacaatttcatgattttgtgtgaaaaaaaaaaaaaaaaaatgtcgacgcggccg

SEQ ID NO: 5080 - DNA, 820 bp, Gossypium hirsutum
  Clone ID: GOSHI-09MAY01-C45971_1
cttcgttgatttgcttcaagcccttgatgactcacagtttagcatctaacttcggaaagaccacccttactgctgaacacttgtgaagttgaagttgattgaagagatcccgtcattttgtgaggtttttctcgagaacagggaaataatggaacaggctgacaaattctttacaacccttcagctcaataagaccaaggtcacttcactcaagcaagaatacagcgagttaagacagcaagtaacaagcctgcagtcggaagtagaagccaacacattgacagtacaagaaatcgacaatcaaatagcgcaactgaaatcccatcgcgcacagctcactagattgatagaaaacaagaagaaagacaaggaggagttaacgtacaatcaaaagttggtggcgaactccattcccaaagtcgtacacgaagttcagctcgctaatgccaggaaaccagaatgggagataaagaaagagagcgcagacaaacgcgaagctgaaatacttgctaaatttgctcctctaaaagggttttccctttgaaaaatatcaatcttccccgaatcaaattctctgctaaagagctaataaactaaaacacggtagttatgggactaatcttttagttttttctctataacagcaggaactgaggctgctatttgctgcgtctgcattgcttatctttttattgttcttgtgtgtgtgtgccttgaatgctattaaaagtgccatagcattatcaataggtaggtatccttgtaatttatctgaaagtctttaatggtgaaagatgtcgtggcagtagcataattatct

SEQ ID NO: 5081 - DNA, 395 bp, Gossypium hirsutum
  Clone ID: GOSHI-09MAY01-C45961_1
atgatagtgacgttcggaagaggatgaaagagatgagggcccggagtaggaaggctttgatggacggtggatcttcacactccacgttatgtcgttttattgatgatgtcgtgggcaacatgccatgaaacttcagcacattgccattgctattattatttctaaaataatgtattcataatcaagatttagcttagcttatttaatatacttatattagaaatttataaatttggcacgctcattttgtgataaaatgtataatatgttgccatttctcctagtgcaggagaggggtttctttatagaatatttttaataatgttgaggttgttacgagattatgcgtgtaactactcaagtttcatatgtgaaaatttatcttatgaaggaat

SEQ ID NO: 5082 - DNA, 876 bp, Gossypium hirsutum
  Clone ID: GOSHI-09MAY01-C45881_1
atgaatctaagcttgatgtcctaggggggaggagcaacgatgttgagatagtgccttcaagtggacttcgaaaaagaaagcacagtagatccaatagtgcgggaagcactccattggtgcattctaatgaaggatcaccacctcatcctgtagggaatgagggtcctcaagcttctgagcatgatcgactggttgttgatcattaccatccacaggggccttccgtacaggatgggggatggcttgctcgagttgctgccttgcttgtgggggaagatccaacacaatcatatgcacttatatgtggcaattgccacaggcacaacggacttgctaggaaggaggatttcccatatataacttattactgcccgcactgccaagccttgaataagccaaaacaactggaagagcatggttctagatctagccccatcatggaccccttgcaatcgggagttggcgatgcagcaaaaagtccaagtggtagcatggctgaggatatactcaggagctccagccctgtgatatctggatctgagattgagaaagtgacggaaaaagtagagtcaagtgatgtgattggataaaatgcatacttacatggagcaatgaaatcgattatggtgttctatctcctttgatctcatatgttgcctgtaggtaaactataggaacgcttgagctctggatttttgcagtggttttggttcttgttggttgttttgactaaacattcagatgtcttactaggaacttatgattatacacacattgatatagaagatagatataattgttacattttactctaacaatatgattagttgcatcccaggaaacttcccttttatttgataaaaacaaatctttgag

SEQ ID NO: 5083 - DNA, 1170 bp, Gossypium hirsutum
  Clone ID: GOSHI-09MAY01-C45471_1
cccacgcgtccgcccacgcgtccggcttatgatgcgtcgctctgcatctaagaaagccggtcagcccaattcaaccaattccattaacttttctccctccgatctctttcgcaccgcttcaagtagggcatcttcaaaagagatggaacggattgacaacctgtttcattcttatgccaataggtctcttggtatgattgacccagaagggattgaaactttatgttctgatatggaagttgatcacacagatgttaggatcttgatgcttgcttggaaaatgaccccggtcgacctcgcgtccgcctccctggaggaatggcgaagaggagtgaaagcgctgagagctgacacttgtaagtaaattaaggaaggccctgccagagctagagaaagaggtcaagagaccagcaaactttgaggatttctattcctattcattctgctattgcctgacagaggagaaacaaaagagtatagatatagggagcatatgtcaattgctggatcttgttttaggatcccatttccgagcgcaagttgactattttattgagtatttgaagattcagagtgattataagggcataaacatggatcaatggatgggtttttttcggttctgcaatgagtggttaaaatttccagttcttgcaacaacactttctctggcagaaaaaattgaagaatacaaatgataagtttcccggacttcagtagttataatccggaccttgcttggccattgatcctggataatttcgtagagtggatgcagtcgaagcagacctgaaattatttggtttggtcaacttctcagctgtaacctccatctatctatataaaggctggtgctttaaagtttaaactcccccttttctttgctccctttttctagagccttatgtagatttcccgatagggcataaattagtcaacttgaaagattttgcaagcacaccattctttaatcaaaactgttgtgaataatttgttgtcaggaatgtttgtattgctgattttttttttttgaaaacatgaaagtcttatccaaaaccgaccttccaaaattacctcttcttgttacaaatgtattggggagtctcaatatattgaattgtagcacccatcagtaatacttctaaactgtggtctaactagatttattat

SEQ ID NO: 5084 - DNA, 400 bp, Gossypium hirsutum
  unsure (1)..(400): unsure at all n locations
  Clone ID: LIB3148-040-Q1-K1-B1
cggcccggaacgaccgacgcgaccgagcacgcgtncgcccacgcgtccgcccacgcgtccgttttacttcagtagttataatccggaccttggttggccattgatcctggataatttcgtagagtggatgcagtcgaagcagacctgaaattatttggtttggtcaacttctcagctgtaacctccatctatctatataaaggctggtgctttaaagtttaaactcccccttttctttgctccctttttctagagccttatgtagatttcccgatagggcataaattagtcaacttgaaagattttgcaagcacaccattctttaatcaaaactgttgtgaataatttgttgtcaggaatgtttgtattgctgatttttttttttttgaaaacatgaaag

SEQ ID NO: 5085 - DNA, 624 bp, Gossypium hirsutum
  Clone ID: GOSHI-09MAY01-C45191_1
gggtttcccagtagcctactcagagcttcttcttccaagattgcttctccacacgctttctctccttgcttaccttcgcaaatttatttccactctcttcctctatttgggtctccccgatttcctcgaacccgacattccttggcgcgaatacgcccctgaaacccaccacgcttccgccgcccccgtctctgctctcctcatccgggaactcctacccgtcgtcaagttctccgacctcgtcgacccgccggagagctgcgccgtgtgcttgtacgacttcgaagggcaggatgagatcaggcggctgactaactgccgccatattttccatcggagctgtttggaccgttggatggggtatgatcagaaaacatgtccgctttgtagaacaagtattgttcctgatgatatgcaacaaacgtttaatgagaggctgtgggctgcctctgggatccctggagtctttggtgattattctcaaattactgctttgtagttatacctgtgcttcccaacaaaaaaaaagaggcttttttgtttatcatcttataagagttggtttgtatatatacatgaaaatcccggaaattaccgccatgatcctccagaaggagagatcat

SEQ ID NO: 5086 - DNA, 1108 bp, Gossypium hirsutum
  Clone ID: GOSHI-09MAY01-C45131_1
gaccaagccgcccgccaacccgtcccacgcaatagtctgtaactttgatgggtgggagcttcccaaggttttgggtcagaattcggttgatagagtgttgttggatgccccttgtagtggtacaggagttataaccaaagatccatccgttaaaacctctaaaagtttagatgacatacaaaaatgtgcccatttgcagaagcaattgatacttgctgctattgatatggttgatgcaaattccaaaactggcagatacatcgtttactcaacatgctccatgatggttccagagaatgaagctgtcattgactatgcactcaagaagagagatgtcaaagtagttccgtgtggactcgactttgggtgtcctggatatatccgatttagggagcatcggtttcacaccatccttagaaaacacaaggcggttttatcctcatgtacataatatggacggtttttttgtggcaaagttgaagaaaatgagcaattcaaagaagaatcttgtaagttctgatggttcagaaacagtagagcaaacccagaggccagaggagatccatagtgatgaggacaacaaaaaagagcttgaacaacaaaagatgaagaaacaaatcccgaaagggaaaaagaagagcttaaaggcgaaagggttatctggaaacggaaaggttgaatcaccaccaacattgaaaaaccgggacagaagcgaaaatgggaaggtagaattggcagcgacatcgaaaaagaggaaaagaaattttccttctaaagaggaaatctcaaaagcaagggaagagaagagaaagccaatgagggggaaaaagaagcacccaaagggagccaagagtggaatatgatgcttcttttggtaccattatgcttacagcatgcagtgatttgagaactaaaactggatgacggcatgaatgtttacaatttaatcaaagttttgttttcatttaatttcttagtttaattttgttatttattttagcaacgactgttattttgcctttttaatcttgaatcttgagtaaaactaggacagattacggttatggtagaatatttgatatattatattattatttttgtttagttt

SEQ ID NO: 5087 - DNA, 563 bp, Gossypium hirsutum
  Clone ID: GOSHI-09MAY01-C45121_1
cccacgcgtccgcggacggtgggtcaaaatctgcaaagggcttctccgcttcaccacaatttgttgatcgatcaatcacaaaagacaaatgtacggttcaaatatgtgatcaaatgtctagcaagctcaattatgatgatgaatggcagggaattcaacgcagcacgtttctggtagatggagatgctctaactaactcctctgatcaaaatgcaactgctggggcatctagccgcacctcatcagatacacgaagacgaaggtttgacccctcatcattccagcagcgtgctgaggcattggaaggattgcttgaatttagtgcaagattgctgcagcaagagaggtatgatgagcttggtgtgctactcaagccatttggacccggaaaggtgtcccctagggaaactgctatctggctgactaagagttttaaagagaatactgcaaagcaagaggattaacgctgatgaaccttcaccgtttgtatcatatccatagctgtaatctttaccaattttttagagttcagcttatcccgatttaggccacgattccggtca

SEQ ID NO: 5088 - DNA, 958 bp, Gossypium hirsutum
  Clone ID: GOSHI-09MAY01-C45281_1
gcgtttcgccctccccgccctaaaaaataaacggaatcctctgaaagaggattcgggggctgattccagtgctgttgaacctccgttcaggagttttctcattcgctcatgcgccaccacgcacggtggtcggagggtcaaaaccttcccccttttcagcgaaagtcaggtaatctcttttacttttcactatttgtaatatatgttaaaatattcacctttgtattcgattggctactggtattgtaagtcgatattactgtgctctgttgaatttgtttgtatatttctctcttcgtaaatcgtgtgtatattattgtctttgtaaaaaatcgggatcccttttacaatgaaggtattcgggctttatagccactgtttacagtgtatttacatctttattttacttccttgccatatttgttggttctgctccctcttgtttccttttgcaggcgatcgaagagaagaaagggcactgatcacggcgtcgatttgcgtctcaacgagatacagggcctggaatcacggcacctatgaagggtagctgaaacgacgcaaggtgaaacgacgtgactgaagaaacgttgatgggggcatgatcgatggtggccttgattcggaagatggacagacgctccccgaatcttctagaagcagtgacggctcaaggaggaaaaggcagaaaccctagggtttcctgccttaatgtaatagtttgggccaattgggccactttagttctgggctaggtagggtgtaatgggtaccgggtaattagctgggttttgggtttgggttttaacttttgggctgtaaaaggactgtttaataaataaacatttatttattatttttttgttttcaattttaaagctcgggcaaattttggttattacaagtgataaaccaattttatgtaaaaaattcatataaaataacaataaagctttggttg

SEQ ID NO: 5089 - DNA, 612 bp, Gossypium hirsutum
  Clone ID: uC-gsronu33B156d08b1
gatagtatatttctctcttcgtaaatcgtgtgtatattattgtctttgtaaaaatcgggatcctttatacaatgaaggtatacgggatttatagccattggtaacatgtgtattttatttttatatttattatattcttcttattttatttcaattttatatatattctatattttttaatatttccatatttatattttttttattattataattttatatcttttatttcttttttcctttacctaatattttttgtctttttctcatttatcttcttatcttcattttctttttcttcctccattaacttatttatttatattcattatatttattaattaaatttcttttttcttttatcttataaatttttattactttcttatctcttcttgtttcatatattttttatactatatttacaaatatattatctttattttcatataatacttatctttctacctactttttatctctaaataatatatctttacaaatatgtcttatatctctactatatcatcccaatctatatatacctatattacttttaactattcttccatcacttctatatcttccattctattatatcatattttcttc

SEQ ID NO: 5090 - DNA, 402 bp, Gossypium hirsutum
  Clone ID: LIB3148-037-Q1-K1-F10
gaatgaattaaagtgctagaaagaacctacgttcatgagttaaataaaaaagataatgcacaaccaagcaacggaggaaaaagggaaaaaaaacttacaaattttaagagaaaagtaaaaaaatctattttacttttaactaatttgtaatatatgttaaaatattcacctttgtattcgattggctactggtattgtaagtcgatattactgtgctctgttgaatttgtttgtatatttctctcttcgtaaatcgtgtgtatattattgtctttgtaaaaaatcgggatcccttttacaatgaaggtattcgggctttatagccactgtttacagtgtatttacatctttattttacttccttgccatatttgttggttctgctgcctcttgttttctttt

SEQ ID NO: 5091 - DNA, 478 bp, Gossypium hirsutum
  Clone ID: GOSHI-09MAY01-C46921_1
tcgcccacgcgtccggtcaatggcaagaggagcgttttatcaagttccatacatgttacaagcaggcaggcacatgatagcagggatgggtggcatgcctttttcatctggtcttcctacaatgccagcagcatctccattttcagaaccagcagacctgccactaatgtctggaactggaaccagaaatcttggcctcccacttcttcaaatgccattttttcattcacagttaccactaccagcagctgccactccaacaatgttcccaaattatcttacagctcgtgatacatataacattgtatccaccacttccattgattgccaacaaatcccaattaccattcagtcccatgacaatagtttcctcggtgaaaattatcttgcctcgtcatcgccagcaaagcttccttctagttatcagtaatcgagagcttgcatggcatcacaatgatgaattgatttcccttgttga

SEQ ID NO: 5092 - DNA, 576 bp, Gossypium hirsutum
  unsure (1)..(576): unsure at all n locations
  Clone ID: LIB3829-026-Q6-K6-D8
naagctcccaaggttctgggnaccaaagcagcccatgnaataaaccctctcttcctaagaagggaaagggagcaagcattccggaaaccaacgcgagaagaaaaatcccaacatcaatcttgatggaacgaagtttgatttctctggggtgccttcccccatttgctcttgtactggtgttgcaagagtgtgctacaagtggggtgccagtggttggcaatcctcatgttgtaccatcaatatatcagaatgtccacttcccatgagtcccaccaggcctggtgctcgtgtggctgggagaaaaatgagcaatggagcatatttcaaacttcttctgagacttgcagctgaaggatatgatctttctcatcctgttgacttgaaagaccactgggctaggcatggtacaaacaagttcgttacaatcaaatagagatgcagatggctggtagctgagcataatatcaatagtttcaaatatttagtaccctgctttctagtttgaatgtaatttactgttataccctagagatgatccgacaactcggattgtaaatattgtctctctgactttgg

SEQ ID NO: 5093 - DNA, 370 bp, Gossypium hirsutum
  unsure (1)..(370): unsure at all n locations
  Clone ID: LIB3148-058-Q1-K1-F2
cccacgcgtccgatgtccacttcccatgagtcccaccaggcctggtgctcgtgtggctgggagaaaaatgagcaatggagcatatttcaaacttcttctttttttcagctcctttttagaagtgtttttcaaaagcatttttgaaaagctaaaaatttcagcctaaagcagcttgttcttcacaagttttctttcaaaagtgcttttggaatcagaagtgctttttttaagctatgaagaactggccctaactcatcacctccctctctaagatcgacnncnnanaaaaaaaaacataaaaaaaaaacaatgagctaaaatttataaatgaacatatgcatgaattgttacaaattctttcctactaaaa

SEQ ID NO: 5094 - DNA, 563 bp, Gossypium hirsutum
  Clone ID: GOSHI-09MAY01-C46561_1
gagaaattttgcaaaaacaaagaagatgatgacagatcaacaccactatcttaaaaggccaagtttacatcggccaattcttcttctgatgttgatggtgatgatcccatggagcacaagccattttgctttagacccaccggagaagagaaacagcctcggcttctttcactgcaacggctcgtccgctgaatgctccggcggtaaggttgaggacgacatgttattggagttcttggtggagtcggaaacaagaagaatgctgcagcaaggaggcaatcggccttcgactaacacccttaagcctaatattgcagcttgtggtcgtgacaagtacggctacttatgcactccgccgagcaacaaagatgttaaaagatctgaaaactgtggaggggataacttcaatcgtgcctgccaccaattatccaaatgagcagttaaggttgtcatattcacccgaacaccccccccgtgggggtccttttcatccactccttccttttattcttcattttatcctatgctagttcaaggaaaatcttagatgtttgatgctcgtt

SEQ ID NO: 5095 - DNA, 495 bp, Gossypium hirsutum
  Clone ID: uC-gsronu33B117a08b1
ttctttcgtccgttccacttgctttcccgctccgagtgccacatttgaatttagggtttaggtttttatccagcgctttccaaatacagccactccaattgaatttagggtttaggatctctggggttttcacaatgatgtacggtgatccgcaacagcagcagaaccagccgcacccgcaagctggggagtttcagagaggtcctccgcctccgcaaatgatgcggcagccatctgcttcttccactactcttaactcagagtaccaccaccctggtgctcctcctcctcagatgccgtcttatgacgctcatggtgacaattttgctgcgaaaagaatgagaaagctgacccaaaggagagctgttgattatactagtactgttgtgcgatatatgcagattcaaatgtcacagcgggattcacgggacaggacaacattgcagcctacaccagcagcagcaattgatatgttgccgacagctgcttatttag

SEQ ID NO: 5096 - DNA, 412 bp, Gossypium hirsutum
  unsure (1)..(412): unsure at all n locations
  Clone ID: LIB3148-052-Q1-K1-C4
cccaaatcaagtatcgattcgccttcatcttcatctccccaaaacgactgacaaacaatagagggaagggaggtaatctttttttatagtcatcaagcttcatcctctccgacgtttcccttccattgattgcagagctcatggtgacaattttgctgcgaaaagaatgagaaagctgacccaaaggagagctgttgattatactagtactgttgtgcgatatatgcagattcgaatgtcacagcgagattcacgggacaggacaacattgtagattcgaatgttctaaccttttgatgttgtaaaactgtataacatatggattatgacatagaatttcatgaaattcatngaaatcatgtaaccattttgtaatatatgaatattaatgttatgcaaaatataantcctc

SEQ ID NO: 5097 - DNA, 510 bp, Gossypium hirsutum
  Clone ID: GOSHI-09MAY01-C46291_2
ttatctttcagcattatactgtttagaacactggaaaccgacgccggaaaaacgaaaggcggccggttcattgacatttacagatgatgaagagaaaaaaagtaatttagttttcaaaaaagaacattttaacatgtctatggtttaatttgccaatcatgtaatgttctgtgttttacagtttcttgcttttcaatccagcactcaagcttggtgtcttttcccattttcaaattgggttaaatttagggactggattggatatttgcctatatatatatttatatattcgaatttatatattttaacacgcctttttctttgatttcatattataaaaaaaaaaaaaaaaaaaaaaaaaaaaaaaaaaaaaaaaaaaaaaaaaaaaaaaaaaaaaaaaaaaaaaaaaaaaaaaaaaaaaaaaaaaaaaaaaaaaaaaaaaaaaaaaaaaaaaaaaaaaaaaaaaaaaaaaaaagggggggccccctttttagagaacaaaattttttt

SEQ ID NO: 5098 - DNA, 612 bp, Gossypium hirsutum
  Clone ID: GOSHI-09MAY01-C46291_1
ttcttcgcgtccgcttggctcaacctactcgaaaacaagactgcattcaccacaaagaaagattatggcaaagaagaaagggaagcacaatgggcacttgcccaaagaacattgcacggacttcaaccaccggaaacttctaatctcttcaatgacaagaacagttaccgggagttatcggagatcgccgagcaggccaagagacgagcggaagttgcaaggcttcgtgtgcttcatacactcaaagggcacgtcgagtccgtggtgaaactcaaggggctggatatcgatacgatccagcagcattatactgtttagaacactggaaaccgacgccggaaaaacgaaaggatggcagttcattgacatttacagatgatgaagagaaaaaaagtaatttagttttcaaaaaaagaacattttaacatgtctatggtttaatttgccaatcatgtaatggtctgtgttttacagtttcttgcttttcaatcgagcactcaagcttggtgtcttttcccattttcaaaaaaaacaaaaaaaaaaaaaaaaaaacaaaaagaacagaaaacacaaaaattaatgaaaaataagagggttcaatatgacccaaaa

SEQ ID NO: 5099 - DNA, 326 bp, Gossypium hirsutum
  Clone ID: uC-gsronu33B113h05b1
gcatagaaaataagttatttagttttcaaaaaagagcactgggtcatgtttatggggtaattggccaatcatagtaatgtgtctgtgttcatacagttatttgcttttcaatcgagcactcaagcttggtgtcttttaccattttcaaattgggttaaatttagggactggattggatatttgcctatatatatatttatatattcgaatttatatatttttatatgctctaatctttgcaaaaggaaaaacccaataccaaagggtgaaaaacaatcatgttaattaatccaaaacctttttgtggagagtttggatataaagct

SEQ ID NO: 5100 - DNA, 501 bp, Gossypium hirsutum
  Clone ID: GOSHI-09MAY01-C46271_1
gatagatgcaagttccatcaccccattgatcggttaacaaccaacgaagcttctcaggaagctattaagctcactcttgctggattacctagaagagagggatctgttcattgtccgtactacatgaaaactggaacatgcaagtatggtgcaacatgcaaatttgatcacccgccccctggggaggtcatgtctgtgactggagtacaaggaacatccacaacaatgtcgggatgaggaacatgatatggaaactcagctacgggaagctactttgtgatgacgatttagccgggtttatagggctttctgtatcaaggtctgttagcatgatgcctagagtggatgggcaatatgaatgtacctagagtggaccatgtgaatttaatgtatttgtcaattaatttttgagaacacaatgccatggtagtagttgaattgttgcttgcagttgtattggtgtttggactagtagatatttggcaattttatgttcccgtt

SEQ ID NO: 5101 - DNA, 520 bp, Gossypium hirsutum
  Clone ID: GOSHI-09MAY01-C46211_2
tagtttcatgacctcaattttccttcaaagtttatccatttttttgttcatgattttcacagttctcaaagacgccgatcccgcttttatgataattaggtatgtactttatggatcaccgtgtccccttgtatccaggctttactttacatagcaaactgttgatgatgagcccagcctaccttcaattttcactgatatttgacaaccctaaaacccatggctttgctcaagggggtctggggctataaaccagccatattcattaactaatttgctcaatttttgcaagcagccgcatacccaggaagtgaagctgaggattgatcctgtccatgtggtgagcgatatggtaattgctgctgcagacagttttagattcttaaacatgtaaaaatacccttggagcctgttatgcttgttttgtttcagacttgaatttcatgtggttctattttgttcattttcgataatatatattacgcaaatagacatccaatgggaaacgattatgagtttt

SEQ ID NO: 5102 - DNA, 434 bp, Gossypium hirsutum
  Clone ID: uC-gsflnu33B066b10b1
gcgtgggtcaagaggcagtgatactcgaaggagaattcgccgctctagttatgcttcatcaacttctgatgagggttcagtgcattctgtagaatttgcagaatatagagtagatgagactgatgatgagtttgtgagcacaagtggctcctcaagaggtagcaccagctatcaaagttctcaaagacgccgatcccgcttttatgataattagccgcatacccaggaagtgaagctgaggattgatcctgtccatgtggtgagcaataaggtaattgctgctgcagacagttttagattcttaaacatgtaaaaatacccttggagcctgttatgcttgttttggttcagacttgaatttcatgtggttctattttgctcattttcgataatatatattacgcaaatagacatccaatgggtaaaccttcccc

SEQ ID NO: 5103 - DNA, 534 bp, Gossypium hirsutum
  Clone ID: GOSHI-09MAY01-C47951_1
tctcccttttataaaatattagtttgtatttcgtggacttaaatgaaaatggaaaaaaaggaaaaacagaataaaataatgatgaacaaccaccttttgaaatgtattcgtttggctgatctcttattgttttctcgtgtatattttgtattcaaaactcgtcccttttacaatgaaaaacgaaggctttataaccaaaatacaaacaatttctgccggtcgcgtggcgcgagtcgaaggtgctgtgaaatcgtggaggaagagtgcatgatcgtgcaacgtgcgagctaggaattcgttcgtgggtgttgaagtgtgggagttgcggcgtgggcaaatggaaccctagggtttgctattttttgaaaaaatttgggtcgttgggcttgtaatcgggccttttaattttagtgatttgggtctgtatcttgggtcgggcaaaatttgggccctacaccagtaaataaagttttaagctgtccatctctgtaaataaagttggaaatcagccttttttttagtaaaatagttgtg

SEQ ID NO: 5104 - DNA, 350 bp, Gossypium hirsutum
  unsure (1)..(350): unsure at all n locations
  Clone ID: LIB3135-039-Q1-K1-A5
gcagaggctgtgaaatcgtggaggaagagtgcacgatcgtgcaacatgcgagctaggaatccgttcgtgggtgttgaagcgtgggagttgcaccgtgggcaaatggaaccctagggtttgctatattttgaaaaaatttacgtcattgggcttgtaatcgggccttttaattttagtgatttgggtctattttttgggccgagcaaaatttgggccttacatctgcctttaaataaaaaaatttaaacagatttattggnntctgccnttcatgcccataaataaaagttctgtttagcaacagtaagtgtttttatatttggacactgcttaatcttaaatgacatcaa

SEQ ID NO: 5105 - DNA, 566 bp, Gossypium hirsutum
  Clone ID: GOSHI-09MAY01-C47871_1
cccatgcgtccgcccacgcgtccgcaacaaaggggcacaattcgacgctttctagttgtgcaggggaaaaggtagaaaatggtaaatcatgaagaggaagaagaagatattgtgtggttggacggatctttcttcatcaatgacaattaccagcttacttctttcacctttgggtctcatgttctccagctctattgtcttcactcagcttctactgattttgatttgacaggacaattggtatggcctggtgcaatgcttttgaatgattatctctctaaaaacgctgagatgcttcaaggatgttccgtgatcgaattaggctctggtgtgggtatcactggcatgctctgcagcagattttgtcgtcaaattcttctgactgatcataatgaagaagtgctgaagatccttaggagaaacattgagctcaatgcattcttctgaaaatcctagttgttgtgctgcactagaagctgagaagctggagtggggaaattctgatcagattaacaggattttacacaaatatcctggaggttttgaattgattcttggtgctgaca

SEQ ID NO: 5106 - DNA, 423 bp, Gossypium hirsutum
  Clone ID: GOSHI-09MAY01-C47501_1
ctttctcagtatgtggggatattgtagctcagctgaatcggagaactcgaaagccgcctccgaattgatacattaaacctcagttgaacttggaaacattgacatttgagcacttcatgtttgataaaatgaggaaatgggggattcttaacctttttaaaacacctttatgctctttcgtcaaagccccgaaccaatctaatctttaagaaggaaggcttcaaacagcatataagataaaaaatcaaatgtataccactttgatatgcttaatttctttcccacaattcttttacaaaatcaatttgcttgtaatgagattggtaattactgtcaataaattcaataatagaatgagtattatacagggcgagcgtcagttaaagagctccctccccaaaaaatatggcaccaacacacttt

SEQ ID NO: 5107 - DNA, 829 bp, Gossypium hirsutum
  Clone ID: GOSHI-09MAY01-C47491_2
cccagcgtccgcccagcgtgcgcgtgacccggtcccactccaagtgtcgagccacccagctcactattaacaatggcgcatcatcgtggctccgaccctgaaaccgaaccaaacacgcaactttacaacccataccaagacttgaaccttcaagttcccataaccaacctgggcgagcgcgccaacctctccggagttcctctttcctgaggaatccctccaccaacgccgctcttggggagaaaatctgaccttttacaccggttccgcttatttaggtggctctgtatccggcgcagccgtcgggctcttctcggttctcaagaacttcgagcaaggcgatactttgaagctgaagatcaaccggatcttgaatagttcgggtcatacgggccggacatggggaaaccggatcggggtggtgggcttgatttatgcggggctggagagtggagtcgtggcggtgactgatcgtgatgatgtctggagcagcgtggctgcgggtctggccaccggagcgggttgtcgtgcggcgagaggggtgagggccgcggcggtggcgggtgctctgggtggggttggcggcgggagcagtggtcgctgggaagcaagttttgaagagatacgtgcccatttgaaaaaagagatgattttgcaataagttgaggccagcgggttatttaaaggatggaaaggagaagtgattgtatattcaccagagttatgttccgttgttgtttctgactctggggttttgttcttttctttaaagattgggaactttagtgacaccccccaaaaatttaaggataaggtgctagattttatt

SEQ ID NO: 5108 - DNA, 926 bp, Gossypium hirsutum
  Clone ID: GOSHI-09MAY01-C47491_1
gcgttctcgaaagttcctctccgttctctcccataaaaccaaaccctaactcgaattcagagccaccaaactcaccttaacaatggctcatcatggcggctccgacccagaatccgaaccaaacacccgactttacaatccataccaagaccttaacctccaggttcccatcaacaacctttacaagctccctacctccccggagttcctcttcgctgaggaatccctccaccagcgccgttcctggggcgaaaacctaacgttttataccggttccgcttatttaggcggctctgtatcgggcgcagccgtcgggctcttctccgctctcaggaatttcgagcaaggcgatactttgaaactcaaaatcaatcggatcttgaatagttcgggtcacacgggtcgatcatgggggaacaggatcggtgtggtgggcttgatttatgcggggatggagagcggggtcgtggctgtaactgaccgtgatgatgtctggagtagcgtggcggcgggtcttgcgaccggagctctttgtcgggccgcgagaggggtaaggtctgctgcagttgctggtgcgcttggtgggttggcagctggaaccgtggttgctgggaagcaagtcttgaagagatacgtgccaatttaaagctggaattttcagtgagttgatatttcgttgaatcgaaaattttgatggtgctaggtcgaatctttgggggaaaaattgataataggtttctaagaaatttaattcatgtaatatgtgaaggtaatgtgatgaataatcgtgtgcctaacgattaatgattttcgaagtttctttgttctatattaatgatcggtattcgatcaaccatgcttttctctttgtttattatctacttaattgtgataaatggtaattagaaatttctttattgttagtt

SEQ ID NO: 5109 - DNA, 957 bp, Gossypium hirsutum
  Clone ID: GOSHI-09MAY01-C47401_1
gaaaaatctgagacgagcagcctgggggtggggggaggtgaggagaaaaatgaaactgaagatgaatctgaagagccctgggaaacacgaaaaagatagaaaagtatcatctgggaaagaaggaatctgctggaaaagctaaaacgaagaaagtgtcgattcccaaaaagtctactccacagaaaagaaccccaaaaacatcagcatctaaaagttcaaaggcagatgatgatagtgacaaaagtccaaaggtgtcttcgaggaagaaaccggagaaggtcactaaggaaaagtcctctacaccgagtacatctgtgtccaaggagaaaaccagcaaaagggctggaaaggggaaggacaaagctaaagagcaaaaactgaagccaagtgatcatgaactaagggatacaatttgtaaaattcttaaggaagtggacttcaatacggctacattcactgacattctgaagcttcttgctcaacatttcaatactgacctcaccccgaggaagtcatcaatcaagctcatgatccaggaagaacttaccaaactagctgatgaagcctatgacgaagacgacgaaggagatgccgagaaagacgaaacccaatctgctggtcaagaggttcaagcctgaccctacaagatggacaataactacatgcaaaaatgacaaaaaggaaatgtaggtattcatgtcttgtgccaatatgtactttttagttgttatttagaagggtttggttgtaaactattgttgctttttccgatgagctaattagcatttatgaaaaatactagagggggaaactgcagttgcacccatctgtgttgcaggatatgtacaaaccattaacataatctgtaggaactttactatttgaaaaaccaagtacttttgagttatagaacacagctgcatgtggttttttctttaaagaagaaaaagggggggg

SEQ ID NO: 5110 - DNA, 380 bp, Gossypium hirsutum
  Clone ID: LIB3146-038-P1-K1-G3
cccacgcgtccgcccacgcgtccgacacaattatgtggaaccatcaccatattgtgttctatgttgatgaagtgccaatccgagtacatctgtgtccaaggagaaaaccagcaaaagggctggaaaggggaaggacaaagctaaagagcaaaaactgaagccaagtgatcatgaactaagggatacaatttgtaaaattcttaaggaagtggacttcaatacggctacattcactgacattctgaagcttcttgctcaacatttcaatactgacctcaccccgaggaagtcatcaatcaagctcataatccaggaagaacttaccaaactagctgatgaggccgatgacgaagacgacgaaggagatgccgagaaagatg

SEQ ID NO: 5111 - DNA, 313 bp, Gossypium hirsutum
  unsure (1)..(313): unsure at all n locations
  Clone ID: LIB3149-025-Q1-K1-F11
cggtcgacccagcgnccgggccaaggagaaaaccccaagagggctggaaaggggaaggacaaagctaaagagcaaaaactgaagccaagtgatcatgaactaaaggatacaatttgtgaaattcttaaggaagtggacttcaataccgtaagaactgtatactaatataatgactgcagcctttactggacttttcttcacaacatttttggtctggtccgactgctaagactatattggttgtgaggacgtgtttcaatgctcattaagatgccattgataacaattgtaatattgttcacattcattgatt

SEQ ID NO: 5112 - DNA, 259 bp, Gossypium hirsutum
  Clone ID: LIB3135-031-Q1-K1-H11
acgcccacgcgtccggagaaaaatgaaactgaatatgaatctgaagaacatgtgttagggaggagaaagagttgaaaagtgtcatctgtaaagaaggaatctgctggaaaagctaaaacgaagaaagtgtcgattcccaaaaagtctactccacagaaaagaaccccaaaaacatcagcatctaaaagttcaaaggcagatgatgatagtgacaaaagtccaaaggtgtcttcgaggaagaaaccggagaaggtcacta

SEQ ID NO: 5113 - DNA, 553 bp, Gossypium hirsutum
  Clone ID: GOSHI-09MAY01-C47741_1
agtcgctcaacagctgccagagctcttgtagattgtgctactcgagcatggaggcttaagtaccctacttctaagaatgatgattgtgctgtcgtatgcctctttctggaatatttgcctgcaagtaatggaactgcagaagagaatgacttaacaaggattcctaaggaatgcagagaacctatggtggctattgatgaaaataagggagattctcacacttcaagtcttggtcaatctgatgcatttcatggttctacggagatagttcctgtaactgaactgacagaagaaatgttgtcttcgaagttcccaggccagtctaagaggagtcttgctgagtgcatctcggttgccgatgatgaagagtggtcagccttagaaggtattactagggttaatagcttattaagccttccgaggtttctatctagtcataaaagatcaactagttcgagaagaaaatggttatgagaactgacacagaagtcatttagcaaaataaacatgttttggatgatctcacattaatgaattatgatatttgttgttc

SEQ ID NO: 5114 - DNA, 650 bp, Gossypium hirsutum
  Clone ID: GOSHI-09MAY01-C47711_1
aaaagaatttataactctctcaatacagcaggcatacaccttgaatactcacattggtaaactcaaactcccagtaacatgcatgcctgtatttcccggcctcagcatatttcttatactgtgtctctattactccgtattcgttcctgtatcacgacgcatcaccggtcatccacacggtgcttctcagcttcagagagtaggcattggtctgtttatttccatcttatctgtagcctggggtggggttttcgaaaggtttcgaagaggctacgctataaaacacggctacgagtttagtttcctaactcccttgcccgatctaagtgcatactggttgttgatccagtactgcctgattggtatagctgaggtgttttccatagtggggctattggagtttctatacgaggaagctccggatgcaatgaagagtataggctctgcatatgctgctatagctggtggcttgggttgtttcgctgccagtataatcaacagtatcgtcaaatcggttacaaggaacccagagaataagcagcggtcctggctatctcagaatataaacaatgcgaaattcgactatttttactggctgcttacagttctttctataatcaatttctgcttttttctgtattcagcacatt

SEQ ID NO: 5115 - DNA, 799 bp, Gossypium hirsutum
  Clone ID: GOSHI-09MAY01-C47661_1
caattcccaaattcttagaaaccctaaatcttcgctaattgtttatgcccattctgccctcccataaaaaccgttagagatattcctagggtttgcatttgcggtttggggtatagggttttagacaacgccaaatcttggatttgaggaatggcgactgcgacgggacaggtgaacgcgaagagaaagccggtgttcgtgaaagtggaggatttgaagcccggtactagtgggcacactttgatcgtcaaagtggtggagatgaccccagtcaagacttccgccaggcccaacaggtcccgtgctctcctttctcgacctgtccctccggtccggatcgctgagtgcgtcgttggggacgagactggcaccatcatcttcaccgcacgcaacgaacaagttgatcttatgacaaaaggtgcaaccgtgattttacgtaatgctaagattgttatgttcaagcgaacaacaatgaggttagcagttgacaaatggggacggatcgaggtaaccgaacctgctaaattcgcagttaaagaagataataatctttctttagttgaatatgagcttgttactgttcctgaccagggcatgaattagggcctttgtttattgtgagtgaatgattgaatatatatatttctaggaagttaatactttttaaaaagtaaccattgggcttgattcttggcttggttttgtgtcatgatcagtcctttgagattgcggtagtacttattagtattggacatatttcattgtgaaatcgagtttaattctcttttgcttcttgttt

SEQ ID NO: 5116 - DNA, 934 bp, Gossypium hirsutum
  Clone ID: GOSHI-09MAY01-C47131_1
cccacgcgtccggttcatccaatagtattacacaaattgaacttccgatcaacggaactatgagccaggaacaaccacaaaggcctggggctagtcaggaacccatcaagtatggtgatgtctttaacgtcaccggtgaactggcttcaaaacctattggaccaaaagatgccgccgccatgcagtcagctgagaacaagatccttggagaaacaccaaaaggtggtgcagcagctgccatgcaatctgcagccatcgccaatgaaagagcaggcgtcgttagtcacaaccaagctgacgttgctggagaccaaggcgtcgccgtcattaagtctgacgcagatggcgatgttatgatcacagaagccgttgctggacagattgtggggcaatacaggcaaccagatgtttcagcggtgactactccagcaatgttggttgatccaggatcaattacgattggagaggctttagaggcggcggccatctctgctgctgataaaccgattgatcagagcgatgcggctgcaattcaagctgctgaaatgagagccactggcagcagcgagataactccgggcggtattgcatccgaagctcagtctgcagccactcggaatgctcgaacccagcggtttgaagatcaaccccctctctcggacgttttatcggatgctactgcgatgctgcctaaggataaagcagtgactcgtgaagatgctgaaagggttgtagcagctgaggtgagaaataatccgggcatgagtactacgcctgggggagtgggtgcccccaggcccgcacctgctaagcgtaatcaaaattcaccaatctagatcttaccactaggctatttaataaacccccatgtgttcggcttttttggaaagaaagtaaccctttacgggctcagtaaaacaaaacaaaaagaggg

SEQ ID NO: 5117 - DNA, 835 bp, Gossypium hirsutum
  Clone ID: GOSHI-09MAY01-C47011_1
tttttctcttctagtttccttttaatttcaacaatggaatctacagataaaccggcggcggtagcggcgacgacaaccacaccaccatcaacgacggttgctgctagcatatgcccttttaattatgcagctgtagatgttggtcttagggtggtattgtttgctgcagctgtaattgctgtggtggttatggctactagcaagcaaactgaaatggttcctgttccaggcttgcctacttcagttagggttccttattcggccgagttcactgattcacctgcctttgtatactttatggcagcactgtcaacaacaggcttatacagcatcatcactgctctcgcatcaactttgctcggctgcaagccttcttataccaacaccatctggctcgcctttgcattaatggatgtggtatttgtgggaatcgtcgcctcagccaccggtgccgccggtggcgtcgcatacatcggattaagaggcaacagccacgtccggtgggacaaaatctgcaacgtttacgacgagttctgtcgacacgttggaacggcaatcgcattctcgttatttgcggccatcttgttggtgttcctcaccatgttctccaccttcgccctttacaaaaagatccggtgatattttttagaaacacagttcttaattactctcatgtctgaatttggattgcgtgttcatcttttgactatataggtggcaagtgttattgtctgtaaatgatggcttagttggtattttggtttttttttcttagatttggttgtatggtttttttattacatacgaaattggattggttcacatttttttagtt

SEQ ID NO: 5118 - DNA, 362 bp, Gossypium hirsutum
  Clone ID: LIB3135-025-Q1-K1-E6
gcttatgtatcaaactattgtagcaaaattgctacttgccttttaaccttttatttcatgtagcggtgcaatttcactgtaaaatatcttggcacttaatttatagctgatatatatataatgtgacaaaatttttgaacatgctgcatttcttgtctgtatgtacatagcaatgacatttatttcaacttttgatcaataaaaatgaagggtgaaatcatgttattgagcctccaacatatgaagacgatactgacgaggataggtcaaagagctattataagattgtaagttcggcagaaaactatgcaacaattctttcaaagctacgtgatgaagggataaatttcgagacggataac

SEQ ID NO: 5119 - DNA, 359 bp, Gossypium hirsutum
  Clone ID: LIB3135-025-Q1-K1-E2
gccacgcgtacgggtggagttagcatggtattggaggtcttaacagataaaataactcggtcaggggcagctgttatggaggtagtcaaggactgtggaggaaagatggcagatcctggttctgttatgttcaagttcaggcgtgttctgagttgttaatataaaagtcactgatgctgacaaagaccagctccttaacattgcattagatgctggtgctgaggatgttattgagcctccaacatatgaagacgatactgacgaggataggtcagagagctattataagattgtaagttcggcagaaaactatgcaacaattcttttaaagctacgtgatgaaaggaataatttcgaga

SEQ ID NO: 5120 - DNA, 330 bp, Gossypium hirsutum
  Clone ID: LIB3135-025-Q1-K1-D8
gagcgacccgtcacacgtccggtaggaattagcaacaaatttggtgtcttaacagataaaatgactaggtgaggggcatgtgttcatgacgaattagatgactgtacatgaaagatggcaaatcctggttctgataagatgaagttcaagcgatgtcgaattgctaatattgaaataactgatgctcacaaaaaacaaatacttaacattatattagatgctactactcttgatgtttttgagcctgcaacatatgaagacgaatactgacgaggatacgtcatagagctattataagaatgtaagttcggcagaaaactatgcaacaat

SEQ ID NO: 5121 - DNA, 1014 bp, Gossypium hirsutum
  Clone ID: GOSHI-09MAY01-C47281_1
agcgaatccatctgcacagattccaccacagcagtcatctcagacaagtgaggttgacccaaatgaatctcagagctctgtcgagaaaatcattcaagaaatgatgatttcatcacagttcagtgagactggtagcatggtcagtgttggctctatggagaatgacttgaataacaacaatgggcttccacaggtgagcggcagctgcttgatggggaatgggtttgttaacaacaattcaggcatcggaagtggaggaggatttgggaatatgaatggtggggtgggtctttctcccaatccaactgctatgagatctaccatagggaacaactctatgaattacactggaagggtgagcatgccattgatgcctcaagatgctatgaaccatcagcaacaagaattagctaacagattactgaatgggcttggagccgtgaatgggtttagtaaccttcaatttgattggaaatccccctaaattagccttgctgactattgttttatgcatttgcggaggtgtgtggtgttaatacagagtgcttgtgccatgcatcctggttgtgccttttgagtttggagtggtgatgtatagttaagaggatttcttcaacctgatacctgttatagagagaagggcaacatgtaactcagccttggcggttgaatagttaattgtttacattgcttttcttccccctctccactatctacagtgtgcttgtgtcatggccagcgtgtgagacccaagagtggcagcggtagacacgagagtattggtggccatgtatgcgaggaaggtctgcacgagtgtcctaatatgatttggaggtgttcccagtgcattcgaacggaactcggcttgaagctttccgagtatagcttccaatcattgttctcgttctgatagaaattttgtagtacatgaatgaatgaatataaatattttattttgttagtaatgaacgtgcctggggggagaaacaagcctgttccgataattttattcta

SEQ ID NO: 5122 - DNA, 495 bp, Gossypium hirsutum
  Clone ID: GOSHI-09MAY01-C40861_1
cggttggaattcccgggcacgacgccacgccttctaatggaaccacaaagcttgttctctgggttttgctcaaactcaactaccccagggtatagaaagtcctcaaaatccattatcttcctcaccaccttctctttcttttccttgtttcaatcaatccaaacatcaagtttcttttgaaatgcaatatctcctatcttctcaaagagtcgaggtctgtaagaagattactgtgtaaaaacagtgtagaaaaagtaagtaatcttgtctctgagaaggaaggttcaaaatcatgggttaagcggaaaacgctagctgcttttgtctctggtggaggctcgaatttcaggtcaattaaccaagcatgcgtcgaaggctttgtcaatggagatgttgtagttctgggcactaataaacatgcttgtggaggtgcacaatatgctagagataaaggcatcccagttattttgttcccaaaaacaaaagatgaacctg

SEQ ID NO: 5123 - DNA, 402 bp, Gossypium hirsutum
  Clone ID: GOSHI-09MAY01-C40481_2
aacgaatgggtcttacctttgaaagagtcaagtattggttaccggcgcgggcgcagccttcagagccggtgcaacgcatccttttccgagctggagtattgcctccgccacccatggtggcaatgggacgcaagggtggaccacgcgacacgcgtcccgttgatcctatgaccggtcgtgttttaaacgaagagaaaccaattgctggcaaccaagaaaaaagtggcgaagatgaggctggtgatgagtcaaactctgcatgaaaagtttatattatccctaagactcctcactctgcaatatctaaaagtcgggaaaaatgaaaagggggattatattggatgattggaaatttgtgtctgaaaaatgacatttgccatttgcggaaactgccagcttatt

SEQ ID NO: 5124 - DNA, 1045 bp, Gossypium hirsutum
  Clone ID: GOSHI-09MAY01-C40481_1
aaaaaaaacactttctattcccaaatcagtaccacctccacctgcccaacgccgctgccgtcgcagctgtctccactccggctgccgctctgtcacccgcttcctctgtcgccggcgcctatcaccgttgcgtcgtcctgctcgttcttccatcaatacactgtggagtgtcgtcgttcccgtcaaactgctggttcatctgtcgccggcgttcaccactttcgtcaccttctccgctccagccttcagccgtcgccgtcccgctgtgccgccgttcaacaggaacaacaaaacccaaaaccctagcaaagcagtggtgtgtgttgaacgggttattgaatcatatcggtaagaagctaagagactgtgtgaaagaagaaaaatggtagtgaggattcgattgtctaggttcggatgtaaaaacaagccattttatagggtgatggctgccaatagcagatccccaagagatgggaagcatctcgaggtccttggttactacaatcctttgccaggccaagacggaggtaaacgaatgggtcttaactttgaaagagtcaagtattggttatcagttggggcacagccttcagagccggtccaacgcatccttttcagggctggagtattgcctccgccccccgcggccgccctcgcgcccgagggtggaccgcgtgtcatgcgtcctgttgatcctatgacaggtcgtgttttaaatgaagagaaaccagttgctggcaaccaagaaaaaagtggcaatgatgaggctgttgatgagtcaaactctgcatgaaaattttatattatccccaggagtcctcactctgcggtataagttggggaaaatgaaaaggtggatcatattggatgattgtaagtttttgtctgaaaaataacatttgccatttgcagaaactgccagcttatttccagtggcctggtcctgggtacaagatgagtttaattaaatgtgatctaatgacaaactattttggattttgaattcactttacaatactaaaccaaacatgttgatattattgct

SEQ ID NO: 5125 - DNA, 946 bp, Gossypium hirsutum
  Clone ID: GOSHI-09MAY01-C40711_1
caaaaacaaccccctcccctccgcttgtcctttaaacgtttcaatttcatgatctagaaaatgggatttggggctttaagaagtatcgttcgaccactatgtcggactctcctactatcccaggcttcccctgcttctggaactatgtcgactctcccctcttatttgtgcccaaaaccctgtttgaattcccttttgtgtgggtctatttaccgccaatctccatggatcgcgatgtccaatcagttgcatagcttaaccgatactcgtttcccaaagagaaggcctcaagacaaggcacgccgaaaaagagccagcttgaaacctcctgggccatatgcatgggtgaagtatacaccaggggagcctattcttccaaataatcctaatgaagggagtgtcaaaagaaggaatgagaaaaagagaatgaggctgcgccgtgcgtttaaattggcagaggcaaagaagaggaaagctcaattgcaggaagctaataggaaggagaagattaagcaagtagagcgtaagatggctgcagtggctagggatagagcatgggccgaaaggctggtggaactgcaggggcttgaggaagagaagaaaaaggccatggcttgaaatttcacttgcttatacgctttgtcttccgatgttatgctgattttgagacggtttgtaagaacttaattatgtttccgtcctaatgtttggttacgccagccggtctacagtttaatggcatttagacatctgatgttggtttctctagttctgcactttttcatttatagactggaaatttgtatctttgtgtttaggactaggaaacagaaaggtgttcaaaagttccatttggccttggctgaggacttatttttagcacagtgaatcaagatctgaaataatttgagattaaattttattttataatgaagcttgtgatttc

SEQ ID NO: 5126 - DNA, 404 bp, Gossypium hirsutum
  Clone ID: LIB3493-011-P1-M1-B12
cccacgcgtccgctctgctcaaaaaaacaaccccttcctcttctcttgtcctttaaacgtaacaatttcatgatctagaaaatgggatttggggctttaagaagtatcgttcgaccactatgtcggactctcctatcccaggcttcccctgcttctggaactatgtcgactctcccctcttatttgtgcccaaaaccctgtttgaattcccttttgtgtgggtctatttaccgccaatctccatggatctcgatgtccaatcagttgcatagcttaactgatactcgtttcccaaagagaaggcctcaagacaagccacgccgaaaaagagccagcttgagaccacctggcagaggcaaagaagaggaaagctcaattgcaggaagcttatatgaagaagaaga

SEQ ID NO: 5127 - DNA, 606 bp, Gossypium hirsutum
  Clone ID: GOSHI-09MAY01-C40651_1
ccagaaaccgggtccgggaactgagcgttatttcgggttgttgtatcctaacgggacaaacatatacgggatcgatttgactgggaagactccggattcgtgtttcgagccgttgccgaggccagataataacgagccgtataaggggaagatttggtgcgtggcggctaaaggtgttaacgagactgcgcttagttcagcattgtcatacgcgtgttcgcaggggaataagacttgtgacccgattcaacccggaaagaaatgcttcaaaccggattcattgttttggcacgcgagctacgcgtttagttcttattggtcacaatacaggaagactggcgccacctgttattttaacggcttggctactcagacggctaaagatccaagttttggtcactgtaagtttccaagtgttactctttgatgaatacccaatcacaaattgaatcgaattttatttatttgtagtaagacagacctaaaaattattctaaagttagtaaaaaattttaaatattgtataaggggtgattacgatttcttcaaattgtatgatctcattcattaaatgaattaataaatttattataattttatcttgct

SEQ ID NO: 5128 - DNA, 802 bp, Gossypium hirsutum
  Clone ID: GOSHI-09MAY01-C40141_1
cccacgcgtccggtcgccgccaacaatgaaacttctagaacctagaaatcagtttgcagccgtgggatcactcctgagacttgaatttcagcgaagcaaagaagaacccgtggcgaatttgcaaagtacggggtctgctggtatgtgtacgggggtgtgggcgtggcgtacggaaactgtgctggcgcggggcgtggctgctggacggtacggaggccgtgcatggggggttgcttggttgcggcgcagaggaaaaggagatgtcctagggttttgtcctgttttagtgttctaggcctgttgggtcctgtagattcgggtcagggtttaattattgggcttgggttaatagactgtggtttttatatttatttgtttgtttttggtttgtttgtaatgggctcgggcacatttggcccactacactatatattgtgtttttgttcttttgtcaattaaaaaaaataataattaatatataaaataaaaataaaatttaattaaaaaaaaaaaaaaaaaaaaaaaaaaaaaaaaaaaaaaaaaaaaaaaaaaaaaaagggggcggcccccctttttttttttttttttttgcaaaatttttaaaaaaaaaaaaaaattttttaaaaaaaaaaaaaaaaaattttttcttaaattttttttccctaaaagcctttttccccccttaaaaaaaaaattatttttttggaaatttgcccccataattaaatatccccttttgttaaagggcccttttattaaaaaaccgcggttttaacctcaaaaaaaaaaaaaaccccccccc

SEQ ID NO: 5129 - DNA, 607 bp, Gossypium hirsutum
  Clone ID: GOSHI-09MAY01-C40161_1
cttgagcgtgaagtggtttcaatactgaagctgtcaaatttctccgttatactccgtcctcaagaatcagtttcaaaaaccctcttccatttcgtaatataaaccatggcggctcaacccgaacgcggcggagtttccctacccgagaggcggtctgccgccaagccggaatccaacatcctcgccaggatcacttcctcccctctcgtttctcgtggtaagcaagccgcgtgcgacgccgctttcgtctccaagaagctcctccgtagcaccggaaaggctgcttggatcgccggaactactttcttgatcttagctgtccctttgatcatcgagatggaccgtgagcagcagctcaatgagcttgagctacagcaagctagtctcctcggtgccccgcctactgcgtccgtcagtaagtgatcaggtccgattgggtcctttcaggtcagagcttggtggttcatcaattttttgcctgttttaggccgttccccttgatttacagtaacctttcgatcatgtatgagttttagatgtagttaaagaatcagattttacttcttttttggtgtttcaagtttgaattcttgtggaatggcgttgt

SEQ ID NO: 5130 - DNA, 1156 bp, Gossypium hirsutum
  Clone ID: GOSHI-09MAY01-C41451_1
cccacgcgtccgcccacgcgtccgatatatctctgtctctctattttcgcatctggacagttcccggtttaacataaagccggtttgacgtgcgccgcctgagatgtcgccggcggtttctagtgtgataagaatctcacggtatagggaagctcagtggtgatagaagataatcaaatcggacggctccggtatttatctggtggggcccaaggagaaaaaaatctaaaaaagggtaggggaaaaatggagagccaaaagagtcaggggaagctaacgcgaacacagtcgtcgttgctccgttcatcgcctaccgtccggtcgtcaatccacagtatgtcatccatcaccgaaagtgactttagcaaagaccaagaagaaaaccagcagcgcgagtcgttactgaaagaatgagaaaaaaacgaaaccgccaccaaagagaacaggttcgatgtcaccgaggattataccggtccggttcaccccggttttcgccatggcttccatctctttcttcactctcttctcttttatcttcttctttgggttttatcttaaaagagaagaaatccccacatcggaaaacctcttgttagccttaatcttcgtcgctataacccttttttttgcttcgaaaaacaaagctttaatcaaccaaggcattgtttgtttcaaatcaagattctacttctccaaacctaattcgaagcccgtcgaatggttcattggagagacccaatgtaataaaagcaacatcagcaaagaaaaagaaaggcttcttccgaccgtaagagaaggagtggagttttacagcaatggagatttttttgaaggtgaattccataagggggagtgtaatgggagtggggtttataactattttgtgaatgggagatatgaaggggattgggttgaagggagatatgatgggtatggagtcagagttgcagcagaaggcagtcatatagacgccactatcgagagggtttatgacatggatttggagcttataggatttatacaggcgattcttatgctcgtgaatggtgtaatgaccaaagccatgccgatgttattcaaacttgtgctgatcggagttgctatgttggggagttcaagtctggggttaaacatgggcttggctactaccatttca

SEQ ID NO: 5131 - DNA, 879 bp, Gossypium hirsutum
  Clone ID: GOSHI-09MAY01-C41781_1
caagccctgccctatagcagtttccttccattgcagagccgaagacctcaaatccattcaaaaaaaaagtaaaaatggagggaatatcgtaccagcgattccctaaggttaaaatccgagagctgaaggatgactacgctaaatttgagcttcgcgataccgatgcctccatggccaatgccctccgtcgtgttatgatctccgaggtccccaccatcgctattgacctcgtcgaaatcgaagtcaactcctccgtccttaacgacgagttcattgcccatcgcctcggtctcatccctctcaccagcgaaggcgccatgtctatgcgcttctcccgtgactgtgacgcttgcgacggtgacggtcagtgcgagttctgctccgttgagttccatcttcgcgccaaattcatttccgatcaaaccctcgacgttaccagcaaggatctctatagttccgaccatactgttgttcccgtcgatttcaccgataacgctggctacgattccactgagcctagagggattattatagtgaagttacggcgagggcaagagctgaggctgagggcaattgcgaggaaagggatagggaaagatcacgccaaatggtcacctgctgcgacagtgacttttatgtatgaacctgagattcatattaatgaggatttgatggaaagcttgacgcttgaagagaagctaagctttggtgagaagcagtccaactaaagtctttgacattgacccaaatacccaacaagttgtggtggttgatccaaaggcgtatacctatgacgatgaagtgctaaagaaagctgaagctatgggaaagccaggtcttgtggagatatatgccaaagaagacagtttcatctttaca

SEQ ID NO: 5132 - DNA, 723 bp, Gossypium hirsutum
  Clone ID: GOSHI-09MAY01-C41761_1
ccgggacactgaagccaaagcagcttaaggacccttgtaaccatggatgctctacaagaggtttacctacgagaaaaggtatatccaagttttataatggcaaatcaaagtccttcactagtcttgctgatgctgtcactgcttcctctgttaaagaatttgcaaaaccggacaatccttataatagaaaacgcaagaacttattaactcgtggttcaaagcgattaggcaactcatatggaagtgcaatggctttcggaactactatgagtagctcagacttgaacttgatgtcatcatcaccgtctagttgtcttccacctctacatccacagtataaaaaatcaactatgattagttcatcatcgatagctgctcaaccgaatttgaaccctccgtgccggtctttctccttgtctgatctacaatttgttgttgccgctgccgctgcaactcctaacatggctggtttggctgttcgtagttgcaacaaggacaacaaaatgcgttgagttcaatgggaagttgccaaaatgtttaccgtgattggtacgggagaccggcacttttatcccttcatgcatttgattcatcttatccctctgtacttggagtgttaggtattcaatggccatgcattctgatatgtgtaattcctgtttgtactgttctcatctcttgttagatttgagataatgatgagaatgctttattgtataatac

SEQ ID NO: 5133 - DNA, 554 bp, Gossypium hirsutum
  Clone ID: LIB3825-013-Q1-K6-B2
aatgttagaacttttaatggaataacctgtttgattttttatttaacatatagggactaatttgctattttttaatagggttaaaatgtaatcccattgtctagactatgtttgagtttttggttcaagttttataggccatatttattttggtctaggtggtctaggtccggactggatatagatttgatggtactttccggtaatagttatttatgtgtattatttatacttgtaacttaaaaaccttaaattacttcttgaatttgaatattttattaatttaatgccatcaattaccgtaaactaaactccattcactcccatcttttgctataaagcattgcttgaataactgtgttgttcttaaaagggtggttgtgatttttacacatgttttgagggtttttcaatttcttattattgtgtgtgtgtgtgttttttttttgcttatttcagaaaaggtatatccaagttttataatggcaaatcaaagtccttcactagtcttgttgatgctggcactgcttcctctggtaaagaatttgcaaaac

SEQ ID NO: 5134 - DNA, 952 bp, Gossypium hirsutum
  Clone ID: GOSHI-09MAY01-C41731_1
cccacgcgtccgcacggaaactctctcttccttttcacaatttcctcttcccttgggcttcttcttcttcttcctatttccagaatttcagcccccctattttcactatcaatagcatatgaacccttattagcctattccccctttcccctttttaccccctagttcttctagggcaaagatcccccgatttcccttcttcaatttcgatcctttatctctggaatttgattctttttttttttaattcaatcatggatggcaacaaagacgatgctttgaaatgcttgaaaatcggcaaagatgctttggacgccggagatcgagcccgtgccctcaaattcctcaccaaagctcgtcgtcttgacccatctcttcctatcgagaatctcttatctgcggcggaaggagggaaatctgacgatcggccggcttcggaacctgttgggtctgctaaagatccgtctgggtcttctccatctaaaccttctgatcaaccctcgattcgtcggaggaatataccgaatggatcggctgcgtctgcttctgcttcttctccggcgtccgcgttggcgcctgcggcggcgtgggccgctggcggtccctccaccgtataccaaatcgtactcgtgaaccatatcaggataaagacggattattatgagattctggggttagagaaatcgcgttccgttgatgatattccaatagcttatcggaaactgtctttgaaagttcatcccgataagaacaaagctcccggtgctgaggaagctttaaggcggtttcgaaagcgtttcagtgcctaagcaatgaagaaagtaggaaaaagtacgatcttgttggatcagatgaacctgtttatgaaaggagagcttcaccgttccgtggcgggggcaatgggattcagcggcttttacgatactgatttttgatgctgatgaagatatta

SEQ ID NO: 5135 - DNA, 596 bp, Gossypium hirsutum
  Clone ID: GOSHI-09MAY01-C41671_1
cccgggtcgacccacgccgtccgcgtatgattccaaaagtgccgtctctgactgggtagcacaaaccaaaagccaaacaacgagtcaacctccagctttgagattggacagcttgaattgagatccataaagcgaaattgcaagctttgtgatcaaaagctggcatatggatatggaacagccaacaggtcattggtgtacaggcctgcaatgctttcaatggtagcagttgccgcagtatgtgtctgtgttgccctactatttaagagctgtcccgaagttctatacatcttccgtcccttcaggtgggaattgttggactacggaacaagctgaggtccagcaactcgccctaagtcggtaaccttcaataggtggtgtttgtatttgtaatatgtttgtaatagactgcaaagctgggatctggtgtataacaccagtgtttggactgagtctcagacacagtagtctcgtcggcatatatattatttgttgttcaatcatcaatgtaacgtttatccagggtataacatgataacacatgcatagttctccctctggagtctgaggttcatgtcttcaacatttgataatgg

SEQ ID NO: 5136 - DNA, 691 bp, Gossypium hirsutum
  Clone ID: GOSHI-09MAY01-C41041_1
aaaagtcgactctgctcctcggacccttgcatgaatacccagggcattttctgaatacgtgtgagctgctaatctgtcatcccggtgcgaataacaacaggagggcaatgaagcgtactattgagcgtactgtgagcacctcttttacaacctaagggtttgcaagtcgtgggcatgtaattcctcaggagatatgccagattgtaattgtaaccttttgtgacgaagttgtagggctctagagtttgttgtaaaattttttagattcggtctgtattaaattactactaggatctagtaaagagtcctataatagtttataagcactacgtacggagaattccctagactgttctcccttccaaacttaaaagtttgcatgacctgtttttgcaagggggatctacaatattttttgagcaacctcgtcatgaaagcatagtccaccttgaagaagttccttcaacgctcaaatgctcttccaggttagggaaggttgattccctaacctaacctagcttcaagaaaattagactgtggataatatttttcctttaaaaccttcgctaataatgaggtaggatagattgtcaattgccaaccttggttagctaatatcgtgatattaaattgacttacattttgaaaaaaaaaaacagttgtagcaaaaaaatagcaataaatttggggg

SEQ ID NO: 5137 - DNA, 1019 bp, Gossypium hirsutum
  Clone ID: GOSHI-09MAY01-C41351_1
tggtacgcctggcggggccggcccggacttactggctggaccctcccgtgcgtcccccgtcgcgcggtttgtgggagttaaagagattattgcagcaatggcttctttgcaatgccagaaaaccattgagaaaggcttgggtcaaggatactatggtggcggttctagttggggaagccaggccactaaaatggagaacaaataccagaatggctatgcgatgtcttacagcgaacatgaacgccatagccaaatccgctgccccacctatggaatgagcgaatcctacactacttacggccaatctcatggcacccacaacggaaacgcaatgtcgaaaccccaatttcatggtcatgggaatggctacggcagccacatgagcaacgggatggctcacactcaagcatatggctctaaccatcacaacagccctggaaaacaccaaggccctgggtatggcagtggctttgggggctaccctcccaaaaaccatggaatgccgcatagcccaccgcaccacggcggcaaactgtcaggccaaggcaacgggttcctgaagccccaagcatacggccctgggagaagcatggcctacggaatgaccgaaaccgaaagttgcgagtaccgcagcgaagtatacttttccaacgagtcacactacaacgacggccgtggataccaccacgctggcaaaagtgaccaccctgtcaagggtctgctaaggaaaataaagggtggcatttcacgtaataaaagctgtagtgatagcgacagtggcagcgacagtgatgatgatggttacgggaagaagacggtcttcgtgagcaaggcaatatgatgaagacatatatgataataataatgataaatatggtggaagatgttggctatataaatgccatacataatataataaaattaaagatccccctatgttgatgttttcgtatcatatgtacctttatgaattaaggtatgatataacctcttgctctggaggagttgggttggtcaac

SEQ ID NO: 5138 - DNA, 266 bp, Gossypium hirsutum
  Clone ID: uC-gsronu33B101c08b1
tgttcgttcacgcgtccgcccacgcgtccgagagtttgtgggagttaaagagattattgcatcaatggcttctttgcaatgccagaaaaccattgagaaaggcttgggtcaaggatactatggtggcggttctagttggggacgccaggccactaaaatgtataactctttccactatggttatgctacgtctcacatctattttgaatcccactcacaatttccgctgcaccacctatggattgtgccttattctacactactta

SEQ ID NO: 5139 - DNA, 496 bp, Gossypium hirsutum
  Clone ID: GOSHI-09MAY01-C41321_1
agaatctttcccaaaaaaacaaaaatggtgattctgaggagatcaaatggttactcaaaggtgtgttatggaagacccagaggagataatccatcgacgagctcagttcttgatccacaaagtgctggagcgagcagattgtagaagaaaaccatcgtttctacgaatcagactgtgtaggctaaaggtgaagatcaggagaagattgaagaagttaaggaagagtggcgttggttagtatttcggcagcaagaactggtgtttacaagcaggttatggatcaattggaaacatggagacgcctgttttaccctgctaggcatcatggaaccattgccacccttcctcgccctttgttaacttgaaacatatatatatgtggcctttatattatacacattctcctctgggtttttttttttttggtaaaatataagaatgattcgtgttttcttctttttggcaataacaagtttcttcttctttttcctttcgt

SEQ ID NO: 5140 - DNA, 638 bp, Gossypium hirsutum
  Clone ID: GOSHI-09MAY01-C42541_1
gcgatttatccatgttgtttatctttccttttggtctcccttttcgtttcattttgttacgctaagatccgcttaacagagatccgccacgatgaccgtcctataatccctttcgacgagttcggcttcacccacaccggtcgcctcgagctcaatgtctccaacattgcgctctcgaaccagaacccagatctcgacatgtctaaggtcgggttctttctctgcacgcgggacgcttggatgcaagtgttattacaaatcgaagacgggtatatcaactgccctctcaattccgatttcgttaaactcgccttcgaattcaaacagcttaaagggaaatctaatagtttcagcaccgtttaccaagagaacaccgccgatcaatacacgctcgtcttcgctaactgtttgagtcatgtcaaagtatcgatggatgtccgatcggcgatgtacaatctcgacgggaaggaaaaacatcgggattatctctccccccggaaaacgattctccctaggggttacttcattttcgccctcctttatttcacattggcagggatttggatttacgtgctttatttaaaacgactcaccggtttcagaatccatttatttatggtggctgtgaatattttaaa

SEQ ID NO: 5141 - DNA, 450 bp, Gossypium hirsutum
  Clone ID: GOSHI-09MAY01-C42491_1
caggaatgactgctcctcaagctgctggagtcattcactctgattttgagaaaggcttcattcgtgccgagacagtatcctatgatgatttcgtcgtatctggttcactagcagcagcaagagaaaaaggacttttgagatccgagggtaaagattacgtagtacaagaaggtgatgggatgctgtttcggttcaacgtttgatgactgtgttcccggagctgaaggcaaattcatcattcttttacttatcaaagcaccaaacaagaaatgtaaacgtcgatggttttatatcatacagcggtctaagaccatgttcaatatcagaaatatagcataggattgcaatttttctttcaccattgctaaaccgagaaatatatatattcagagattttgctcgaggaattgcttgtttgtaatccaaaagtaaaacaaaggttcttacagc

SEQ ID NO: 5142 - DNA, 572 bp, Gossypium hirsutum
  Clone ID: GOSHI-09MAY01-C42441_1
gcctccagcaagtcaagcaccacatcgtagtccaaactcagcttccccaccaccgatctcatcatcttactaccctgcagctcctcacatgcttttagccctttcaggtggtttagctggtgcattagacaacaaccaccatcaaaataactctcatttacaaggcttaggaacccttaccccaaacaccacaaatctgggttcccactcaaagaaaagattcagaacaaagttcactcagtttcagaaagataagatgttggaattcgctgagaaagttgggtggaagattcagaaaagagatgaacaagctatccaagagttttgcagtgaagttggggttgatagaggggttttaaaagtttggatgcataacaataagaacacttttgggaagaaagatcaagccattaatgaaggagaaactgggattaacaacaatactgagaatggactcatccatgaataccaccatcaccacatcaacatcaatggtcaaaatctcaaccatcacttttaaacttataatgttgctaatgttgaaataaatggctcttcttccttttaaaaca

SEQ ID NO: 5143 - DNA, 572 bp, Gossypium hirsutum
  Clone ID: GOSHI-09MAY01-C42401_1
cggacgcgtgggtttgagtgtcagcacgttagcgggcacccctggctacgttgcttctgaatactaccagagcttgcgatgttccaccaagggcgatgtttacagttacggtgtggttttactcgagctactaacgggaaaacggcctacggattcagccgattttggcgataacaatcttgttggatgggtgaaacagcatgctaaactcaaaataagtgatgtcttcgatccagagttgatggaagaagaccccatgctcgagatcgagcttttacaacacttaaaggtagcttgtgcttgcttggatgatcgacattggagacgacccacaatggttcaagtgatggcaatgttcaaggagatacaagcagggtcggggctcgactcgcaatcgaccattgccaccgatgaccgaggttttaactcggtcgaaatggtagacatgacaataaaagaagtcccagaaggtaagcagtagatgaaaaccaaaaaaacttcagaagagaacattcttttgcaggtgaagaagaaagaagcaggtggtgatgatgaattcccacagaattttc

SEQ ID NO: 5144 - DNA, 526 bp, Gossypium hirsutum
  Clone ID: GOSHI-09MAY01-C42721_1
gcgcccactttttgcggccacgcgtccgctcggcatttgttggggtcgggttcacaatgtgcttaacctctattatttacgaggtttcgggagcatgggaaaggcggcacatagagtcaaaccaaccgcttagttctcaagaggtaccacggcccaatcaagcaccggtaacggcaccgttacaaacacaaacggatacgaacgcccatggtaatgaacccgaaaggagagctttagaaagtgggaatgccaattaagtttaaaacatctataaggtgtaaaaaatggtgttcaatgaaagttttctgttgtacatataccatctcattgtgtagagatgctttacatgcttgtctattgttgattttattaaacgttacttggggaaaaagcttttttacttaaaaaagtaaaaataaaaaaaaaaaaaaaaaaaaaaaaatccctctaatattttctgattcttttttcttctttttttttctttctctttattattatttttttcctttaatctactccttct

SEQ ID NO: 5145 - DNA, 425 bp, Gossypium hirsutum
  Clone ID: GOSHI-09MAY01-C42631_1
gaaagattattcaaataatctgatcgactacctctcgatcactgaccttctatcaatcctcgcacatctttatttccaagggaagatcccaggtactttaacatatggtcaggcctctattctactctgcatgggcttgcagaaccgggatgtctcttatgttgagggacaattgaagaaagcactagagaggcagcagatactatcatattttaagaaggttatgataaagctgtacaagtatttgtatggggttgcatcaaaggagattgaatctgctttacctcgactaaaagaaagagtgttggaacctcatagtatctctgtggatgaggatctcaatgatgctgcaaagaaagttgaggaggaaatgaaaggcaagtcggatggtgtgttaaatctgcagttactccaacaatttgcga

SEQ ID NO: 5146 - DNA, 616 bp, Gossypium hirsutum
  Clone ID: AI727380.1
catgggaagtggagctgtacttggtcttgcacctgctcctgagtacaccttccttatttatgtctcacctgttggaaactattttaaggaaggtgttgctccaataaatttaattgtggagcatgaattgcatcgtgccactcctggtggcactgggggtgttaaaaccattgggaattatgctgcggttctgaaggcacaatctgctgcaaaggccaaaggatattctgatgttctctatcttgattgtgttcacaaaaagtatttggaggaagtttcttcttgcaacattttcgtggtgaagggtgatgtcatctcaactcctgcaataaagggaacaatcttacctggcatcacaagaaagagtataattgatgttgctcgaagccaagggttccaggttgaggagcgttttgtgccagtagatgaattgcttgatgctgacgaagtgttttgcacagggacagcagtagtagtgtcgcctgttggcagcattacatacaagggtaaaagggtgtcatatggcgtaaatggttttggggctgttgcacaacagctctactctgtgcttaccaaactccaaatgggtcttataaacgacaagatggactggaaa

SEQ ID NO: 5147 - DNA, 439 bp, Gossypium hirsutum
  unsure (1)..(439): unsure at all n locations
  Clone ID: LIB3147-051-Q1-K1-B4
ccggccggaattccggtcgacacgcgtncgccacgcgtncgccacgcgtcggatattctgatgttctctatcttgattgtgttcacaaaaagtatttggaggaagtttcttcttgcaacattttcgtggtgaagggtaatgtcatctcaactcctgcaataaagggaacaatcttacctggcatcacaagaaagagtataattgatgttgctcgaagccaanggttccaggttgaggagcgttttgtgccagtagatgaattgcttgatgctgacgaagtgttttgcacagggacagcagtagtagtgtcgcctgttggcagcattacatacaagggtaaaagggtaccgtatggcgtaaatggttttggggcttgtgcacaacagctctactctgtgcttaccagactacagatgggtcttatagacgacaagatgaa

SEQ ID NO: 5148 - DNA, 551 bp, Gossypium hirsutum
  Clone ID: GOSHI-09MAY01-C42351_1
cggacgcgtccgcccacgcgtccgcccacgcgtccgagggattaatgtcattacattctatgctccaatactattcaggacaattggtcttcgtgaaagttcttcactcttgtctgcagttgtgattcgttgtttcaacgttggctgtacattcatatctatgtttgtagtcgataagcaaggtcgaagagtactgtttatgcttggtggaattcaaatgcttgcaacacaagtaacaattggagggtttatgacagctttattaggtgatcatggtggattgagcaaggcgagtgcttatgtggttctagttttgatatgtatatacatttctgggtttgggttatcttggggtcccttgggatggttagtccctagtgagatttatccattagagattcgatcagctggccaaagtattacagtagcagtcagttttttcttctgttttcttattggacaaacttttctagctatgctttgccacatgaaggcagggattttcttctttttcggaggatgggtggctctgatgaccctatttatatact

SEQ ID NO: 5149 - DNA, 740 bp, Gossypium hirsutum
  Clone ID: AI055202.1
gttacagccttattgttggatattttaccctcatttgaattgcagtatgccaagtatttcaagtgttcctaccaatgagaaaccaacagctgctgcctttacagcaacaaatcaaagcaatgaaaatggaaacatgattgatcctgacttgctcgtccaaattctcagcaaccccaaattgattgagaaattagttacagaacatggagtggcttcaggtgcacaaagcttacctatatcttcaatcaatttggtaccgtcgtttgacatgcctccatctgcaggtcacatcggtagaacagaaaatgatggagccgtttacggcaagtcaaatggggttggaattggagcctcaaataaacatggttcggatcctggtgtatgtccaatttcgcattcacttgcaatggaactttcccaaaagaaggatgtaaactattacatgaacttgattcaacagcttgtatgtaaaagtcaagtggaagtctcaattacataaccgttacatttacagttaatactcacccatagttctaattctcctatgtcatagatctaatctatgttatgaaatctgttttactttacatctcatggttcatgaagtcgctatgtcttatcattgtacttttatgaatagtattagtttctatcctatgttaattgttagtatttatagcttgtatactatgtctctttcatattatatggtttcctgtctcatttttgtatctcctaag

SEQ ID NO: 5150 - DNA, 447 bp, Gossypium hirsutum
  Clone ID: LIB3147-055-Q1-K1-H2
gagaaaccaacagctgctgcctttacagcaacaaatcaaagcaatgaaaatggaaacatgagtgatcctgacttgctcgtccaaattctcagcaaccccaaattgattgagaaattagttacagaacatggagtggcttcaggtcacatcggtagaacagaaaatgatggagcgttttacggcaagtcaaatggggttggaattggagcctcaaataaacatggttcggttcctggtgtatgtccaatttcgcattcacttgcaatggaacttccccaaaagaaggatgtaaactattacaagaacttgattcaacagcatggaggagaaagtcaagtaggaggtcagaagttcaataaccgatacaatcaacagttaagacccaaccaagaagtaataaataacccgaggtcaagagattcgaagccgaggataatgaaaccttgt

SEQ ID NO: 5151 - DNA, 640 bp, Gossypium hirsutum
  Clone ID: GOSHI-09MAY01-C42371_1
gtcaacctttcttggaaggaactgtaaaaccttctgtaccctccagtgcaactggaactggggtaaagcgaccttctactgcagctaatggatctaataactttgcgacaaagaagggccgtggagctggtggcatgcaaaatcagcttgtgaacagagcattggaaggcatatcttatggtgggaggggtggtggaagaggtaggggtcgaggttgggggggacgtggaagaggaagaggctaccggtaattcgaggacgaaacatagtacaacaacgatctataaatttggagaatatgtttgtacctgaagaacacgagaagtcgttgatgtgttagaccaagtctcttttcaggacaaggtttgtttgataccagatgctgatgagtttctagattcactatggactaacaacaggcattgcagtcctctggagattgttttaaagttgattggataacatcttggatttgagttcccaatcctgtcgaattttagtgtatttgaagaaacattgcatgttttttagagtgtggagttggctgtatctttcaggacagtgaagttaaatagtgactgtttatcaaggatgattattcagacctgattatgtagaatccgacctcgtttgttaattt

SEQ ID NO: 5152 - DNA, 479 bp, Gossypium hirsutum
  Clone ID: uC-gsronu33B058c03b1
ccccgggggtcccgttccgaattcccgggcgccccccacgcccgtttttaggatcccctcgaggttgggggggacgtggaatatttaagaggctaccggtatttttaggatgaaacatagcacaacaacgatctataaatttggagaatatgtttgtacctgaagaacatgagaagtcgttgatgtgttaaaccaagtctcttttcaggacaagttttgtttgataccagatgctgatgagtttctagattcactatggactaacaacaggcattgcagtcctctggagattgctttaaagttgattggataacatcttggatttgagttcccaatcctgtcgaattctagtgcatttgaagaaacattgcatgttttttagagtgtggagatggctgtatctttcaggacagtgaagttaaagagtgactctgcttatcaaggatgattcttcagacctgattatgtagactccgact

SEQ ID NO: 5153 - DNA, 374 bp, Gossypium hirsutum
  Clone ID: LIB3196-048-P1-M1-B2
cggacgcgtgggttcaggtacaaacatattctccaaatttatagatcgttgttgtactatgtttcgtcctcgaattaccggtagcctcttcctcttccacgtcccccccaacctcgacccctacctcttccaccacccctcccaccataagatatgccttccaatgctctgttcacaagctgattttgcatgccaccagctccacggcccttctttgtcgcaaagttattagatccattagctgcagtagaaggtcgctttaccctgcacaacaattgcacagttgaatttgtttcgtttcagggtcacacagtaaaaagaatcctcttgaaacatgaatgacaagggagatagtttatgttgttcaatactac

SEQ ID NO: 5154 - DNA, 352 bp, Gossypium hirsutum
  Clone ID: LIB3147-056-Q1-K1-C12
cccacgcgtccgcccacgcgtccgcccacgcgtccggttagaccaagtctcttttcaggacagggtttgtttgataccagatgctgatgagtttctagattcactatggactaacaacaggcattgtagtcctctggagattgttttaaagttgattggataacatcttggatttgagttcccaatcctgtcgaattttagtgtatttgaagaaacattgcatgttttttagagtgtggagttggctgtatctttcatgacagtgaagttaaatagtgactgtttatcaaggatgattattcagacctgattatgtagaatccgacctcgtttgttaatttaatgttgaaac

SEQ ID NO: 5155 - DNA, 596 bp, Gossypium hirsutum
  Clone ID: GOSHI-09MAY01-C42361_1
cggcgcgtgggcggcgcgtgggcggtcgcgaaagcggcagcaaaggtgtcatcttcgattcccaatggtgaaaggtcgccaaggagagcgcatcaggctctatgttcgtggagccattttgggttacaagaggtcgaagtcgaatcagtatccaaatacgtcactgattcagatcgaaggggtgaacaccaaggaagaagtgggatggtactgtgggaagcgaatggcgtacatttacaaggctaaagtgaagaaaaatgggtcacattatcgttgcatttggggtaaagtaactaggcctcatggcaatagtggtgttgttcgtgctaagttcaagtctaatctccctcctaaatccatgggtgataaagttagagttttcatgtatcccagcaacatttgagatgcgaggtaggaattgcaagttggtaggatgagttgtgcaagtcgggactggattgcaatttagagctatattttatatctatgatgattttggtagctttttgtatttcttaagataatcaatattgttaagttcaaaatgtggaatctttgttatttataaaatatcagtatatttttggatcttaaaa

SEQ ID NO: 5156 - DNA, 529 bp, Gossypium hirsutum
  Clone ID: GOSHI-09MAY01-C42321_1
gctattgcaaatgaagcactacatgaaaagcacaccacgaaatggacgattggacatggaagacacgacgagaacaacgacgaattgaagacattcaacccgagagaaccgaatttcctatctgttgttccagaggcagataaagaaaaagttgatctaaggcatgaaatgatggaagaaaggagaaatgcagaggaatggatgttagatcatgcacttcaacaggcagtaaccaagcttggaccagctaaaaaaaagaaagtggcattacttgttgaagcttttgaaacagtcttaccattgcctataactaaatgtgaaactcatttaaggcatcatacttcaacaggatttgctcatagccacggtagaaccattcaggcttgtaactgatagactgttctattacatgttatttgtttggtttttctagtttgtatttgtgggtgagaattatgtctgctgttatgtactcgtaatggtggcactaaagtttatgttttaaatatttaatgcatcaatgtttttt

SEQ ID NO: 5157 - DNA, 606 bp, Gossypium hirsutum
  Clone ID: GOSHI-09MAY01-C42211_1
actttgtttaatttcatagggagtttatgtgtttatggtactatttgtaagcatttgaacgtgccttttgtgtttggagggacaagtgagtgttgggaagagagttatatagacggctccgatgccagactcgtcgccgaacaacaaatttgggcagccaccaggaatggcgatggagtgtcttccaacggcgaggcgttcaatgcatcaacggttcgagtttcagttggaaggagatatggccaatattgggaaagaaatttggagttagagtgcctaaagagacgtgtatggaggaattttggtatacgagggccatgggagacaagaaaagggtatgggaagaaatagtggagaaggaaaggttggtggagacgaagatggaagagttggcaaattggcaattcatggacatcttgcttaggttccgagccaaactgttggggtccagagctaaagttgatgggctaggttttacaatgagatgcaacacatttgattcaatcttgtattggattgatgtcatgagacatgaaaacttcattccctaggcattttctttacaaaaaattaattaaaggaaaaatatgagttatggaaagcaaa

SEQ ID NO: 5158 - DNA, 308 bp, Gossypium hirsutum
  Clone ID: GOSHI-09MAY01-C43991_1
ttctttacctcgtccacctacccacccagcaatgcatggaaagtttctgttatttgagagcaggtaggttctaagccacgggacgctacccaagtgaaccaaaatttaatcaaatatgttgtctagcttcttatagtgttgtgactaagtaagaaaatggcagacaccatgctattccaaccttacttgttaatatcacattattctcctttccccttaaaattgttaatcgtagaaatgattttttgtgaaatgctgaactttctttaaaaaaaaaaaagataaaaaaaaaacaaaaataacaatat

SEQ ID NO: 5159 - DNA, 531 bp, Gossypium hirsutum
  Clone ID: GOSHI-09MAY01-C43981_1
ctgcaatcctgagaatagggctagtggaagagagcttttcaattgggcattggagccagcagatgatgaaattcttgataggctctttgagtttggatatctagatgcagccgtatggggagagcagaaccctgtcaaggacattgttgcagataacagtccccttgttgggaatggttctgccaagtaaatacttagatggttggatagcatttcagggtaactctgtctcaaccctggcaagtaggagaatcgaatttcatgttggagtgctagaccatggctaaaatatagatatagtagccaagattatataaagtttatatggtatgaaattgtcaaacgaccatgagatgtcataggtacagtaagtgaggaagaaaggaattgaaatgtagaatttaggataaggatataatattgtactctgggatgatgtcaaaatccattcatccttatccatctcatgttctccattgtcttgtaatctgaggatttctttgtataataccagtaaaactgcagttgctc

SEQ ID NO: 5160 - DNA, 504 bp, Gossypium hirsutum
  Clone ID: uC-gsflmaxxa042f02b1
cgtctataaaaaagaagagagagggaagagagaaggaagagagaagggaggggggaaggaaaatcaggccaggggggccggtcaccggacggccaccggaggctcgccggcgccggcgccggccaccgcacgcggtggccggaaaagaggcatggggtgcagacggtgatgggcatgcgtggaggctggcgcggagcagaggcgtgcgaggttgagtggttgcgcacatggggcaacggcgcaagtgggcaagtgggggggggtttgctggtgtgggcccgggcagattttgggctttacactgagcattgattagtagcaaaaagaaatagtgtctttacgactaagacaagatgaaggattaaaaagtggggttgtctctgtcacgagtaatcaaaaaccattaccaataccaataccaataccaataccaataccgtttccttttcctttttctgttgtaactacatccactacttctcgagacaaaaatggaaaactaca

SEQ ID NO: 5161 - DNA, 446 bp, Gossypium hirsutum
  Clone ID: LIB3148-018-Q1-K1-G6
cccacgcgtccgcttccatgtatctctgcactcttcttgcgatatctattcccgtcgactccttgctttcgtgaaagtatttattcttggaagaccagatcatcaacaaagcataacaaaaaagtcgacagtgttcatcggaaccactcgtaaacactcaggttagccattcccatatattttgactcatataagtaatgacccaagagagccgtaaatttatccagacctctattgatatagggtatgtaaagcccaaaatctgcccgggctcataccagcaaacccctccacttgcccacttgtgccgttgccccatgtgcgcaaccactcaacctcgcacgcctctgctccgcgccagcctctacgcatgcccatcaccgtctgcaccccatgcctctgtcacctccatcgtgcccatcccatgcaaagaaacaaaacagaaa

SEQ ID NO: 5162 - DNA, 545 bp, Gossypium hirsutum
  Clone ID: GOSHI-09MAY01-C43881_1
ctgaaaaggaaaacactatttttccgcttgagagaatctatcacttgaggcaccactcaccacttcctcctctccccctgaaaacaacagcaaaaaaagccccttttattatccttttatattcttccatatctttcagatcatggagatcacggaaaagctgctaaagttgaagtaccccataatcgtaatactcactctttcgcttaccctttcagccctcatcatttttgcaccttcttttctcaccattttagcctacttttggcctcttttgctttccactgccctcttcctagttgctgtcatcttctttgggaaaacgtctgctcataccgccgcgtctgactccgatccggcagataaggccggtgaagtcctccttgactacgttgctggccaaccccaactagctgttgacaccagttacaagcctgagtagaactttcaagcctttactgtaatctctaactctctctctctctctctctctctctctctctctgctggaacttcaccccttttaccttttcttttatttccta

SEQ ID NO: 5163 - DNA, 341 bp, Gossypium hirsutum
  Clone ID: uC-gsronu33B160g09b1
ttgttcgcgtgggcggacgcgtgggcggacgcgtgggctcttcttagttgctgtcatcttctttgggaaaacgtctgctcataccgctgcgtctgactccgatccggcagataaggccggtgaagtcctccttgactacgttgctggccaaccccaacttgctgttgacaccagttacaagcctgagtagaactttcaagcctttactgtaatctctaactctctctctctctgctgctgtaacttcacctcttttcccttttcttttatttcctatcctgcgaactgtaaagtttgggaggaaaataataataaactaattgctagttgctagttgctgt

SEQ ID NO: 5164 - DNA, 483 bp, Gossypium hirsutum
  Clone ID: GOSHI-09MAY01-C43821_1
cccacgcgtccgcccacgcgtccgcccacgtttccgcccacgcgtccggtcttttaaaggaatgggatacctggatgatggtccagttgcagcacattattcttgctcaatccgttgaatccattcctgagtgggcagcttgtatacgttacgcagttactgggaaaggaaagcatggaacacgagtaccccttctgagacaacagattttgaattgcttggtgacacctttacctacagctgtaactactacagtagtggcaaagcggtatgcttttatttctgctgcacttatagaactatccccacaaaaaatgcctgtgcctgagatacagctgcacagtaaacttctggatgagttgctgggtaatatgtgccactcttcagcccaagtaaggggagctattggggttgccctatctgtgttgtgctctaacattcggctttatgtgtcatcttcacaggatcattcaaatgaaaggg

SEQ ID NO: 5165 - DNA, 579 bp, Gossypium hirsutum
  Clone ID: GOSHI-09MAY01-C43491_1
cccactcgtgcgggataatatcatacattcatgtggggatatgtattacacaccttgggtgagatgattaattcataaagattcaagctcacccaaaaatattttaagtgccaggtgcaggtggataatttctaggatcagctcagatgattctctatgttatatacaagaacaggcctgtttcaacaaacccaagcgaggcaattgaagaataagatgaagaagaagaaggcggctcatctcacccagcgagaagaggcatagagatgaattcatcactcggaaacgtctaaacaatggcaaaagcctcccgagaccacattttaatcaacaatacaacaaaatagagagtccctttaactccatttgagctgcgaccagggtggactcgtgacagtgacgtagaggatccagacaatgatcaccccatcatcttacgacggtagttaagcactgggagcttcaaagctttcaaacttctgccctttttatttttttccttctttcatgtgtcttgcttttctattgtaaacctataaatgaaaaataaagaaatgattctcagggagggtaattttt

SEQ ID NO: 5166 - DNA, 394 bp, Gossypium hirsutum
  Clone ID: LIB3148-015-Q1-K1-F5
cctaaagatgcgaaggttaaggcagcgaagttggtgtgtgtagtaaatgttggtgtccttggaacggttaccgctgtaactctttttgcagttcataaaaacacaaggctcacttttgttggaattttatgtactgctttaaccattggcatgtacgcatcgccattgtcagccatgagcacggttgtaaagaccaagagtgtggagtatatgccatttttactctcattgtttctgttcctcaatgctggtgtttggtctgtttatgcagtgcttgtgaaggatatctatattggtgtgccaaatgcagttggattatttctaggatcagctcagttgattctctatgttatatacaagaacaagcctgtttcaacaaacccaagtgaggcaa

SEQ ID NO: 5167 - DNA, 501 bp, Gossypium hirsutum
  Clone ID: GOSHI-09MAY01-C43441_1
aacatacgtaaacacaaacaaaaaaaaaaaaaactaaagtttttctgcaacaaattaaggcaggtctctccaacaccatggacatgaagaagaagatctcttgcgctgtcatattcgccgctgcctcaatgagcgcagtcatggcagcaagcaccgccccagcttcctcaccagatggcgccccacttagctccgcctcagttggcgctgcaccagcttctgcaccaggcccggactccagcgttgcaacctcaaccttgcctgttcttgggtcattggttggagccttcattgtctctttctttgcttaaattatgggttacctgcagtatttgaagagatcatatataacttacataccatttgtattcaagaaggctcacgttccgttccctttattttgacttctactgattgaagatttctttttcttcacttgttctgtaatgtgagaatttgaattccttcttatattttgcaattaaaaattatggttatgct

SEQ ID NO: 5168 - DNA, 334 bp, Gossypium hirsutum
  Clone ID: LIB3828-027-Q6-K6-H9
gaaaaaaaaaaatcttcaatcagtagaagtcaaaataaagggaacggaacgtgagccttcttgaatacaaatggtatgtaagttatatatgatctcttcatctgaaaaaaaaaaaaaaaaaaaaaaaaaaaaaaaaaaaaaaaaaaaaaaaaaaaaaaaaaaaaaaaaaaaaaaaaaaaaaaaaaaaaaaaaaaaaaaaaaaaaaggggggggccctttttaaaaaaaccaaattttacacccccggggaatggaaaattatattttttttttttgggggcccttaattaaaattctcgggccgtgttttaaaaacgtgggattgggaaaaccc

SEQ ID NO: 5169 - DNA, 684 bp, Gossypium hirsutum
  Clone ID: GOSHI-09MAY01-C43471_1
aaatgaacaagcagctaggtttgccaatggaggtgcatatcccccagacttaagccttatgagccaaggctcgtcattatggccagaactatgtgtttggtcttctaaccggttatcgtgatcctcctgctggtatctcgattcgagaaggtctgcattataacccttactttcctggcggtgcaatagctatgccgaaaatgcttaacgatggtgctattgaatatgaagatggtactccagctacagaggcccaaatggggaaagatgtggtgacatttttatcatgggcggctgaaccggaaatggaagagagaaaactgatggggtttaagtggatatttgtgctatcacttgcacttctccaagcagcttattaccggcgtttgaaatggtcagttttgaaatcccgaaaactggtgcttgatgttgtcaattgattcccttctgtttatttgagaagagatagattggtaataattaattcattaaactgctaatacagttggacagattgatctccttttcgttgtactatttgtttacttagctaaagaataagctgcattgaattgtattaggatcagaaaccgaagttactcggatttgggtgtgaatatccgatttgaagtatgtatgggtaatttatctaaaatacgtgaatgtatttagagggtttttagg

SEQ ID NO: 5170 - DNA, 594 bp, Gossypium hirsutum
  Clone ID: GOSHI-09MAY01-C43401_1
catgaaaaccaactcccccaagaagcaaaatttcaagctttatgagagaagaaacagtaacctgaagaacaacctcatgatcaacactttccttccttctaacaacggtgaaggtggtggtggtggtggtgctttttattcgccgaggaatgcagagatcttgtctccaagcttgcttgacttcccaaagctagcacttagcccggttacaccattaaatgaagaccctttcaacaagtcttcaccttctttagggaattcatctgaggaagagaaagctatagctgagaaaggcttttacttgcatccatcacctatgtcaacacctagagatactgagcctcagcttttaccactctttcctgttacttctccaagagtttcaggctcttcttaaacatatgttagtttgagagtgatttgtcaactgggttttggctgaaatttgagtgataaaaaaaaaaggaagttaagaggatctttcttcaattgtatgatttggtctccctttgattatggtaaagctcttctttttaccttctttcttcattttacttggattatggctaactagattattcccatatgaaaaag

SEQ ID NO: 5171 - DNA, 813 bp, Gossypium hirsutum
  Clone ID: GOSHI-09MAY01-C43761_1
atcaattatcatcaaatcaaaatcatcctcaaactgttcaacaatttcgtctcccgttaccaaatttccccattaaaaccaaaaatgagaatcccaaatctcaccaaagcctttattttgttaatggcaataactctgatgtcaacccaagccaacagcctaatcccttacagtagatccttatgggacgtgatgctcgctgaagacccattcaaaatcctggaacaaaacccagtgaccgtccccaaaggatcagaacccgtcgctttagctcgagccgactggaaagaaaccccacggtaccatgccattaccctggacatcccagggatgaaaaaggaggatttgaagatcgaggttgaagagaacagagtgttaaggatcagtggagaaaggaaagaagaacaagaaattgaaggagagaaatggcatagagctgaaaggacgaatgggaagttttggagacagttcaggttgcctgcgaatgtggatatggatcgtatcaaagctcatatggaagatggggttttgaggatcagtgtgcctaaaattgtagatgagagtaagaagcactctaaggtgattgacattgttcagtcgggtggtattggtgaagatgtcaaggcaacctcccatggtcatcattagatatttgattaatctaccaggtttttgatggattgatttcgggttttcatcgtttcgccttgttacctaataataagttgatgtttatgtgtttggttgaagtatgatgaaatggtgatgcttaatttcaatattatcaatatattagtatttccctttcgggtt

SEQ ID NO: 5172 - DNA, 1200 bp, Gossypium hirsutum
  Clone ID: GOSHI-09MAY01-C43721_1
actggatgtacttgtgggaccttgcattgcgggaaagatccctgggatacataaagtacatccttaagagcagcttgatgaaattacctgtatttggttggtcattccaaattttggagttcatccctgtggaaaggaagtgggaggttgatgaggcaaaaatgcgccagatgctttcaaaattcaaagatcctcgagatcccctttggcttgttctctttcctgaaggaacagatttcactgagcagaagtgcttaagaagtcaaaaatatgcagctgaaaatggcttgcctatcctaaagaatttgctgcttccaaaatcaaagggttttaatgcctgcttggaagatttgaggagcactttggatgcagtttacgatgtgaccattggatataagcatcgctgtccttcattcttggataacgtctttggggttgacccttctgaagttcatattcacatcaggcgtgttaccctggatgacatcccgttgtccgaaagtgaagtaacatcttggttaatggatacattccaacgtaaggatcaattgctttctaatttcaattccgaaggttatttccctctgcatggagcagaattgaacctctctacagtcaagtgcctcataaacgtcatgctggtgcttgtcttgactggtgcattctcatttttaacctttttctcttccatttggtttaagatttttgtatcgttatcttgttcctatatggtttcggctacttatttaaacatccgtccagaaccgatcttcaactttgtcaaaactagtctttaaacctaatttcttccaagttattattttgcaacttcgataggtattcattcacaagcagcatcaagaagtgcttgctggaaaaacttcatttgacatgacttccagcatcatccaaatggggaggttcatgtcgggagcttaaatagcttgtggcctaatggagaatcttcggagcgtcaaaatcgcctgtatgtgctattttcagatatcaactttgttttaaggtttatgtactattaagtagaattttgggtccccattctcagaaactgtatgaaatctctaaataaggtttgccatttcgcacattttatagaagcatcaatcaacgcccatttgtttctatttgtcttcagagaattttctctggtttaatgatatccaaagttcgaatctaaaaacc

SEQ ID NO: 5173 - DNA, 418 bp, Gossypium hirsutum
  Clone ID: GOSHI-09MAY01-C43191_1
tttaccaaggtaaatatgttgcggaaataaccaagaaactcaagaacaagcccctggcttcataaaacccctcttcaagttgcagtaaaaggtcctcccaatacaccttgagggatatcaatccccgttgtgtccagggattaacagagggccaacataattatcctttatgtttggattgaaagaaagtgataaagaaaagcaagggaaccaaagaaaacttcttccattattgtttggttccaagggaaaatggagcagtgatcccatctcagttgtcccgcatatatatcattataatctcaaatgtagtaaaataaattaccagtccaatgccaccagctatgattccatatcagttgttgcctatcatgtctcagtttttccaatagaattgaatgaagatccaccttccatg

SEQ ID NO: 5174 - DNA, 527 bp, Gossypium hirsutum
  Clone ID: GOSHI-09MAY01-C43091_1
ctaaaaaccactcgttttagcagttaaagatgataaacatgtggatcaagaaccccagtctgaaactccccttcttgctttacaagtaaccaacaacaacagtaagggttgtcaagtgaacaagggtaataagattcacgagtgttcaatctgtgggtcggaattctcgtcgggtcaagcccttggaggtcacatgagacggcacagggcagcagctgccaccaccgcaagcaatcaagttgtggtgagcgttggcaatggcgatggcattaaacccagaaatattctatctttggatcttaatcttcctgcaccagaagatgatctaagggattccaagttccaattcggagcaccccaacaagctattgttttctccacaccagctttggtagattgccattactaaccccccccccccaaaaaaaaaaccagtatatggatcaatcaatgtgaattataattgatattgtttcaacccaatattatttacagttttattattctttgaatggtggttccttttt

SEQ ID NO: 5175 - DNA, 359 bp, Gossypium hirsutum
  Clone ID: LIB3148-007-Q1-K1-E10
cccacgcgtccgcccacgcgtccgagcctttggaggccacatgagacggcacagggcggcggcaagcaatcaagctgctgtgagtgttgatactactagcattccaattgagtcaggcaatggtgatggaaccaagcctagaaatatcctagctctggatcttaatcttcctgcaccagaagatgatctcagggatgccaagttccaattcggagcaccccaacaagctattgttttcaccacaccagctttgatagattgccattactaaacccaaaaagaagaaaaatcatgtatcaatgtgaatcatatataatttgtattggttcaattcaatattattatttacaattattaac

SEQ ID NO: 5176 - DNA, 1105 bp, Gossypium hirsutum
  Clone ID: GOSHI-09MAY01-C43041_1
cgaactgtcacaactgtttgaaataacagagtgatcaaatctcctcaaatttttatcttctaccacaagttttcagaaaaagtcgtttcttattctttaatctggagctctcgactttaccctctccacttctccttgaacccagcttgagacgcctccctccagcctctgccacaaacgatgatgcaacgtcagagtgaagtatcaatttagaagccaagatttccccatccatcgcacgtacaatcaaacccgaagctgatctgaaaaacttttggttgaaagccatatcaaaatagatggttggacgcgttctttgttcatcatgtttgagatctctatcagaatcaaagctaagtattttctcatctaaaccttttaactccgaaacataactattaatgtgattggaaatatctgagcttgttgtgtttctattttcataaaggagcttgtttctacttgtctagatgatccataatccacagcagaaaagacgacactgttcgcttgtcccccgttgaaagcccatgacattgccgaaaaatctaaatactgtcttcttcattccaatgacacctggggcattgagtctcaacagcaactcgttttatcttaatattagcaaaagtagggacgtagttccaggaaattttccagactgtaattttgagttttgaaggaacatgtaggttccatagttttctgtagaaagttttaatcttggcctataaattattaattactaggaactagtgtagccctttgtaatagtttgtaggcacttttaatggagaaattaccggatggttcccctccccatacttggaaatcgtcgtgcacagcccttgccaatggaatctgcatgatttttttaacaatctctatgtgaaagactagatagaaatgtgatcccccttcccgaccctccagtacaatcctttctccaaaagtcctttagatgcccacacacttttccagggctcctaccgcgcattgagggggtggtgtgaatagtgtaggttattttgtggacgaatgcctcattccatacttgggagttagtcggattcaaaacaagcggcattgatctgaacaattgatt

SEQ ID NO: 5177 - DNA, 319 bp, Gossypium hirsutum
  Clone ID: LIB3148-006-Q1-K1-G2
tctttgaacccaacttgagacgcctcccttcagattcatgcatgcattaaaacccatggggctgggtaatattattgcatctagtcctgcaaaagcctgcgtctcaaacggtgatgcaacgtcaaagtgaagtaccgatttagaagccaagatttctccatccatcgcacgtacaatcaaacctgaaacctatctgaaaagctcttggtagatggctggacacattctttggtcatcatgtttgagatctctatcaaaatcaaagctaagtattttctcatctaaacctttcaactccgaaacgtaactaattatgtga

SEQ ID NO: 5178 - DNA, 473 bp, Gossypium hirsutum
  Clone ID: GOSHI-09MAY01-C43311_1
cccacgcgtccgcccacgcgtccgccctcgcgtccgcaacaacatgcctagtcgctgcgaaattctgtgtgaacttttgatcgcgattttgatccctcctttgggagtttgcttcaggcacggttgttgcagcgttgagttctggatttgtgtgctgttaactattctgggttacgttcctgggattatttatgctctctacgctattgtttttgtggatcgtgatgagtacttcgacgagtacaggcgtccactttattactctgcttagttctcttttatgatctctctctttttctgtaaagtggtgatcctgaaactgtttgcatttgtttttaattgaactcgatattgatgtgcttctactctttaattgatcttgacattgtgcgattgtaaatttgtaatgtttctttgatcttgtttggatttcagacaaatgtttgattttaactttaagtgagttcattttt

SEQ ID NO: 5179 - DNA, 344 bp, Gossypium hirsutum
  Clone ID: uC-gsronu33B032b12b1
caatttgtcttgaatacctttatttctggtttgctggttgacccactttttaatcttcacatcaacaacaacatgcctagtcgctgcgaaattctgtgtgaactcttgatcgcgattttgatccctcctttgggagtatgcttgaggcacgagggtcgcagcgtggagccctggatttgcgagctggcaacggctctggtatacaaagctgggattaaaggtgcgatgtaccgcatgtggcagaagttgctcgtcttgagtgctccccagactatgcttatggtgcctgtgggttttcctgcagggggattccagccaacctgggtttcgaattcgagattgaa

SEQ ID NO: 5180 - DNA, 873 bp, Gossypium hirsutum
  Clone ID: GOSHI-09MAY01-C43301_1
gctgagaccaatataaggccgtggataaatgtattgaaggagataaagaagggcaacgagaggaggaagtggaaggaaagggtgccttatgcttattggagagagaaccccagcgtcgcccctactaggaaggaccttatgaaatgcaatgctaccgacaaaaattactggaacaccctcctatacgttcaggattgggaccgagaatctaaacaagggttcaagcactcaaatgtagaggaccaatgcagccacagatataagatatatacggaaggatgggcgtggtctgtaagcgaaaaatatatcctagcttgtgattcaatgaccttatatgtaaggtctcgtttctacgacttcttcatccgaggcatgctaccactgcagcatttttggcccattagtgaaaacaccaaatgtaaatctctcaaatttgcagtggaatggggcaacattcatcctaaaaaagcacaggcaattggggaggctgctgggaaattcctacatgaggatctaaagatggacaatgtgtatgattacatgtttcatttgctaaatgaatacgcccagctcttgaaattcgaaccgacagttcctccgggatcagtcgagctgtgttcggaaacaatggcttgcccgagaaccggtacgtggaagaagttaatggtagaatccttggtgatgtctcccagcgatgtaaccccatgcggtatgcctccaccttatgaaccccaagagctgcgagactttctagaaacaaaggctaattcaacgaggcaagtggagatgtgggaaagccaatattggcttagtcaatattaaaagcaacgaaaatgctgaacttttggacctcaagaggtggtcatatgcact

SEQ ID NO: 5181 - DNA, 677 bp, Gossypium hirsutum
  Clone ID: GOSHI-09MAY01-C43291_1
cccacgcgtccgggcagtcagaagcccaaagtctcgatttttcgaagcgatttcaaaggtaaattcgctttttatttattttaatggtacttgcatgtatttagagaagaaaaaaaaatgaaaaggtaaaggtaaaggtatatcacctttaagaaactgtatgtatttggcttttgtattccttgttaaaaatctcccccttcgtttacaggttacaaaggaggcttttatagccactgtttctattacattttgggaagaaatcttttatttctttccatatttgttttgcttgtttgctactgtgtctttctttcttttgcaggtaatcaaggaaagtagaccaccggtgttgattcggccgtagaccacggcatggttcgaagcccgggaatcacggcactgattcaggtcgctgcgagacgaacggacacgagtcgaaggggtgtgactcttggtctgattgcggcgcaaggtcttctgtcgcttggtatggcttgcgagttgcggtgcaaaccctagctaggttttcccgaaactgaaaataaattgggccaattgggcctactaagtcttgggttactggcctacttcaggggtattgggtatttgattgtaaatgggctactgtgttaagcgggatatgggcttattgtaactggactctaataaataac

SEQ ID NO: 5182 - DNA, 538 bp, Gossypium hirsutum
  Clone ID: GOSHI-09MAY01-C43241_1
ttttcgaagaagttccatcgatttcagtttagcattcataatgtcaggaagaggaaagggaggcaaggggttgggcaagggaggagcaaagcgtcaccgtaaggtcctccgtgataatatccagggaattacaaagccggctattcggcgtttggctcgtaggggaggcgtcaagcgcatcagcggcttgatctacgaagaaacccgtggtgttctcaagatcttcttggagaacgtgattcgtgacgctgtcacctataccgagcacgcgaggagaaagactgtgactgctatggatgtggtttatgcgctcaagaggcagggcaggactttgtatggattcggtggttaaatgtgatttagggtttaggttttagaatggtggtgtcttaggggggatttgaagtcttgctgtcaagaatgtttgagctttgggttagggattgtaattagggggtgtttacccgtttgtttgtttgtgggttgtgtaattcgtgcttcgaattgcagatttcattgaattttaacttcatttgtt

SEQ ID NO: 5183 - DNA, 448 bp, Gossypium hirsutum
  unsure (1)..(448): unsure at all n locations
  Clone ID: AI728766.1
gaagaatcccatcgatttcagtttagcattcataatgtcaggaagaggaaagggaggcgtcaagcgcatcagcggcttgatctacgaaaaaacccgtggtgttctcaagatcttcttggagaacgtgattcgtgacgctgtcacctataccgagcacgcgaggagaaagactgtgactgctatggatgtggtttatgcgctcaagaggcagggcaggactttgtatggattcggtggttaaatgtgatttagggtttaggttttanaatggtggtgtcttaggggggatttgaagtcttgctgtcaaaaatgtttgagctttgggttagggattgtaattagggggtgtttacccgtttgtttgttttgtgggttgtgtaattcgtgcttcgaattgcagatttcaatgaaattttaacttcattttgttaaaaaaaaaaaaaaaaaa

SEQ ID NO: 5184 - DNA, 542 bp, Gossypium hirsutum
  Clone ID: GOSHI-09MAY01-C78911_1
ggagaacagggtgccaagactcctgaaatatcatcttctcttgaaccaactctagaggtcaacgagtttctggacaacgcaaaccctacgaagaagttgaaactgagcttgaataatgtcatgcctactggaggagacaattcggtaaagagtttatccgatgagctattagctatggacaatcaagtgaactactttcagacaccatttattgacgagaactggaatgtttcgatggatgacttccttaatggagatgcaactcaggatggcggaaacgaaatgggtttttggagctttgatgactttccttccatagatgggggtattttctgaacaaactctccttacttattatccgtttccgtacataaggcatcgtgttagcgagtttcgaccctctggcaactgcttgactattgtttctattttgatatctctaacaccgaaaaattcaaatttaaatttcgagtgactgttagaacttacaacattgattatgtgtgatttatgatgaaattttgaaaactctattaatgttt

SEQ ID NO: 5185 - DNA, 893 bp, Gossypium hirsutum
  Clone ID: GOSHI-09MAY01-C78871_1
cccacgcgtccgaccacgcgtccgcccacgcgtccgcccacgcgtccgcccacgcgtccgcccacgcgtgcggcaaaacggaactaaaaaaactaaaaaaatccgaacgctcccctctcagcgccgctcatcgcctcagaacagggctttccgaatcctatgctcgactccgatttgcgacgaagagagcacaaggctggtcccaagtgcgttctgactcctcttttccttttatttgcttttcttatatatacaaagaggcgattcaaaaagaaaatgaaaagaaaaaaaagacaaactttctgatttacctccaagcttttttggttcttttttgatctttgtatatattggatgtgtaaaaaggggggatcctttacaaattcccaaagcggcttttatatagccggaaataaaatcaagatttacaagaatttttttctaaaaaaatctgctattttttctctgctattctctttttgccattgttgccttctgtttttgctcgtttgttggtcctttgcaggtacatggtcgaacgagggccagcatgtacggggggctatgtgtgggaggggcgtgctcgtacggaggctcgcgcacacacacgaaagggggctcgtgctctattacggcacggtaactgctgcctagggtttctgatttccccatgttaggctaatttgggctgagtgatttgggcctggagggttaagtattgagttaacagtttaggcttgggaattttgggttttgtaatcgggtttgggcttgttgtaataaactggacatttatttggtttattttatttttttatttgggttctaatatttgtatcgggccgggcaaatttgggcattacaatgatgatatggatatgatgttttgatgc

SEQ ID NO: 5186 - DNA, 771 bp, Gossypium hirsutum
  Clone ID: GOSHI-09MAY01-C78701_1
cttctcttcgtctttttgctttcacctttttctaaaaagatttttaagtttcagagcaatgacgaggataagtcggacttttggtgatacaatgcaaaaggaagcagttccagctgtctcagctgatgtaatatttgcttcgacttccagtcggcttcccagttacagaattgggtcaaataatcagatcattgatgccaaagaaaatcctaaagttttgtctatgaaggaggttgtggcacgtgagaccgcgttgttgttggagcagcaacaacgcctctcggttcgtgatcttgctagtaaattcgagaaagggttagctgctgctgctaagttatctgaagaggctaaactcagagaggctgcttcactggagaaacatgttcttttgaagaagctcagagatgccctggaatctttaaaaggacgtgtggctggaagaaacaaggatgatgtagtggaagctattgccatggtggaagctctagctgttcagctgactcaacgagaaggagagttgattcaagaaaaggcagaagtaaagaaactagcaaatttccttaagcaggcttctcaagatgctaagaaacttgtcgatgaggaaagagcttttgctcgtgctgaaattgagaatgcaagagcagctgttcacagagtagaagaggcccttcaggagcatgaaaagatgtctcgagctacaggcaaacatgatttggaggaattaatgaacgaagttcaagaagccagacggatcataatgctgcaccaacc

SEQ ID NO: 5187 - DNA, 604 bp, Gossypium hirsutum
  Clone ID: GOSHI-09MAY01-C78091_1
cccacgcgtccgcccacgcgtccgattcatttcaatagaagagggggaaaaagtgttgagaagtagaccacttgtgccttttttgtttttgacagagaatccagaataaaatgaagaacggtaacagcaatactaagctaattctcctccatccttatatccaaaaacaaggaagctcaaacagattatggctccttgcttttgtctccttcttcaccatagctttccttctaactcttatatacaccagagagtcgattactactaaaactactgccccaagcacaactgtcaccggccctgcaggctccgccattggtggtccgccgttgccaaacaccgtggtcaacaccctcctccactatgcttcaaaatccaacgatagttaccacatggcatactcagagctcaagccaatctccgatgtgctgaggaaatgttcttccccttgcaacttccttgttttcggtctaacacatgaaacccttctctggaagtccttgaaccacaccggacgcacagttttcatcgacgaaaacccgtattacgccgcttattacgaaagagttacatcccgaaatcgatgcctaccatgtacaataca

SEQ ID NO: 5188 - DNA, 686 bp, Gossypium hirsutum
  unsure (1)..(686): unsure at all n locations
  Clone ID: AI729456.1
gccgacggcgcgcctctactggtaccactggcgagaggtcgtgtgcagaagctgctgaacgtgggcggttaccgtgacgtgggagcagcgacgtgggggcgatggtggcacctggactattcggctgctaacttgctgttaactgttgcttaggattaggttagggtttgcacacttggtccttattgggccgatattgtatttgggtttgtattgggcctgttattatttgggtctattttggattggtgtaatgagtatttgggttggtcttattttgaatgggccgggcaaaaatgggctattacaatggtaatgatggaccggtccttcataaatcttgggtttttaagagaaaaaaagtgaaactgaaaagtgggtttttaagagaaaaaagtgaaactgaagagagcgagaggttgcggtcgtatcantacgtggggagaactgggtcggtgattccnacaacttctttggcgggagcggaatttantatccgagaaaatcggtccgccacttccttttccgggccattgcgggcatccattcccccccccttttattcactccccccaaccccctcctttccaagaatccttccctcctccccaggtcccttcctcaccaaacttttccccttacccccttcaatttcccgaaggcacttatttggaccaagttttacc

SEQ ID NO: 5189 - DNA, 484 bp, Gossypium hirsutum
  Clone ID: LIB3582-012-P1-K1-C3
gccacgcgtccggtgaaactgaagagtgggtttttaagagaaaaaagtgaaactgaagagagcgagaggttgcggtcgtatgagtacgtggggagaactgggtcggtgattccaacaacttctttggcgggagcggaagttagtatcaaagagattcggtcagccacttcattttccggccattacccgccatccattcacgctccttttatcaactcccccgagccccttcctaacgaggaagctatcctccatcaaggtccttacacaacagactatggcacatactccaatgattttcggaggcaattattggacgaggtagagatacgagaattgctcatcgatcatgtcggccatcgatgctgttgggggagtcgtcctgctcgaacatggaagatccatgctgttgaggattgcaatgtttacgtggggactctagaaactttcttagaggagagggaagtagtcagagaaacagaac

SEQ ID NO: 5190 - DNA, 493 bp, Gossypium hirsutum
  Clone ID: GOSHI-09MAY01-C78211_1
cccactcgttcgaaaaagtttaaataccctctgaaagaggggagaggagaggccctcctggctctggcctccgtaggccacgcgccggtcatcaatcctacacgcgccgtcgtacacgatggtctgagggtctaaaaccttcggcattccacagcaatcgagcgagggaatctctagcctctgattactgcgccgatcacggatcctagaatcacggcactgatgaggctactggaacggcatgcctcgcagggctcgagacccttgggatggctcgaagtttccagaacctcgttgcggcgctgaggagagggagagctagggtttctaaccctatctgaaagtcatttgggcccctgctatttgggccttcgggtttattagtattaggtgggtctgtttgggtctggtttaagttgggctggtctagtttaagtctggtttgctgggtagtttttttaggcctgctgggttgtaaccggtctgattgggt

SEQ ID NO: 5191 - DNA, 555 bp, Gossypium hirsutum
  Clone ID: GOSHI-09MAY01-C79931_1
cccacgcgtccgcccacgcgtccggaagaagagccggataatcacaagcttcttctacagagccaaaggctgcgccatacacagacatggctagcagtttagtgccattatcagctccacacccttcttggttcacccccaaaaggctgctagtcatcttttgtgttatcaacatgttaaattatgtggatcgaggaacaatagctagcaatggtgtcaatgggagtctgggaacttgcacatccagtggtacatgcacttctggtagtggaatacagggtgaattcaatttgaacaattttgaagatggagttctgtcatctgcatttatggttggacttcttgtggcttctcccatatttgcatcgttagccaagagtgtcaatccatttagacttattggagttggcttgtctgtatggactttggctacagctggttgtggcttttcattcaatttctggtccatcacaatctgccccatgctagttggtgttggtgaagcttcatttatcagtcttgcagctcctttcattgatgacaatgcccctattg

SEQ ID NO: 5192 - DNA, 655 bp, Gossypium hirsutum
  Clone ID: GOSHI-09MAY01-C79881_1
cactgtctcgtcctcctacgcttcagcgttgaagaaacattgaagttttttgacaatgaggggagacaaagggaagcagatagtggaagaagaagaagacgaagaagaagaagcagaagaagaagaagaagaagcagaagactggtgttttgtttgtaaagatggtgggaacttgcttctttgtgatcacaagggctgtataaaagcttatcaccccagctgcattggtaagaaaagtaaagtactaaagtctgaaggtagctggatctgccacaggcattcttgtgctgaatgtggtggcccccctcagttttattgccttgcttgccctgattctgtctgtaggctctgtgttggggcatatgagtttgtgcgtcattaagttggacaaaggactctgcaagacacgtttcgagctcccactgcttgcagaaaagaatgcagaaatcgactctgagggagagaagctagactttcaagatccaacgacggatgaatacttgtttaaagaagatttcgctgataataatggagcaagaagagttgacccttgatgatttacatcatgcttattctaagagggagaactagtacagcggctcatattgtgataagaacaaagattaagatgatgcaatctaatatcggatgctga

SEQ ID NO: 5193 - DNA, 605 bp, Gossypium hirsutum
  Clone ID: GOSHI-09MAY01-C79591_1
tttcgtccacgcgtccgaataatagtccgggggggggggagggataagttggctgctgtccggattaatggtatggttgagaggctacaactgtctcaacagatacgggagagtgtgtattctcttttccaaaaaaacttaaccagaggacttctttgttctttaaccgtcatattgatcaggggagcgtttgttgtttctatgtagttgcgaagatttctcagttgcgcctaactttcaaagaaattatttgcaactataggaagcaaccacaatgtaagccacaagttttccaaagtgtatttgttgacaggtcatctgcacgaagaaatgggagaaccgggcaggacaatgttgatatcattgcattctacaacgaaatattcgttccttccataaagcctttgctgggagaacttggttctgctggaacaaccacaagaacgagttgagttgctgaagccaacaattgtaatgatggttcatgcccgggatcttcctaaagtttctccttttccaagtctccctgatatgtccccaaagaaagtatctgcaacacataacgtatatgtgtctccattgcggacatccaagatggatgctct

SEQ ID NO: 5194 - DNA, 581 bp, Gossypium hirsutum
  unsure (1)..(581): unsure at all n locations
  Clone ID: LIB3825-034-Q6-K6-C10
nganatgtgtattctcttttccaaaaaaacttaaccagaggacttctttgttctttaaccgtcatattgaccagatcatcctttgttgtttctatgtagttgcgaaggtctgtgcttcttatgagatcattttagccgcagttaaatttatctgcactatttcctcttacttcctgaacgaatgacttgcagatttctcagttgcgcctaactttcaaagaaattatttgcaactataggaagcaaccacaatgtaagccacaggttttccaaagtgtatttgttgacaggtcatctgcacgaagaaatgggagaaccgggcaggataatgttgatatcattgcattctacaacgaaatattcgttccttccataaagcctttgctgggagaacttggttctgctggaacaaccacaagaacgagtagagttgctgaagccaacaatagtaatgatggtacatgccccggatctcctaaagtttctccttttccaagtctccctgatatgtccccaaagaaagtatctgcaacacataacgtatatgtgtctccgttgcggacatccaagaaaaattgaat

SEQ ID NO: 5195 - DNA, 402 bp, Gossypium hirsutum
  Clone ID: GOSHI-09MAY01-C79541_1
cccacgcgtccgggccttcgggtgtggacattgtcttcaaaaccgtggtcttcaccctccaactcctactgccggagtcctcgggcttggcaaaagtaaagcaagcatctcatcacaattgagtagcatgggtgtaaccaaaaatgtgtttggccattgcctcggtgataatagagggtttttgttctttggggctgatttcgtcccaaaatcgggaatgacttggacacggatgttacaaagttcctctgataaacattattcatccggtccggcagaacttcttttcggtgggaagcctactggtattaaaggcgttaacgttatcttcgatactggttccacttacacttacttgaattaaaagtttatgaaaccggccttaaacttgataaggggaag

SEQ ID NO: 5196 - DNA, 639 bp, Gossypium hirsutum
  Clone ID: GOSHI-09MAY01-C79311_1
cagatcttgaatttggtattccttctcagtacagctacatgacagtgtgtgctccatcatgtcatgactgctccaccctgcgtgcctggtgggaagaagatgaagagagacgacaccggttttccaagtctgtgattgggtcagatgatctaccaccgagtcaatgtgtcccagagttggcacattggccccccacgcgtccgatagaatccccatcaatgtgggcaattttcccccttcaggatttgttagctcttaaggaagagtacatgactcgccctgctacagaggaaacgataaatgacccaacaaatccaaagcactattgcagataccgtgttcatgtaacaatggagtccttgataaaggataaagagttaaaaacgaccattaaagatcttatacaagggactggacgatcatatcctcacattggagaagctgaaaggcagttgagtcaagaaacagcagccttagctctggggaagcagtagcaccatgtgagtggtccagatataatttgtagtcgagtttcacagaaaggacatgttggtaatcctttacaaagcgaaggttgttcgtgtgtaagctcattactttggaattccagttcactaaataacaagcaagggaggtaat

SEQ ID NO: 5197 - DNA, 527 bp, Gossypium hirsutum
  Clone ID: LIB3585-059-P1-K1-B4
caatttctgtttttgattcatataattggtagttcaattctgctaatttgtacaagcagaagtgctttacttacatgtattattcgtttttcctgcagaatgcttttgtaatttgtcgtctattcaagaaacaagatgagaccattgaagatataaatagtgatgaagttgatccatctgtgttgtctcctactgaagacatggtgtcagagttagaagtgcctcaagcctctcctacggtaaaacaggaagccgagaaagcctgcgataccagtgaaacatgttttgccagttttcgcgatgaagtgatttcaaatgctgttgcacccatattcgagggcaatagtgacaaccatgataattataatgaaatagaccaagtggctgaaatatcccctgcagaggtgagggaacaagaaaactgtattttgatttagattttgtcaccatttctgtagcacttatgttattcaatttcaggtggatctacttgaggaagctttgaatcatttttacgatcccatgat

SEQ ID NO: 5198 - DNA, 251 bp, Gossypium hirsutum
  unsure (1)..(251): unsure at all n locations
  Clone ID: LIB3829-006-Q6-K6-H9
gngnaagcctgcganccagtgaaactgttttaccgtaggagaggcttgaggcacttctaactctgacaccatgtcttcagtaggagatcttttcacttcaatgaatccagcttattattattaaaaaaaaaaaaaaaaaaaaaaaaaaaaaaaaaaaaaaaaaaaaaaaaaaaaaaaaaaaaaaaaaaaaaaaaaaaaaaaaaaaaaaaaaaaaaaaaaaaaaaaaaagggggggcccgttttaaaggaac

SEQ ID NO: 5199 - DNA, 753 bp, Gossypium hirsutum
  Clone ID: GOSHI-09MAY01-C74891_1
atgattttcgttattcctttgatcctttcgccaatatccaacgccatctctgtcttcaccattttcagtcgcgatcgaaatctgttggggcctgggggtttcgtttctccatacaaatcgacacagtgaaagcaggcaatcgttgtagcggaatggctctcaggctggtaactaagaatctcagcggtcgaatttcgcccaagctgtgttctgcttctctgttacattcacatgccacaagttttgggtttaaagaagtacgagaagaagagaaaagccaaatggttggtaaagtctttagcaatgttgcttcaaactatgatctcatgaatgacttcatgagtggcggactacatagactgtggaaggatagattggtttccaaactgagcccatttccaggaatgaaacatcttgatgtagctggtggaacaggtgatgttgctttcaggattctggaaagtgttaacagcatcaaacgcagagctttccaagatccactcaatgatgacctacaggaagaaactcgttttatgtctgcgacatcacccaaacatgttaaatgttggaaaaatcgtgccctaaaaaagtcttggagagacaatctctgaatgggtgcaggagatgcaaacccctagttgaagaatatcatggatggtatccatgcattggaatagaatgtaccacatgagaagtcttctgagctataggttgaatgggagagattcttgctcgactgacatgtgaattctg

SEQ ID NO: 5200 - DNA, 569 bp, Gossypium hirsutum
  Clone ID: GOSHI-09MAY01-C74411_1
cggtccgccatcccggtcgccccgcgtccgctttcacatctctcctttgccactatcaccatcagcatccacttcaccaccacctactggtggcgcgtgaggtagactccgctgggtctgtggcagttctccattcgtttataataacagataaggtggacagaaggtgatgggtcaaaagcttagctgcttggaaaaccatgagaatgatttgctcagtgctgttcagacaggtgacttggacatggttaaggcaatggttgaagcagacccagttaccttaaaaagcaccactcgatatgggaagttgtctatacttcatgtggcagctatccatggccagatcgagattctttcgtttcttttagatcggcatccaaattcagacatcttgaatcgtcacagacagaccccattgatgttggctgcaatgcatgggaagaccgactgtgtgaaaaggcttatccagagtggatcatatgtattgatgtttgattcacttcaaggaaggacttgcttgcattatgctgcctactatggccattttgattgccttcaagctcttcttt

SEQ ID NO: 5201 - DNA, 635 bp, Gossypium hirsutum
  Clone ID: GOSHI-09MAY01-C75911_1
cggacgcgtgggttcatgtaatggaggtctcaatcaaatgcgagcggcaatttgtgacatggttaccattgcaagatatttgaatgtcacgcttatagtcccggagctggataaaacgtccttctgggccgatcccagtgaatttcaagatatatttgatgtggatcatttcattacatcactgagggatgaggttcgtatattgaaggagttgcctcctaggcttaagaggagagtggaaatggggtttgtgtattcaatgccaccaattagctggtcagatatatcctactatcataatcagattcttcctctgatacggaagtataaagttgtacatttgaatagaactgatgctcgacttgccaacaacgggcagtctttagatgttcagaagctgcgatgtcgtgtaaattttaatgctttaagattcactcctcagatagaagacttgggtaaacgagttattaagcttctgaggcaaaatggtcctttcatagtacttcaccttagatatgaaatggacatgttagcattttcgggctgtaccccaggttgcaacaatgagcaggtggcaggagttgacaagaatgagatacgcttatccatggtggaaagaaaaaataataaattct

SEQ ID NO: 5202 - DNA, 480 bp, Gossypium hirsutum
  Clone ID: GOSHI-09MAY01-C75871_1
gagacatctgatcctgagaatggctgccaatttccattctttgaggaactacatgcagtattcaccgaaagagccaagactatgcagcgccgcctacttgaaccagaagcaggttccagttccacccaggcaaagaaaaaggtgaagagaacaaccacagaaagatcctcagatgaattctctgaaggcgaggacgaagatgaaagtgaagaagaaaagccggctcgaggcacttcacgcaagaggaaaaaatctgacagtactgtagtggacaaatctcctagaccaaattctggcactcgtacaggcctccaggaaatgcttagagaattttttgatcagcaactaaggatggaaatgcagtggagggagatgatggagaagcgtgcccaggagagacagctgtttgagcaagaatggcagcagtggatggagaagctcgagagggaaagggtgatggtggaaaaggcttggagggag

SEQ ID NO: 5203 - DNA, 634 bp, Gossypium hirsutum
  Clone ID: GOSHI-09MAY01-C75451_1
cggcgcgtgggcttagatctcgagaaggtcaggctcaggatgacgggtttcaagctgagattgagacattggggaaaattaggcacaagaatattgttaagttgtggtgctcgtgtactaccagggattgcaagcttttggtgtatgagtatatgccaaacggtagcttgggtgacttgttgcatagcagtaaaggtggtttgctggattggccgaccaggtacaagattattgtcgatgcagctgaggggctttcttatttgcaccatgactgcgtgcctccgattgtgcatagggacgtcaaatccaacaatatcttgttggatggggactttggtgctagagtggctgattttggagttgccaaggtagttgatgcagctggaaagggtgttaaatcaatgtctgtcattgccggatcttgtggttacattgctcctgagtatgcatatacgctgcgtgtgaacgagaagagtgacatatacagcttcggtgtagttatactagagttggtcacaggcagactcccaattgacccagagttcggagagaaggacctagtaaggtgggtctgcaccactctagatcaagaaaggagtggaccatgttctcgattccaaagctcgatccatgt

SEQ ID NO: 5204 - DNA, 746 bp, Gossypium hirsutum
  Clone ID: GOSHI-09MAY01-C75461_1
gttggatacggtcacctcggggatggaaatttgcaccttaatgtttctgctccagagtacgatgataaaattttagaacaaattgaaccctatgtctatgagtggacatctaaacaccgagggagtatcagtgctgaacatggcctgggactgatgaaagctaacaagatttattacagcaaatctactgaaactgtacaaacaatggcttctataaaaaagttgcttgaccccaatgggatactcaacccatataaagtccttccacactcactcaattcttagagccgaggctgggaaaacaagcacaaccgtgaagtcttctctattttttccacgttcagtgactaggatttcgaatgtgcacaagaaagaagtcatgaatggaggttagctgaaatgggcaaagggggaagagccgaggaatttctatgaagaatattggtttggcagacaaagggcatcgcttctgatatggtacattgaatttggtataatcatcaaatcgaataagatcaaaatgtgcaaatcacgagtaaatgatactaattgccaaaataagttggagctttgtttagcctttctttttctttctgtaatggcatattgtggtagatctgaggttggtgtgttgaaccttttgtaatgtccactgatccaaaactgggttgtttataggctatatgtattgcggcacacaatatgtactttccggaaaaaagcttatagataatcagctaccacgt

SEQ ID NO: 5205 - DNA, 851 bp, Gossypium hirsutum
  Clone ID: GOSHI-09MAY01-C75661_1
tttttggcatatccttttaagtcgataacagctagttgcttctatgtttggaatatgctactttaaacttccacaagcttatgattaagggtatgtcttttgagttttgatttttcatttttttatcattcctagtgatgatatactgcagattctgttattacaatgccttcaaaggggatgatttgattgatagaaatctcattacttgttattattggtttcccactccaactaaaagcactctctcaagtatatgcatatattatggattaccacatatatagtttttgctttcccacaagattgaaattaaaaaaaaaaaaattttcctttgaaaagttataaaaagaaagtttttttttaagtcttcctaaaaatcattgttatatggcctccttcattttcattgttagtgtttgcaccatcgaaagctttccttttatttccttctcaatacctcaaaaatattgatggcttaagctaatgtatttaacttcaaacacttaccagagtgctagagttcaagatgctttattgactgcttgcaagcttgctaatgttttcctagtgaagtactattttaaagaccttttaatttccatattttgctttctgaaatatgattatatttgtttcatttgtagtggaactgctgtatcaatggtaatgaaatatgcagacaatattgtgaaggtaagatatgacccaaaattcatgtagtcaatcattgatttgtctgcatttacatccatctctctgattttttaagaaacttgttaggcatgtcatgggtatcaataatggtcatgcatttggtatggcaaatgaaggaagtgcttctctttctt

SEQ ID NO: 5206 - DNA, 686 bp, Gossypium hirsutum
  Clone ID: GOSHI-09MAY01-C75061_1
cttttctttgctttccaaagcttttgctactctttcttttaactcttcaacctaggcagtgtttggttctaaaccatggaaattccggttatcaacaggataagcgatttcgaagctagcataagcactctaaacaacccatcttttctttcccaagtttatgccctttctgggattgataaaatctaccaagcttatcatttttggaaatggggagctttgattcttgccctactggcctccttatctaccataatcaatagactcaagattctggttatcagattccgacgaaaccattctttaccatctcgacctcttctttatgacacagattttgatactgactcggagacttcatcatgttcatcatcggacaacgaagtagaatatgaggagccctcggcttctcaaaactggcgacaagttgatgaggattttcgagtgagaggatcgggtcattttattgacgatcaatggcggaacagtggctccaccctgcgaaagaggagaagcagcatcggcgatctgttttcgtgggctgaagagctaaccagcggaaaaagcgtggtgaagctgtgggacaacttaggattagggttccgtttggacctcgatgaaagcgacaacgttttaaatgtttacgacatcaacaaagaaacaaaaatcaggtcaatttttgggga

SEQ ID NO: 5207 - DNA, 480 bp, Gossypium hirsutum
  Clone ID: GOSHI-09MAY01-C76871_1
tcgctgacgcgtgggctgtctcaagatttccttgatctccatcctttctggtaatgcggggagcttgcattctcctgttagtgtactccaactaatggtgtagtggcttttttccattgtcaacgggtgtgggcgtttttgcgctgtactgctcgtttttaagcagtttggactttggaggatcggtgatcgtggtcgatgatatcgagaaagaacatgggaagtgcttcgccgctccttctcattacattagttcttggtgtttgctttgccacatataatcttgtaacaatggtaatgcacaatagatctatttcaaaactgacaatctataactccgatggtggaatatttgttgatcccatcattgagatgcccgaaagtgtgaggaaattgaagcgtgccaaaatgcctttccatgttgccttaactgccactgatgctccctacagcaaatggcagtggcgtatcatgtactat

SEQ ID NO: 5208 - DNA, 375 bp, Gossypium hirsutum
  Clone ID: GOSHI-09MAY01-C76831_1
agtctatgcagctgagaaaacctgcatttgagaagcaccactttcatggctaccaaaatcctagcatcttcaagccatagtttcgagaacgaatgcaaggaaattcacgaatcacggggaagatggaaccacttgattcgagctttggtcactcggactcagctcgaatgcaggggaatcagagagacttacagggacatgtatggggaagatttgataactctgctgcaaaaatctagccttcgaaatcagcctggtgtttcccccaaaacttgcgcagctgtgtccctttggatgcttcatcctcatgaacgtgacgccattggtgctcgggaagctcttctgcaagataatgattctaattatcagtctctg

SEQ ID NO: 5209 - DNA, 318 bp, Gossypium hirsutum
  Clone ID: LIB3493-023-P1-M1-E4
acgctgaatgggtaaaacagagatttctttcgagatccatgaacccattctttagagcgcggccgaagtttagagcaaatagcggatcctgccaagactgatgccatgaaattgacgataccgtgaaaatgaggcctcttgattcgagctttggtcactcggactcagctcgaatgcaggggaatcagagagacttacagggacatggatggggaagatttgattactctgctgcaaaaatctagccttcgaaatcagcctggtgtttcccccaaatcttgcgcagccttgtccctttggatgcttcattctcatgaa

SEQ ID NO: 5210 - DNA, 600 bp, Gossypium hirsutum
  Clone ID: GOSHI-09MAY01-C76571_1
tgactatcctatacttcaaggtcataggattgaacactcgcatggaaactggttgatgcctccccccacttcatctcatcatgaaagcaatccagtccaatcaagagatttaatgcccaaaacatcatttgtacaagggcatgagaatggaaaatatagagaaggaaattgtaaactctttggtattcctctcattaggaattctgttgcatcagagccgacagtctctcgtatgcaagctgcatcccgccaagttcttgaatttgagtctgctcaaaattctgaaaagatgaaggccttgcaattggcagaggcggaggacctgtctaattataacgagcaggagatacagcctcatacacgagagattcaaagcaaaccttcaagtgcctcaactaggagttgtaccaaggttcacaagcaggggattgctcttggtaggtcggaggaccttactaagttcaatgactatgatgaactcgatgctgagttggatggattatttgaatctaaaggcgagttaatggcccctaagatgaattggctcgcagtttatactgatgatgagggtgatatgatgcttgttggagatgatccctg

SEQ ID NO: 5211 - DNA, 1086 bp, Gossypium hirsutum
  Clone ID: GOSHI-09MAY01-C76471_1
aaggttttatatcggttttagcgtaaacagtacgagttgcgatggctcgagttgactcaggccgaggtgtactcacctcggtcgttacaagtatggagagcgcttttgaactggttggcttttttctatcagatctttgctcaaatcatcagagccgtcggtcaatatcctttgctttcttcttcttcgtcgtcgtcgatcacttcgacttcaacgcaccgttttaagcccttgcctgttgctgactctactcgaaccgagtctcgcgctacggtcgagatcgctgccgttttggactcacctgatgaagaccgcatcgaaaaactcacggtagttcttgacttggatgaaactctagtatgtgcatacgagacatctagtctgcctccttcccttcgtaatcaagcaatggatgctggattaaagtggtttgagctggaatgtgtatcttcggacaaggaatgtgaaggaaagcctaagatcaattatgttacggtgtttgagcgcccagggttgcaagatttcctaaatcaactaagcgaatttgctgagcttgtactatttaccgctggccttgaaggctatgctagaccgcgtgttgacagaatcgatgctgaaaaccgggttagtcttcgactctataggccttctacagttagcaacggagtaccgggagcatgtgaaagacctcacctgcatatctaaggatttatgcccgactggtattgtcgacaacaatcctttcagtttcctgttgcaaccggtaaatgggattccatgcattccgttttctgctgggcggccacatgatacacagcttctcggtgttctccttccacttctcaagcacctttctcaggaaaaagatgtgagaccagttctttatgataggttccgcatgcctgaatggtttcagaaacagggtatcccctcttcttgttgggcactgtaggaaaaagatagtaggcaatgccttaggttcttctgggtacttttcgtgcaagcctcttatcttccaaaggcagcatcttatcataggattcatgatcttgtgataacatttgaattctagaggtgtctatgaat

SEQ ID NO: 5212 - DNA, 616 bp, Gossypium hirsutum
  Clone ID: GOSHI-09MAY01-C76141_1
gcttttgccccgcgtccgcccagcgtgggtgggtttggggtgtttaaaaccatcgttcaatggaacacccaaaggacttatgtccaggaacttctgccatagtttttctccttcttactggccttctctacttatgtgtatggtctccttcaaaccctttacttcccttccatgaacccgggggggcacccaaaaattatactggcgtagagttccttgtgaaagatgagcttgatttggcgttggaggaagcctcgatgccgaacaagaccgtcataatcgcggttgtaaatagggcttacgttgagcaaagcgttaatgcggagaccacaatgctggaccttttcttggagagcttttgggtgggggaagatacgagggcattgctggagcacttgcttctggttacggtggatcagacggcttacgatcggtgcatgttcaagcggttgcactgttacaggttggtgacggagggtgtggatttcggggaggagaaggtttacatggcccgggattttgtaaagatgatgtggagaagaactctgttccttttggatgtgttgaggcgcggctacagtttcattttcacggacacagatgtaatgtggctaca

SEQ ID NO: 5213 - DNA, 391 bp, Gossypium hirsutum
  Clone ID: uC-gsflnu33B002h10b1
tccacgcgtccgatttaacctacctcacctcctttcatttcattataactcccctctctctttctctctcttagaaccatcgttcaatggaacacccaaaggacttatgtccaggaacttctgccatagtttttctccttcttactggccttctctacttatgtgtatggactccttcaaaccctttacttcccttccatgaacccaatggttcacccaaaaattatactggcgtagagttccttgtgaaagatgagcttgatttggcgttggaggaagcttcgatgccgtacaagaccgttataatcgcggttgtaaatagggcttacgttgagcaaagcgttaatgcggagaccataatgctggaccttttcttggagagcttttgggt

SEQ ID NO: 5214 - DNA, 730 bp, Gossypium hirsutum
  Clone ID: GOSHI-09MAY01-C76161_1
aagggagcaccaggggttggagcttattcacttacttacagctggtgttgaagcaattggatcaaagaacattgctgccatcaatcattatatagctaagttgggggatctagcatctccaagaggcagtgccataagccgtctaactgcttactatactgaagctttgactcttcgagtcacaaggctttggcctcacatttttcatatcacaacccctcgtgagcttgatcgggttgatgatgataatggtactgcattgaggctcttgaatcaggtaagcccgattccaaaattctttcacttcacatcaaacgagatattgttgagagccttcgaagggaaagacagggttcacatcatagatttcgacatcaagcaagggcttcaatggcctagtttgttccagagtttagcttcaagggctaatccaccaagccatgttagagtcaccggaatcggtgagtcgaagcaagaactaaatgaaacgggagacaggctctcgggatttgccgaggcattgaatttgcctttcgagttccatccagttgtggacaggttagaagatgtgaggttgtggatgctccatgtaaaggagaaagagacagtagctgtgaatggtgtgtttcaactgcacaagacactttatgatggaaatggaggcgctctcaaggacttgttgggacttattcgtagcacgaaccctgcagtgttgtcatggcagaacaag

SEQ ID NO: 5215 - DNA, 648 bp, Gossypium hirsutum
  Clone ID: GOSHI-09MAY01-C76091_1
ctccgtaaaagcagaggggcagtgcagagcatatataaaagatcgagataaagagggggagagagagatattgaaggagaaagttttaaggatcaaaaccagatatgatttcttgttaatggattcttttggttgaacagtccgaaacccatttccagaaaaaaaagaatcaagaaaacaccgagtggggttttcttggttttgatttgtatacttggatttgcaaggaaaagatttttggttgaggttcaatggagggtgagaaaagatacattagtgcggaagagctgaaagagcataacaaatctggggatttgtggatctcaatccagggcaaggtttacgatgtttcagagtgggcaaaggagcatcccggcggggaaatcccgcttttgaatctggccggccaagatgttaccgatgcgtttctggcgtatcaccctggaacggcttggcagtatcttgacaagttgttcactgggtatcatctcaaaaatttcgaggtgtcggaggtatccaaggattatacgaggctggtctcggagtttgccaaaccccgtatgtttgaaaagataggacatgtaccccttttttcacttacagctgtagctctattgtttcttgtggttctttatggggtctcgagag

SEQ ID NO: 5216 - DNA, 516 bp, Gossypium hirsutum
  Clone ID: GOSHI-09MAY01-C76071_1
caaaatcctctcaatatactgtcatcctttgagaaggttgtgcctccatctttccttgagctaggcttagtagatttggtttccatttacagtgagctttgtgcattgggaaagcccccaccagttatcgatgccgcagaccttcaacaaaatcctgaggacactttacgtggtctttgtaaagatttggatattccttttcatgatgcaatgctcagatgggaagctggtccgaaaccgatcgatggtttgtgggcgccatggtggtataaaagtgtgcataactcaacacattttgcatccccaagaaagtaccctaggccatttcctttctcattttatgacttgttggagcaaagtctacctttctataacttgctaaagcgcaacgtgaggcagacatcttcccttttaaggtctcccttaccggttcccgatcttccagttcctgagaatgcgaagctgcttgcttgggttggtgatgagattgcccctcgtgagagtgcaaagggttca

SEQ ID NO: 5217 - DNA, 1007 bp, Gossypium hirsutum
  Clone ID: GOSHI-09MAY01-C76291_1
ctggcttgttaggccttggtcggggaagactatcattccccacccaagcaggacgccgctcctcccggaagttctcttactgtttggtcgacaggtccgcttcttcaaatccgtcctccatgattttcggtgatgcggccattccccgaaccgccgtctttactcctcttcttacaaaccctaagctcgacactttctactacgttgagctgcttgggattagcgtcggtgggacacgtgtccgagggatcacgccttctttattcaaaatggatccagctggtaacggaggggtcattattgactcaggcacgtctgtcacccgcttgacccgacccgcttacatcgcaatgagggatgcgttccgtatcagggcctcgaatctgaagcgggcgcctgacttctcattgttcgatacatgcttcgacctgtccggcaagacttccgttaaggtaccgacggttgttctacattttagaggggcggacgtgtcattgccggcgacgaattatttgattccagtagacagcagcggaaccttttgctttgctttcgcgggtaccatgagtggtttgtccataattggaaacattcagcagcaaagtttccgggtggcttttgattcagcgggttctcggatcgggtttgctccccgtggatgcgcttaaacatgggtatggttcttttatctatttttactaaggtaagggataaatctctttccctgcctctattttagggtaagaagggaagaacaaaaacgatcttccatggatttgaatgtaagacaggaggagagggagatgataaaaggcgggtagtttgttagaaatagcgaatcaacgttgttttgcggtttttcaggtgttatcaattgtatttttcaaatatgaaggtcgatttacgcgctacttttaagacacggggaatatagtttattacctgtttaattaattataagttgaatttaacttcagtttctagaatataaacagcatagaatccat

SEQ ID NO: 5218 - DNA, 415 bp, Gossypium hirsutum
  unsure (1)..(415): unsure at all n locations
  Clone ID: LIB3493-015-P1-M1-H10
aatcaaacaaattggcacagacagcaatgataaagcaaatcctgaaaagatgttccagcttagggaagaaacaaagctacggtgaagaacaaggactccctttggatgtcccgaaaggtcattntgtggtatatgttggtgaaaacagaagcagatatatagttcccatctcctttctgacccgacccgagtttcaaagctcgcttcatcaggctgaagaagaattcgggtttgatcacgacatgggcctcaccattccttgtgaagaagttcttttccagtctctaacgtccatgctcagataataagactggttttatatggataggcttttaaatggaggatatacatgaaattaaggcgaagctgcttcattgcttctctttttattagattttccctttattattattat

SEQ ID NO: 5219 - DNA, 260 bp, Gossypium hirsutum
  Clone ID: uC-gsronu33B039g10b1
tcttatctcttatttgcaatcccaaaagagaatggctatcagcaggaaatcaaacaaattggcacaaacagcaatgataaagcaaatcctgaaaagatgttccagcttagggaagaaacaaagctactcttgtgaacaaggacttcttttgtatgtccctaatgtttcattttttatccttattcccctttacttatttccttattttttacttttttttttttttttctcttctttttttttatcttttttttttctta

SEQ ID NO: 5220 - DNA, 440 bp, Gossypium hirsutum
  Clone ID: GOSHI-09MAY01-C76261_1
cttaaacattgattatcggaatcctctgatttttatagtagagttacacgtctttatttattcaggtcatatctacttaaaagtttatgacataaaacttttactgccgcctaacaaattggcggcaccagcttaaaatatgcatggccataatattttgggcacttttgcccaccagaattaagctaattccatggctctatctttcattagtgcaggactgaccaatgctttcttaacaagtcagttcctcgatactccgtcatggatggatgtatgcatcggaatatggaacaaggtcactcaatacgaagaaattcgacatgtgatcttctatgcctcttacatcacctacaatttttagatcgatcgcaaaagacttatattgagtcataacacttacatcagaataagtaatcactgtggcttctgattcaaga

SEQ ID NO: 5221 - DNA, 655 bp, Gossypium hirsutum
  Clone ID: AI055412.1
gttctaacatagtgtgatatgaccataactttaaccatcgtgttctttcccccacagtttcatcatagtttggttccaccatctgctgatttgcacggacactggaatcgttgcaagcttgacccagcagcatgcagtgcataccagatcagtgtattgcaaggtttgaggcgtgatatgcttgtggctctttacccatcctacaaaaattcaagaagagatgggatgtttataaattcatgctttgctcattgccaaagtgagtcacaggacacatggtttgctgttgattcttcaagaatacacaataagaccattgctgaagcagttggagattggtactttggcagaaaaattaccaaagagattgattgtccatatccatgcgataaaacttgccacaaccttatacctttacctcaagtggtaatgctacctttacctacaggctacattcttcctgacagggctgctttttggtaaaaatacactgttgtcccgaatgaaatgcatctgcaggtttcactgagatagattatctttttcttccagaacaaatcttagtttcatcatattgttaacctgtcgtcgcatccgtacttaatgggagaacgattccatattttaagttactcttttaaaaggtgtgcccaag

SEQ ID NO: 5222 - DNA, 516 bp, Gossypium hirsutum
  Clone ID: LIB3585-027-P1-K1-B11
gtttcatcatagtttggttccaccatctgctgatttgcacggacactggaatcgttgcaagcttgacccagctgcatgcagtgcataccagatcagtgtattgcaaggtttgaggcgtgatatgcttgtggctctttacgcattctacaaaaattcaagaagagatgggatgtttttaaattcatgctttgctcattgccaaagtgagtcacaggacacatggtttgctgttgattctccaagaatacacaataagaccattgctgaagcagttggagattggtactttagcagaaaaataaccaaagagattgattgtccatatccatgcgataaaacttgccacaaccttataccttcacctcaggtttcactgagatagattattctttttcttccaagaacaaattcttcagtatacatcatatctgttgaacctggtcgttcgcacgccgtagctttaatggtgatgaaacgaagtccaggtattttaatgtttttaattcttttttaaaa

SEQ ID NO: 5223 - DNA, 753 bp, Gossypium hirsutum
  Clone ID: GOSHI-09MAY01-C77751_1
cacagtttttatcgacgaaaaccggtattactccgcggattacgaagagttacatcccggaatcgatgcctacgatgtacaatacacgaccaagattagtgaaaccagggagctaataacgtcggctaaagaacagattcggaacgagtgcaggccggtccaaaacctgttgttctcagagtgcaagcttgggatcaatgatttgccgaaccatgtttacgaagtggattgggatttaatattgattgatggaccaagaggtgatggacccgacggacctggaagaatgcaacccatcttcacttcgggggtgctagcgagaagcaaaaaagggggcaatccaaagactcacatattcgttcatgattattacagagacgtggagaagatgtctggggatgagtttttgtgcaaggaaaacctgggggaatacaatgacacgcttgcacatttcgtggttgaaagaatggaggaaaacagctttcagtactgtcgcaactctaatcataatattacatccacaaaagcttcctcatcttcctagttaaaactacttatccaacttcataaaaaacatacagtccaagggggtcagtcaagatattgtatttgagaaaagaaaagggagaatatggattattatcatgatttcatggaatttgtgttgatcgatcgacctttttgtgaggtgtgtggtgtagaataactttttttacacgaaagaattacatgaaagaattaagtctgatcgag

SEQ ID NO: 5224 - DNA, 678 bp, Gossypium hirsutum
  Clone ID: GOSHI-09MAY01-C77151_1
aaacaaaactcattaacatcgtttcgaagccaaaacaagactgaattcatggtgaaaggagggcaaaatttgccggctgacgtcatccaagtaatcgatcagctagagcgccattgcttatctcccgatggatctcttatctccaaatccgcctactacgatctccagctcgcgagagaggaaatgtcgagagaaagattacgctacttagaagcaatggcaatttactgtgaagcaatggctatggtggaagagtatcagcaagcagtttccgtggcgaatcttggagggattcgagatattcgaggtttttatccgcagcttggattgaagaattctcctcaggtttatgagaactctagagcatccattagttgttgcagaaccggctcaaagattgagacttccactaatatctaaagatggggaaattcatgaggaagaaattgagaaatggagtattatttcacggagttcacttgatagtactagtaccagtctcactatcagctcgagttcaaactcattgaattatgcaaatagtgcggcaaccagtggtacagctgcaaataatactggtgattcaggagaacctggtgttggtggtgtgcctaatcgttttcttggaatcacacctgcttatttgtggcaaactcagcttcaacgagtaccattgtc

SEQ ID NO: 5225 - DNA, 467 bp, Gossypium hirsutum
  Clone ID: GOSHI-09MAY01-C77121_1
ggcgtcttttattcctcaccacaagaaaagctttgttactactttaatggaagctgccactctccgctctccttttaaggaagatacctacttcatctgccagtgtgaagtcttccgagaagaagtccttgcaagaactcaaggacaagcttacggcctctcttggccccggcggccaatgcaccatgtggggcatccctcttctctccgatgacgaaaaagccgatgtcattttgctcaagttcttgcgagctagggacttcaaggtctccgactcctttcacatgttggagaaatgtcttgcctggagaaaagagttcaaagcagacagtgtgacggaggaggagttggggctggaggagctggaggcagtggttgcttatatgcatggctatgacagagaaggccaccctgtttgctacaatgcctatggcggttttagagacaaggacatgtgtgagagaatg

SEQ ID NO: 5226 - DNA, 415 bp, Gossypium hirsutum
  Clone ID: GOSHI-09MAY01-C77331_1
cctgacgcgtgggttcataggcattctttcagaaatcaatgcgtttaccaggagagccaaggtgactgtaatttgtgctctgcctgcaagagctgaagcaacagcggtaaatgaatcatcaagaagttgcatgtctcgtcgtatgcatgaaattgtttaccaaatgattagtgcaatcggctatcatcgggagttagagcctggaatgcttgtctacgagaagtctgacaacgtgggatttagatcttgtcattttcaacttgaaaagccgccctccaacgcaaaatgcacgtgggatcattcaaatagctgcaactctatcgttttcaacatccaagctagctcactattatacagagctaggcattgctgctgcagtgagatcgattaccaggcagttagcttacataaacca

SEQ ID NO: 5227 - DNA, 992 bp, Gossypium hirsutum
  Clone ID: GOSHI-09MAY01-C70861_1
gaatccccgaagggaaaactcagttcaaaaaacccagaagagaaaagcaaagaattaggcctttttttgggggggagagatttctatcatttgctcgaattatgggatctgcttcgattgaccctgttcttttggatgatataatatgtcgtttattggagtttaagcaagcgaggcccgggaagcaagtgcagctaatggaaggagagatccgtcagctttgcaccgttgcaagagaaatctttcttcaacagcctaatcttcttgaacttgaagctcccatcaagatctgtggggacattcatgggcagtatgctgatcttctgcggctttttgaatatgggggttttcctcccaaagctaattatttattccttggggactatgttgatcgtggcaagcagagtctagaaacaatatgccttttgctagcctataagattaaatatcctgagaacttctttcttttgagagggaatcatgaatgtgcttctattaatcggatttatggattttatgatgaatgcaaacgaaggttcaatgtgagactttggaaaacctttactgattgttttaactgtcttccagtggctgctctaatagatgacaaaatattgtgcatgcatggtggcctttctcctgatctaacaaatttggatcaaattaggagtataacccgaccaactgatgttcccgattctggtttgctttgtgatttactttggtcagatcctggtagggatatcaaaggctggggcatgaatgatcgaggagtctcattcacctatggcccagatagagtctctgacttcttaatgaaaaatgacatggaccttgtttgccgtgcccatcaggttgttgaagatggatatgaatttttcgctgacagacagcttgttactatatttcctgctcccaactattgtggtgaatttgacaatgctggcgcaatgatgagtgtcgatgaaagcctaatgtgttcattccaaatt

SEQ ID NO: 5228 - DNA, 586 bp, Gossypium hirsutum
  Clone ID: GOSHI-09MAY01-C70561_1
cccacgcgtccgcccacgcgtccgcccacgcgtcggaggatgttgaagctttgctcttgcaatgtgacggaccaaattcaggcatcggttcaatgccgattccccggttcacccggtcctttcgcatttcggcggcggagcccggtctctgtctcttgttccccgctgagtagactcaagttgacgccggttcaagccgtgctgtcaagccagcaaaaagaagttgccaaggttgttaaatctgggtcggggagtttggccgacctgctccgcttgggtagcttggcggaagatgggttgtcttataacgaaaagtatatagtgaggtgttatgaagttggaatcaacaaaaccgccactattgaaacgctagctaatcttttgcaggagattggatctaaccatgctcaaagccttggattttcgacagacgggtttgctacaactcccaccatgagaaaaatgcatctcatatgggtgaccgcacgtatgcacatagaaatatacaaataccctgcttggagtgacgtggttgaaatccttaccggctgccatagcgggggaagaattggaaccagaagggact

SEQ ID NO: 5229 - DNA, 515 bp, Gossypium hirsutum
  Clone ID: GOSHI-09MAY01-C70401_1
gtccgagcccgcgggcggccgcacttacataaacagcatcctctgcactaaaccttctcataagcagtgggtattttcctgtgcatgtcaatcgtgatctgctaaagtgtaaacattcttacagatcattctgatgagattatagctgctgctgaaagtcttctgtctgattcatctgactcacatgagatgaacagagaggatcttactcatttgaagggctatgctattgatgttgatgaggctgatgagcttgatgatgccttaagtgcatcaaagttgcaagatggccggatgaaaatgtggatacatgttgcagatccagctagatatgttgaacctgggagcatggtagacagggaagcactgacaagaggaacctctgttttcttgccaactggcacttatcctatgtttcctgagaaacttgctatggagggaatgagtttgaaacaaggagaactttgcaatgcggtcagtgtctctgttatcctgcactctgatggcagcattgc

SEQ ID NO: 5230 - DNA, 762 bp, Gossypium hirsutum
  Clone ID: GOSHI-09MAY01-C70701_1
cggacgcgtgggcggacgcgtgggcggacgcgtgggtttctttgttgcctagttaaccctaaaacacttccctcgacactaacgcgccaccgcgaactgcgatctgcacgttcaaactccaagggagtggttttcggccttgagatcccctttagattccgatttcaacggaatgaaggggaaacgatggccaactcgcgaggtaaccttctctttcgctttcttttttctgtttttatgattgatttcaaaataaaaaagaaaatagaggcgtaaaaataaaaaagggaacaacctctgaagaatattcaacttctctgtatttgattgctattcttttttgtatattacccgtgtgtaaaaaaaggagtttttacaatcagaaaccataggctttatagccgaatcataaagaaaaaaaaacaatttttctttttgttgtttttgttgctgctgtgtggtcgtttgtttgcaggtacggagtacgggcgtgcgctggcccttggcgtgaggcgtacggggctgtgttggcgcgggtacgggggccatgctggagggttgcggctactagggaaaccctaggtttctgtttagctgaagttgttttagttttgggccgtttgggcgacgggtattttgggctagggttttagctaatggattttaattgggtcttgggttatgtatttaattttaggtttaggattgtaaaatgggctgatggactgttaataatatattattgattggatttttattatt

SEQ ID NO: 5231 - DNA, 889 bp, Gossypium hirsutum
  Clone ID: GOSHI-09MAY01-C70121_1
cccacgcgtccgcccacgcgtccggcacttagtgtgcgaagtattgaggatgacacttagtgtgcgagacatctgaaatgacacttagtgtgcgagacatttgaaatggcacttagcgtccgaagtattgaggatggcacttagtgtgcgagacatccgaaatggcacttagtatacgaagtattgatgatgacacttagtgtgcgaaacatccgaaatggcacttagtgtacgaagtatcgaggatgacacttagtgtgcgaaacatccggtatagcacttagcgtgcaagacatcgattgtgcagcgacatttcgtgtaagtatgattttgttatggatcggtacaggtatgtacatggatgtatgagcttgttaatagacattattataattgagatttaatcctgtatatttgaattgttgatgattatgattgtacggaagtattttatgaaaatttggcattggaaatccctgttgaaccttaggaataaattaggatacaaagggcatgtcattgaagttacattgatttggcttcgagccatgatactggcacttaggtgtgcgagattcccgagtatccaatttttattccaaatagttcaacgggtatatcgaaaatatgaatgagtaatttagccttgatagatttgagttactgcagtagtgtaactttgaaaatacactacaatagtggaaaatgagttagaggtagaataaaatatgagattaaagcttaatgagtttattttcacatgaagaaacaggggaagaaaaagaattcatattgggtgatatttgaatcttgtgaacaggtctgatgaatcgagattcctgtctgacttagaaatcaccacaattgtgaaaaatttaagagtatactt

SEQ ID NO: 5232 - DNA, 584 bp, Gossypium hirsutum
  unsure (1)..(584): unsure at all n locations
  Clone ID: LIB3829-030-Q6-K6-G2
gtgaaatctatcaaaggnagaatactcgagaatgaagggacgtattggtaaatgttgtgaaatggatactttaaacaggtatgtacttaacgctcgggttgaaaactcgacataacaacaatatggtaagatggtaaatgaaaatgtgatatgaatgtctcagtgatgattatacaaacgatgttatattaattttgtgaacaatgatcatgaatgagtaatttagccttgacagatttgagttactgcagtagtgtaactttgaaaatacactaaaaatagtggaaaatgagttagaggcagaataaaatatgggattaaagcttaatgagtctattttcacatgaaagaaatagaggaagaaaaaaaattccatattgtgtgatatttgaattcttgtgaaacaggatctgaatgaattcgagatcccctattctgaatttagaaattcaccaaaaattgtacaaaaattattaagagtcataccttacattcatagattccttatttagtctatttttaggggaaataaacggcatggtcgttggaattttgtacagggagaaattcggtttgtagtgcac

SEQ ID NO: 5233 - DNA, 1060 bp, Gossypium hirsutum
  Clone ID: GOSHI-09MAY01-C70091_1
attttcttgggagattcttgtaaaaagttcggattttcttggtgggttttggattttaagttgaaagattgaaagggttttttgagttaaaaagtagtatgaagatcaaggaaggtgatcatgaagatgtaaatgccttttagagaaagtaggaaagcattatggttgcgaagggacgccagaatggcacaggctctgcaaaagtggaggttggagagatagatactagtgcaccttttcaatccgttaaagatgctgtcactctttttggtgaaggtgctttctccggggaaaaacccgccaaaaaaaaagtcaaaagcttattctgctgagagaatagtggcaaaggagacacaacttcacgtggctcaaaaagagttaaacaagttgaaggagcaactagaaaatgccaagacaacgaagactcaagcactcgcagagcttgaaaaggccaaaagtatggtggaggaactgacttgcaaactcaaaaccattaatgaatcaaaggattctgcaatcaaggctacagaagctgcaaagagtcaggcaaagcagattgaagaagcaaattctgatattctcccgggacctgatgatgctcggagccaggacttggaaacttctagggagcaatacatggctgtgattgctgagactgggtgctgcgaaacaaggattgaggaagcttcatcaagactgtgatgcatccttggaagcgaaaattacagccatcaacttgatgttagaagctaaacattcagctaaggctaatatcgagaagattggggaactctctaagcaaatttcatctttacaaggatcaattggacaagtgaagcttgcatctcttgaagcacagcaagaacaagctaaattttttgccgaaaaggacacacagagagaactatataaagctaccattgaagattcgagaaagaagttgcttgctttaaagaatgaatttgacccagaacttacgcgaaatcttgaagcacaactgttggaaacagttaatcagattggggatttgcagaagcagatggaaaatgcaaaggcttct

SEQ ID NO: 5234 - DNA, 880 bp, Gossypium hirsutum
  Clone ID: GOSHI-09MAY01-C70391_1
cccggtcgacccagcgtccgctctcataacaatgatgttgcctcagaacagccaagctaatgatggaggtgcatctgttgattctagtaatcctagtgaatctgctggaatacctggcagagttttttccccttcatggtttctggtatgcagtggaggcctggaagctcctttcagaatcaaaatgacccggggcagtttcgtggaagaactgagatagcacctgatatgagggaaaaatatttgcaacggcttcaacaagtgcagcaacaaggccatagcaacctgcttggtgtgcctcctctcgctggaggaaatcttaagcagttttctgcacaacaagccccactcatgcggcagttcaattctcaaagctcttcactctctatccaatcgggtctaggacttggtggccaagcatctggttttaatagtgtaacagctgccagcttacagcagcaacaaaatcccatccaacaacagtctagtcagcaggcattggcaacaaatgttccaaaggatggggacattgggaatgcaaaagttgaggaacaacaaccgcgcaatttacctgatgattcaagttctgaagctgttccaacttctgggcttgccaagaatctcatgaacgaggatgagatgaaaactcagtatgcaattgattctccggctgctgtgtcaggctccttgacagaacctgctcaagttattagggatgttgatctttctcctgggcaacccttgcaatctaaccagtcttctagtgttcttggcgttattggcaggagaagtgttactgattttggtgccattggtgacaacctcagtggctcaatgaatactggaggaatgcatgatcaactatacaatttgcagatgc

SEQ ID NO: 5235 - DNA, 1062 bp, Gossypium hirsutum
  Clone ID: GOSHI-09MAY01-C71981_1
cttcctcgctctcttctcagacaaaatacaaccagtttctctcaatctctctcgcaatgccggcaactgatgcagaattggatctccctccttctcagtccgccttctctatcggagagtatacatttgcagatgctggaaacttggaccactgtacaaagtacttgaaccagacgctcgttacctttggctttcctgcttctctcgatctctttgccaatgatccggtttcggtcgcgaggacctgcaattgcatatattcattgctgcagcagcggcagcgcgacattgaatttagagagtctgctaatgagcaaagacaacgattattatcagatatctcaagattagaggcaaaagttgagaggcttgatgcacagttgcaagctaaagatagagagatagcaacaatgactagaacggaagccaaaaatactgcagcttttaaggcacagattgagaagctacagcaagaacgagatgaatttcagaggatggtgattggtaatcagcaagtgagaactcaacagatacatgaaatgaaaaagaaggaaaaggagtacataaagttgcaggagaggctgaaccaagtcttaatggaaaagaagaaggaatcaagatcaggaatggaaataatgaatttgcttcagaaagaagggcggcaacgtgggacctggaatgggaagaaagcagacaatgatttctataaaaagattgtggatgcttatgaggcaaaaaatcaagaactgaaagcagaaaatgctgatttaagagcattactgcgctcaatgcaggtagatatgcgtgatttctttaatgctcctaatgggttgccaaagcaatctttgcctgttagcgaaagacatgaaaatgatccatcacaatcgccacttggtgggagggacggatgtctttgatcttccttttcacatggctagggatcaaatagaagaaagtcttcgcactaagatggcttctgtaaaagagcggatggttcaattacaggatgcgcaaaaaggtgctgaagtcacttctgaagcaacagagagggagcttgagctt

SEQ ID NO: 5236 - DNA, 538 bp, Gossypium hirsutum
  Clone ID: GOSHI-09MAY01-C71911_1
ctgatatatgcgtgaaagcatggcatgatatgacagcaagaaataagagctttgatgtctgtcatgaatatgttgctgagcaagggagggaactttatgagctggttgcccatttgccagacaaagcaaataattatttaactccggccttgtctgttttggaaaaaaacacttgacattcatttaagggataacatgttatcaacctctgagaaacggcatcctgtcggaactgcttaaacaagatggaagtcccataatgatctctttggaagtcagcaacaaatttttatgttctcttttgctcagatgatgtttgccctctatgttacgcatagtttttgtttactgtaaatccatgtgtagtctcatatagaaaatgtgtatgcatgtatgtatgatggataacatatagtgtatatggagcaaaagctctaaataatgagttgtcttttattccaatttatggttcactgtgatgtaaaccctcatgaaatattacataaatcaaattgaacagtgttgacatgttttttgg

SEQ ID NO: 5237 - DNA, 734 bp, Gossypium hirsutum
  Clone ID: GOSHI-09MAY01-C71851_1
cccaatttcatcaaaatcaatttcacttttcagtctttcaaagtctttgatgtaccaaattacgtaacatcaccgctagttctttcaaacttattctttatttccacatcttcgccaaattaaaaagatcgaacctcttcattcattttagctaaaagctttgggagttccatcagcaggattaggcagcatgtcggtgaaaacacaccggtggatcaatcctcaccaaattctatcatcactaaccattttctttgtcatcaccatctttgtatatcccatcaacagcttggaatcaaggaggctcgatgacagcactgttccaggtgatcaaggcatcaagcgtaccccatcatgtatacaaagtcctccaccaccctcactgccgccaccatgccctccaccaccatcacccccagcactgcctccacctagaccgaaaaagccgccaacccaatactgtccaccaccaccaatactgcctagtccatcatcctttatatacatacccgattcaccagggaatgtgtactcaattgaccaaaatttcggcggtgcaaccggaatgtcgctgtggggttattgggtctggtttgtggattttctctccttctcgctttttgaagtttgtaaggttctaggatcttgtgcaaaaagttggatatattaagtacaaattccttttctttggacaagaatataattttgtccaaacagaaagttttacgaactgg

SEQ ID NO: 5238 - DNA, 623 bp, Gossypium hirsutum
  Clone ID: GOSHI-09MAY01-C71591_1
cccacgcgtccgcccacgcgtccgcccacgcgtccgggaaaataaaaagctttttagtgggcggcaaactgcctcttttttcgttgctttctcacttctacatttctagtctctatacaatctttttcccactccattccctgtttctttctctttcgttttgttcttggcttcaggggggagtttacctgttgattctttcatttggtgattacccttttgagtttttgaggcaagaaagtaagtggttaagctatggctgctccaaaacctgaagaaattagcttcccaccaatggaccaacttcaaggcctggagtacctgcattgactcaaatccttcttggggggagggctatcgctttggggtttcaacattacattttggccttaggaactgctgtgatgatcccttcgtttcttgttcctttgatgggtggaactgatggtgataaagtaagagtggtgcaggcactactatttgttgaagggattaatacacttctacaaacactgttcggaactcggttgcctaccgtgattggagggtcttatgccttcatggttcccatcatatcaataattcacgatacttccttgatgagtatcgaggacaatcacgtg

SEQ ID NO: 5239 - DNA, 575 bp, Gossypium hirsutum
  Clone ID: GOSHI-09MAY01-C71481_1
acggctacaaggagcagtaccatccaaaatgcgatgtctgcaaccactttatttcaacaaaccctgctggtcttatggaatatagggcacatgctttttggatgcaaaagtactgcccttctcatgagcatgacggtactccacgatgctgcagctgtgaacgaatggagccacacgacacgggatatgttgcccttaatgatgggcggaagctctgcctagagtgtctggactctgcagttatggatactaagcaatgccaacccctttatctggatatacaagaattttatgaaagcttagatatgaaagtggagcagcaagttcccttactcctggttgaaaggcaagctttgaatgatgccagagagggagaaaagaatggccattatcatatgccagagactagaggactctgcctttcctaggaacaaactgtcagcactatccgaaggcgaccaagattggggacaggaaatcgttctatggacatgataacagagccgtacaaattaactcgtgatgtgatgtgactgcaattctcattctttatggccttgccaaggttattgact

SEQ ID NO: 5240 - DNA, 660 bp, Gossypium hirsutum
  Clone ID: GOSHI-09MAY01-C71751_1
cccacgcttccgaagaaataagcatgggtgagggtgataatgatgataatagaggagtttcagagggaggtagttaccccaaaaatgctgaaccagagcgctcatttgcaatttctcactttcgaggttgggctgatgggggatccatcagtaagcctaaattgaactcacctcaccgtcctgggaaacatcttactctatctacttggtgactgggagtgacctttttagtcgaaaaacctttgccaatttgggttgcagtgaatacatgattaaatctttaaaacaacagcttttcctgcgcccttcacatattcaggcaaaggcttttggacctgttattgagggacagagctgtattatagctgatcaaagtggctcagggaagacattagcataccttgcacccttagtccagcgtcttagggaagaagaactccaaggagtcagcaagtcatcctctggtagccctcgtgcagttataattgtaccaacggctgaattggcatctcaggtcttgaatagttgtcggtcattgtcaaaatttggggttccattcagatctatggttgtgacaggtggttttcgacaaaaaactcaattggaaaatctagagccaaagtgttgatgttttaatagcaacaccaggtcgtttcatgt

SEQ ID NO: 5241 - DNA, 758 bp, Gossypium hirsutum
  Clone ID: GOSHI-09MAY01-C71651_1
cccacgcttccgcggacgcgtgggagggaaccgggagcaaaacaaaatggccttttccgaatgggactctgcttgggctcaatagggacatgcccgtgtgcgattacttcaggtcgtggtcaagcctgttaaataggcacggacgtgtggtctacccgtgtgagtcgtgcttcgagtctgctaaattgacacgaccgtgtggtctgcccgtgtgagaaagtccaggacgtgttaatttcgtaccttggcccattttctccatttttggcccgtttctcattcctttcactctcctatactcacctgagtataaaacatgaaattaagacattaggagcatcgaattcaccaaatttaagaaaaaatcatccataagatgtgctaagcatgggatagaaatatgtatgaattacgatttatcaattctcttagatattcactccagtacagtacctgttcatatggcctgggtctccttctatgcatatccatttggattgaaaacaaagtactacgcaaggatgtcaaatggggtcaatttttaaagattttgttttgcttttgggttttttcttggctacttatactggagccaaatttattaggagtttaagtttatattttagaaataggctgttgagtgtttgaaaagaaggaaaaaggaacatataggaaaagcactttaaaatttaaaatttctagtttttaatttgatcatttggaaaatttcttttacaattaatatcataaaaggttca

SEQ ID NO: 5242 - DNA, 1015 bp, Gossypium hirsutum
  Clone ID: GOSHI-09MAY01-C71391_1
ctttttttgttttcccctctctctcttatactgtcatggcagattctcgtggttgattcccctgccactagctaagtctcttatttttgggttcttctccaacagttacttattttttccctgtattttcttctaaaaaattttttccctttttcaggttctgcaggtaagcttcaaagcttggcgacattgaaaaaattattcaactattttagtgtaaagtttgggtatttgttattgaacgggcgcgggggttgggtgtgtcaggctcagttggtgttataatattgctttgtttataatttagctgctttagcatctcgtgtcaccactcagtatgaacaaccaatatggtgaagatcaagatgaagcaaccgtcattggatttgaagtgccaagatcacctgattcaagttataataatgcctaccctgggaatgaagatgatgcacgtgaccctccagttgtccctccacacctgcaccattcgttgctcagttaccccacgagtatgaatacttctgggaatcttcctttgccagaaaacgtgattctaaatcatctttacattgaaaaccgagaggcaccaagatctgtagtggcactagggtttactcaccgtttccgttcaaagtatgttactgttgtgctatacaaaccagttccaagaaggggtagttctcatacttaaagttctgaacatcgaataggccttcagtttgttggttagccctagtgatccaattagtttcgatagactcgaatagggaattagctgaaagaatattcattggttttgctcgatgactataggggtcgtccattggacctcaaaatttaacattttaacatgaaaatatcatcagtttatgttgtgatacatataaagctttctcgtagctcggtatttgcgggcctgtgagcttgtttgctgcgtaagatggtactaaacttaaaagaacttgtatttgtgggaattgaattgaatggattggttcatttagttggacatgtt

SEQ ID NO: 5243 - DNA, 664 bp, Gossypium hirsutum
  Clone ID: GOSHI-09MAY01-C71311_1
cccacgcgtccgcccacgcgtccggaaacagtcacttgttaatgctgctggaaaagatttatttggtggtttgtatgcatcatggtgccattcacccatggcaatcattagtctctgtttattagctcagacgtaccaacatgcatgtgctgtgattcagtccctggttgaggaagatattaatgccaaattcttggtccagcttgataagttgattcgcttgctcgaaactccagtcttcgcttatctaagattgcagcttcttgagcgccagacaatacatatggttgctgaaagcattatatggtcttttgatgctgcttccacagcaaagttctgcattcaaggttttgcgaagacgtttaaaaactgtgccatcatactctttcggtggtggtaatctcaaacgagcagcttcaggcaaccctcactctcaaattttacatcatagtggattacaaattaccgaggatggtgatatagaccaagataatggaattacagagtggaattaactttgcttcattgcaacagtttaagcaatgcagcaacaacaccatatgcttgcaaaatcacgagcacaatcacgaaacagttccacttcaattttgaggaggcccaaagtagaacccttacaaccttcaacattaggcacaaacaagtc

SEQ ID NO: 5244 - DNA, 771 bp, Gossypium hirsutum
  Clone ID: GOSHI-09MAY01-C71281_1
ctcttatatgggtagctactgcaggttccgagaacgggggtcaactgggtcatgagttcagaggacttgcccttcgccttgcaaatccgggcgaattgacacggctgagtggtttagtaaataacttgatttccctcggattgggacgtgaagcggcatttgcagctgcggttttaggagacaatgctcttatggagaaggcttggcaggatactgggatgcttgcggaggctgtgctccatgcacatgctcatgggcgacccacactgaagaacttggttgaggcttggaacaaagtgttgcagaaggaggtggagcacaccccatcagcaaaaacagatgctacggctgcatttttggcttctcttgaggagcccaaacttacaagcttgtcagaggcagggaagaaacctcctattgaaatccttcctcctggtatgtcagcactctcagcttcaattacagttaaaaagaaacctgctccggtgactcagacttcacagccacaaagcaaaccattggcattagaagcacctcctactggaccagcttctgctgcagtacctggcacaccaattggagcacctccttctgatgcaccagatgcaacacctggtacgccaataggagcagcaactctgatgcaccagctgtggcagcaacaggtgcagcacccgcatccgaagcaagtgaacctgctctagtagaagaagctcctaattcatcaacagggagcaatccctgatctgattgcttttgtacaaatgaacc

SEQ ID NO: 5245 - DNA, 683 bp, Gossypium hirsutum
  Clone ID: GOSHI-09MAY01-C72591_1
tgctttttagttataaagggcggggttactttttggtcgtgagatctggccattcatttataaatcgtaagtaaaaaaaagtctcagattttgggtcttttgggttcgtactaatacgaccacaagacgatgtcctacgcttacctcttcaagtacattatcattggcgatactggagttgggaaatcatgtcttcttttgcaattcaccgacaaacggttccagcctgttcatgatttaaccattggtgttgaattcggagccaggttgatcgccattgacaacaacccaataaagcttcagatctgggacaccgcgggccaagagtcattcagatccattacaagggcttactaccgaggcgctgccggtgcacttctagtttatgatattactaggagggagactttcaatcacttgaccagctggttggaggatgcaaggcagcatgcaaatgcaaacatgaccgttatgcttatcggcaacaagtgcgatttggctcataaaaggctgtgagcacaaaagaaggtgagcagtttgccaaggaacatggcctggtattcatggaagcctcagcaaaaacggctcaaaatgtcgaagaggcatttataagcaccgctgccaaaatctacaagaagattcaggatggagttattgacatatctaatgagtcttatggtatt

SEQ ID NO: 5246 - DNA, 511 bp, Gossypium hirsutum
  Clone ID: GOSHI-09MAY01-C72491_1
gttagatgaaacatcatttaccatccattttcctgctcaaggagaaacatctgtggtcaaagcatggcttcttcgtccttctctgatgtggaaggatggtaattgggttgaatggtccagttgtggggataatgatggctcttcccacgagggtgataccccactggaaaagcgaccaaggatatgcagtcctgtgatagagaacaaagaggatagtactaaatgttttgacagtaaggaatctgagaaacctgacaacacaagattgctggatttaactgctggtgaaaaaatatttaatatcggtaaaagcaccagagacgagagtaagcctggttcactcagaatgaaacgttctggtttaaagaaagaaggatcaagggttatttttggtgttcctaagccaggaaagaaaagaaagtttatggaagtaagcaaacattatgttgcggatcggagcagtagaactcttggaacaagtgattcagctaaatttacaaagcattcaatg

SEQ ID NO: 5247 - DNA, 973 bp, Gossypium hirsutum
  Clone ID: GOSHI-09MAY01-C72721_1
gtgttgagctggaacgagttaacaggggagttacccagaacagtgtcggcgcagttattacacttggatttgaagaagaacaagatcagcggaccgttgccaaggttaccgtcaactgtccgttacttgtcagtgtcggagaactggatgtggggcccactcaaggccctggaatcgctatccgagttagcgtacctggacgttagcatgaaccaattcagtgggcccatcccggcttcactcttcttaaacccctccctcacttcactgtttttgcaacggaacaatttatcgggtggcctcccatcatcaatcaagatggaccccaccttccaatcctacggcggcaagggatccatcgtggacttgagccataacttcatcacgggggatataacccccttcttggctggggtggagactctcttcttgaacaataaccatctcactgggtctgtacctgaggagtacgtgaaaagcgtgtacgacggcaccaccaaaactttgtatttgcagcataactatctatccggattcccattacctcaaggttccactctgcctgataccgtctccttgtgcttgtcctataattgcatggtgccgcccgttgggatatcagcctgcccggccagtgccggaagccagccctccaggccgcaatcgcaatgttccgtattcacccatcgtggctccaccaactgacatcaggataaggtggatatggttatacgtttcacattagtagaagcaatgttaagagtgtgtgtaacttatattactaccatataggtttttttttttttttaaatttatataatttgttttaaggatgagttatataaacagtgaaaaagaaaggttttattagcagccctgcttctcttatacttaacccctccccacccctcaatgtaatcgtattttatttgggttacttttttattattataaaatttgacttgacttgttt

SEQ ID NO: 5248 - DNA, 591 bp, Gossypium hirsutum
  Clone ID: GOSHI-09MAY01-C72161_1
ataatcagtgtatcttctttccgggccctcctaaagatgtcaaaaattgacaataacaatgctccatggcaccgtctcaggcgtgcttccacaccagggaaggcaacggtgcttgccatcggtaaggcctttccacggcaactaattcctcaagaatacttggtggagggctatatacgcgatacaaattgccaagatgtctccatcaaagagaaactggaacgtttatgtaaaacaactactgtgaagactaggtacacagtgatgtgcaaggagattttagatcaatacccagaattggcaactgagggttcatcaactatcagacaaaggcttgaaatagcaaacccggcagttgttgagatggcatttgaagcaagcttagcttgcatagaggaatgggggaggcctgcaactgatatcacccatatcatctatgtctcttccagtgaaatacgcttaccggggggtgatctttaccttgccagcgagcttggcttaagaaacgatgttagccgggtaatgctctatttccttggttgttatggtggtgccactggcctccgagtagctaaagacatagctgaaaac

SEQ ID NO: 5249 - DNA, 502 bp, Gossypium hirsutum
  Clone ID: GOSHI-09MAY01-C72101_1
tttgatgctagcatcttcggagatgtcttgccgatagggtggaagcttttgttagggttaaagaggaaggaaggtcgtgcttctgtatattgccggagatatattagtcccggtgggcggcattttatatcatgtaaagaagtcgctgcattcttgcaatcctgcttcggtctccatgatgcacccttgacaatggataatgatggcgacattgctcagcatatttatcaaatggctcctgaaattgaaggtgcaatccagaaaggggacgatcaaaggcggactgaacgtgggaaggaactcaacttactgggaatggataacctggcagaagttcaaatacatgatcttttcgaatgtcataaatgcaatatgacttttgatgagaaggatgcatatttacaacatcctttatcatttcaccaaaggactaccaggaggtacaggcttggttcttctgttggagatggtgtgatacttagagatgggaaatttgaatgcc

SEQ ID NO: 5250 - DNA, 815 bp, Gossypium hirsutum
  Clone ID: GOSHI-09MAY01-C72251_1
cggacgcgtgggttacaatacaggaagtgcaaaaagagagagaagcaaaacacattgagtctgagttccattacttagcagtatctctaaactctctcatcttcttatcttttagcacaactcaacaatcaagaagatcagagatcaaggagttagaaacctatcaaaatccacccatcagtcattctatcaatcaatcaatcaattcaaaagctcataaaaatttcccccaaaaaagaaaggatgtcgtcctcatcagtttcattttcatcggaccacctctctcccgcggaccagctctgttacgtccattgcaacttttgcgacactgttctagctgtgagtgttccttgcagtagcttgttcaacaacacagttatggttcgatgcggccactgcacaaatcttttgtcagtcgacatgcgtggcttgcttcttcccacagctaatcagcttcaccttgcccattctttctttaccccacagaatctcctggaagagatccgaagttgtgcaccaccaaatatggtgatgatcaatcacccaaacccaaatgacactgttattcgtggagcagctgagcttgaggagatagccaaacctcctgtggtcaacagacctccggagaagagacagagagtgccgtctgcctacaatcgcttcatcaaggaagaaatccaacgtatcaaagctgggaatcctgatataagtcacagagacgccttcagtgctgctgccaagaattgggcccacttcccgcgcatacatttcggacaaatgcctgatcaagctgttatgaaaatgaaaaataacgt

SEQ ID NO: 5251 - DNA, 944 bp, Gossypium hirsutum
  Clone ID: GOSHI-09MAY01-C73981_2
gctgtactgaaacatttcgagtggccggaacagaaggctgatgtattgcgtgaggctgcatttgggtattgtgatctgaagaaactagaatctgaggctgcatcgattcgtgatgatgcccgacaaccttgtggtcctgctctcaagaagatgcaggctctgcttgaaaagtatatataatcctgaatatctctgtttgcagtgcttgtttgtttgtttgcttgtatgtttgcttgttctcattcaattattaatctgaatatatatatctcattcaattattactctgaataatggcaggctagaacatggcgtttacaatctctcccgaatgagagaatccgctacaaagcgatacaaggggttccaaattcccatggattggatgcttgaaactggtattgtaagccagatcaagctggcatcagtgaaactagcggtggagtacatgagacggatatcttcagagcttgaagcagttggaactggtgggcctgaagaagaggaactgattgttcaaggtgttagatttgcattccgtgtacatcagtttgctggcggatttgatgtcgaaacaatgagggctttcgaggaactgagagacaaagcaagatcatgcaatgtccaatgccaaaaccagcaaaaattcatttgcaggtctactacaacaagctgatttttcaaaagaaaataccagtttttctgttgtaaagatcgaaacatcatgtttgtgaatacaacgagccagctgctatttatcctcctacattcaattcatttaatgccagctattgaagctgggaatttactgtatcacctaaacccagctgttctactttagctggtaattgtgccttgaccccttgagtcagggagttaatgtaaaagttttaagacttatcaaatcgacttttctcctattgattaatttaaagaagcctttg

SEQ ID NO: 5252 - DNA, 1448 bp, Gossypium hirsutum
  Clone ID: GOSHI-09MAY01-C73981_1
cccacgcgtccggcaatcgtggcgaaagtgaggagagttccggaagtcgtggagttctatcactcgctcatgcggagagactcaaaaagagaagccgccggtgggtgtagcgcgccggaggttttacctgcaaccgccaatgccagggacatgatcggggagattgagaaccggtcatcttatttgctcgcgataaagacagatgtagaaacacaaggagagttcataaggtttttgattaaagaagttgagaatgctgcatttacagatattgaggatgttgtgccttttgttaaatggctagacgatgagctctcctacttggtggatgaaagagctgtactgaaacatttcgagtggccggaacagaaggctgatgtattgcgtgaggctgcatttgggtattgtgatctgaagaaactagaatctgaggctgcatcgattcgtgatgatgcccgacaaccttgtggtcctgctctcaagaagatgcaggctctgcttgaaaagcttgtacattcctgaatatctctgtttgcagtgcttgtttgtttgtttgcttgtttgtttgcttgttctcattcaattattaatctgaatatatatatctcattcaattattactctgaataatggcaggctagaacatggcgtttacaatctctcccgaatgagagaatccgctacaaagcgatacaaggggttccaaattcccatggattggatgcttgaaactggtattgtaagccaggtaacttaagctttcaaccctcatgttctataacattagacactaattagagatggtgcattatttcaactcattaatatatgcaaataaattgtgacagatcaagctggcatcagtgaaactagcgatgaagtacatgagacggatatcttcagaagcttgaagcagttggaactggtgggcctgaagaagaggaactgattgttcaaggtgttagatttgcattccgtgtacatcaggtaacagctattctcattaatttttacaacttgaaccaagacggcatagtgaaggcaacccatttttcttttgttcatggacagtttgctggcggatttgatgtcgaaacaatgagggctttcgaggaactgagagacaaagcaagatcatgcaatgtccaatgccaaaaccagcaaaaattcatttgcaggtctactacaacaagctgatttttcaaaagaaaataccagtttttctgttgtaaagatcgaaacatcatgtttgtgaatacaacgagccagctgctatttatcctcctacattcaattcatttaatgccagctattgaagctgggaatttactgtatcacctaaacccagctgttctactttagctggtaattgtgccttgaccccttgagtcagggagttaatgtaaatagttttaagacttatcaaatcgtattttctcctatgatat

SEQ ID NO: 5253 - DNA, 740 bp, Gossypium hirsutum
  Clone ID: GOSHI-09MAY01-C73671_1
atttctcttaattaatttattttccatcgaaacgcgggtttcttataaaattcctatctcctgtctccagaaatctctggaaattcctttgggaaacttgacctctacttccgatggttggaggaatccaccgcctttttttgatcagcaaaccgaggctggtagtgataagcagccaaagcttctttgccctctttgtcgaggagagatttatggctggagcgtggtagaagctgcacgtgagtttatgaactccaaacccaggagttgttcttcagagacatgcgatttcactgggacttacggtgaactcaggaagcatgctaggtctgctcatcctttggtccggccaactgaagttgatccagaacgacagcgtgattggtctaggttggagcgtgaaagggattatgaggatatgctgagttcaatccaaccagttgctagggaagaaagtaatggagaaagcatttcaaatcttgaggattttcgttcgtggttgacaataaatcttgcatacttgacacttgcacttgagttcattagtgattcaagaaataacgaacatgatagatttaggaggagaccacggaataggaggttcacgtatgatcgaagtctgatcatggtacaagggagaataatagttccacaccagacagagcactctttggccaccgcaacaatcctacaccagaagagagagttccaggtagacatcgtggctcacagggaattct

SEQ ID NO: 5254 - DNA, 504 bp, Gossypium hirsutum
  Clone ID: LIB3585-057-P1-K1-F12
attattatcctagggattcaaagagtgccgtatagaggtgttgaaaaaaggcagatggttaagataattgttactggtaattttttaaagtttcagaaaaaaaaatgccaaaggatagaagggttggttcctttttttttgaacgctctagggtctctccttacccatgtagttccaggggcagggatgccaaacaatgccaacatgaggatccgttggaactaggatttggactcgaggatgttaaagagtgggaggatgcaaggtgtcctatttgcatggaacacccacacaatgctgtacttttgcggtgttcttcctttgaaaagggctgtcgcccttttatgtgcaatacaagctaccgccattcaaattgtcttgatcagttttgtaagtcatcggtgtcgtctccttccactgctatgttgcaggaaattcctttgggaaacttgacctctacttccgatggttggaggaatccactgcctttttttgatcagcaaa

SEQ ID NO: 5255 - DNA, 628 bp, Gossypium hirsutum
  Clone ID: GOSHI-09MAY01-C73621_1
taaaagcatggctatatgacaacatgggtgccagagttcatattgatgctccaggtctagcatgcacaacaatagcatatagtgctgataataaaaggctgttttcatgtgggacgaataaaaatggagaatcattccttgttgaatggaatgaaagtgaaggtgatgcaaaaagaacctaccaaggactttgtgaaaattcttcagctgttgtgcagtttagtccaattaagcgcgtggtcctggcggcagctgatgaccatgttattaaaatatgggatggggataaggttgagcaatcgacaattattgatgcaggagacttaccagcaaacccacatatacgattcaacaaggatgggaccttgctggctgctattgcaagcaaaaacaaaatcaagatcttggcaacagcctatggccttcagttgctgaatgcatcagtaactggttttgttaattcctcttcagatgtctctgatggtccaagaaagcatgtaataaattcaagtttaagtgttgctaattacggagaagctgatgcccatgaaccaacccatgtaataaatccaagtgttgctaaattccggagaagctgatgcccatgtctcaaccaacttcaatgagg

SEQ ID NO: 5256 - DNA, 385 bp, Gossypium hirsutum
  Clone ID: GOSHI-09MAY01-C73141_1
catacctcccttaaaatataataaccctttcccttcactgctcaaaatcctattcaatgctcccatggcttccaatctttctgagagtcagagttttggattgacatctatagctgaggaagaagctcgttggcgctgtgtccttgtgctggtaaccctgtcattgctcaactctctcaaggaaactaactataccataacaaaggatgaggattatgatgggaaaggcgtgagtcgccgggcgctgcagcgagcgtgtgatgaaatctatgtggttgcagaaggagaaaccctccactccattagcgacaagtggtgggatccttttatagtggagcacaacccccatattcatgacccttgatgatgtatttccccggacttc

SEQ ID NO: 5257 - DNA, 677 bp, Gossypium hirsutum
  Clone ID: GOSHI-09MAY01-C68861_2
gtcggtctgtcactcccaatccccagtactctctttcgcttcctcccttttgcttttgctatatcttttcttcctctccatgtctccttgatcacgatccgacggtccacaatgaacgcttatccttttgcttgtttcctctgcttttagtcctgcaaatcctcagatctactttcgcctccctcctaagcttctctgttttctcctttccttttgattttagctctgtaattcctcagatctactctctccgccttcctcatcttcgtttctcggtgagttgtgtttttccaaaaaccaaaagctaatttataccaaaaacaactttccgccggcgagttttgctcgtaattcaaggttgcctttaggtttatcgttggccgtagtgaaatactgaagttgcccacagttcgatggcggttacggttagttacgtcgcgctaacatgcgccggtgaaactctagcttccatgttcttgtcggctcttgtcaataaccaccttgtagctctgaactcctttacattgctggtggctaacaaacctggaatcaagggtgaccattcccaaaaccagcctaagctgaaggacgccgatggggaagataatggtgacggcaatgatgatggcgatggtgggggtggtgaggttggagatggtggaagaagagctgtcctc

SEQ ID NO: 5258 - DNA, 636 bp, Gossypium hirsutum
  unsure (1)..(636): unsure at all n locations
  Clone ID: AI730608.1
gaacgcttatccttttgcttgtttcctctgcttttagtcctgcaaatcctcagatctactttcgcctccctcctaagcttctctgttttctcctttccttttgattttagctctgtaattcctcagatctactctctccgccttcctcatcttcgtttctcggttgcctttaggtttatcgttggccgtagtgaaatactgaagttgcccacagttcgatggcggttacggttagttacgtcgcgctaacatgcgccggtgaaactctagcttccatgttcttgtcggctcttgtcaataaccaccttgtagctctgaactcctttacattgctggtggctaacaaacctggaatcaagggtgaccattcccaaaaccagcctaagctgaaggacgccgatggggaagataatgatgacggcaatgatgatggcgatgatgggggtggtgagtttggagatggtgaaaaatactgtcctcggaaggcggggattatggcaacaatggtaatagcgagaagaacaatccanagacaggactgggaggtggtgcgaccggggcagaacanaatggagaagacgaagacnatgacgatggagatggtgaagaccctgacgatgacgatgacgatgactt

SEQ ID NO: 5259 - DNA, 408 bp, Gossypium hirsutum
  Clone ID: LIB3189-032-P1-K1-G1
cgcttatccttttgcttgtttcctctgcttttagtcctgcaaatcctcagatctactttcgcctccctgctaagcttccttttttctcctttcctttagattttagctctgcaattcctcagatctactctgtccgtcttgctcatgtgcgcttctcggagaactgagttattccaaaaacagataagcttatttttaccagacacaactttgcgcccgcgaggtctgctcggaggtcaaggttggctttagatgtatcggtcgtcgctgtggaatacttaaggtgcacacagtatgcaggcggttaccgtaagctacaagcagctagcatgcacctgctgatcggagcctattatgtttcagctggctctggctatgatgacacagctggcatggagcatcatgcca

SEQ ID NO: 5260 - DNA, 806 bp, Gossypium hirsutum
  Clone ID: GOSHI-09MAY01-C68471_1
gttcgctaaggtagttaagggaaggttaaaggaagattcagccaggaaatactttcaccaactagtcagctcggtcgacttttgtcacagtcgaggcgtctaccatcgtgatctgaagcctgagaatctgctactggacgagaatgacaacttgaaagtctcagattttggactctccgctttgcctgaacagctaagaaacgatgggttgcttcacacacaatgtgggactccgtcttatgttgcccccgaggttttgaggaagaacgggtatgacggagccaaagctgacatttggtcgtgtggggttgttttgtttgttctcctgacagggtttttgcctttccaagccggaaatgttatgcacatgtataggaaaattttcaaggcagaatatgagttccccccctgggtttcaaacgacgcacggagattaatttctaagcttctcgttgctgaccctgataagaggatttctgttccggggatcttcggcaatccctggttccggaagggattttcgaagactatgtcatcattggttgaacatgaaaacggcgacaagaatgggattgagagcaatagagagctggaaatggtaaccacgaagtcatccccgccaccattttacaacgcgtttgaattgatttcatcgatgtcatcagggtttgacttgtcgaatctgttcgaagatgagagaaagccagcttctttattcactttcaagtgttcggcttcggtaaccctggcgagggttgtatccacggcgaagaagttgaagtttagggtgttagctacgaaagaat

SEQ ID NO: 5261 - DNA, 466 bp, Gossypium hirsutum
  Clone ID: LIB3189-031-P1-K1-C10
gcaagtattgataataacgcacctaattattcgaattacgaatggggttcggatgtaaatgctggaaccacagtgggttataataattatgtaaattatgatcagtcgagtgttgatcaaaattcaggaaactatggaaacaatgatcaaaatattggtagttatgcaaattatgctgattatagtagctatcaatcgagtagtgatccgaatattgggggtgttgatgctgctactagttatgggagttatgagagttatggaaattaccatgtacaatatgagaataattggggtgatgggtcaacaacagcttctatgttgcctgagaccactgggatagctgactttggggtgaaaattaagggaaagagagggaggaatgatttaccagtggaaattgttgaggtgaagcaggatgatcttacgaagaatcggcccagggaagaccaagtcaagatgactg

SEQ ID NO: 5262 - DNA, 224 bp, Gossypium hirsutum
  Clone ID: LIB3189-031-P1-K1-C4
gttctacatcacaagcatccacccttttatttttttttcgaaaactcattctaatcaatgactgttatttatatatctgaataacagtaactaactttatctcatttacacttttttctaaatacacaacactatctaaacaatgatcaaaatattggtagttatgcaaattatgctgattatagtagctatcaatcgagtatctttcagaataaaaactttta

SEQ ID NO: 5263 - DNA, 624 bp, Gossypium hirsutum
  Clone ID: GOSHI-09MAY01-C68761_1
gtttatattctaatcctatttaatttatgaactggaggtgtagttcatctgcaacagttgtgattcctgccaactttgatatcaatgtttttgtaaggtgttggcacagagatagcgttgaagtttgatgttgcactgtcacctctactggcccttgtgataaccagtgactggctacaatgtcattcatcttttgcttgtgcttcgccgtgatttttctgttgaccgaagttgctaggtaggtcaaacggtcttaagaagaaatgccttgtatgtattctggaacatttggtctgctattggaatgttgtcttggaccgttctatgggtgggtattttctactaatgatatataactactgcagttctaggtgattataacgtttacaggacccattgacactgtggttaagtatgactaatttattttgaagagaaactactttcaatctcaaaagtcaatcccattgattttctgcctctagtattgggttgatgtcaagttcatgagtaaatctctacgtaaggtatggtttagggaataaacagaaaatggggtaatgactttggtactgtggactattgggcttgaatgtacttgttcaaaatgtgtaaaaaaaaaaa

SEQ ID NO: 5264 - DNA, 199 bp, Gossypium hirsutum
  Clone ID: LIB3189-030-P1-K1-A9
atctgcaacagttgtgattcctgccaactttgatatcaatgtttttataaggtgttggcacagaggtagcgttgaagtcttatgtttcacttttacctttttcggcccttgtgattgtccagtttctgtcatctttttctaatatctcttgcttttgttcttcctttctgattgttttttttcttttttttttcatttt

SEQ ID NO: 5265 - DNA, 741 bp, Gossypium hirsutum
  Clone ID: GOSHI-09MAY01-C68661_1
ctccttaacagtcagcatcgaaccaggataggagctcagcttgctcatcgcatgctcggtcagccccattgctgccaagtatggtctcgtccgtcaggtgataataactgcaatttcatcataattcgtataaaatgatggaatttagtaggttttttttgttaatgaggaatggaaattgcaatgatttaggcagtgaaaaggactttggaaatcttggtagcactgggtacttttgctttgaaactgtttttggaccaaaagaatgaaaccttagatcaaaacaagaggaaacgcgcagctgaattgaggactatcttcaccagactaggccctactttcataaaattgggtcagggtttatccaccagacctgacctttgccctccggagtatctcgaggagctggctcagctgcaggtattcctgtattttatggcctagtacagcagtcaggactacatgcattagtagatgaaaaaaaagttcctataacaatggactgtgagtctgtgatgaaacaacatatttccattgcagatgcaaaaacatagctagttacagcaattaaactcatcctttggacaacctgataactagcccttggtatgacagattatagaatggttcaacaactcagggttctatggaatttcttagtactattcacaattcaaagtgcataacgagaagttcatgctcaccctataaatcaaaaagattcatccacacatttcattt

SEQ ID NO: 5266 - DNA, 526 bp, Gossypium hirsutum
  Clone ID: LIB3828-031-Q6-K6-D8
cccacgcttccggtctaaaccaactgactgcgggggggtaaaatctatgaatcaaccaaaagggtgacacattccaccattttttggttttattgaatccattggttggaggggggaaagtagttgcagtggcagccatgagtcttgttgtttcagctgggggtcattccttctgttaggggcaggtaaagggtttcctatatccaaacccaagggctacaaattcggtcctcgagctgctttggtcgaagcgacacccagagtcaacggttcgccatcgtccacctctatacaggttttagcaactgaccgagccgaggaactaaaggcggaggctcgagccttggctcgtgctgccgatgcctccgtttacagcccccaattgcttgccaaaaagtatgggtctcgtcccgtcaaggcagtgaaaaggactttggaaatcttggtagcactgggtacttttgctttgaaactgtttttggaccaaaagaatggaaccttagatcaaaacaagaggaaacgagca

SEQ ID NO: 5267 - DNA, 622 bp, Gossypium hirsutum
  Clone ID: GOSHI-09MAY01-C68191_1
aagttggagcaacgggtggaaaagctggttttgaaagggtaaagagaacacttgaagcattgatgacaaggagaaagacctgaagcaccagagcctgagccagagcctactactgaagttctcttcctttgcagctatgaaggctgtggaaagacctttattgatgctggtgctttgagaaagcattcacacattcatggaagaaagacaatatgtttgtcactgggagggttgtggaaagaaatttttggatagttcaaaacttaaaagacacttcctcattcacactggagagagagacttcatatgcccacatgaaggttgtggtaaggcattctccttggatttcaacctgaggtcacacatgaaaacacattcacaagaaaactaccatatctgtccatacccagattgtggaaagagatatgctcatgagtacaagctaaagaatcacattgcatcacaccatgaaaagaacacgacaccagaagtggcaaaatatgccccacctttagagaagatagttaaaactccaaagcctactggtggcgcctatggttctgcatcatctgatcgcccttatgctcgcccttatgaaggttgtgagaaagcttacatacat

SEQ ID NO: 5268 - DNA, 1024 bp, Gossypium hirsutum
  Clone ID: GOSHI-09MAY01-C68091_1
aatcattaacatttcacccaaaaaacatacacccatttgcgttttaagcttcagaatgatacagaaaatatccattatttttcatgatccaaatccaaacccgcttcttgcgcccataaaaaaccccgaaaatgatggagacgttgccggtggggcggtttcagtttaagagattggttgcggcgttcctttcttcatatcgaactctctttattctcttatggatcgttgctttcggttcggtttttatatggcagcggaaaattattggggcggggatttcagtttcggtaaaaaccgggttgagtcggcctatgccaaagatgcggcctcttgcgtttaatttgactgatttcggcggtgttggggatggtaagacgttgaatacggcggcgtttgaaagggctgtattggcgatctcaaagcttgggaagagaggcggtggtgggcaactcaatgtgccgcctgggaagtggcttacggcgccctttaacctcactagtcatatgactctgttcttggctgaggatgctgagattcttggaatccaggatgagaagcaatggccattaatgcctccgttgccttcatatgggtatggaagagagcatcatggacctcggtatggaagtttaatccatggtcaaaacctcaaagatgtcgttataactggggataatggtaccataaatgggcagggtcaatcatggtggaaaaagtttcggcaaaagctactcaaccacacaagaggtccactcatgcaaattatgtggtccagtgacatcgtaatcgcaaatataacattacgtgattctacctattggacttttcatctgtatgactgcaagaatgtaacagtcaggaacgttaccatcctggctcctgtacgtgaagccccaaatactgatggaatcgatcctgattcgtgtgaggatgtagtaattgaggattgttacataagtgtcggagatgatgcaattgcgataaagagtggatgggatcagtatggcatagcttacgctcg

SEQ ID NO: 5269 - DNA, 944 bp, Gossypium hirsutum
  Clone ID: GOSHI-09MAY01-C69961_1
ccccgcgtccgccatagtcaaatattagcggtctgttgcctctcttgatttttccaagtaagatttcatttatcaagtgtttagtcgctatattattaatattgatttcctttttctggtttttcaggagcttaatttagggagagatcgggtacattttttgggaaaaaaaactgctttatgacttgcaggagtattgaacctattcatttcaatctggataattgggtttcaatctttttcaggtgaaagccctacaacatgagcttgtatgcaaggatgctttactcaaagctaagaacctggaaagaaagggggaagcggatatcaacgatcaaaatactgaccacgcagctgaggacgatgacaaggcttgtacccgcaacagaaggcgtaatgctagaagtcaatctatgggcccttcaaccacaagcagaagaagtggagataaagaagaaggctgaaaataaaaggcgttgtttgagacggcgaactgcttggtttaaatccccaagaggcagagaatctatttgagattgatgacctcgactatgtgggcgctcaaccttgatactcccgatgcatgaattagcagcttcatctcttagcatggaagaagctcgtagtaacccaagagctgaaagcagaagttcgatcgctgcaaggccattaccattacgcaaagcagtcgagaaagtgcagtcatacaaggaagttccacttaatatcaaaatgcggagaaatgagtgaacatcaacaaccaaccgcttcattcttctaatttaatacttgtaacctatgtagtgttatttgtggaacttaattctgtcgtaatctatctatccctacatgctgttgtttattccaaacatctagttgactgcaggattgtaaaagaaacaaaatgtggcattttgaagcgatccaacaatccttttcactcc

SEQ ID NO: 5270 - DNA, 600 bp, Gossypium hirsutum
  Clone ID: GOSHI-09MAY01-C69891_1
acacattgaaacagaatgtagaagccttgcttgagggcttgcttgaggctcgtcaagagcttagaccactgttgctcaagtctactggccgtctaaaagatctattgtttttagacattgcccttgactctactgttaggacagctattgaaagaggttatgaggagctgaataatgctagaccagagaaaatcatgcatttcatcactcttgttctagaaaaccttgcgctttcttcagatgacaatgaggatctggtctattgtttgaagggatggcaccattccataagcatgtgcaagagtaaaagtgctcactgggcattgtatgcaaaatcagtactagacagaactcgccttgcactggctagcaaagctgagacgtaccagcgtatcttgcaaccatcagcagaatatcttggctcattgcttggagtagaccagtgggctatcaacatattcacagaagaaattatccgtgctggatcagctgcaactctatcctctctaattaacagacttgatcctgttcttcgagagactgctcatcttggcagttggcaggttatcagtccagttgaggttgttggatatgttgaag

SEQ ID NO: 5271 - DNA, 853 bp, Gossypium hirsutum
  Clone ID: GOSHI-09MAY01-C69691_1
gtccgcccacgcgtccgccacaggtcacaccgtcctccactcactttctctattcttggttggtttttctggcgtgggccttcttggttgctttgcccagatttctgggtatgctgggatatattatagctcgcctactctggcaactgccatgcttaatctcatcccaggtctcaccttcatccttgctgttgctttcaggatggaaacactgaatttgagaagtagcactagccaagccaaatcactgggaaccatagtgtcaattgctggggcattcattgttactttctataaaggcccctcacttttgatggcaccctcacattcaagctcacctcatctacttctggggcagcagtctaattgggtcattggaggatttctccttgcagctgattgtgtgtttgcttctgcctggcttattgtacaggcatcagttcttaagaaattcccagctgagctttttgttgtcttctattattgcttctttgtcacccttcaatcgggaataatctgtttgatcatgggaggagatcttagtgcttggagctttaaacctgatgtgagattgggcgctgttatatactcagctgtgtttggctctgcattccaacttggggtttctacctggtgtatgcatcggacgggtcctgtttttgtttccatgttcaagcctttgggaattgttgtttcagtagtcattggtgttatcttcttaggggatacatcctttctttgaagtttagttggtgcaattgtcattgttactgggttttactcaattatgtggggaaaagcaaaagaaagggagttagacgtgcaaacttaaggggatgatgtcagaatcaag

SEQ ID NO: 5272 - DNA, 642 bp, Gossypium hirsutum
  Clone ID: GOSHI-09MAY01-C69671_1
cccacgcgtccgcaaaaaacgaaaaaagaaaaactcaaaaccttctctcaaaacgctcttctctctcagtcccctgggcttcatcggcacctaatgcacctccatctccgtcgcggtttcaactagatccataaggatccgtcaacctttggacaggggaagcaaactttcactagatcgataccaacagcagataagaaaaccctcttcttctttcttcttatttttgtatcaaaaggaaagaaaaataaatgaataaataaaataaaaagcccgaagagaagcaatgaaaatcacctttttgttttctttttttatttcgatttctatggggtttttgtattttgaagattgagtttttttgttttcaaaaatcccccctttttcagtttgtatcaaaacgatttttgaaaaaggaaatgaaatgaacgaaaacaaaaaaagtgatgaacatctcttgaattttttgagtctgtttttggttgtttctttattctgctggttttttttttttgcctttgattgctcaaaatctttgtaatacaatggtttttggatttaaaaaaaaacccttacattcggtttcttggtggccttatagccaaatgagataccatattttcgctactcttttcggtctct

SEQ ID NO: 5273 - DNA, 622 bp, Gossypium hirsutum
  Clone ID: GOSHI-09MAY01-C69151_1
ataaatattgaacttcccaaagttccgtttggtacgagtttacatgttggtgtggattatcaaccatgagcaacgtggctaagtttctcagatactcttcactcactatcttcgaacaacccattgcaaaggacccttggccatcctctacttcctctttctagcttcttcttctagggttcttgcctttgggtaatctttgttgttgggttttttttgaagaaaatatgagtagtggagagaaaagtttgaggaacttccaattacacctaccacaccttcatcatcattgtcatcatcatcatcaagggaagaaacaaacgagggatgtaccaaaagggtatttggcaatcatggtgggatcacaaggagaggagcgacagagatttgtggtgcctgttatgtacttcaatcaccccttgttcatgcgactgttgaaagaggcagaggaggagtacgggttcgaccaaagggaaccatcacaatcccctgtcatgtggaagaattcaggaatatacggggcttgattgataaggaaaagtattttcatcatcatcatcatcaccatcatcatgtgggttgttttagggtttgaataatttattgttatttacttcaatgg

SEQ ID NO: 5274 - DNA, 448 bp, Gossypium hirsutum
  Clone ID: LIB3189-039-P1-K1-G9
gcgggtctctgtactgagcggacccccgcgatctataacgcggacgacccgaagaagggcagcatcgagtgttagactacacattggcattggttacatcgggggtgccaatatcttatccggtggtgccttcgacggtgcgtccatgaaccccgcggtctcattcatggaggtcgtggcactcattcgcgaccaaacccataacctctactggccaggcacgttcatagtgattttcaaagtgggactggcttaccaggtgaaactcatattcgcaatgggaggcctcgaccagacggccgcggataaaacaaataatttgcgggttattggcctaggtttactgaccgagacctgcatcaatagctggagattcaaattctgtgatcactcctttgtttgagaaaaagttgagtgcttgtgatgctgggcgaatttggacgtctgg

SEQ ID NO: 5275 - DNA, 418 bp, Gossypium hirsutum
  Clone ID: uC-gsflnu33B060b02b1
gggtaacatcggcatcatcgcacccattgccattggttttatcgtgggtgccaatatcttagccggtggtgccttcgacggtgcgtccatgaaccccgcggtctcattcggtccggccgtggttagttggacgtgggacaaccattgggtctattggcttggtccgttcattggctcagccattgcagccattgtatacgaggttttctttattgccccaagtacatatgaagagcttcctagtgcagatttttaaaatattttggggtcttttcttttaggtccttttgtggttttcaattaaaatgggttgaaatttgggtgggtcgatttggtttttttttttctttttaattattgtttatttggctggagtaccttgagatgcccgaagagaaagaagaagatgagctggcag

SEQ ID NO: 5276 - DNA, 347 bp, Gossypium hirsutum
  unsure (1)..(347): unsure at all n locations
  Clone ID: LIB3083-070-Q1-L1-B3
gagaactagttttgagtttttttttttttttttttttnttaacggaaacaagaagttcataccaggcaacaattaagcgaaaaaatacaaacaacttggaattaaaaaaagaagcagcaggcaataaacaataattaaaagaaaaaaaaaaaccaaattgacccacccaaatttcaacccattttaattgaaaaccacataaggacctaaaagaaagtactccaaaatattttaaaaatctgcactaggaacctatttatatgtacttggggcaataaagaaaacctcgtatacaatggctggaatggctgagccaatgaacggaccaagccaatagacccaatggt

SEQ ID NO: 5277 - DNA, 770 bp, Gossypium hirsutum
  Clone ID: GOSHI-09MAY01-C69021_1
acagaatctcttacaaggctagttcatgagtgtgaggcaaatctcgagcttctctttccactggaagctgaagtaattgaatctactccacaaggagaaccaaacccatcatcaaataacactgcaaagcgctcacaggaagcttcatcgtcgaatctgggagaggaaacattggatatttaccgtagcacactggctgcaatgaaagcaatacgcggtcttcaaaaggcaagttccacctgtaatccattatcgttctcggctttccttaagaaccaggatgatgacagtggtgctgtaacagctgaaaactctgcttcaaattcttcacccactttgcaaaaaggtaaggagtctgataaagaggatgcacaatctgcgcaacaacgataggttttcgattttcccggatactttttatctttgacttcttctttgaacaactgacagattaataatgtgtttgaagctgtgtttttgcaatctgtttcatagtatgttagctgggtttgagattgtaacttcaccggtatctattgattttgaatgttttaccctttttcctggtataattactaactttgagcctatacccttcccaatggtataattctttgatgtcagcgttggactttggtgtcatctgttatggacatttaggacctgagctggttttaggatactaggatcggatgaaatagagctgtaatggaatgctattccgtgagaatggaaattaaattgaataagtataaatgttatttggttgg

SEQ ID NO: 5278 - DNA, 493 bp, Gossypium hirsutum
  Clone ID: GOSHI-09MAY01-C64841_1
ccctcgcgtccgcccacgcgtccgaagtcggccatggcggatgcccttttgacatccatgtgggttttcagcatgccctttcttaagattctcactttcgaaattgcagctttcctcggccttcgacccttccctttggctgctttcttcatcaccaccctcttggtcagccttatgatgtttatcttcaccatcatcggcaacgctctcggcggcgccaccttcaatcccacggcctccgtcgctttctacgccgctggcctcaggaaagactggtctgccctttccatggcagtgcgttttcccttccaggccgtcggtggagtggtgggcgtgaagacagttttgggggttcttccaagggaatataaagaaaccatcaaaggaccttctttgaaagtagatatacagacagggtttttagctgaagggttgctgacatttgggctatgtctagctctattggtgattttgataaggggtgctaacaacc

SEQ ID NO: 5279 - DNA, 567 bp, Gossypium hirsutum
  Clone ID: GOSHI-09MAY01-C64401_1
ggaatgaattatttgcatgagaataaaccaccaagggttcatcgtgatcttgagccttcaaacattttgcgggatgactctggacatctgaaagtcgcagattttggtgttagcaagctgctcacagttaaagaagttaaacctctaacatgtccggtgacatcttgtcgatatgttgccccagaggttttcaaaaattatgactatgataccaaagcggatgtgttttcatttgccctgattctacaggagatgattgaaggctgcccgccatttcttacaaagcaagataacgatgttaccaaggcatatgcatcaaaggagcgtccgcctttcagagccccatctaagtattacgctcatgggctcaaagagttaattgaggattggtggaatgagaaggctgctaagcgaccaacatttagacagataataaaaagactggaatcgatccatgacagtttcagtcataaaaagcattggagggggggtgcaatcttttttactattaggctgataattgtctctacggtgcatatgctcagctagaccattaactggttcaga

SEQ ID NO: 5280 - DNA, 543 bp, Gossypium hirsutum
  Clone ID: LIB3828-034-Q6-K6-H2
cgggtcgacctagcgtccggttttcatttattatgactatgataccaaagcgggtgtgttttcatttgccctgattctacaggagatgattgaaggctgcccgccatttcttacaaagcaagataacgatgttaccaaggcatatgcatcaaaggagcgtccgcctttcagagccccatctaagtattacgctcatgggggggaagagttaattgaggattgttgttttgagaaggctgctaagcgaccaacatttagacagataataaaaagactggaatcgatccatgacagtttcagtcataaaaagcattggaaggtattctttctttcctcaaaactaccattcccttgcactcatcttctctgagtttgcatgcatgcttgtacattgtcgtattgccagtggaaacactgattgtcaaagaagaatgcaaacaattattcagatattgtttgagggaattagttgcttcttgataaacagacaaaaataaagtatgatctacaattgaaatttgaggaatacatcaacttttgtaa

SEQ ID NO: 5281 - DNA, 846 bp, Gossypium hirsutum
  Clone ID: GOSHI-09MAY01-C64611_1
ccccgcgtccgttctttttctccctatttgtgatgtctcatgtatattggattctgattttgaacctttggatcttaaaagcgacgtcgttgcaaccgggatcgaggacggtgcttcgagagattggcaccggcggtagtgatccgaaggattatggcgttgaactgaacgccacgaatttcgatggagttctcaaggacactcctgctacatatgccatagtcgaattcttcgctcactggtgtcctgcttgcagaaattacaagccccactatgaaaaagttgctaggcttttcaatggacctgatgcagtgcatcctggtatcatattgatgaccagggttgactgtgcattaaagataaataccggtctttgtgataagttttctgttagtcactatcctatgctgttttggggtcctcctacaaagttttccactggctggaaacccaatcaagaaaaaagtgaaatacgtgaaattgataattggcgaacagcagaactcttgcttaattggatcaataagcaaataggcagttcatatggcttggatgatgaaaagtttgaaaacgagcaacttccatccaatatatcagatcctggacagactgctcaagccatttttgatgtggaggaggcaaccgcaattgcatttgacatcattttagaacagaagatgattaaatcaaaaactcgagcttcacttataaaatttcttcagcttttagtcgctcatcatccttcccagaggtgccgaaaaggaagtgcagaagtacttgtgaactttgatgagttctgcccgttagatatgtggtcttctgataaacatgatggttccaccagta

SEQ ID NO: 5282 - DNA, 567 bp, Gossypium hirsutum
  Clone ID: GOSHI-09MAY01-C64291_1
cccacgcgtccgatctaaatgttttcagaaacttagatccaattaatattgttcccctaaaattttacccaaaataattccgtattgaaacaaaaaaatgggaattttatgcaaggtagttgatatgctgctgttggtggcgtttatggtgatgcttgtagccggacctttaatcgatgcgcagctggttttgccggagaccactttcccggaggtgctcgtccgtttgaagcagcaatatgcggcggagtaccaagattatttgatggtggagaagcctcatttcttcgtggccttggtctggttggagcttattttccagtggcctctggttttgcttaacatttatgggattttggcatccaagcattggttccataccacttgtctcatctatggtgcctctgttattactgccatgaccgctttattaggggagctgatgggatcccagaaggcatcagataaattgttgacagtgtactctcctttcatgggactcggtgttttagccttcctgcgagggctggttccaaactcaggcaaggctcggaccattggcaaaag

SEQ ID NO: 5283 - DNA, 419 bp, Gossypium hirsutum
  Clone ID: GOSHI-09MAY01-C64251_1
agaacattagcctcttttgcccttttgccccccttttttggttacaccccattcccctctcttcgcagccactgtttgtctcacagattttttgaaaataatggaccggtaccaaaaggtagagaagcctaaagctgacacacccataaacgagaatgaactgaggattacagctcaagggaggatgaggaattatatttcttacgccatcactctgcttcaggagaaaggtgctaatgagattgtgcttaaagccactggtagagctatcaacacgactgtcatgattgctgaattaattaagagggggattgctggtcttcatcaaaacacatcgacgggatcgatagccatctccgcctcatgggaaccgctggaagaaggccttcttcccctagaaaccacacgccatgtttcga

SEQ ID NO: 5284 - DNA, 417 bp, Gossypium hirsutum
  Clone ID: LIB3272-003-P1-K1-D10
gcccgtttccatgtctcgagagctttatctctcctccgttgtccccatcggtgctctttactctctcagcctctggctctctaactccgcttacatttacttgtctgtttcctttattcagatgctcaaagccctgatgcctgttgccgtttattccattggggttctttttaaaaaagagggctttaagactgacactatggccaacatgttgtcgatctctttaggggtcgctattgctgcttatggtgaagctaaatttgatacctggggagtgatgttgcagcttgggagccgttgcttttgaggctaccaggttggttatgatccagatcttgcttacttctaaagggatcaccttgaatccgattacttctctgtattatgttgcgccatgctgtttcgttttcttggtgg

SEQ ID NO: 5285 - DNA, 346 bp, Gossypium hirsutum
  unsure (1)..(346): unsure at all n locations
  Clone ID: uC-gsflmaxxa107a01b1
caggatggtccgaggcttttgagctagcagccaaattctgctatggccttgcagtagatttaacagcagggaatatatctggtccctgatgcctgttgccgtttattccattggggttctttttaaaaaagagggctttaagactgacactatggccaacatgttgtcgatctctttaggggtcgctattgctgcttatggtgaagctaaatttgatacctggggagtgatgttgcagctgggagccgttgcttttgaggctaccaggttggttatgatccagatcttgcttacttctaaagggatcaccttgaatccgattacttctctgtattatattgcnnaa

SEQ ID NO: 5286 - DNA, 652 bp, Gossypium hirsutum
  Clone ID: GOSHI-09MAY01-C65871_1
tgtcacgcgtccggaattttttctcccctcaagttcctttctgcccattgtaacaatttcgttattggaaaaaaaaaagaaaaaaaagagaagttaatggaaaacaaatactcttgttcttccctccgttgtttgctccctcttgaatattcaccgaaatcccaaaaatcccatcttgtttttgttttgtttttgaggttcaaacgtctcaaaactctggaaaggaatcacacatacctatggaggaattcaagacgatcaagaagaaaatgtggatgttttctctttagtctttctttctgtttgaaaaaacgatctccctagaattgttcacttgcgttatggaagctatcatcgaaacaatcatagcactgatcatcggcaacaacgagaaagtcgctaaccatcaaaactttgttcttcaaaagctctctttctggttcgctcccactacacgcccacctggtctactctctttcacttctggttcctaaaaacaaactctcatacaactgtcgtttagctttctttttatttttgggggtgtttttatatggctgctttctatttcaacaacaacatttttttatctgggaattggtattctgggttcctcgatccctttttccgcgatttggaaccatgccatggg

SEQ ID NO: 5287 - DNA, 405 bp, Gossypium hirsutum
  Clone ID: GOSHI-09MAY01-C65441_1
aaaaaaacagaaaaccctgcgaaaaagaatgcaaaaccgccacaacgctttgttttgaagcttcactcatgtcgcatgcacttcatctcgtccccaataacattcctggttatggaccgacagactgccgatatctctcctactcgggcatttccggaagagcagtgactctatctccttgctcttcacatagggaccacaaaatttgtacacaggtgaatgttagatctttggaatgtaggtcggggggaataatatcttttgtatgcagagcaggtcctggtggccataggagaaaccctgacttctcgaggcaaagacctgggtgtcgagggaagaattgacaaaatgcagaccgggagaactttgaaaatctagatgaatcccgaatggtatcttcaaaaa

SEQ ID NO: 5288 - DNA, 521 bp, Gossypium hirsutum
  Clone ID: GOSHI-09MAY01-C65771_1
aatatgttccgctgccatatctgatatctccctcaaattcaaatccccatcaattccagaagaccaagctttgacaaaagcctttgcagttataagtctagggttttcctgttttcttttattcttttttttcttttttaaatggccttttctccctcgttcagacctaacatgcccctcgttctatctcctttccttgaccgaaccggaccccctaatcctcttttaaatcgacctcaatttcctggtttttctgctcgcgggcagttccttcgtggttccctatccgtggccaagtttgggttcaaacccggactcttgcccgacccggaggcttccgaaggtgttctcagagagctgttcactagagctgaaagccttctttatacgattgctgatgcttctgtttcgtcttccgacaccattgctacaaccactagtgctactagtaaacaaaataatgattggctttctggaattgccaattccatggaaactgttttgaaggtcttgaaagatgg

SEQ ID NO: 5289 - DNA, 1150 bp, Gossypium hirsutum
  Clone ID: GOSHI-09MAY01-C65031_1
atcacctggtccgataccaatggttgggttacaggactcttcagctgtctttccagttgaaactgatgattcgttaactacggtgggtgaggaaatatgggatccaaagctgaatagttgcagagtttcatcccaagcagaccaattggcttcattcactcagcaagatccatgcagtcttaattctggtggggtaagggatttgtctgatgacagcaacaatcaaagtgggatatatagtagctgtcttaacattgatgttagctttggttgcagcaccgtgattgatccttttgtttccagtgccattctagatgagttttgctcattgaaagatgctgattttcaaaacccttcagattgtttggtcgggaactttggttcttgtcaggatgttcagtctcagattacctctgctagccttgcagattctcaagctttctctcgacaagacttgcctgacagctccggtggcaatatcgattttgatgacagtggtcttctgcaaaacaattcctggaagcaaacagctccacgcgttagaacatatacaaaggttcagaaggcaggatctgtaggaaggtcgattgatgtcacaagttttaagaattatgatgaactaatctctgcaatagaatgcatgtttggactcaagggtctgctggatgatcccagaggttcaggctggaaattggtgtatgtggattatgagaatgatgttcttctcgttggagacgatccttgggaggaatttgtcgggtgtgttcgttgcatccgaattctatcccctacagaagtacaacagatgagtgaagaaggaatgaagcttctcaacagtgctgccacagtgcaaggcatcaatggctctaactcagatggttccaatgcaaatgcttaaagaatccaccaagctgagttattatcgtggttcgggatttacccaacaaagctccattgtttatttggagattgagaatggcggagtttggcattcaagtagtatctctgtaagcctttgtagagatggaaatgtgatgtacggatattaaattactttttcagcaggaaatgaactttcatcaaatagttgtactaatcagaacctgagctatggtgatgagtgatgagatataatatttatttccattag

SEQ ID NO: 5290 - DNA, 789 bp, Gossypium hirsutum
  Clone ID: GOSHI-09MAY01-C65361_1
tttgcttttccccggcttttcatctctgagtccctgtttcttgtttgcttttggtttgttcatatagtactacaatacgttcagtaatggaaccagcttgggtggatactactttggatctcaacatcaacccttgttttcgcaccaacaaagctatgaaacgagaatttgagggagatgtggtcgagtcggcaccagttaaatatgagagtggagtgttggtggaggaattgaatcgggtcagcgccgagaacaagaagctaactaagatgctaacagttctatgcgaacagtattactctttgcagcaccaattcatggaatttgtcaacaagaaccctgaaattgaaactgctgctgctgcaacaacatcatcatcaaagaagagaaaagctgaatgtgaggattatggtgccaacatgattggatttagtggaaacactgagaccagctctagtgatgatggctcacctaaaactcccaaggactgcattaaacctaaggtttccagggttcaagtccgcacaaatccttctgataatagcctgatagtaagggatggatatcaatggcgaaaatatggtcaaaaagtcacaagagataacccctgtcccagagcatacttcaagtgctcttttgccccaagttgtccggtcaagaaaaaggtgcaaagaagtgctgaagacccatctatcttggtggcaacatatgaaggagagcacaccaccatgagcaccccattctccacccgctgaaatatctttaagctccaacaacacacccctagtt

SEQ ID NO: 5291 - DNA, 386 bp, Gossypium hirsutum
  Clone ID: GOSHI-09MAY01-C65231_1
gaaacaaggcacggtgtatatcatatatgatatgagattttccccactcgccttcatcaggtcaatctccaattatatctctaaaccccacatgtcttttccttctacgcatccctaagccaaaaccccgccttcaactcctctcacccaccaaaatcccatgtcacctcctccggcactgcagctcgctctggtggctctactacacctaactctaactaacgccgccacctccttccccgactttcaactcttgaacgtggaacaagctctcgttggggtgttagcacagcctagtcctctccaaacatctgaatataatcatcacgaacttctcaacgttactgaaagtgaagatcaatggaaatggaagctgaaactcatcc

SEQ ID NO: 5292 - DNA, 400 bp, Gossypium hirsutum
  Clone ID: LIB3272-043-P1-K1-E2
attaactctatatccatggctataatttccaccactgcaaaatttatgtcaacaggcttgtttattattcttcttctcttgcagttctccataacgaaaggtcatggtggagacgatcacgacgagaacaacggtggagtctccccttatttctttcgatgggacgaaagttttctcctcttaggcacacagtttgccggtggggtttttctggccacctctttgatccatttcttgagcgattctaatgaaactttcggtgatctcacaaccaaaacctaccctttcgccttcatgttggcatcggtggggtatcttctgaccatgcttggtgattgcataatcgttagtgttacatcgagtagtaaaagagaagttagagtgcaagtgcaagtggaag

SEQ ID NO: 5293 - DNA, 272 bp, Gossypium hirsutum
  Clone ID: LIB3272-034-P1-K1-A1
taactctatatccatggctataatttccaccaccgcaaaatttaagtcaacatccttgtttattattcttcttctcttgcagttctccataacgaaaggtcatggtggagacgatcacgacgagaacaacggcgaccatacaaacttgcatgacaaaggcttaatcttggtgaaaacatggtgtttgatcattcttttagtaaccacttttgcaggtggagtctccccttatttctttcgatgggacgaaagtttcctcctcttaggcacac

SEQ ID NO: 5294 - DNA, 607 bp, Gossypium hirsutum
  unsure (1)..(607): unsure at all n locations
  Clone ID: LIB3825-009-Q1-K6-D3
cacagtttcaagcccaacagnattgaccgacatcaacaagtcaactattttaccaacttgtccttgccgtcgagctgccactctcctagaaaggtacaaaccctcgccatctcctcctacatctgttgtcataagctagtcaatgtctatctacttgtagaggagaggccgcttgatgaatgcgtgctttgaatttgatacttanaatttattcccattatgaacataaattctgccttacaattttaaagcatatgattgatatttgaacataatccttatagttgaaggagctatagttactgtcagaatcttcttttaggcacgtctgaatttactattttatctgggttccatgatctattaagcatttcgagaatcaagcctttttgaatatatgtccatcctagatactttaacccaaaaaatgaactaaagaaatataggggaagtcatgaaaaactgagcataccaatgttagaaacgtattcatgtcgaacacttggaccttagtccgagaaacatagatcatgatcatatgtgctatgctttttttcctcttcagtcacattcttttataggagatattttccccttttacctaaca

SEQ ID NO: 5295 - DNA, 430 bp, Gossypium hirsutum
  Clone ID: LIB3272-035-P1-K1-E10
caacaagtcaactattttaccaacttgtccttgccgtcgagctgccactctcctagaaatggacagtaaaaatggcaatgaatgtccgaaaaacattactgaagcttcacaaattagacatgggttgactttattggatgctgatttctttaacgatataaaggttcttgagattgcaaagggtgcaaaagagttcaatattcctataataagaaccaacaggaagttagttgcttctattaatggagggctgcataacccttctcctctggtttttaaccccgagtggagcagggagcaatcacagggcagggccagcaggttaaatcatccttaagcttccggcattcaaaggccaattaatgaagaagatatagcctttatgagtgttctcgaactaggagaactcataaagaaaaaacagattact

SEQ ID NO: 5296 - DNA, 767 bp, Gossypium hirsutum
  Clone ID: GOSHI-09MAY01-C66311_1
aaagaaaacctcaaaaatccattgcctttcattacatttctaattcactctactgcttatatttctttcctttgagattaaacttctgttcttccaatttgatactctgttcttcccagttttttttcttctttttctgtgctctggttattttcccgggaaagttgaaaattttctttccatttcagttagaaaattgatctcgttgaaaagacctaaacgtttgaaatcatgggtttttgttgaaaccaagaaatcttttaaatttccctgccttcgatcataaaaagtcagaaaaaagaaaaatttccctcattttctctcgttttctcgggctttcttttgttctcgtttcttaacttgggcttgaaattactgtgttttgaaaggtaaagatccactatttgtttcttcatcgtcgatcaaaacagagcaagacttgaagttttctttctaaaaaaacgtgtgtaattgaatccccttttagttttcgtttctcggttttccttaaaattttcccgagaaaagtgcaatcttcaaaatccagcagggaccgaaaaaataggttgaattaaaaaaaggttgtcaacttacaaacaagattcttcattttctctcttcagtttttcccctttttccccttaaattttgttgtccaaacgtcaaaaattaggaattttctcgtcaaaattcacattacctaaaatcacgtcaatctcgctctgctctttttctccctttgatttcttctactggtcatcaacacc

SEQ ID NO: 5297 - DNA, 532 bp, Gossypium hirsutum
  Clone ID: uC-gsflnu33B055d01b1
atttattttagttctactgagacattgaacgctgaggacaaatttttctgtgacaagtgctgcagtttgcaagaagcccagaagagaatgaagataaagaagcctcctcacatcctggtcatccatttaaaacgattcaagtacattgagcagcttggccggtacaagaagctctcataccgtgttgtgtttccacttgagctgaagctgagcaatactgtggaagatgcagattcggagtattctctgtttgctgtagtcgttcatgtgggaagcgggcctaaccatgggcactatgttagcctggtgaaaagccataaccactggttattttttgacgatgaaaacgtggagatgatcgacgagtccgcagttcagacattttttgggtcagcccaggagtattcaagttatacagatcatgggtatatcttattttatgaaagacttggtgcaaacaagaatagcttgagaagagggtttggcttttaccatgagttgctgttctagaatcaggaaaaaacgggaaaaa

SEQ ID NO: 5298 - DNA, 409 bp, Gossypium hirsutum
  Clone ID: LIB3272-030-P1-K1-A10
agtacattgagcagcttggccggtataagaagctctcctaccgtgttgtgttcccactcgagctgaaactgagcaatactgtggaagatgcagattctgagtattctctatttgctgtagttgttcacgttggaagtggacctaaccatgggcactatgttagcctggtgaaaagccataaccactggttattttttgatgacgaaaatgtggagatgattgatgagtctgcagttcagacatttttcgggtctgcccaggagtactcaagtaatacagatcatgggtatatcttattttatgaaagcctttgtgcaaacaagagctgagaaaagagggcttcgattttaccatgagtacaggtatccatttccccaaatctcaattttcttgaaccacctatgctttt

SEQ ID NO: 5299 - DNA, 623 bp, Gossypium hirsutum
  Clone ID: GOSHI-09MAY01-C67491_1
aattccggggcgcggacgcgtccgggtaccggaaaatttgtttggcaaggtttgcatcatcatagacaagattgaaaagatcccaatagatgagattaagagagagttgaacgctactgggttatcagaagaggctattgaggaactattacaagtgctttccataaagtcattgactaagttggaagagatacttggaggtgctggggaagctgttgctgacttgaaagaactgttctcactttctgagaagtttggttactctgagtggattcagtttgatgcatctgttgttcgcggtcttgcctactatacgggtatcgtttttgagggttttgatagacaaggaaagctaagagctatttgtggcggtgggcgatatgatagactactttctacttttggtggggatgatggtccagcttgtggctttgggttcggtgatgccgtcattgtggaattgctgaaggaaaagggacttctaccagaacttaacctcggagtagataacattgtttgtgcactggattatgatcttcaaggagtagctgctgaagttgctactaaactcagggagaaaggccaaaagtgtgacttagtcttggagagcaaacctcttaaat

SEQ ID NO: 5300 - DNA, 652 bp, Gossypium hirsutum
  Clone ID: GOSHI-09MAY01-C67631_1
gcgttcgcttttgtttctcacagtcacagctttacccatttcagcttccaattaactatttcgcttcgtttgctttagcatcagtaagacgctgcaatcaatcaaaggtgatataacctttagttggaaataacgtaactggtacgttgaaagattttaatggcaggcaatggcctgccatctctgggtcgtgtaaagcttactgacctcgtaccttctgaaggcattccttcagattcttacaagctatcagtctctactctatcacaatcatttgctcaatattcagctgccatcattcagtttccagctagtgatggagctctactgagatccggtttagattctgctcgcctttacttccaacaaaaggctgcatacccgccggaggagctgattcacacaaatgattcttgtgagtggtgcaaaacgtcaggttactatgccggcccccaactatggcaggaaatgtatgattaccggcctggtctaactcctacagaccctatcaatggaatggagtttcccccgggtggtttgcctgatatatttggcttgctcggtaaggcagctcgagatgtactggatgcgattagctattacttgaacttgcgtagctctccctttactgaaatactcgataatgtaccct

SEQ ID NO: 5301 - DNA, 736 bp, Gossypium hirsutum
  Clone ID: GOSHI-09MAY01-C67071_1
ttcactcgtccggcgagttggctgaaccaaaactcctaacagcaaacaatccgactttggaagaagatgttgaagtttctatccaaagtgaagatcgagttcaatgcattggacccacgcatagcttcatgcatggaattcttagcccagtgcaacgcccgcaaagctaaagagtccaaccccgcctgccaacttcaggtcaagcgccgaaccgacgatcacccgccccaaatcaccgttactttcgtcaacggagtggaagaagcttttgatgccacttccactcctgctcaaaccattaggaccatgatcctcgagaaaggtcagatgcttgagactgagcaaatgttccgtgaagcaggcgagaagtggcccgttattatacccgaggaggaacttcaccaatcctttcctggaaccaagccaaggaaagcagaagagaagaagcagtaacgccaatctgtctgaccattttactggatctcactttggaagatcatagatattccattgtatgatgaagcctgagaaagtaccctatatgaacattttgaaatctgatttgtggtgctagaatgtgttttcttaaaattttctttatcaacttcaattgaactattactgtttgagctaatctttagaatcccgtttggggatttgatttcaactattcaaagtcataagaaaactttgtttgctgcataaaaaaaaaaagacttcttataaagaatatatt

SEQ ID NO: 5302 - DNA, 491 bp, Gossypium hirsutum
  Clone ID: GOSHI-09MAY01-C60431_1
atgctatgtgtaaggaaaaactggaaaaggaagcagctgaaaaaaaaaagaaagaggatgaaaacaggagcaatacgggagaaaggagcaatgacaaagaggatctgtgtcgtgaatttcgaagcatgcggataaatgggaagcttatctgcaccagagaaaataaccctgttcgaggcccatatggcaagatgcacatcaataaatgtgctatgtgtcagagcatcttcgatcgagaagctaatgaaagaaaaaagaaagatgaagagaaatcaagtagcaagccctcaaataatgcaaaggatgagtgcagtgaatttcgaaactatataaggaacaatgagctcatctgccctagagagaatgacccagtgcgcggtgctgatggaaagttctatacaaacaagtgctacatgtgcagagctgtctttctaacagaagctttggaaagggcaaaacttcaagaaaagccatcccatgttagagcttct

SEQ ID NO: 5303 - DNA, 738 bp, Gossypium hirsutum
  Clone ID: GOSHI-09MAY01-C60771_1
cgatggtctccgaggctccccacaaccaagggcctagtttgccggtggtgtccgatgctcccgcacatccatgcaccaaggtgcagatggtgctcgaggctcccgcacatccaagcatcaaggttaccgatggtggctgaggctcccacacatccgagccaccaaggtgatggaggctcttgttgcaaaagcggagggaccgggaggattcatccattgttggctatccgaattctacccttggattggggagggaccgggacaactcattcattgttgagtaccgaacatataatgatattcgaattctacctttggtattggggagggactcgattcatcgttttcgtatattctgggatacctcaccgggatggattgtcggagcaccgccgggaacctaaccggtggtggggggcactgacgcccgggcatgcgatgggcgtgggcattgccctggataacccctgctcgctcaatgtctcctcccccctaaagagctaaaaaaacttggtccatgcgctaccaggagacgtacatgtgtctgaaatagggacacttttttttttagtttccatatgtccgaaacagggacactttttttagcccaatgcttccgcaccaacaggggccgaagttgtcgatggtgctcgtggctcccgtacatccgaggcaccaaggtgccgacagtggggagctcccccacatgtctgaaacggtgacaattttttttgtgcc

SEQ ID NO: 5304 - DNA, 696 bp, Gossypium hirsutum
  Clone ID: GOSHI-09MAY01-C60171_1
caaggaactgatgttcctgagtaccagaaacttacaagccaggttcatgaaatcgttggacgtattaatggccgatttggaacattgactgctgttccaatacatcacctggactgttcgcttgactttcatgcactatgtgcattatatgctgttacagatgtagcacttgtgacatctttacgggacggcatgaacctcgtcagttacgagtttgttgcttgccaagaggcgaaaaaggggtcctcgttctcagtgaatttgctggtgctgcacaatctctgggtgctggtgcggtcttagtgaatccttggaacatcactgaagtggctgcttcgatcggccaagctttgaacatgccggccgaagaaagggaaaaacgacactgccataactttcatcatgtgacagagcatacagctcaagaatgggctgaaacatttgtaagtgaactgaacgatacggttgtcgaagcacaactaaggtcaagcaaagtgcctccagagcttccacaaaacgatgcaatggaatgttacttgttgtctagcaatcgactggtaatactgggttttaacacaacattaaccgaaccagtggatactccggggagtagaggtgatcaaataaaagaaatggaacttaaattgcatccggcgttgagagaacccttaacagccctctgtaatgatccgaaga

SEQ ID NO: 5305 - DNA, 381 bp, Gossypium hirsutum
  Clone ID: GOSHI-09MAY01-C60021_1
cggacgcgtgggcggtttctcgtttccgacgcaaagtcgagttccaatgattttttatagcgttatcagtacgtccaggcaacaacctagcaattgtagcccatttattcccatgaaccgcatgcgcttgtatagtagcagcatcctccgcagccgtgaaaggacggtgttgcacggcgggactgagttgattgcaccaccgcagcctgcaagacttgccggatcttccagggattgaggagcttatcatggaccagttcctgggaccatgctgttccactagcttgatcaggttagcgtcctcttgtgggctccatgaacctttcacacgatcaccaccattgatcatcttcaacgataaaaagaaaaaagaaaacccca

SEQ ID NO: 5306 - DNA, 366 bp, Gossypium hirsutum
  Clone ID: LIB3196-013-P1-M1-A3
tattgctcctctcccccaaacgctcttttctctttaaaaacataaaccatcaacccctggcggtctggtcctgcccctcggccgccgtctcctgctccatgcaacattttcatgaggtggagcttaaagccgaatcatgctcttggccgtgttcgctgtgcttcttttggtgctgcctctggtgttgccgccattgccgcctccgcccttcgtccttctcttaatcccagttgtgatgatgctggctctccttttcctcgcattttcaccgtctaagatgccagacttggatatctcctcctctgtgtgatctaaaacgcatgtaatgcatgtatattccgaggagaatctagattcgacatatat

SEQ ID NO: 5307 - DNA, 325 bp, Gossypium hirsutum
  Clone ID: LIB3196-013-P1-M1-A8
tattgctcctctccgggcaaacgctctttttctttaaaacataaaccctcaccccccgggggtatgggcctgccccttcccccttctttactagtgcatgaggacatcttcatggggtgggcttaaaacccaaaaaatgctcttggccgggttcgctgggcttcttttggggcggcccttgaggtggggccattggcaatcccccctttcgccttctcttaatcccagttgtgatgatgctggctctccttttcctcgcattttcaccgtctaagatgccagacttggatatctcctcctctgtgtgatctaaaacgcatgtaat

SEQ ID NO: 5308 - DNA, 577 bp, Gossypium hirsutum
  Clone ID: GOSHI-09MAY01-C61891_1
aaacaaagaaaagggtttaattttctgggtttttcttctgtttgggttcctggaaaagtgttagtgagagatagagagacaaggtgaggatgttgttttgccggggattttctaggattcgtacaactcccggaaagagcttgtttggtttcgttctctctcgtcgagctgacccttctctattccttctctctaatcaatatgtttactctactataaaggttcgtagtggcagagaaactctttcttggagttttccttcattgcttggtcttggacggcaaattcatcagagtagctctctaatagaggaacaacttgacccattttcacttgtttctgatgaactgtcacttgtcgctaacaggttgcgggctatggttattgctgaggttcctaagcttgcttcagctgctgagtacttcttcaaattgggggtggaaggaaagagatttcgtcccacggttttgcttttgatggctacagctttgaatgttcatatacctgaaccagttggtggtggtgtaggagatactgtggcaactgaattacgtacaagacagccgtctatagctga

SEQ ID NO: 5309 - DNA, 510 bp, Gossypium hirsutum
  Clone ID: uC-gsflmaxxa097f10b1
cccacgcgtccgcccacgcgtccgagagagacggggtgaggatgttgttttgccggggattttctaggatttgtacaactcccagaaagagcttgtttggtttcgttctctctcgtcgagctgacccttctctattccttctttctaatcaatatgtttactctactataaaggttcgtagtggcagagaaactctttcttggagttttccttcattgcttggtcttggacggcaaattcatcagagtagctctctaatagaggttatcctttaattgctcatccttctacaatttgcgaggttttttttgttcatttaccgaatttctttcatatagttttaggacaggagacatggttatccagggataggatgttttctagtgtgttaaattttctaatgttcaaatatgaaacaaatgctactattttggccttaagttgattacttccctttctgttgtgtttgctattgttaattgctggctactagtttgtttatctcctctc

SEQ ID NO: 5310 - DNA, 400 bp, Gossypium hirsutum
  Clone ID: GOSHI-09MAY01-C61781_1
atgtggtggggtcgccctgaatgctgtggacgacctaagtcccgactgcttgggccatgcaggacttgtgtatgagtatacattgggagaagagaagttcacctttattgagaaatgtaacaacctctcgttctgtcacattattgatcaaaggaccaaacaggcacacactcactcagatcaaagatgcagtgagggatggcttgagggctggcaaaaatgctattgatgatggctgtgtggttccaggtgctggtgctgtgggaggcggcaatggcagaagccctgattaaatataagcccagtgtaaagggcagggcacagcttggagtccaagcatttgctgatgcgttgctcattattgccaaagatcttgctcagaactctggttttgaccttc

SEQ ID NO: 5311 - DNA, 483 bp, Gossypium hirsutum
  Clone ID: uC-gsronu33B017f11b1
aaattttattgtacttggtttttcttttttacttctattattattttgctgctgagttttgttttttatgaaggagaaacagttatgtttatgggttgaaagaagaagtagatgaacatgcttttttctctgaaccttccggtacaatgaggagtttctcaggttcatctgtggatgattcatggcaacttgcaccactaacaatgagctcctcttcctcaaagcagaggaactgttctggattacagagtgaatactcttacttgcagcttcaaagcctcactgatcacaacccgaaacaaaacaaacaggatgctgatgaacattcctatatcaaatatgaaatgactgatgaattggagaaaggcgaaccccaaaagacagtccatcgtttctttgatgaatggccaccaaaacatagagattcatggcttggattggatgataaatcatcaaacaagttatcagtttcaacaaccagac

SEQ ID NO: 5312 - DNA, 362 bp, Gossypium hirsutum
  Clone ID: LIB3196-030-P1-M1-E3
agacacaccacccttcttctttttcttctctttcttccatgtccttgtcttctgaatcccaacagcagcaccaacttcgctaccatggttatcattcccaggcgaatcacccctttatgtatccccatgcatcgagacctccaggggttggactgtcacctcaagaaaacaccacacattctctcctcggctctggctcttactcccagactaacatggattacaggagaaacagttatgtttatgggttgaaagaagaagtagatgaacatgcttttttctctgaaccttccggtacaatgaggagtttctcaggttcatctgtggatgattcatggcaacttgcaccactaacaatgagc

SEQ ID NO: 5313 - DNA, 579 bp, Gossypium hirsutum
  Clone ID: GOSHI-09MAY01-C61211_1
gaattcccttcttaagttagccatggataacgcagctactgcattcttcacctcttccttgagtcctttcaccgctgtgtcctcaatttctgtcgccactttcctgagcatctgctccacctttgctgtcatggcattcgctttctatttcctcttcaagttcctgtctggaggtaacgggaaagcaaagcaagcccctctcccacccctcctcctgaaaccttggcctattgtgggaaatctccctgagatgcttataaacaagcccacatttaggtggatacatgaactgatgaagggtattactacgggcattgcatgcatccgctttggaaatgtgcatgtaattgtcatcacttgtcctgaaataagttgtcaattcctgaaaaaccaggacgctgtttttgcgtcgcggccagttagcatgtccactgatgtcaccactaaaggttacttaacaacagctctggtgccctttggagaccaatggaaaaagatgaagaaagtgctgatgggcgaattgctttccacaacccgccaccggtggctgcatgataaaagggttgaagaagctgataa

SEQ ID NO: 5314 - DNA, 607 bp, Gossypium hirsutum
  Clone ID: GOSHI-09MAY01-C62901_1
gttttacatctcaaaaaagagacttgtttgttgctgaaaagtccctttacggtttgaaacagtcaccaagacagtggtataaaatgtttgattcctttatgacttctcatgattttaaaagaagtagttttgacagttgcgtttactttaagaaaaacagtgatggttcttttgtgtatctactcctttatgttgatgacatgttgatagcagcgaaagataaatgagagataataaaggtcaaagcccaactaaatggaggatttgagatgaaagacttgggaccagcaaagaagatacttggtatggagattcccagagatagaaaagcaagtaaattgtacctaagtcagaaggggtacattgagaaagttctttgcaggttcaatatgcagagtgctaagcctgttagtactccttttgcagcctatttcagactttcattggctttgtctccacaatcagatgatgagattgagtacatgtcacatgttccatactctagtgcagtgggatctctcatgtatgccatggtttgctcacgtccagatttatcatatggcagtcagtacaattagcaaatacatggcaaatcccggaaaagaac

SEQ ID NO: 5315 - DNA, 577 bp, Gossypium hirsutum
  unsure (1)..(577): unsure at all n locations
  Clone ID: LIB3543-034-Q1-K1-B9
naaaattattatataaattgtaaatgatattcaaaatttcttacaataatgttaaaagttaccaagaaaacaaatgtctaatgtgacagcccaaaattgaccctagtcgggaagtggtttcgggaccgctaaaccgagtcaccgaaggtttgaatgtgatgtttattatctagaatatgtaataatgaatgtgtgaaaatttcaagcttcgatttagtcgattgcatgcgaatttagtcaataggacttatatgagaaaattttaaaatgtgataggtcaatgcatgaggacctattagtgcatgtggaagaaaaagggacttgcatgtcaaattccccctccctaatatgtagtggccggccatgctatgggtggaaacatgtcaccaacatgttgtgttagtgatgtatggtaaggaaaataaaatattaagcatgataattaaaataaattaaagaaaggaattaaacaatgaaaaggaagggtgatgaaaaaaaaatggtctcatccatacccccccttgttgccgtgagttgagggaagaaaacaaaaaaaaaatgtgtgttcattcttgaa

SEQ ID NO: 5316 - DNA, 256 bp, Gossypium hirsutum
  unsure (1)..(256): unsure at all n locations
  Clone ID: LIB3196-047-P1-M1-A5
cccacgcgtncggtgaaaatttcaagcttcgatttagtcgattgcatgtgaatttagtcaataggacttatatgagaaaattttaaaatgtgataggcaaatgtccaagtgattaaaatgttaaactattaaagttgtgggtttgcatgtcaaagtacacaaaatttgattagtggccaaccatgctatgggttaaatgtttaataacatttatgtagtgtttatgtagaattataaataagacatggtaagaata

SEQ ID NO: 5317 - DNA, 416 bp, Gossypium hirsutum
  Clone ID: GOSHI-09MAY01-C62141_1
ctaatttcaaaaatcttcaatgtttttcccttcttctatttcaaatctaaattttcgattcttcttgattcatcttttgttttaatttttcttctttaaatacttttctaagcagtttaacagtatagcacgactgttaattgtttaatctcttgctattttgagaattttattgtgaattttttcctttggattgctcttgaagttttctgttttttccgagatttctcgtttaaactggggaagttgcaggagtatttctaggttctgcaagatttgaagcaaaattcgtttctaacgatggctacggaggaccaaattgaaagtacagcatcacctactgctctcaaatccggtgtgtgctgttccataggcagtggacaatctgagacattgactcaattgcaggagttata

SEQ ID NO: 5318 - DNA, 504 bp, Gossypium hirsutum
  Clone ID: GOSHI-09MAY01-C62061_1
atgcaaggtttttggagcagttaaaaaagtttttcagctagcccttttatgcacgaaaagacaaccgtttgatcgaccacccatgcatgaagtgacccgggttttaggaagcctaatgccattagacccccccccaacaaaacagctggcatcgatccaactgtccaaagttacttgctccaaagatgagtatgtaaatttcaagactccccccttagtcaattgcccctcaatgagtccctcccaaggatcatggagaggtcatatttttttaagcccatcaatgtaagcatcaaaatattccaggagtgaccagccttagatgatttgagtgaaaagtgatcgtggggaaatgtgtataaagactatggtttcaattattgtagcttagagaaagaaaaaaggaaaaggatgggccttggaaagtttatagtcctggtcccccaaattaatgcttgtatattgtcccatatgaaattatggtggtaactttgttattgtctc

SEQ ID NO: 5319 - DNA, 744 bp, Gossypium hirsutum
  Clone ID: GOSHI-09MAY01-C63741_1
gtaggaacagtaaagaactagtggagattgttaaagaagttgatgaatatttccttaaagctgctgatgccggtagccatctttcattactgttagaagcttcaaatcccaatctttcaggcaaagggtataataactatgcctgtaacttaaccccaacaacatggacatggaattggagccccaaaatagtggaaaacaccattgttggacatacaggaaatactagcgcattgttccaccatagagaggttatatgcttgggagaagaaactataccaggaagtcaagaatgctgaggctataaagatagaacatgagaagaaggtggcacatatgaggaaacttgaagtgaagagagctgagtatatgaaaactgagaaaacaaagaaagaagttgaaaaattagaatcccaaatgatggttgcttcacaagctattgaaactacatcagctgaaatcattaaactcagagaatctgagctttaccctcaattacttgagcttgtaaaaggattgatgtgcatgtggagaagcatgtatgagatccaccaagttcacacacacatagttcaacaactcaagtaccttaatttcatcccttctaacgagccgacatccgagattcaccggcaatcaactctcctgctcgagcttgaagtccagcaatggcatttgtctttctgcaacttagtcaaagctcaacgagactacattcagtcccttgctggttggcttcggctt

SEQ ID NO: 5320 - DNA, 860 bp, Gossypium hirsutum
  Clone ID: GOSHI-09MAY01-C63601_1
agaaaatgaaaaaataggcggaaaatggtgagcgaccaattcaaagcgaggttctcgcgaagcagagccgaatctgaaatcgtagtgtgagaggagagagacgagaggacgctgaacgactatggcgatgctagaaagcattgtcgttttcactctccttctccttatgttgatccttatcattatcctcattctcttcgccttcaaaccatggcgtttcttctcttctcccttttatctttcccttctcgttctcgctccatcaaggttgaagacgtcgagaggcctctagtatcagatgatgtcaatcacagtcaagatcaaagcaatgatttgacaagaaattatgacgtagagggtgcatgttaccaaagtgaagctcttttgcgctcacctcgcaataagggacttgttcacacacagcggctcccccctgcgtctcaccatttggctcagggtgatagctcggttctaggaatatctgatccttcagaggatcttttggttggtcagacgctaaagcgcccattggcgacagagcacctaattgaagcgctaaaacttggtaggcctgaaaatcaaaatgaaaacagtatacaagagtttgtgcccaaagttatcagtgatcagcgaagttgcctctctcttgaggttgtctctggtccttctcgtggaattcgctgttctgtacagtcaacaaacccttcaaggttgccgttgaccctagggagagtttctccgagtgatttattattgaaggatgcagaggtttccggaaagcatgcaatgataacttggaattcaaataaactgaaatgggagctggtagatatgggtagtctcaatggaacgctactgaa

SEQ ID NO: 5321 - DNA, 518 bp, Gossypium hirsutum
  Clone ID: GOSHI-09MAY01-C63291_1
atttcattcattttcccaccgccctaccaatcccaagagaaaaaaaggaaccacccatagccagaaaccaagccaaaaaaaatgtcagacgatgtttcagtggaagagtgcttattcaaaatagtgataataggacattcaggccgtcggtaaatccaacctcctttctcgattcgcacgaaacgagttcaacgctcactcaaaagcacccattggagttgagtttcaaacccagagcgttgaaatcgacggaaaagaagttaaagctcagatttggcactctgcgggccaagaccgtttccggcctgtaactccggcttattacacgggtgctttcggatgctcttgttggtttatgatattacccgaagagctccgttccataacgttgctcggtggcttgatgagcttagctgtgagtgctcattcttttttcctgcctgctcttgtgttggtttttgggcacttgagtaagtctatttttctcttgatgatattaagctcgtaacagcatggtt

SEQ ID NO: 5322 - DNA, 866 bp, Gossypium hirsutum
  Clone ID: GOSHI-09MAY01-C18551_1
agccgatttccatggcgggccccaccgcagccgacatacaaagaagtcgtgatttggaaaagtttttggtgcaagctgggctatatgagagtaaagaggaagcatcaaagagagaagaagttcttggtcaaattcaagagattgtgacaaattgggttaagcaacttactcgtttgaggggttatactgatcagatggttgaggatgcaaaggcactcatttttacttttggttcttatcgacttggggttcatggacctggatctgacatagacaccctatgtgtgggaccatcttatgtgagccgagaggaagatttcttctttgtactgcacaacatcctggcagaaagggaagaagttacagagttacaaccagttccggatgctcatgtccctgtaatgagattcaagtttaatggaataccaattgatcttctttatgcaagcatctctcatttggttgtccctcatgatctgggcatctcagacatttcagtactgtacagtgtagatgagcctactgttcgaagtcttaatggctgcagggttgcagatcaaattctgaaactggtgccaaatgttgagcattttcgcacaacactccgatgtctgaagttttgggctaaaaggcgtggtgtttattccaatgtgactggatttctcgggagtgttaattgggcacttcttgtagctcgaatttgccaactttatcctaatgcagctccaagtatgcttgtttcacgattttttagggtctttacccagtggcgttggccaaacccagttatgctttgtgcaattgatgaagatagactcggattttctgtttgggatcctcgtaaaaaccctcgtgataggactcat

SEQ ID NO: 5323 - DNA, 396 bp, Gossypium hirsutum
  Clone ID: GOSHI-09MAY01-C18541_1
ctcactcgtccgttttattgtcctaaaaccatttcaaatccttctttttttttttttagaatttcccaacgatggcttcgacgattccaacgagccgatcctcctctgatgacattaccgacacgacgccctttctgtcaccaacaagcaacgcttcaaacgacgactcctccacgcgtcggaccgttcgtcgccagagtctccgcgatgcggctaggttcttgcgccgagccagcagccgaaggatgatgcgtgagccgtccatgctggttcgagaaaccgccgccgagcagctcgaggagcgtcagagcgattgggcgtattctaagcccgtagttgttctcgatattatctggaaattagccgtcgtggtggtggcaagtggtattttgattt

SEQ ID NO: 5324 - DNA, 1156 bp, Gossypium hirsutum
  Clone ID: GOSHI-09MAY01-C18571_1
gcgcggacgcgtgggctgttcattacattgcagaataacagaaaaaggaaacaacactctgcttctggagcagctagcagtactggcacaggaaacacattggcccttcaccaagttcaccaccgtcaactcacacacctggtgatgcaataacttctgcaaccagtttgcagcatgttaatagtgtttctaaaagcatgatgtatggtgcagatgcaactgcgggtcttacatcatcttccaatctgttggaagacatggataggtttgatcctctggatgaaaatatggagtcactactttcacatgaaagtgactcaagggacatttatggtaccattaaacagtgtcctcctgagcacccaaaggcgtctgctaaaggcttcacttttgctgaggttggttgtatacagacaagaaatagcgaagttacttgctgtcatttttcttctgatgggaaggtgctggctagtgctgggcatgacaagaaggtggttctttggaatatggataacctgaaaacagagagtactccagaagaacacaaattggttattacagacgttcgttttagaccaaattcatctcagttggcaacagcttcttttgataaatctgtgcggttatgggatgcagccaatccaggctattgcgtgaaagcatacaatagccatccttcacctgtgatgtcccttgatttccaccccaaaaagacggacttgttctgcttttgtgataatgacaatgaaattcgctattttaatcttaatacattctcatgcacccggatatccaagggaggtatggcccaagtaaggttccaaccaagaattggacattttctggcagcagcatcagataaagtagtgtccatctttgatgtagaaactgatagacaaacattaacatttcaggggcattcagaaattgtgaactatatatgctgggatgcaaacggagagtatttggcatctgtcagtcacaacttggtaaaaatatggtcattggtgacaggggagtgcattcaagaactcggttctggtgggaaccagttccactcgtgtgtctttcatccaaattattccactcttttggtgatcggaggaatttcatcattggagctgtggaacatggcttagaataaaagcatgacaat

SEQ ID NO: 5325 - DNA, 438 bp, Gossypium hirsutum
  Clone ID: LIB3197-059-Q1-M1-E1
ggataacctgaaaacagagagtactccagaagaacacaaattggttattacagacgttcgttttagaccaaattcatctcagttggcaacagcttcttttgataaatctgtgcggttatgggatgcagccaatgtaatcatcttcttcttcttacaacttggatctttgtaaaagttttgcggatatctctggttatgactttagctattctatactctctttgctgacagttttctggtattgtagacatttaggaagcatgcatgataaatatttctatgctactgtggttaacaagctaagttcattgttacagccaggctattgcgtgaaagcatacaatagccatccttcacctgtgatgtcccctgatttccaccccaaaaagacggacttgttctgcttttgtgataatgacaatgaaattcgctatttta

SEQ ID NO: 5326 - DNA, 879 bp, Gossypium hirsutum
  Clone ID: GOSHI-09MAY01-C18511_1
aagatttgtattgaagtcttggagctatgtgtcaaatgcaatactcacctttcagaaggccagtttttcttggcattgaaaactgtagatttgattgacacaaactacttgcagaatatccctgtaaatacaatcaaaataatgatagggaagaatattcctataataaaagctcatatcgaaaagaaagtgactgcagactttaacgagtggcttcttcacattaggagttctgccaaggatattgggcagactgcaataggtcatgctgcatcggtacgccagagagatgaagagatgcttgaacggcagagaaaagccgaggagctgaacgtttctggcttaaggagatgtggtatattcattagatgttgaagaagttgatgaagattctgttttgaagtttgatcttacacctctttatcgagcatctcacatccattcctttcttggaatccaagagcaatttcgtcgatattactacaagaatggtctattacaactcaattcagacttgcaaatctcttcctcacaaccatttgttgaatcatatcaagcctacctagctcaaattgcaggctattttattgtggaagacagggtcttgaggacttctgggggcttgttgtctgccgatcaagttgagacgatgtgggagacaaccgttgcaaaagtggtgtcagtcttggaagaacaattttctcatatggattctgcaacgcatcttctcttggtgaaggattatatcgctcttcttggggttacacttaggcagtatgggtatgaattgagttcaattcttgaggtcttggacaataccgaaaacaataccatgagcttctttttgaagagtgcggtcgcaattagcaatgttctatt

SEQ ID NO: 5327 - DNA, 628 bp, Gossypium hirsutum
  Clone ID: GOSHI-09MAY01-C18451_1
gtttcaactttcaatttttttaaagaaaaataaagaaagaaagaaagaaaaaactataattatctttttttaaaaaaataaaaacaatattttaattactattctatttttccttggtttcttctccttcgcttcttctgcggaattctctctcatatggcttcttcagtaatctaaatctcgctctctttctctctctctgaaattcttctcttttcattgttttaaacaacgtcgtttatgcattgcgatctgtttctttttctttcttagatagtttacgcgttttgcattaggaagttggagttttcgttttacttcctgtttgtttcccgagaaaacggagagaccctggttttgatatatggggcatcagttaatctgagtgtaaagaaaatggatcaacacaggaagtttaagacttgtactggagttctattggaggtcttgtagattcgttgattttagatgataagagctggacgcagcttgtagaagctgcagttgagaatgttgattattttctggctgatattctatcattcttacgatgagaagtctgttcctgtcagtatcatacatttcatgctacagtctagcagtaaaccatatatgcaagctagtggtt

SEQ ID NO: 5328 - DNA, 1821 bp, Gossypium hirsutum
  Clone ID: GOSHI-09MAY01-C18471_1
atctcaagtcgccgcgtttgactcggtccatgggtaacgcgctaaaaattaccaccgccatttctgcccttttccttcacatccttaatctttttttttgttcatgttctttgatcattgaccttgttttctctcatgggaactttactttcaagccgtggtttctccttgttccttctttggaccttcactttatacggtctctgtttatccttctctccgatcgacaattacctcatcaacagcggtgcctccctcgattccgtcgtagacaaccgtcgattcatctccgactcgtcgaattcacccgattcccatctctcttctggtcggaccttttcgctctgtgccggaactctccttcctggtctgcctcaaatctaccacaccgctagggtttttaatttgccgtcgaaatacgtcttcaatgtcaaagatccaggtacgcacatggtacgtctccatttccatcgattcaattcatcgagattggatctgggtaactctcgatttcacgttttggttaatgggttagtagctttaaccaattttagcggtggggattttgtaaatcctaaagttatagaatatttgctttacgttaattcagaaaaggttgaaattcgtttcgttccagctaaaaaatcgaattttgctttcgttaatgcaatcgaagtgatatctgcaccaaaagatttggtactagaaactgcacagtatgttaatggtgataaaattgaggaatttcagggtttaaataaacaagcatttgaaactatgtatagggtaactgtcggaggtcctaaagttactccgttcaatgattctttgtggagaacttggatccctgatgatgagtatttgaaatcgagtgagggttccaataaggtgtacttcggtggtcggattaagtaccaagatggtggggcgagtcgtgaggttggtcctgataatgtgtacgattcagctcggttgattcgaagcaagaatgcttccatccctaatgtgaacctcacttgggaatttccagtgagtgaggattataagtatcttgttaggatgcatttttgtgatattgctagtatatcccttggattgttgtatttcaatgtttatgtcaatgaacatttggcatataaagatttggatctctcggttgttacgaattacatgctggcttctccgttttatgctgatttcgtggttgatgctggtcgttccggggtcattaccgtaagcgttggaccttctagcaagagcatggggtatacggttgatgcgattttaaacggagtggagatcatgaagatgaagtaactccgtttattagtcttgacggtaaggtgcctgcggagttgattatgaagtgttggccaagaagaactcttgggattctgcttcctttgattgctctcgcctgtttgctgttgagcttatctgccattgtgcataggaggaagagtaatgctgaattgttcccatggtcgaaactgcctacggatatccatgaaatatctccaaagcaagccaaactacaactatcaaacattgttacataaacattgtaaagatccaaatccactggctttataatatactattacaagtagctagggggggcatactaagaaaaattgaaggtttgcagttccaatctgttaatggtttcttcgtgtttaaattcgaggttttgtccagtaatctgtatgtaaaagctgtattagcagaatataatgttgtattctatacctattctacattgattatgtctgagatggtggattggtgaaaaaaaaaaaaaaaaaaaaataattaataatt

SEQ ID NO: 5329 - DNA, 302 bp, Gossypium hirsutum
  Clone ID: LIB3272-012-P1-K1-G6
gttaaatgctactgaatccttagttgagagcatagccaaattgaaaacagcgtgttgggcatgaaagatatacggtatcatggctatccgacgtctgcgatcgacaattacctcatcaacagcgttgccttcctcgattctggtaaaaacaaccttctattcatcttcgactcgtcgaattcacccgattcccatctcttttctggtctgaccttttcgctctttgccggaactctccttcctggtctgcctcaaatctaccacaccgctagggtttttaattctccgtcgaaatacgtttt

SEQ ID NO: 5330 - DNA, 470 bp, Gossypium hirsutum
  Clone ID: GOSHI-09MAY01-C18421_1
aatgctcaactctactcatcagctgtcacaggagcggttcttgcaggatctacattcatttccattgcggcaggcgatcgattgggtcgaagagttttactgatcagcggcggaatacaaatgattatatgtcaggctatagttgccataatcttgggggtgaaatttggggacaaccaagaactatcaaaagggtactcaatattggctgtgatagtgatatgtctgtttgttttggcatttggatggtcatggggtccattagggtggactggaccaagtgagatattcccactggaaatcagggctgcaggccagagcattacggttgctgtaaatctcctcttcacattcatcattgctcagtgttttctagccatgctttgccatttcaagttcgggatcttcttgttctttgcatcgtggatcacggtaatgaccatcttcgtttactttttcttaccggaaac

SEQ ID NO: 5331 - DNA, 562 bp, Gossypium hirsutum
  Clone ID: GOSHI-09MAY01-C18751_2
cacctacaatatataccacccttacacgtcatggatcccgataactgtgtatatatgtttaagaaatgttacccaatccttccgaagctacagtttaaccctttttgcatggcttggaaagattacactggagacctatatctcgcagattcacatctggctaagatccgggattccagatggtcagcctaagctgctcctttctctgatcccagattacccaatgttgaatttcatgcttacgacttccatatacctggcaatttcttacagactctttgacttgacaaatatactgaaatcagcttttgtacctaccaaagacaacaagcgccttctccacaacttgattactggtgttgtagtctcgagcatattatactctctctctttcgtgttcctaagaatccctcagatgttggtgtgagaactataaatatagagatagtaggaggcagccaccatgaccttgttcatcactgtgttgttggaagtattttccttcacaatggaaacgtaaaattgctgaattcaattggagaatacgttctcttgatcagat

SEQ ID NO: 5332 - DNA, 432 bp, Gossypium hirsutum
  Clone ID: LIB3145-010-Q1-K1-E3
aaaacaaacccctttttccaaacttggtttccgggggtggaagcctcaaccttataacgccctttttttttcgggttccaaagaatccctcaaatgttggtgtgagaactataaatatagagatagtaggaggcagccaccatgaccttgttcatcactgtgtcgttggaagtattttccttcacaatggaaacgtaaaattgcagaattcaataggagaatacgtctcgttgatcagatcatgcggaatctcggaacatggaaggttaaagtcggtataaaacctccaatttgaggttggttatttttgttcactattattgttttctaaacacacgatatagttactacatgattcgttaccatgtctaaaacgtacttatattggtttgcattacatcctccttattaaataaagatttgccttttatt

SEQ ID NO: 5333 - DNA, 481 bp, Gossypium hirsutum
  Clone ID: GOSHI-09MAY01-C18771_1
gcaaagagttagatcgaagattgcaaaatgtttaactttgaagctgaggtatttgcaaaagaaatcatcaaaccatcttcactagaaatccatggcatgaaacctttcaaactcaatatctttgaccaactcaccccaacaacttatgcctcattcatggcattttaccccttgaatgaagccaatttcactaccaccaacatcttgcctcatctaaaggcctcgctttctgaaaccctaaacatcttatatccaatttccggtcggatcaaagataacatattcatcgatcatttccatgaaggtgtgccatttttatcagctcaagctggttgtcgattgtctgagtttcttaagcacccatgaggttaagttattgaacaaattgcttccatgccaacctttctccaaggaattcaacaatgaggctcccctccttgtgtgccaagtcactattttcgcttgtggcgggatagctcta

SEQ ID NO: 5334 - DNA, 451 bp, Gossypium hirsutum
  Clone ID: GOSHI-09MAY01-C118729_1
taattgccattgtttctggagtagggcagagaaaggaagaagaagaagagagatggggcagttgtgcatagagctcaacgtggatatgatgggacttgtgcttgcgctagttatcgccatcgctctcttgctttcctgcgtcaaccaacctccccggccccgccgaccaatggttgttactcatcgtttaggttggtaaacccttcgttttgcgtctttactccccaagttactcgagtaacttaagtctcataaggtcattgaaaattgaatccatgtataaactcctttatttttttgtgaattaagtaattgtataaaaacaaaaacaaacaccatctcctctatccctcatcccttcccttataattctttttctcttttctctcctactatttaaaataaatctggggggggccgttttaggggttccaagttttttctcccgggc

SEQ ID NO: 5335 - DNA, 659 bp, Gossypium hirsutum
  Clone ID: GOSHI-09MAY01-C18731_1
tgacctgatgatgataaagtggcggattccaacgtataagagcaacactagatttaaggaataggtttgaggtccaggtgtctttctttttctttggttacaatttccaacaccgaaccacacgtcaaatatctggactgtcaagtctctcacatagtggcttgagttcaagtcttaataagtgaaagagcaagagaaaaaggaaagtcgagcaaaaaaataataataaaaagagagagtaaaggaacatgggaaaatccacttcctgtttcaaaatcatcacttgcggcggagattttgctgagaacaacgacgttattcatgttcctgagcctgagattaagaaatcaaatgacaaatagggatggagttttagaaagagatctgaacggcatcgggtgcttagcaacactgttatacaggaagctacttctggacttaaggaaagcccggaatctgccggttttaattttcaacagcctgatgcatccattattcctgaagaaacctccaccattgaatacagtgaagagaaacctcaggcgctgacaccaaaggagcacattgaagaagaatctaagtgtgtggcatcaaaaggataccctgaaaaaaaatctcagttgttgattccagagggctcaaaagttcctgaaccccgt

SEQ ID NO: 5336 - DNA, 1246 bp, Gossypium hirsutum
  Clone ID: GOSHI-09MAY01-C18611_1
atctttctgaaaaaatttcccccttttgtttttataaccttcaaattcatatatatttactttttgactgtgttgtgcattcccattgttcttcttcgccctctgcgtccgctcttcagtccagcatttctaaggcgcataaagaaaacccatttttttttggctcttcttttctgttccaaatcccgagatctctgaaacccatttcttcttttcacttgattcatccaattcctcatctgggtatcttcagttttctttttcaaactttatttgattagataaatctggtaaatgatgaataaaatcatgtctgcttattggatcttttctgcaagtgaagcttcctaggaattctctggttttttatttttattttttgggttttctctcctttgttgcatcatcagcaacatttctttatttcatccccaatttttaatgatttaatctccaccaaaacctcacaaatccagctcatttaacaagggatgttctcttagtcttattcatcaaatcacatttcaaaattcccatatttttcttcactgttttccctttttcttttcccctgtttttttttatgggttgcgctagttccaagcagaaacgatgccgccattgccgggctccttattcgcctgttccaagaagctattcgatgcatgttcatcatccggctcagcacacaggcgatagctaccatgtcgtagcgttaacatccacaacattaggcactctcaagctagaagacaaccaccacagcaatggcggcaccatcaacgttgcagcttttgaaaacggctccaaaatcaatggggatttgaaggaagctgaagaagagagcaaagggctgaatatgaaagtgattgaagccaaaatatggtcgaaaatgctcgctgatatgtttccaaaagttgtccccaagacgcctattcggactcctcctggagagcctgaaacaatcaatatatgggaaatgatggcagggcttgaagatattagtccccttcgatctccaggtcatttcaagagtttttcttttgatgttccaaagcctaagtggcttcaaattcaagacactgatgataatgaagctgatttgggggtcacagatttcgaccctgaaatcatttctagctttagggaatcacttaaaaaggataaggttgttctgtattttacaagtttaagaagtgttcgaaagacatactacgattgttgtgatgttagagtgattttgaaa

SEQ ID NO: 5337 - DNA, 380 bp, Gossypium hirsutum
  Clone ID: GOSHI-09MAY01-C18161_1
cttaggtattgcttggtgccaagcaatgctataggttaaccaccctcgatggtgtcttttatgttattacttgtgtatcatagcatacaaccaatcgacatgttgcatcatgaaggcgtcttcgtcgatagtgtggtatgacaaactgattagttttagatggtattaacccaaaagttctttaattaagtctgcttttggatgtaaaggcgaacaacgagcttgcattatttaacatagcatacagccaatttgacatgatgcatcatgaaggcgtcttcatcgacagttatgagacaatgattaattctagatattattaaccaggaagttttaattttaattcactcttgtcttagattggcaaccaatttttttat

SEQ ID NO: 5338 - DNA, 628 bp, Gossypium hirsutum
  Clone ID: GOSHI-09MAY01-C118109_1
cagttatctgaaatgcatcttagtaatggagaagatcaaggagccagtggtacagggcttggagttctaataactcctatgatcaaagttcttgatgaaatgtatagtgcacaagatgacctaatcaaggaaatgcgcagccatgataatgcaaataaggaatggaaagatgaagagcttaagaaattatatgaaacccatgagaggttgctggatcttgtttcactgttttgttatgtgccacgagcaaagtatctccctttggggccaataagtgcaaaactcatcgacatatatcgtacacggcataatattagtgcctcaactgggttgagtgatccagctgttgccactggaatttctgatcttgtttatgaatctaaaccggccaccactgaatctgatacactggatgatgatctagtaaatgcttgggcagtcaaccttggtgatgtccccgctgtgaacagccgcaatcaatttcttgctggggctgggaccgttgcaccggatgttgatgagaacatagtctctaaaccttctgttagttatgacgatatgtgggccaagacacttttggagagtacagaaatggaggaagatgatgttcggtctcagggtcctctcc

SEQ ID NO: 5339 - DNA, 979 bp, Gossypium hirsutum
  Clone ID: GOSHI-09MAY01-C18121_1
ctcgtgccgccacaaaatgttgtccgctggatcttcggttaaggctaggtgatcaacctccactacctcgcccctcccgtccgaaaaaggcctgaatttgtttgaattttctggcgatactatggatgaatctttcttcgatctaatggaattcttgaagaaacctacgataactgaaacattcgtcgacattttgttatgtgcggtgcccatatggttagccgtgatgatcgggctcttcatcggttgggcttggcgtcctaggtggaccagcttggtttttctaggtctccgatctaagttccggttcgtctggactgctcctcctgggttcggagctcgccgactctggctcgcctttactgctctttccgctttctctgtttgccgtacggttttctccaactttattaaagggagagccaggaaatcgactgctgaaacttccaattcggccgttcctttacaatctccgtcgcctactgtgaggatttcgcctgaaggagcggctggtacagttagccccaccactaaagctgaagaaaggcaacaggatattgtcactgagaatgatttggctcacctcttacatttactcgaaggcaaggaaggggagatggaatggcaaaatatgatggaaaggactaccccgaatatgtcataccaagcatggcgtcatgagcctgagaatgcccctgcaatttatcgtagtagaactgtctttgaggatgcaactccagagttggtcagagatttcttctgggatgatgagtttcgaccaaagtgggacactatgctttcatatgttaaagttttggaggagtgccctcgtacagggacaatgattgttcactggataaaaagttcccttttttgcaggacggagtacataatgtcaaaatatgaggtggaagctaccatggtacaaagaggctatctgattgaaactgacagcagatgtgacttatttcagtggtat

SEQ ID NO: 5340 - DNA, 440 bp, Gossypium hirsutum
  Clone ID: LIB3582-051-P1-K1-A8
cccagcgtccgttaaacttccaacgggggcgtgggtattacacaatccgacgtctactggcaggatatctcctaaatgagctattgggacagctagccccaccactaaagctgaagaaaggcaacaggatatacggcactagacaatgatttgactcacctcttacatttactcgaagggggggagggggacatggaatggcaaaatatgataggaaaggactaccccgaatatgtcataccaagcatagcgtcatgagcctgagaatgcccctgcaatttatcgcattaaaactgtctttgaggatgcaactccacagttggacagagatatcttctaggatgatgagtttcgaccaaagtgggacactatgctttcatatgttaaagttttggaggagtgccctcgtacagggacaatgattgttcactggataaaaa

SEQ ID NO: 5341 - DNA, 586 bp, Gossypium hirsutum
  Clone ID: GOSHI-09MAY01-C18241_2
ttcccacgcgtccgaagatgctcagcaaactatgacagccttgaaatctgccaacaaggagctgaaaggaatgatgaagactgtgaagattcaagatatagataatttgcaagatgagatgatggacatgatggatatgagtaatgaaattcaagagaccttaggcagaagctataatgtgcctgatgatattgatgaggatgaactcatgggcgaacttgatgctctggaagcagacatgggaactgaagctgatggtgttccctcttatcttcaacctgataaggaggaaccagatttggatgcagagctcaatttgcctacagctccatcaggaaatgcaacagcagcagctggcagggccaatgcccaggttgaggatgaacttggtttccctgctgttcctcgagcatctgtccgcagttaaaacatttgctaatatatatactgtaagatgaagttggatgaagcacgtcctttgtaaacatattgtgcagaattaactttcaattactagtgcaatttaattgatttttaatttttcgggttgggagctatatattagcataccggttgtcttgaaaaa

SEQ ID NO: 5342 - DNA, 884 bp, Gossypium hirsutum
  Clone ID: GOSHI-09MAY01-C18241_1
aaaagaaaccatccaagccccaacaaacaaaacagctcctcgttatctccaatttcaaaatcaaaatcaaaatcaaaatcaaaatccaaagatctaaatctaaatccgtctcctctcctttctctttctttaaccttacaattaaggaaagaagatgaagagagtcttcggcgttaagaaagacaaggaacccccgccttctatccaagatgctaccgatcggatcagtaaaagaggggatacggttgatgagaagttgaagaagctagatgctgagttgagtaggtataaagagcagataaaaaagacaaggcctggccctgctcaagaggctcttaaatctcgagctatgagggttctcaagcaaaaacgaatgtatgaagggcaacgtgatatgctttataaccagacgttcaacctcgatcaagttgcttttgcttctgagggtcttaaagatgctcagcaaactatgtcagccctgacatctgccaacaaggagctgaaaggaatgatgaacactgtgaacattccggacatacataacttgccagatgagatgatggacatgatggatgtgagtaatgagatccaagagaccttgggcagaagctataatgttcctgatgacattgatgaggatgaactcctgggcgaactttgatgctccggaagcagacatggggacctgaagctcgatggcgtcccctcgtatcctcaacctgataaggaggaaccggatgtggacactgagttcttgcctgcagcacccacaggaaatacaacagctgcccagggtgaggatgaacatggtttgcctactgttcctcgagcatctctccgtagttagatggttggactgctacaatgtgttactgcctgcatat

SEQ ID NO: 5343 - DNA, 447 bp, Gossypium hirsutum
  Clone ID: LIB3197-054-Q1-M1-E5
gtgaaactaaaaagacaaggctaggaaagcaatctctaagcaaacgaactgagaaacagcttttcggcttccccgccgatctctccaaattctattttcaaatcgaagtcaacaatcaattgtaaagcactttctcctctctttcctaaggaaaggagatgaagcgagtcttcggcgttaagaaagacaaggaaccgccgccttcgattcaagatgcctccgataggataaataaaagaggggacaatgtggaggagaagttgaagaaactggatgctgagcttagtaggtacaaggaacagataaagaagacaaggcctggccctgctcaagaggccattaaagctcgagccatgagggttctcaagcaaaaacgaatgtatgaagggcaacgtgatatgctttacagtcagacgttcaacctcgatcaagttgcttttgcttctg

SEQ ID NO: 5344 - DNA, 482 bp, Gossypium hirsutum
  Clone ID: GOSHI-09MAY01-C19981_1
cttctactacattcttcacaattttctcaatatctttataacacaaaattactaaaatatatcagaatttatacgatcttggtttttacgtatcaggggggtattattattaggttcagcaagtactgcttattcaagtacataataccatgcgccattatcaaagtagccacaacaccactcaccgatttagggtttaaggggggttctctgtcactggtattacattcacgaccgacaatccatatgcaaacagcgatttaaattccctgcgagaaactcttaacaacccaagcacgctagaacaaatgaaatcaaagtgaagaacacggaagcaatacgcagcaagctctagacacctgtaccctctccctcacctgggtgttaaggatcacgacacatgaagtaggcatttgggttgctgcgtatctacatgatttcaatggaaaagagccatcacattcattctctaaagcactttt

SEQ ID NO: 5345 - DNA, 1000 bp, Gossypium hirsutum
  Clone ID: GOSHI-09MAY01-C19951_1
atccattctattcaagaaactgatttttcctttgactcgtttcccaaaagcgggaatcttccgatctgggtagggtcgatggcagaattggacagtagctgcaccagctcatcatcggggtccacgttcttcaatcgctccttcacgatgcacgcaaatacagctgaacccgatgcccccaaagtccatcttcttctcaacaacccatcgtctcttaatcgagcagctgccatttccaaaatttacaattcaatcgattcagtcaaaggttaagtcaaaaagctttgcaatttattcgagtccgcgaaatcttcatcaaccagtacagaactttcccctaaagttgttttaagacccgcgaaatcaatcgggtattcatcttcgttttcttcgagttttaataacccattgataagattacccggaactgaagatcggattgttgtctatttaactagtttacgagggattagaaggacttacgaagattgttatgctgttaggatgatatttagaggatttagagtttgggttgatgaaagggatgtttccatggattcagcttataagaaagagttgcaaagcgttttgagaaagaagaacccgagtttgcctcaggtttttataaagggaaagtgtggtggtggtgctgatgtgattaaaagcatgtttgaagttggggaattggctaagattcttgaggattttccaaggatacaacagcctgggcttgtttgtgattgttgtggggatgtcaggtttgtgccttgtgggaattgtagtgggagtcgaaaagtgttcgacgaggacgaagggttgcttaagagatgcttggaatgcaatgaaaacggcttgatccggtgccccaattgctgttcttaacactttgattgctgctgcctgcaggatgttaaggtatatatacataatgagcttggtttttttttcgattgtcgaggtatatgaaagatggtctgatgtgttttgtatgaaccctttc

SEQ ID NO: 5346 - DNA, 668 bp, Gossypium hirsutum
  Clone ID: GOSHI-09MAY01-C19971_1
ttttcattatccagcaaggaagtgattgactctgcagagtttacgcaatgagatcgcatctcatttatttttctgcagcgttgtgttgggtagatttattattggttcctcttttttgaaattcaccttctggcagtgacacatatttatatctaccctttcctttaatatcatattcaagtcttctccctctctctctctctctctctctctctctctctcgtagcgaagcggctctttcttttgacttctagcttataatgaagtaaaatggagccaatgttacccaaatcccacaaactcccatgatactacggtggggatgatatttttggtactcccaggtggatccatggtagcatatgattcacgtctaaagtttcagtctttgtaagttgtgtccatctatctccagaaacaacaatggagtggattttccatgaaatagagaaaaggagcttgctttctccatcagagcagccatattacctccctcaatcaccaataccgttacttactccaccacaaaatttgcagtctgatagcttcaatttgaacaacaagagctagcttactccctgatttctctccaaatgatagctgctcccccatatatgtacacctttttatatctatgtgggcatatataatgattatgggggttaaaa

SEQ ID NO: 5347 - DNA, 524 bp, Gossypium hirsutum
  Clone ID: GOSHI-09MAY01-C119829_1
tcgttcacgcgtccgattccaggtcttgcagttcaattgatgctaaaattaagatgtatggttctcttgactctattgaacctgtaaaagacattttagaaaaggaccaaaaaggctttgacacatctttagtggctgcaattgatcgaaccatgaagaaacatactgataatttgatgcacatgttagaaggtgttggtgaccgacttacacagctggagagtagaaccagtaaacttgagacttctgtggatgatttaaagatgtctgtaggaaacaatcatggaagcattgatgggaaaatgagacagctggagaacattttaaaagaggtgcaaacagaggtgcatgttgtaaaagaaaagcaggagagtgttgaagctcttttacagcatgcaaagctgcaggagaccaagatggaccagccatcggaaacttataacactgcacatataggttccatgcaacaagctgcatctgctccttttcaatctcattaacagcttccattggctggctttttt

SEQ ID NO: 5348 - DNA, 410 bp, Gossypium hirsutum
  Clone ID: GOSHI-09MAY01-C19521_1
aaaaaacatacacaaaaaaatgaagccttggggaaattgaggagttgtagaaaccatttatgaagatgaactttatgatgatcatgatgatgatgataactcttccaactctccttcacttctctcatctcctccttcacctctccattcaagtgcacaagcttggtcatcggcaatggggtgtaaaactgacgtgttgatacatgtacagggaactgcttttcaccttcataaggatcctctgatatccagaagcacctatttaaggcggatattaactgacaaatcagaattaacgttatccccgccgttaaacataaccgccgaaacattcgctctcgtagtcgatttctgttacgggactcacctctcgtaacgccgttcaacgtagcgtcactcttggtggcagc

SEQ ID NO: 5349 - DNA, 517 bp, Gossypium hirsutum
  Clone ID: GOSHI-09MAY01-C19491_1
aagcagtttcctcttatcaaagcccgtgatgctacagacgacatgctgtcttgggggctcaagagaaaggttgatggttccattactatgatcgataatgtgaactgtatgactgacgaaccttcgcaagatggtaatgaatatgtgaatgacgtcataatatatttggaaactttggtttctaccgcacaacagatattgcctccgcaagtgcttaaaagagttttacaagatgtactttctcacatatcagacaagaccctcggggctttatttggagactcggtgaacaggtttaatgtaaatgctattatggggattgatgtcgatattcggttgttagaatctcttgcggataacctatcacctgtgttttctgaaggcgattcacttcaattgataaatgcacttgctgagtcaaggcagttggtcaatttgcttttgagcaatcatccagagaattttctgaacccagtaattagagagaagagttacaatgccctggactacaggaaag

SEQ ID NO: 5350 - DNA, 607 bp, Gossypium hirsutum
  Clone ID: GOSHI-09MAY01-C19441_3
cccacgcgtccgcccacgcgtccgcccagcgggtgtggtttcttccggctttcgattcaaatcccttttggaactgtccttcaattgaaaacaagcagccaacatggggaagacacgaggtatgggagctggacgtaagctgaggacccaccgaaggaggcaaaggtgggccgataagtcatacaaaaaatccaaccttggtaatgaatggaagaagccatttgctggttcttcccatgccaaaggcattgtccttgaaaagataggtattgaagctaagcaacctaactctgctatcagaaagtgtgctcgagttcaattgatcaagaatggaaaaaagattgccgcattcgttccaaacgacggttgtttaaattacatcgaagaaaatgatgaggtgttgattgctcggatttggacgaaagggtcatgccgtcggtgatattcccggtgttagattcaaggttgtgaaggtgtctggtgtttcattattggcacttttcaaagagaagaaggagaagcctagatcctaagtttgcaacaatgaggatatctttatgatgttttcatagtttttttgggatcgaattaaagcaatgtgtttctc

SEQ ID NO: 5351 - DNA, 641 bp, Gossypium hirsutum
  Clone ID: GOSHI-09MAY01-C19441_2
tttacgcgtccgcccacgcgtccgctcaatctctctgggaaccctcgccgcatttggaacctcgcagccaacatggggaagacacgtggtatgggagctggacgcatgctgaggacccaccggaggaggcaacggtgggccgataaggcatacaaaaaatccaaccttggaaatgaatggaagaagccatttgctggttcttcccatgccaaaggcattgtccttgaaaagataggtattgaagctaagcagccgaactctgctattaggaagtgtgctagagttcaattgatcaagaatgggaagaagattgcggcattcgtcccaaatgatggttgcttaaactacattgaagagaatgatgaggtgttgattgccggatttggacgaaagggtcatgctgtgggtgatattcctggtgttaggttcaaggttgtgaaggtctcgggtgtttcactgttggcactcttcaaagagaagaaagagaagcctagatcataaattttgagagaggtctctcatcgtgttctgttagttctatttataacaaactatagagatttttattgctatgtagctatttggtcaacctggtcactttatcttaattaatattttgcgcttttgtactgttgaataaa

SEQ ID NO: 5352 - DNA, 686 bp, Gossypium hirsutum
  Clone ID: GOSHI-09MAY01-C19441_1
cccacttttccgccaaatctctcaaaaccttcattccatcccactcaccccgaacaacctctctccaccaacatggggaaaacacgtggtatgggagcggggcgcaagctgaggacccaccgcaggaggcagaggtgggctgataaggcatacaagaagtctaaccttggaaatgaatggaagaagccatttgccggttcttcccatgctaaaggaattgtccttgagaagataggtatcgaggctaagcagccgaactctgccatccgaaagtgtgctagagttcaattgatcaaaaacggcaagaagattgctgcttttgttccaaatgatggttgcttaaactacattgaagagaatgatgaggtgttgattgctggatttggacgaaagggtcatgcggttggtgatattcctggtgttaggttcaaggttgtgaaggtgtctggtgtttcactcttggcactcttcaaagagaaaaaagagaagcctagatcttaagtttgcaatgaggaaaagatggctttcatgatctttctatagtttttcttaaaactgagagcgttctgttgcctggtagcttttctggacttttgtttattttctggctattattgtattgaatttttggtgtcatcgtttgatcaaaaagattttggtgctttaaaaaaaagtcgacgcggccg

SEQ ID NO: 5353 - DNA, 1122 bp, Gossypium hirsutum
  Clone ID: GOSHI-09MAY01-C19791_1
tgaagtctctggatgaaaatcagcggttcataattgaggattcagttcttattgcactgcttgggcaactgaaactagaggcagaaactcttgctgctgagaagaactcagtacggcaggagttgaaggttcagtctgtgcagccctcgcggccgcccacccgtccggaaaaacttgcggatatgaatgaagtactgagatcaaaagtggtagaggtaaaccaaagagaagacgctttgcagactgaattgataagtgttcgtggacaactgttagccttgcaaaggcaatatcagacttcactggaagacaactgcaaggtgctagatgagaaaagatctttgatgaaggaagttttggacttgggcaagcagaaacataatctagaagatgaaaatcatgctgtaatttgcgaagcaatatctcaaagtaacatttctctcattttgaaggatattattgctaataattttgaggaaataaagtatttaaatgacaatctgggtaaactcaaatgtctcaataatgatcttgagggaaaactgaagatgatggagagaaaatttgaagatttgcaaatggaaaattcaaatctcaaggattcaatgaaaaaattggagaatgaactggtttcagttagatctgttggtgatcaactaaatgatgaagttgcaagggggaaggatctgttgtgccagagggagattgcactattggaagtagagaaaatgctcagtgcgagtcaagaggagacagcccaactgcataaagttttggaggatctgcagactaaatttgaggaggtcaagctgataggagaagatcaaaagaggcaaattctgaaactatctggggactatgatcatcaaattaaggagactgaaagcattagtcaggctaatcagaaacttgaggttgaattgttgaaattgaatgaggagcttgaagaaaacaaacacagggaggagggtttgagctttgaactacagaaggaaagaattaaagttgaaatttgggaaactcaggctgctgcatggtttgatgagctacagacttcagctatacgtgaagtaatttttgaagagaaagctcatgagctcggtaaggaatgcaaattccttg

SEQ ID NO: 5354 - DNA, 1199 bp, Gossypium hirsutum
  Clone ID: GOSHI-09MAY01-C19781_1
gttagaggaaggcgaattgcatcgtggagaaaaagaagggaaaagagatttcactgaaaacgatgcatactgagttctcagttgacgatttctccgactccttttgggcggctccgccggggatgagccgaagccaatcggagtgggcttttgacaattttattgaagagttttctggttcgggcggggcgatcccggtgtcgcgttcggacgagagtgtgatcggtccatccttggcggaacctcggccgtccgtttcgaaatctgaagaagccgatggtgaaggtgacgtggtggagatcaaaagacctggtaatcagaatcataacagtccgccgtccgatctggcaccgacgttctcgattgactcggatgagtaccgcgcgatcctcaaggacaagctccatcaagcctgcgcagctgttgctctctctcgtgcatcatctgtgaaggcagaagttttctctgcgcaagctgaagatcaagcgcttcaatcgagatcccaagttcaaggttcctcaaaggctcaaggacagggtgaactagatgctacacctagtgaagtcttggctatgtctactacacagacaaaatcaaaggtacaaatgaggcaaacaacaagtgtgtcatcaggagaagattcagatgatgatgaacttagagatactgaaactactgataacatggatccggctgatgcaaaacgtgcaaggagaatgcggtcaaatcgagaatcagctagacgctcaaggagaagaaagcaagcacatatgaatgaacttgaaacgcaggttggccaactaagagttgaacattctacattactcaagagtctcactgacacgaatcacaagtatgacgaagctgctgtggacaatcggattcgggaggctgatattgaagcattaagagcaaaggtaaaaatggctgaagaaacagttaagcgggtgacggggattaactttaactctggtcttctatctaggcacaatgtagctagtgttagcatgccttttgttagcagcccattggaaacatcttcaactgctcctgttccattgcagccaaacactaatcagttttttcaccaaccagttcccttgcatcatcagagaatggagaacgttttcatggggaacaccatggttcctcctatcgtgaattcacgaaccgaaggagtgaaacatgaaaatgaaaca

SEQ ID NO: 5355 - DNA, 1030 bp, Gossypium hirsutum
  Clone ID: GOSHI-09MAY01-C19741_1
cccacgcgtccgccggtcatttctttgtccatccttcttccgagtgcttcaggttctgccagaatgaggaaatggttctggggttttcttttcattgcttttggttttgtttgtagcattgccgctgagcgcaaccctcgcactgagagaatttctggaagtgctggtgatgtgttggaagacgatccagtagggaggttaaaagtttatgtatacgagcttccgagcaaatacaacaagaaaatccttcagaaagaccccagatgtctttcacatatgtttgctgctgagatctacatgcacaggttccttttatccagtcctgttcgaaccctcaatccagaggaagctgattggttttatacccctatctatgccacttgtgatcttacacctactggcttgccattgcccttcaagtctccacggatggtgagaagtgctatacagcttatttcctcaagctggccttactggaatagatcagagggtgctgatcatttctttgttgtaccccatgattttggagcatgctttcattatcaggaagagaaagcaattgagaggggaatccttccaatcctgcagcgtgctaccttggttcagacatttggacaacggaaccatgtgtgcttgaacgagggttcaatcacaattcctccttatgctccccctcaaaagatgcaggcccgccagattccactagatactccacggtctatttttgtctacttccgtggattgttttatgatgtgaataatgaccctgaaggtggctactacgcaagaggtgcaagggcagctgtttgggagaacttcaagaacaatccacttttcgacatctccactgaacatccaactacttactacgaggacatgcaacgagctatattctgcttgtgcccactagggtgggcaccctggagtccgaggctagtggaagctgtggtatttgggtgcattcctgtcatcattgctgatgatatagtgttaccctttgctgatgctattccatgggaggaaatcggag

SEQ ID NO: 5356 - DNA, 458 bp, Gossypium hirsutum
  Clone ID: uC-gsronu33B137h07b1
tcgattctttctcttttgaagaacttgaaaaaggatcagtcgaaaaaatgcggaacatgtgtagtttcgagaatttaagcaatttggaagtgaataaaagcggaaaacaccgtgagggaactccagtggtgattgaaaacaagatgtatttccgaaaaggtaaggttggggattgggagaattatttgacacctgaaatggctgttcggttggactcgataacgttgcagaagctaaatggttcaggcttaactctatgattgaataataaagcagccatggggtacattttgccttctctgcaatttcacatattatgtttctaaaaataaattgggtatgctttttgcaagtagcaacacttctcgtgttgttcatgttaagatcaattaaaagtatagttggttcaattgaaatcgattcaatcaataaaatttgatataagttgatttgaataa

SEQ ID NO: 5357 - DNA, 344 bp, Gossypium hirsutum
  Clone ID: uC-gsflnu33B082d12b1
ttgtaaacatgtgtagtttcgagaatttaagcaatgtggaagtgaataaaagtggagatcaccgtgagggaactccagtggtgattgaaaacaagatgtatttccgaaaaggtaaggttggggattgggagaattatttgacacctgaaatggctgttcggttggactcgataacgttgcagaagctaaatggttcaggcttaactctatgattgaataataaagcagccatggggtacaaaaaaaaaaaaaataaaaaaagaaaaaaaaaagaaaataaaaaaaaaaaaaaaaaaaaaaaagaaacagaataaaagaagaaaatgaaaaagatttaaaaatcg

SEQ ID NO: 5358 - DNA, 800 bp, Gossypium hirsutum
  Clone ID: GOSHI-09MAY01-C19691_2
cggaagtcagtcagtcggtcaaacaatcaaatgcctcgtcagctttagcttccacttccacctaacatttccatcttcccaatctttcctcctccatcggcccgtggtctttgacttctccggctacgcccctctcgtccggccacattcagcaatatttgtaacagatggcttcttccttccgagcattcctaaacagtccagttggcccaaaaacaactcacttttgggggcctgttgcaaattggggttttgttctcgctggattggtggatatgaataagcccccagaaatgatttctggcaacatgacatcagctatgtgtgtctattctgcattattcatgaggtttgcatggatggtacaaccacgaaactatctactgttggcgtgccatgcttcaaatgagacagtacagctctaccaactctcccgttgggcaagagctcaagggtatttgtcggagaagaaagacaaagctacatcgcagtaaagcagcagcttcagttggagctagctgcttttcgattctttccattccaagtgtctgtgagttttactgtgatccgggatgattggaggattctgaacctactattaaagcattcattttgactgctaaaccaataatgattgttggagtgcatcttgattgaccctataatgtgttctgattcttgattttacctgttaaaaaggtaaaattagcttagagttacaatcactgttgatttgggcatcaagtcatgcttttataaactggaatcgattagcagatcacagaatgataattttaaca

SEQ ID NO: 5359 - DNA, 908 bp, Gossypium hirsutum
  Clone ID: GOSHI-09MAY01-C19691_1
ataaccatcaggttcgcctctatgatatttctgcccacgaagacagttgtatcatttgacttcagggagacccctataaaagcagttgcagaagacctagatggtcatgcagtttatatagggaatggatctggtgaccttgcttctgtggatatacgcacaggtaaattgttaggatgctttttggggaagtgctctggaagcatccgatccattgcccggcaccctgaacttcctgttatagcatcttgcggcttggacagttatttgcgcatttgggacattggaacaaggcaacttctatcatcggttttcctgaagcagcatcttacaaaagttgttttcgatactaattttaccgaagaagggattggtggacatgaataagcccccagaaatgatttctggcaacatgacatcagcgatgtgtgtctattctgcattattcatgaggtttgcatggatggtacaaccacgaaactatctactgttggcgtgccatgcttcaaatgagacagtacagatctaccaactctcccgttgggcaagagctcaagggtatttgtcggagaagaaagacaaagctacattgcagtacagcagcttcagttggagctagctgcttttcgtttctttccacccccgcggccggtgagttttactgtgatccgtgaagattgtagtattctgaacctactattaaagcattcattttgactgttgctaaaccaataatgattgttggagtgcatcttgattgaccctataatgtgttctgattcttgattttacctgttaaaaaggtaaaattagcttagagttacaatcactgttgatttgggcatcaagtcatgcttttaataaacttggaatcgatttagcagatcacagaatgtataatttttaac

SEQ ID NO: 5360 - DNA, 597 bp, Gossypium hirsutum
  unsure (1)..(597): unsure at all n locations
  Clone ID: AI727833.1
ctcctgcaaacagccttggtatttttatccctacttggtttacatctgcaacatttcttagcaaagatgatcatcgtaaagttgtggctggtaccaataaccatcaggttcgcctctatgatatttctgcccaacgaagaccagttgtatcatttgacttcagggagacccctataaaagcagttgcagaagacctagatggtcatacagtttatatagggaatggatctggtgaccttgcttctgtggatatacgcacaggtaaattgttaggatgctttttggggaagtgttctggaagcatccgatccattgcccggcaccctgaacttcctgtgatagcatcttgcggcttggacagttatttgcgcatttgggacatcggaacaaggcaacttctatcgtcggttttcctgaagcagcatcttacaaaagttgttttcgatactaattttaccgaagaaattaaacactttgcagccgatttggcattgcatgaagcacagagcataaatgaaattgaaaccacagatgaaactgaaaaactggctatgaaaaggaaaaaatcatcatctanagaaaataaagaaggcaaaa

SEQ ID NO: 5361 - DNA, 531 bp, Gossypium hirsutum
  Clone ID: LIB3543-008-Q1-K6-H6
aagcagttgcaggaagacctaggtggtcatgcaatttatatagggaatggatctggcgaccttgcttctgtgggtatacgcacaggtaaattgttaggatgctttattggggtaagtgcgtctggtaagcattcgatccattgcccggcaccctgaacttactgttataacattttgcggcttggacagctatttgcgcatttgggacattggaacaaggcaacttctatcatcggttttcctgaaacagcatcttacaaaagttgttttcgatactaattttaccgaaaaagtgaaatatttacttggaatctttattggtaaaaactaattattccgtgtttggtgtcaccacccctcaatatggcattttagttataatggtgagtaatactagtaaacaagaatttgtttggaaggcgaatcttgcatatcttacgcctttgtaaactcgctgacagatggattgttagtcgcaaacttttacaaatagctttttgttgcctatttaatgagaacattattgtttac

SEQ ID NO: 5362 - DNA, 293 bp, Gossypium hirsutum
  Clone ID: GOSHI-09MAY01-C19181_1
gaaggtgtcacaagggagggggtattggacaactttacaccaaaaaatttaccaaataaatcacaaggtggagaagccgatgactactcagctgatttaatggacattgcgattaatcaaaccctcaaatattgcataaagatctctgttatccgggccaaaaatctcctctgctttcctcaaagtctcttctctcgtttgtttgtgggagtttagttctttaacatttgccaccaatgcaccaaactgctcatacgacaagcggctcctgacttgacggaagaattctttcc

SEQ ID NO: 5363 - DNA, 967 bp, Gossypium hirsutum
  Clone ID: GOSHI-09MAY01-C19141_1
gcaaagtcgccttccaagacagtgaaacacacaattcaactctgtctccagatctctctgtctcccccttctctttctctgctgaaactcaaataaaaataaattcgtgaacaccatgtcagtctgctcttcttcttcttcttcttcttcttcttcttcaacaggtaaagcttggatagttcacaggattttagctggcacagcaattgcggtagccattggtgcccgtgcctatctgggtcgggctaggaagtttcggacacgggtcgtgggaattatacccgccagatatgcatcttctcggttcgaaggcaagcctttggttcatatccttgggaaacccatgatccagaggacatgggagaggtcaaaactggcgaccacactggaccatctagttgtggcaacagatgatgaaaagactgcgcctccctccccgcgtccgggcgctgatgggatcatgacatcagagtcttgtcaaaatggcaccgaaagatgtaatgaagctcttgaaaagctagagaagaagtatgacattgttgtgaatattcagggagatgagcctcgtattgaacctgagataatagatggaattgttaaagctctgcaggcagcaccagatgcagtgtttagcactgctgtgacttctttgaacccagaaggcgttgttgatccaaatagagtgaaatgtgtggttgataatcgtggttatgctatttatttttctagaggactaataccatttaacaaatctgcgaaagtcaatccacagttcccttacatgcttcatcttggaattcagagctatgattcaaagtttctgcaaatatatccgaagcttcagcctacaccactgcaactagaagaggatctggaacaacttaaggtccttgagaatggctataagatgaaggtgataaaggttgagcatgaggctcatggagttgacacacctgaagatgtggag

SEQ ID NO: 5364 - DNA, 431 bp, Gossypium hirsutum
  Clone ID: LIB3048-021-Q1-L1-F11
cacacttcaactctgtctccagatctctgtctcccccttcggtttctatctgaaaccaaataaaaataaattcgtgaacaccatgtcagtctgctcgtcttcttcttcaacaggtaaagcttggatagttcacagtattttagctggcacagcaattgcggtagccattggtgcccatgcctatctgggtcgggctaggaagtttcggacacgggtcgtgggaattatacccgccagatatgcatcttctcggttcgaaagcaagcctttggttcatatccttgggaaacccatgatccagaggacatgggagaggtcaaaactggcgaccacactgaaccatctagttgtggcaacagatgatgaaaagatagcagaatgctgtcgaggatttggcgctgatgtgatcatgacatcagagtcttgtcaaa

SEQ ID NO: 5365 - DNA, 442 bp, Gossypium hirsutum
  Clone ID: GOSHI-09MAY01-C19161_1
gactgaacaagagcaggcactctcttcagagcttagcaacaaggtgaaaggaaggcagacagcacgtgaaataattttatggattgaggaaactgtctatactattcacggccaggaaattaccctcagtgtggttatacaaactcttcttgacattgggtctaaaagtttcactcatttgatcactgtcttggagaggtatggacaggtcatggcaaaactttgcgctgatcaagataagcaggtcatgcttatatctgaagttggttcatattggaagaacaatgcacagatgacagccataacaattgatagaatgatgggttatcgtcttatatctaatttggccattgtgagatgggtcttctctccagaaaacattgagcaatttcatatatctgatcgtccatgggaggttctgaggaatgcaattagtaagaca

SEQ ID NO: 5366 - DNA, 441 bp, Gossypium hirsutum
  Clone ID: LIB3083-011-Q1-L1-G2
cagtcagcacgtgagataattttatggattgaggaaaatgtatatcctattgacggccaggaaattaccctcagtgtggttatacaaactcttcttgacattggatctaaaagtttcactcatttgatcactgtcttggagaggtatggacaggtcatggcaaaactttgctctgatcaagataagcaggtcatgctcatatctgaagttggttcatattggaagaacaatgcacatatgtcagcgatagcaattgatatggtgatgggttattgtcttatatctaatttggcctttttgagatgggttttcttttctgtaaactttgtgtttttttttattttttttcgtcctttttttgatattttggttttttattttttttgtttttttatttttttatttttatcttttcttttttttttttatttttttaatttt

SEQ ID NO: 5367 - DNA, 603 bp, Gossypium hirsutum
  Clone ID: GOSHI-09MAY01-C19131_1
cccagcgtccgcagaattgcggcaggaactagccatggggtattgttgtttaagagcaacggaatggacatagtctatggagcaaaccggataacttacaaggtcattggaggtattatagacttgtatgtttttggcggaccattgccccacaccgtcgtgcagcagtatactgaacttattggccgccctgctcccatgccttattggtccttcggattccatcagtgccgatatggttacaaaaacgtttctgacctcgagggtgtggttgctggctacgccaaagctaacatccctctggaagttatgtggacggacatcgattacatggatggatttaaggacttcactcttgaccccgtcaacttcccggaggacaagatgaaacaactcgtcgatgagcttcatcggaatggtcaaaaatatgtggtcatcatagatcccggtatcagtgtaaacagttcatatggaagctacatcagagggatgcaagctgatatattcataaaaagagatggcatcccttatttgggtgaagtttggcctggtcgagtctactttccagattttgtaaaccctcaaacacaaacatattgggat

SEQ ID NO: 5368 - DNA, 937 bp, Gossypium hirsutum
  Clone ID: GOSHI-09MAY01-C19091_1
aaaatgtaaggagttggacacacgttatgctttcttcacttcagcttaagttgactgtatgtatatataggttggtcacccacgaatcctccaccattgaacccttgaaagatataaaacttgtagttggttacctacaacagccatcattgcatagtttccccctataaaagcctcacagttccgccatcactacgattacagcagaaaaagggaagatggcaacatatcttgtcttggttgtagtagctatgctttgtgcaggagccacagctcaatcaggttgcgctagtgtgttgatcggcatgtcaccctgtttgagttacattacagggtcctcatcaaccccatctcaacaatgttgcacacagctagctaatgtcgtgcgttcatcaccgagatgcttgtgccaggtccttaatggtggtggttcatcatttgggatcaacatcaaccagactcaagctttggccttacctgattcatgcaatgttcagactccacctatcagcagttgtaatgctgcttctccagctccagcagactctccggtaggatcacctgaatctgggagcaaaattccaacaggagatggatctagaagtgtaccaactgcacgggagaatagctcatctgatggaagcaccaccaaattgtcactctctttgttcaccttccttctgttggcaacatcatatagttcaatcttcacatcacactgaatcttctctagtataccctacctctcatgacacttcatgttagcaaaaacactatattgtattttttttatttgttagtgtccattctcctttggttgaggatacatgtaattttttttatcccctccactactccagggtcctatgattttgtatagcttaagagaaatatggcttctcctcccttctcaatccaagattgcttgggattactt

SEQ ID NO: 5369 - DNA, 528 bp, Gossypium hirsutum
  Clone ID: LIB3543-019-Q1-K1-H12
aaaatgaaggagttggacacaactgtagcgacttacacattaatcatacttgacggatcttatcgatttgaggaggcacgctttaaactgaagccgggtactgtggcagataagaactcatagttcgagtgaaataccagctgcaacattggttggcgctcatgtatcagaactatagagacagccaaaggcttgtatccatgcactatgggtacaaatgcacaccaagtggaacaatgaaagtaacactacggcatgatcgagacacaatctaattaacattcacaagagggcagatccgtacatcagcctcaaggctgtacctttaaaagcccacataaaatccgcacctgcaaagtgttgcacgcagatagctaatgtcgtgcgttcatcaccgagatgcttgtgccaggtccttaatggtggtggttcatcatttgggatcaacatcaaccagactcaagctttggccttacctgattcatgcaatgttcagactccacctatcagcagttgtaatgctgcttc

SEQ ID NO: 5370 - DNA, 514 bp, Gossypium hirsutum
  Clone ID: LIB3584-047-P1-K2-E11
cggacgcgtgggcggacgcgtgggttccggtgatctcttatatttcttgatttatcattgcataaaccttaagttctgggaataagaaagaatttttgcttttatgcgaaaggttgatggtaaaaattgaaatgcatatatgtaactgcatccttaccattacaactgctgacaggtggagtctgaacattgcatgaatcaggtaaggccaaagcttgagtctggttgatgttgatcccaaatgatgaaccaccaccattaaggatctgacacaagcatctcggtgatgaacgcacgacattagctagctgcgtgcaacattgttgagatggggttgatgaggaccccgtaatgaaattcaaacagggtgacatgccgatcaacacattagtgcaacctgattgagctgtggctcctgcacaaagcatagctactacaaccaagacaagatatgttgccatcttccctttcgctgctgtaatcgtagtgatggcagaactgtgaggcttttata

SEQ ID NO: 5371 - DNA, 488 bp, Gossypium hirsutum
  Clone ID: GOSHI-09MAY01-C19041_1
ggccccaccaaatggagccactaatactaatcaaaatgatcaaaaaccaaccccggaccagcttgttcgagttgactcagaatgtctatcttccattgtcacaaacctagataaaaacgatccaaaaagtgccaaaaccattgaaacccatcacagcttgcatcaccatcaccatcatcatcaacaacaaagctttgcaacttatggtgccatggaattggacttctcttcctacaatcatcatcaagcagcagcatctaacggtggaggtgtgtcattgacgttagggttacaacaacatggtgggaataatggggtgagcttagcattctccccaacttcacaaagttcattgttttaccctagatcggaccaaattgaagattgtcaaccggttcagtactcacttttagatggtgaaggacagcatttgccttataggagctcgatgggcgctcaattgctacatgatttggctggttagcaat

SEQ ID NO: 5372 - DNA, 554 bp, Gossypium hirsutum
  Clone ID: GOSHI-09MAY01-C19351_1
tctctcccttcccatcatccccccaggccccagctgcgttagcaccgtcaccttccgccgaaaacaagcaataatatctcttcattaatttagccatgcctcttaacttgatagcaacgaaaccagaacatggcatcagtagtggcccattggaggctctgtcagagacgcctgagccccacaacagtgctatgcttgcgtttccaatacaacgcaactcacaacctcctgtcagactcaccactttgtatcctataactatgaagtttgaagagatcgtgtacaaggtgaagttggagcagaaagggtcatgctggggtggatggatcacacgagaaaagaccatactcaatggcatctcaggtgttgtttatccaggagaaatactagcaatgttaggtccatcaggaaagtggtaaaaccacccttcttaactgctcttggaggccgctcactggcaagctatcccggaagatcacatacaatggtcagccattttgtggtgccataaagcgaaaagcaggattcgtggctcaagatgaatgtttggccct

SEQ ID NO: 5373 - DNA, 627 bp, Gossypium hirsutum
  Clone ID: GOSHI-09MAY01-C19311_1
caaggagatggatttcttttcttctcaatatcaatcacatgatcatcatcatcatcatcaagagggcaacactaataataatggatcatcttcttttattgattcgagtgtaaacattggattaaatcttctcaggtcaagccccggagtttcaagggcatcaaatgaagagaaacccaaagctcaagagagtgctctcaaaatggagttagaaaagttaaacgaagagaatcggagactaagaagcatgttggatcagattaccaaaaattacaatgaactacaaggtcaactattaatggcgttgcaaaaacaggcccacagaaatcaacaagaccagaaggatgcagtacatgggatggcgagtaccataatgtcagtccaacaattcatggacccacggccttcggctgcattagatgtcaactagccttctgggtctgacgacaagacgcaagagttgtcagcatctcccgaaaatactatagaaattgtctcaaaggaatacgaccatcgaatggttcataatatgccgggaaagcaggtttctattgaagatggtactgatcaaacatctcacagttggggatcactcaagagtccgaagatagatcagtccaagaatgt

SEQ ID NO: 5374 - DNA, 451 bp, Gossypium hirsutum
  Clone ID: GOSHI-09MAY01-C19211_1
atcatatagttgatgtcaatagttgcggattgggttcaaggtcattcagaatgctttaattgtgctatctcacaaaggatgttgatggaattgtggatgcgctggcgaaagaggaaatgtattttccttctattttgagccaggaggtgaaatttcaattttattcgttgtctttgtttgctgcttttgtgttttagggaggcgtttaaagcaaaactaatacattaataaggagggattgcagatgcgctggcgaaagatggaatgtatttactggttctattctgagcctcggtggtagaatttcggctttatctgttggctctggctgctagttgtcgttttggcgaggcatttttcttgtatcttgcttcgagattttgtcttagttgtattttgtgtgtttgtttttcttctacttctggtgatgtattttgttttggagtgggat

SEQ ID NO: 5375 - DNA, 391 bp, Gossypium hirsutum
  Clone ID: GOSHI-09MAY01-C119239_1
tcgttcacgcgtccgtttcaatcacgccgttgcactccctctgccgttccagtctcttcccttttccgaccagataacggcgaaaggaggacacccaaatactctttcaacggtatgaaggtcatagaggacgtgcgcggagtgctgaacgtggggcatggaagcggttgctgcggcgctgaggcacaaaagctgcctagggtttctgctgtcgaaaattgctagggctaggcattcgagccagtcgttggattactgtactttgggccaatgggtttgtaatttattgtatttctatttccaggtttatgcatcttgggcccgggctacaatggcctattacaatgtgatttaccattttattaattttagttttttattttgatacccc

SEQ ID NO: 5376 - DNA, 427 bp, Gossypium hirsutum
  Clone ID: GOSHI-09MAY01-C19231_1
aaaaattacaaatcaatttcttgggtttctcgacatttttgtgaatctcatagtttgtataagcctttactctggtgctgtacaggaagatagaaaggtttacattgcatacttgggatcacttcctgatggagactacattgcttcatctcaccattgcaatatgcttcaagcactttctaaacacagctctgtggaaaattacttaatccgaagttacaaaaggagcttcaatggatttgcagctaagctaactaatgaagaggcaaagaaactttcaagctttaaaggagtggtttcggtttttccaagtaaagtttaccacctgcatacaacaagatcatgggatttcttgggactcaatcaaactgttaaacgtaatgccacagagagcgatgtcattgtcggtgtctttgataccggaatc

SEQ ID NO: 5377 - DNA, 766 bp, Gossypium hirsutum
  Clone ID: GOSHI-09MAY01-C19221_1
cggccgcgtgggcagaagtgatgatccttcgccagaaacttgcgtaatgatcggaacataacttcaagtgatgcacttgctgaggctgaacaagggggcacgcttgatgcctcaggtccgtgccatgtaatgaatgatttgggtgggttgaggatttcaaaaacagttgtggctggaacttgaagttcaagcaatgatcccttacctttcggaaatggaagttcatatccgcctccaccgcctgttccacctcctaaaccttcagcagctaattcgaattcaagaagatttgcctcaggaagttcaaatcctgttcgtgctggatcatctagaagagctgttgcctggcccactgtttcaataaggacatcaccgtctgggtcacgtccatcttctcctagatctcatggtgagagtgagggttacaatagtgctgatgagcagaatccatgctttgtatcctcctacaatgatgcagaaagagaacgccaattcgaaatagatatcagacgagcaaaaggcttagaagttaaacggatgctagaagatgggaactgcctcttccgtgctgttgctgatcaagtgtatggggactctgaagcttatgatttaattcgacaaatgtgcattgattacatggagcgagagagggatcacttttctcagtttataacagaaggttttacatcttattgtaagaggaaaagaagagataaggtctatgggaacaacgtggagattcaagcgttatctgaaatgtataaca

SEQ ID NO: 5378 - DNA, 585 bp, Gossypium hirsutum
  Clone ID: GOSHI-09MAY01-C14981_1
ggataggagtttacgcatctactaataaccaaccagatcctcccaaaattggttaatctctcaggtgctgtgcctcaggctcgtaaagcatccttggctcgatttttagagaagcgtaaagaaagggtatcaaacacctcaccgtacaacatctgcaaatctcctgaatctggccctcttgcatctgatggcataagttttcccgtgacttctgctggatctagtcctttacaagccatcaattaaggatcgagcctcgagactttttcggaccgtgggtctaatagataatgtaagagctcattgcagacatttgtttttgttggtaatcaaatgaactcgattattttgatgtcaaattttaggtcgagttatatacatacatatatatatatatatggtggtcatatgtttttggttttcttgttccgaaatgcttagattcggattttttttgtatcagtttcttttgggatgactttttagaacatcatgtaactcttattgttgtatgttctacacgttgattgtagaaagcataattttgtattcatctgtgctaactatatgttgccggattttgat

SEQ ID NO: 5379 - DNA, 570 bp, Gossypium hirsutum
  Clone ID: GOSHI-09MAY01-C14971_1
gcgttttggtattgggaggaaaggaaagcagtcgagtcagaagaagactctaagattgcccatcttgagctatcagagaggagtttggcaccaaaagttgcacaaggacctaactatatacagccttcagcagaagaagaagagtctgccctacttgtcttgatgaatataccccagaaaatcctaaaatcacagctcactgctcacaccattttcatcttggttgtatttatgaatggttggaaaggagtgaaagttgtccgatatgtggcaaggagatggagtgctgtgagagcccctaaggtctggttgcatcttgattcaatgcaatggagcaaatacatatagagccgcaggtattatcaggatgtataagctctctgatctttattgaagaggcacatcgtgtatataagagtttgttctttatccatcactagtagtactacctgggaatttcttcctactcggactcgaatgatcatgacgttaccttcgatgtaaaaagctaatataataatttgtgtgaaagttataatacgtggaatcaacttgatgatgtgtaacaat

SEQ ID NO: 5380 - DNA, 371 bp, Gossypium hirsutum
  unsure (1)..(371): unsure at all n locations
  Clone ID: LIB3825-011-Q1-K6-B8
tagnaaagcagcaacttagttaaacatacagtgtcatttctattccagaacctttggggtgcatctgattttaagtgtcgtttcttttgcggggcaggagatggagttctgtgaaagcccctaaggtctggttgcatcttgattcaatgcaatggagcaaatacatatagagcggcaggtattatcagtatgtataagctctctgatctttattgaagaggcacatcgtgtatataagagtttgttctttatccatcactagtagtactacctggtaatttcttcctactcggactcgaatgatcatgacgttaccttcgatgtaaaaagctaatataataatttgtgtgaaagttataatacgtggaatc

SEQ ID NO: 5381 - DNA, 781 bp, Gossypium hirsutum
  Clone ID: GOSHI-09MAY01-C14911_1
ttttttttttttttttgatgaaattatatttttaatatcgtaaaaatatacaatttaattccggcccccaaataaagtttctggctccaccactgcccatatgtatttgtatttactagataccaaagagtaagaaaaaaaaaacagtcatcaaagttcaaaatattcaagctaaaaataagttgttcattgtaatgcagtttattttaaaaatagggcaaggactgcatacattttattctacacccaccacaactcaaaattttaaaaacactaattttgaaggttttttttgacaaaagaatcaaaacaattcttccttagacatgttcgaaatgaagtatccaatagaaatatcagccatcccgactgaacttgaacgagaatataaaactcctacaaagcataatttacttaccatccgatgagacatgaccgagcacaatgaagcaaaactacgcctgcaaaaagctagcatatttggcacctaggaaaagcctctggatgcagagcaaggcattcttggtaacctccgcactgtcgtggttcatcaacttcatcacccgctcctttgccttgaggtcgtttactatcacccggccagcaggatggtgctgaataaattgtgagagatcgaagcaagcaacagccagagctcttgggtcactggatgtctccataattgcggtggggacccttagaacctggaaatcatttttcaacgcactcaaccataatccaccaccaacaatggatctttatgcatgggtgaacaatcaag

SEQ ID NO: 5382 - DNA, 507 bp, Gossypium hirsutum
  Clone ID: uC-gsronu33B168g03b1
gcggtggtacatggccagattctaagggacctcattacggtgatggttctcggccaatgatgcaagacctctggctgttgcttgctttgatatttcacagtttattcagcaccatcctgctggtagggtgatagtgaatgacctcaaggccaaggaacgggtgatgaagttgatgaaccacgagagtgcggaggttaccaagaatgccttactctgcatccagaggcttttcctcggcgccaaatacgccagctttttgcaggtatagtttcgtgttgttgtgtgcatggtcatgtctcattctacaatgcagctagtgaatatatcgtaagtaaattcggcttcggctttgttgggtgttatattttcatcggatatattttgataatgcaaaaggaagattattttcctttctgtcaaaaacttaaaatgctactctgattctgagaatgtgcaatagaaaatactacttctaaatatgttaatttatttaattttgccttttgc

SEQ ID NO: 5383 - DNA, 440 bp, Gossypium hirsutum
  Clone ID: LIB3189-047-P1-K1-H11
tcgcccacgcgtccgtccacgcgtccgcccacgcgttcgtggacgcgtgggcgcgagcggccgcccgttgtttttttttttcaaaggtggggagtattcaagctaaaaataagttgttcattgtaatgcagtttattttaaaaatagggcaaggactgcatacattttattctacacccaccacaactcaaaattttaaaaacactaattttgaaagttttttttgacaaaagaatcaaaacaattcttccttagacatgttcgcaacgaagtatccgacagaaatatcagccatcccaactgaacttgaacgagaatataaaactcctacaaagcataatttacttaccatccgatgaggacatgaccgagcacgatgaagctgaactacgcctgcaaaaagctagcatatttggcacctaggaaaagcctttggatgc

SEQ ID NO: 5384 - DNA, 616 bp, Gossypium hirsutum
  Clone ID: GOSHI-09MAY01-C14901_1
gcggccgctaggggggctttcctggagtctcttttaggtcgtttatacctttcaactttcaagcaaatttgtggctcggtagagtgcccatgggggtttaggcattcaggctgaacagcagctggtgatgacttgttgctcgttcttattttcacgaaagaagacagctcgctcagctgtacatacaacagaaattgatgatgaggtttcaggcattcagaacactaaactctctcctttcaaggagctgaaaatggcaactggaaattttcattactccaataaaatcggagagggaggtttcggtgttgtctacaaggtgattgcaaaggaacttttagagatggtattgtggctgctataaaagttctgtcagcagactcaaggcaaggggtgcgagaattcttgactgaaataaatgtgatcgccaacatagagcatgaaaatctggttaagctgcatggttgttgcgtggaaggaaaccacagaattttggtatatggctatctcgagaataacagcctcgcacaaactcttctcggtggaagcaatagcagtatgcagttcagctggtctatgaggcgtaacatttgcctcggtgttgcgaaggggcttg

SEQ ID NO: 5385 - DNA, 352 bp, Gossypium hirsutum
  Clone ID: LIB3189-047-P1-K1-G10
ctggagtctcttttaggtcttatatacctttcaactttcaagcaaatttggaacagtttaacggttgtttagtatatgatggggcgcatgatatactctttataatggacatagaggatgatgactcctgtttggtgctttacagtggcttggtagagttcccatttgtgtttaggcattcaggctgaacagcagctggtgatgacttgttgctcgttcttattttcacgaaagaagacagcttgctcagctgaacatacaacagaaattgatgatgaaggtttaagcattcaaaacacttaactcttttcttacaaggagctgaaaatggcaactggaaattttcattact

SEQ ID NO: 5386 - DNA, 628 bp, Gossypium hirsutum
  Clone ID: GOSHI-09MAY01-C14881_1
cgaagtctagcaacaaggaagccgagaatgggacagggaaaggagaagaccctcaagacggaaggaggtcaaagaagaaaaccggagagcgacaagacgaggaatgcatggaaaacggtctctcagatacggatttcgagcattacgtgaaggtaatcagatggttagaatgcaaaggacatatcgaaaagaacttcagacagaaattcctcacctggtacagcttaagagcaaccccgcaagaagtaaggatcgtgaaagtattcgttgatatcttcatttccgatccagcatctcttgcggagcagctcgtggacacattctccgattgtatctccagcaaaggatcatccgtcgtaccggctggcttttgcatgaagctttggcattgacatgaacggactgttgccgagtagtgagctacatgtttccgagtgcaaaaccggattaaagtcggtgttcggcaataattctttagacccacaacattctggatttagttgcttttgtcattgttatgatcatgtcagaattgccagaatcgtctttttatctttttacaaaaacactgttggttcattcacccaggttgttaaagttattttctaatggtatttacatttcatgt

SEQ ID NO: 5387 - DNA, 766 bp, Gossypium hirsutum
  Clone ID: GOSHI-09MAY01-C114849_1
gcccccttcattgggtctttaaatctcattcctgctacttcatttctttttgtgttttttccctttgatctttaactaaagggatctgcttcgttgcctttgtctaccaggaagcagagcttacgatcacaacttgagctcaaaaaatgtcaggagaagaagttgcagttgcccaaccggacgcagcagcagtcattggtgagccaatggacattaacacagccttgccacttgtgattaggaagtcaaaagctcacagtgggcttgctcgaggcttacacgaagctgccaaggcaattgaaaaacacagcgcgcatctttgtgttatagccgatgactgtgatcagccagattatgttaaactggtcaaggccctctgcgctgatcataatgttaaaatgctacgtgctcctagtgccaaagctctcggcgagtgggctggtttatgcaagatagattccgaggggaaagcaaggaaggtagttggctgctcttgtgtagttgtcaaggattacggtgaacaacacgaggctgtcgaggttgttcagcagcaccaggattaagcaaattagagggatggttccctttatttattattattttttttgtagaagcagttttttgttttgtgttttatggatttgatagtgaacaacagaccaatgatgttgagattttgtttctttgagaaatgttgcaatgctgagttgctgccttgctggtgtggttgattgaaatatatataaattcatgggattgtggtttt

SEQ ID NO: 5388 - DNA, 479 bp, Gossypium hirsutum
  Clone ID: GOSHI-09MAY01-C14871_6
cccacgcgtccgatcatcctcttcctcacctattaatcttcagtttttgccttcccagcacctgtcacttttcatttcctctaagataagcattaatatggcgacgattaagactatgatgcgcgccgttcaatacagtaaatatggcggaggagccgccgatctcaagcatgttgaagttccggttcccagtccaaaaaaggatgaagttttgatcaaagtagaggcagctagtattaacccaatcgactggaaactacaggacggggtagcagcgcccatttttaccattgcaatttcccccacattcctggtcccttcgatgtagcaggagaaattttttttttgaattaacattttcttttatgttattctattatcactttttttatttttttctttatatctttcgtctttttctatttaatcaactaaactttcctttttttctcattcccttttatttattttatttcttt

SEQ ID NO: 5389 - DNA, 529 bp, Gossypium hirsutum
  Clone ID: GOSHI-09MAY01-C14871_5
cccacgcgtccgccgtctcacattctaatcttgagttcttttgccttcccacaaactttaaaaaggagctttcggttgttattctcttagaaaaagaaagacaatggccaacaatctgatgcgtgctgttcaatacagtaaatataacggaggagttgctgatctcaagcatgctgaagttccgattcccagtccaaaaaaggctgaagttctgatcaaagtagaggcagctagtattaacccaatcgactggaaaatacaagagggggtagcgcgcccatttttacctcgcaaattcccccacattcctggtactgatgtagcaggagaaatcgtacaagttggatcaggtgtccagagtttcaaagtcggggataaaggtgttgccgtacttggtaatggaggtgcactagctgaatatgctgtggctaaggaaggttccacagttccaaggccttcagaggtatcagccccttgagctgcagctttgccaattgctggccttgcagctcaccagtcactcacccag

SEQ ID NO: 5390 - DNA, 1282 bp, Gossypium hirsutum
  Clone ID: GOSHI-09MAY01-C14871_3
cccagcgtccggacgttgttgccgtacttggtgtaagtactcattcttattctgaagtttgttgcatacttgcatgagagaacatatgtatgtttgatacattggacagtttgttgcttcaagctatacaacactcaggccatagattctttttcaccttattattcatttccttgttttatgtgttatctagcatcatttgtgtcctggttcttgccaatatcttattatttgaatatattttgcaattacagaatggaggtgcactagctgaatatgctgtggctaatgaaggttccacagtttcaaggcctccagaggtatcagcccgtgaagctgcagctttgccaattgctggcctcgcagctcaccagtcactcacccagcttgctgggatcaaactcgatggaaccggcccagaagtgaatgtattggttaccgctgcttcaggtggtgtaggtcaatatgccgttcaactcctaaagctcgctaatgcacacattacagccacttgtggggctcgtaacatagatttagtcaggagcctggggctgatgaggttcttgactacaaaactcctgatggggtggctctcaagagcccttctggtcgaaaatacgatgtaatcatcccctgggcacacaacattccttggtttacctttgaggctaacttgccttcaaaagggaaggtagtagatccccctcctggtttcggtactttgatgagtgttgctttcaaaaagataacattcgcaaagaagcaactcatacccttgttcccctcacctaagaaagaaaacctcgaatttcttgtgaagttggtgaaagaaggaaagcttaagccagtaattgattcagtacatcctctaagtaaggctgaagaggcttgggccaagagcattgacggccatgccactggcaagattcttgtggagccataagttatgaaggttacctgataaatagcactagtttttcagtttctcattgagtggtgtagctcaccatttctaagttcacaaagtactcagtatcttgaacaattccatgttggtgtgagagtttcctaatctttcttgtattttgctggtggtataaacaatgttgtgtggtatctgatgttactgagcactgtgttttcttgtgaaacttagattttattttatttttaatgtaattcaaattgcagatgattatacggagaacagaactttccttgtttttgaaaaaaaaaaaaaaaaaaaaaagggcggcgctcgcgatctagaactctagatcgc

SEQ ID NO: 5391 - DNA, 787 bp, Gossypium hirsutum
  Clone ID: GOSHI-09MAY01-C14871_2
ttgaggcatcacattggtttgacatctacacgcatctgaattaattggacagcaacatattcatattttgcattactttactataaattccaactatctgacgccaatttatatcatcctcccccgcgcccactaatcttcagtttttgccttcccaccggcttaacaccgcctttcagttttcatttcctctaagaaaaggattaaaatggcgaagaatatgatgcgagccgttcaatacagtaaatataacggaggcgccgctgatctcaagcatgttgaagttccggttcccagtccaaaaaaggatgaagttttgatcaaagtagaggcagctagtattaacccaatcgactggaaaatacaggagggggtagcgcgcccatttttacctcgcaaattcccccacattcctggtaccgatgtagcaggagaaatcgtacaagttggatcaggtgtccagagtttcaaagtcggggatacagttgttgccgtacttggtaatggaggtgcactagctgaatatgctgtggctaaggaaggttccacagttccaaggcctccaaaggtatcagcccctgaagctgcagctttgccaattgctggccttgcagctcaccagtcactcacccagcttgctggtctcaaacttgatggaaccggcccacaagtaaatgttctggttaccgctgcttcaggtggagtaggtcaatatgcagtgcaactcctaaagcttgcaattgcacacatttctcccttgttgggctcgtaataggtttagtcagag

SEQ ID NO: 5392 - DNA, 1349 bp, Gossypium hirsutum
  Clone ID: GOSHI-09MAY01-C14871_1
gaaagaaagacattcatatttggattactttgctataaattcaaactatctgacgccaaaatatattatctgatccttctccaccttgtctttctcacagtttttcttgatttttgcctttaccacagacttaaaagcttcggtttttattttcactttgaaaaacgaaaatggataagattaagagtatgatgcgcgctgttcagtacagtaaatatggcggaggagtcgccgatctcaagcatgttgaagttccggttcccagtccaaaaaaggatgaagttttgatcaaagtagagacagctagtattaacccaatcgactggaaactacaggacggggtagctcggccatttttacctcggaaattcccccacattcctggtaccgatgtagctggagaagtcgtacaagttggatcagaagtccagagtttcaaagttggggagaacgttgttgccgtacttggtaatggaggtgcactagctgaatatgctgtggctaatgaaggttccacagtttcaaggcctccagaggtatcagcccgtgaagctgcagctttgccaattgctggcctcgcagctcaccagtcactcacccagcttgctgggctcaaactcgatggaaccggtccggaagtgaatgtattggttaccgctgcttcaggtggtgtaggtcaatatgccgttcaactcctaaagctcgctaatgcacacattacagccacttgtggggctcgtaacatagatttagtcaggagcctgggggctgatgaggttcttgactacaaaactcctgatggggtggctctcaagagcccttctggtcgcaaatacgatgtaatcatccactgtgcacacaacattccttggtctaccttttcggctaatttgactccaaaaggaaaggtagtaaataccactcctggtttcggtactttgatgagtgttgctgcgaaaaagatttcatgctcaaagaagcaactcatacccttgtttacctcacctaagaaagagaacctcgattttcttgttaagttggtgagagatggaaagcttaagccaataatcgattcgaagcatcctctaagtaaggccgaagatgcttgggctaagagcattgatggccatgccactggcaagattcttgtggagccctagttttgggagactgctgcttccttactttacatttatactttttctgtgagtggggttgcttatgagttatttgtatattaacaagtactctgtattttgaagaatacaaatgttggtgtgtgagttctttatttgttggcaatttcaagtgtgctaactgtaatgttattcaaaactgtgttttgttat

SEQ ID NO: 5393 - DNA, 489 bp, Gossypium hirsutum
  Clone ID: uC-gsronu33B090f06b1
cctattcttccctccttcactttctctgatcttctttctttgccttcgccacaaacttgcaaaaagagcttcgcttttcatttttttcttacgaaaaacaaaaaaagaaatggctaataatttgatgcgggccgttcaatacagtaaatatggcggaggagccgatgatttgaagcatgttgaagttctgattcccagtgcaaaaaaggatgaagttctgatcaaattagaggcagctagtattaacccaatcgactggaaaatacaggaaggggtagcccgcccatttttacctcgcaaattcccccacattcctggcaccgatgtagctggagaaatcgtacaagttggatcaggagtccaaagtttcaaagttggggataaagttgttgccgtacttggtaatggaggtgcactagctgaatatgctgtggctaaggaaggttccacagttccaaggcctcctgaagtatcagcccctgaagctgc

SEQ ID NO: 5394 - DNA, 526 bp, Gossypium hirsutum
  unsure (1)..(526): unsure at all n locations
  Clone ID: uC-gsflnu33B056g12b1
ttccacgcgtccgctcctccttatctttctcagagtttttcttgatttttgcctttaccacaaacttaaaagcttcggtttttattttcactttgaaaaacaaaaatggataagattaagactatgatgcgcgctgttcaatacagtaaatatggcggaggagtcgccgatctcaagcaagttgaagttccggttcccagtccaaaaaaggatgaagttttgatcaaagtagagacagctagtattaacccaatcgactggaaactacaggacggggtagctcggccatttttacctcggaaattcccccacattcctggtactttacttttctctggatggttcagctctatgggttaattcgaagcatcaaaacttttctttctgtgattgcttgtttttcaatcatttgcttaacaacatttggtcgagcaggtcccgatgtagctggagaagtcgtacaagttggatcagaagttcaagagttcaaagttggngagaacgttgttgccgtacttggtaatgg

SEQ ID NO: 5395 - DNA, 323 bp, Gossypium hirsutum
  unsure (1)..(323): unsure at all n locations
  Clone ID: LIB3149-026-Q1-K1-D9
gtttttcagtttctcattgagtggtgtagctcaccatttctaagttcacaaagtactcagtatcttgaacaattccatgttggtgtgagagtttcctaatctttcttgtattttgctggtggtataaacaatgttgtgtggtatctgatgttactgagcactgtgttttcttgtgaaacttagattttattttatttttaatgtaattcaaattgcagatgattatacggagaacagaactttccttgtttttgaaccctttcgttttctgcttaatgcttaataagtatacaaaaatactgcnnanaaaaaaaaaaaaaata

SEQ ID NO: 5396 - DNA, 231 bp, Gossypium hirsutum
  Clone ID: LIB3145-016-Q1-K1-F12
tgaaggttacctgataaatagcactagtttttcgaccagaagggctcttgagagccccccggtcaggagttttgtagtcaagaacctcatcagcccccaggctcctgactaaatctatgttacgagccccacaagtggctgtaatgtgtgcatttgcaaactttaggaggtgcactagctgagtatgctgtcgctaatgaaggttccacagtttaaaggccatcagaggta

SEQ ID NO: 5397 - DNA, 487 bp, Gossypium hirsutum
  Clone ID: GOSHI-09MAY01-C14531_2
gaatagagaagaaaaggggctgaagatctagtcaagatcaagcctggaaataccaaaaaaagagaagcttgtgatggggagggaactcacagaggtgcacatggatgttaagccaaacggtttagtgaaatcgattgttaatcgtgttaacttgcagggcaccgagccaaataacttaactgtcaaaaaaggagcaaccgaaaactcggtcattgaggatggtcaggaaaagcaagatgtgctatgtgttaaaaccacaaattttagtaccgacatccctgaagagaaaaatgaaaaggctgaagatcagaagtctgctgacaatatgttgagcactgctgaatcaaaatctactagtgttgaaaatactcatgcgaatgacactacttccgaaactggtgcaaatggcatggaaactgttaactctacaccttcccctacttctgcaaaggattcggagccaaaccgtcctatgactcctttgatg

SEQ ID NO: 5398 - DNA, 784 bp, Gossypium hirsutum
  Clone ID: GOSHI-09MAY01-C14531_1
aaaacaaacattcaaagcctgggggcggggtgggggaaaacacagaaagcatttcgtctgttttaggaaaagaggaggggagagaagaaaggggctgaagatctagtcaagatcaagctagaaaatccaaaaaaagagtttctgttagagaattgtaataattgtgatgggggggggggcggagcagaggtgcacatggatgttaagccaaacggtttagtgaaatcgattgttaatcgtgttaacttgcagggcaccgagccaaataacttaactgtcaaaaaaggaacaaccgaaaactcggtcattgaggatggtcaggaaaagcaagatgtgctatgtgttaaaaccacaaattttagtaccgacatccctgaagagaaaaatgaaaaggctgaagatcagaagtctgctgacaatatgttgagcactgctgaatctactagagttgaaaatactcattcgaatgacactacttccgaaactggtgcaaatggcatggaaactgttaactctacaccttcccctacttctgcaaaggattcggcagccaaaccgtccgatgactcctttgatgtcgaagaagtcatcacaaccttatgagaggaagcatactgatgaagatgatacttggtctgtcgcttcctctactgctatatatgctcgacgatcaagattgagggtaactgatggatcttcaccaacttttaaaagtgctgaacgtgctgaaaagcggagggagttttaccagaagttagaggaaaaataccgagctttggaggct

SEQ ID NO: 5399 - DNA, 613 bp, Gossypium hirsutum
  Clone ID: GOSHI-09MAY01-C14521_1
gcatgaagttgcgttacacctacttctacaactttattcttctatgcccccactcttacaaaatcatcttcttcctttccctttcctttccttttccgttccatcattccctccaacacctctctttctctctcgccaacgcaattgactgcttgatggcctgaatacttgaaccacaaagctatctcaccttgttatcaagctctctgagtgcgcgtctatcaatggcgaaaaccaatattgggtcattcttcaataagttcctttctcttttcatccttcttctccaccttggttgcttcgttttcaccgccgctaaagacaaccataaagcaaccaagaaacgcaaatcctcacctctttctcctaactctcacaaacaccgcaaagctctttcctccacatggacttttctcaaacgcattttttcttctaaagccaactgcataaacaccatccaggccgcacaccctccaacatcagcaaccacacccgcgttaacctttgcaagaaactcccaacattcccttgtctccatgtccatgatcaatccacctgaaactcacctatcagacagccctcccccactttctcaaatacaatccgggtcttt

SEQ ID NO: 5400 - DNA, 441 bp, Gossypium hirsutum
  Clone ID: GOSHI-09MAY01-C14461_1
gcgcccttttttttttttttttttttatcggtcaatatagcttaattaatatcaaaatgggatggtctgcatatgcagtatgagtccagataaatattctggacaagcatcaatcttgatatatagcatcttacattaaacaatgtcaagaaacaaaattagtatgtggtctaatgctctcttagcaaactttagaaccccatatacaggatctggaaaccttaaaaattatggaaattgcaaagatttagtgtttttttttttgccatgtcatgagtactgtccaaaacagagtgcagctgcgtgtgtttgcatagcatgggcagaaagcagagagtgcaatgcaacaattcacgacctttttcgttcagtctatcgccttaatagaagccattaagctgctgccgcagcagactgaaacttcccaacaaatcacaatgc

SEQ ID NO: 5401 - DNA, 467 bp, Gossypium hirsutum
  Clone ID: GOSHI-09MAY01-C14791_2
tccgcgcgtccgggatgaggaagtttcagaaccctcaagtataaggaatcattgggccggcatctagaattctcgttatttgcaacaactaagcgaagcgagacaaaaatggcgacttcagccatgtcggaaaaacgggtcgtcctgctctgcggcgactatgccgaggactatgaggttatggtccctttccaggctctgttggcttatggtatatcaggggacgctgttcgtcccggcaagaaggccggcgaaacttgccgcaccgctattcatcaactttccggccatcagacctataccgagatccgtggtcacaatttcacactaaatgcatcatttgaagatatagaccatactaaatatgatggtttagttatagcccgaggacgagctcctgaatatctcgctatggatgcatttggattgaacatggttcgcaattttgttaattatggaaagcctgt

SEQ ID NO: 5402 - DNA, 1461 bp, Gossypium hirsutum
  Clone ID: GOSHI-09MAY01-C14791_1
cccagctccgaaatggtgggggggggaccctaatggccggcttcggccgctctcgttctgtccgaccactaagcgaagcgagacaaaaatggcgacttcagccatgtcggaaaaacgggtcgtcctgctctgcggcgactatgccgaggactatgaggttatggtccctttccaggctctgttggcttatggtatatcagtggacgctgtttgtcccggcaagaaggccggcgaaacttgccgcaccgctattcatcaactttccggccatcagacctataccgagatccgtggtcacaatttcacactaaatgcatcatttgaagatatagaccatactaaatatgatggtttagttatagccggaggacgagctcctgaatatcttgctatggatgcatttgtattgaacatggttcgcaattttgttaattctggaaagcctgttgcttcaatttgtcatggtcaattgatattagctgctgccggggcagttggtggtctaaaatgtactggtttccctgctgttggacctacacttattgctgctggtgcattgtggattgaacctgatactttggcagcttgtgttgttgatggtaatatcattactgctgctacttatattggtcatcccgagtttatcaggctgtttgtgaaagcattagggggcaccatatccaaatcgaacaaaaggatcctatttcttcgcgggcgccttatggaagattatgaagtaactgtgcctttccaatcacttcaagctctaggctgccgggtagatgcggtttgtcctaagaagaaggctggccattcgtgtccaactgctgtccatgatttcgaaggtgaccaaacttacagcgagaagccaggtcatgattttactctaacagccaactttgaggacatagatgcctcaagttatgatgctcttgtcatccctgggggtcgggcaccagaatatttagcgatagatgggaaagtgattgatatagcgaagcattttatggagtccgagaaaccggttgcatccatttgccatggacagcagattttagctgctgctggcgttctcaaggggaagaaatgtaccgcatacccagctgtgaaactgaacgtggtgttggccggagcaacttggttagaacctgagcctatagatcgatgcttcactcatggaaatttggttaccggagcagcttggccaggacaccctgagttcatttctcaattaatggatttgctgggtattaaggtttccttctagttgatctgctttacaagctctgtgcatgtgcaacgtggcaaatactgtaaaatctatatgaatgtgtgcaactggtatcttccctcgtttgtaacaggtttttctgtgtgccgaagagatggttatggttatggatgtttctagctttgtggaataaaaatgaaaaaaacatcttgatttgctattttgttcat

SEQ ID NO: 5403 - DNA, 1049 bp, Gossypium hirsutum
  Clone ID: GOSHI-09MAY01-C14741_1
cgatgaacatttccgttcgcgttcttccgactacgatgctactgttcctcaatctcctatcgttgtttttattaactctcgcagcggcggtcgccatggtccggtccttaaagagcgtctccagcagttaatcagcgaagagcaggtgttcgacctcctcgatgtgaaacctcatgaatttgtaaggtatggattggcttgccttgagaagtggggtaacaatggagatatctgtgcgaaagagacacgacggaacattagagttgtagttgctggaggtgatggtacagttggttgggttcttggatgtctcggagaacttcatcaaaaaggtcgagatccggttcctccagtagctgtgattccacttggtactggcaatgacttgtctagaagttatggttggggaggttcatttccttttgcttggaaatcggcaattaatggttctttgcaccgagctactaccggtccaatttgtcgtttagatagttggcatgttgtactgcaaatgcctggtggagaagttattgatcctccccattctttgaaagctactgaagattgtcattttgatcagactttggagattgatgggggcattcctgacaaagtgaactgctaccagggagttttctataattactttagcataggaatggatgcgcaagtggcttatggattccatcatttacgtaatgagaaaccttaccttgcgcaaggtcctatttcaaacaagattatctactccagttacagttgcactcagggctggtttctcacaccttgtgtgagtgatccaagtttaaggggactcaagaatgattttaaggatatatattaaaaaggccaggtgctcggaatgggagcaaattcccgtccctagaagtgtgagggcaattgttgctttaaatcttcataattacggaagtgggtcgatatccttggggtttgctaaaaccagagtatttggataagagaggctttgtggaggcccatgccgatgatgttctcctagaaaatttggattaaagcaagggtggaatgca

SEQ ID NO: 5404 - DNA, 723 bp, Gossypium hirsutum
  Clone ID: GOSHI-09MAY01-C14771_1
ccccgcgtccgcttaaaaacactggcgaataaaagctaagcttagagaaggaaactagggtttattttttgaggggtgaaggattggttggaatttgattgtttttcctaagagatgtacacaagttctatgcgaaaatctttcaaggattctcttaaagtgcttgaagctgatattcaacgtgctaataccctggcatcagattttccgagggaatatgatggtgcatgtcttcaaatgaggatgtcgtatagtccggccgcgcacctcttcttatttttggtgcagtggactgattttcaccttgcaggagcccttggattgttaagaatactaatttacaaggtttatgtggatggaactaccacgatgtctacacatgaaaggaaagcaagcatccgagaattctacactgttatctatccctctttgctgcaacttcagagcggtgtcactgatagtgaagagaaacaacagaaagcggcatgcgtggaaaggtatcgtagaagagaagatgaagagtataagcagcttaccgatattgatttcgaaagagaagaagaatgtggaatatgcatggaaacaaaccgtaaaatgttgctgccgaactgtaatcacaccatgtgcttgaaatggtatagggataggcggtcattatcatatttttgcccttttgtgttatgattgtattaaaaagtattttaattaggtgtttttttttgt

SEQ ID NO: 5405 - DNA, 458 bp, Gossypium hirsutum
  Clone ID: LIB3147-058-Q1-K1-G6
cggacgcgtgggcgagaattctacactgttatctatccctctttgctgcaacttgagagcggggtcactgatagtgaagataaacaacagaaagcggcatgcgtggaaaggtatcgtagaagagaagatgaagagtataagcagcttaccgatattgatttcgaaagagaagaagaatgtggaatatgcatggaaacaaacagtaaaatgttgctgccgaactgtaatcacaccatgtgcttgaaatgttatagggaatggcggtcaatatcacagtcatgccctttctgtcgtgatagtctcaaaagagttaactcgggggatctttgggtatatacagacagccgggatataatcgacatggccacagtgacaagggagaatcttagaaggcttttcatgtacatagataagttaccacttattatccctgataccatttttgatacttatgattc

SEQ ID NO: 5406 - DNA, 686 bp, Gossypium hirsutum
  Clone ID: GOSHI-09MAY01-C14661_1
gtgaaaaggtttaaccaggaagggttccaaggtcatagggagtggttggcggaggtgaattatctgggacagctttatcatcctcatcttgtgaaattgattggatattgcttagaggatgaacaccgtcttttggtgtatgaattcatgcctcgtggcagcttggagaatcatttattcagaagaggtacgtatttccagcctctttcatggagccttcggatgaaggttgctcttggtgcagcaaaggggctagcctttcttcacagtgctgaaacaaaagtgatctatcgagacttcaagacttccaatgtcttgcttgattcgaactacaatgcaaagctttctgatttctggctggccggggatgggccaacaggtgatcagagccatgtttctaccagggtcatggggacctatggatatgctgctcctgagtatttagccacaggtcatttgactgctaagagtgatgtctatagttttggagttgtgctgctggagatgttatctgggcgtagagcagttgacaagaatcgaccgtccggagaacacaacctggtggaatgggccaaaccatacctggccaacaaacgcaaaatattccgtgtcctagataaccgtcttgaaggccaatattcaatggaagcagccttcaaggccgcagcccttgctttacgatgctt

SEQ ID NO: 5407 - DNA, 1435 bp, Gossypium hirsutum
  Clone ID: GOSHI-09MAY01-C14611_1
atctctctcgctctgaaaacccgtacggattctcgaatggccaacaaatctgcttggtacctggaaaaaccaaagaaaatgaaaaggaatgcctgttgattgacgggaaatttttgttcctctaggctcgactttctgcatcatcaaaaggggagaaattagtcaggaaatgggggtatatctcagcaccccaaaaactgagaagttatcagaagatggtgaaaatgacaagcttcgatttggattgtcgtccatgcaaggatggcgtgcatctatggaagatgctcatgcagcatatctggatctggacgactcaacatcattttttggtgtttatgatggtcatggaggcaaagcagtggctaagttttgtgccaagcatcttcatcagcaggtgctcaagcatgaggcgtattcagctggagatattgggactccagtacagaaagcttttctcagaatggatgagatgatgtgtggacaaagaggatggagagaattagcagtcctgggagataaaatggacaaagtttctggtttttttgaagggtttgtatggtctcctaagggtgatgaagccaatgaccattttgatgattggcctcctgaggagggttctcactccgattttcatggacctacttctggatgcacagcctgtgttgcaataattcgaaacaagcaactagttgttgctaatgctggtgattcccgttgtgtaatatctagaaaggggcaggcatataatttgtctaaagatcacaagccagaccttgaactggagaaagataggattctgaaagccggtggttttattcaagtcggacgtgtcaatggaagtttaaacttggccagggctattggagatgcggagttcaaacagaacaaaagtttacctgctgaaaggcaaattgtaacagctaatccagacatcaacactgttgagatctgcgatgacgagcggccgcttgttttagcttgtgatgggatttgggactgtatgtcaagtcaacaactagtggattgggtacgagagcagttgaactctgaaactaaactttcagcaatctgtgagagagtattcgacaggtgcttggctccaacagctggtggggagggatgcgacaacatgacaatgattcttgttcagttcaaaaaacctgttggttcaggtacttctttgagcagcacccagcattgaaagatcgagcacccacgaaccaggtaaaacgtacatttggattttggaccttaagaagcattagtctcttctcccaagcaaacacgtaatgaatattacactttcttattatgtaagtgatttgcggtttatgatttgtaaatgatccaaggttttttatttcgcgactccgctatgtcgggtttttcattttgtaaatatggtggtaattggtatgtttttcctttgaaatgt

SEQ ID NO: 5408 - DNA, 499 bp, Gossypium hirsutum
  Clone ID: GOSHI-09MAY01-C14621_2
caaagattcttttcttcaaccaagtttcaaaattcaaggtctaatctaatctgtacgttttgcttcccatcgacgttcgacttccctgtaattcttgtaagatagtataggatggagaatatgcaatatgccgaggagcttgtgagggaatttttggtcttcagaggatttacaaatacattacaagcttttgagactgagagatgtacggatattggtaaaatgtttcaaggtgatgagatagtagacttgattttcgccgtatatattcctaaatttcatgccgagaaattagttgggttatttaggttctttaagcaatgcttttcgtcgtggtctgagactacgatgcttgatacgttctcgaaattggagggctctgttcttcggtgttacatcgttcatgcattgcaatctgggaggaaagataaagttgtggagttttttggaatgaatgggaatgatttgctgctaaagggttctgattggacagcttggt

SEQ ID NO: 5409 - DNA, 622 bp, Gossypium hirsutum
  Clone ID: GOSHI-09MAY01-C14621_1
aaacaagtagtacataaaaatcattgtttatttgtagcaccgaatccctaattaaattcccgtcgcggtatccaaagattcttttcttcaaccaagtttcaaaattcaaggcctaatctaatctgtacgttttgcttcccatcgacgttcgacttccctgtgatccttgtaagatagtataggatggaaaatctgcaatatgccgaggagcttgtgagggaatttttggtcttcagaggatttacaaatacattacaagcttttgagactgagagatggctctgttcttaagtgttacatagatcatgcattgcaatctggcaggaaagataaagttgtggagtttttcggaatgaatgggaatgatttgctgctaaagggttctgattggacagcttggtttgccattccttatgtgaacaaccctagcatcaatcctcagtttcgtgtatatttctccaaggaatggtatgaagctctccgtctttctgtgacgaactttttcagcgagatcttcaatgggactcttaatgatgggattttgacgaatgtccttaaccaaagcacgccttcctgccctactgaagatcagttcagaaaagatacaattagctggcttaag

SEQ ID NO: 5410 - DNA, 489 bp, Gossypium hirsutum
  Clone ID: GOSHI-09MAY01-C14191_1
accattgtcagtttcagagttgttattctttcaagtaagactctgatttctccaatagtggcaactgtatataatggcgatctggttgcaagacaatctgatctaaaacccattacctttccttcatccaccaccaaaagggtccccatcgtcaaatgcgaagcctcgttttccaccaccactactacagagctcgagcctgtcttcacctccgtcaagtccttcgctcccgccacggtagccaatctcggcccaggttttgacttcctcggcgcggccgttgatggcctaggcgacttcgtttccctcagcatcgacccttcgggcagccccggtcatgtcaccatctctgagatctctgggtcctctaaactctctcccaatcctctcttccactgcgccggcctcgctgccattggcactatgaaaatggtgcatgttcggtctttgggcccttcactccaactcctaaagggcttaccttcgggc

SEQ ID NO: 5411 - DNA, 490 bp, Gossypium hirsutum
  Clone ID: GOSHI-09MAY01-C14121_1
aaatactgtagtttaactttaattaagaaagagtttttttttttcctttggaaagttggttccttgtaattctctataaattcttggcagggccaatggatttagcccttcattttcttttcttccaggtacttgaggttggagaggtgaggatcattaaaagaaagaaacatccctgtctctctcttttgtacaaacatattgttgtcagctttcagtggctcaatattttgtattggttgggaattacggcctctccccatttagagacccaaaacagcaaacctgcttgaaacttgagccctccatcaccaacacaaaaaacagagttcctttaatcacctgggtcatgaagcagctcacttgctcaggttccctggatgctttgaatcccatcttttcaccaaaagaggagatgatttcaatgaagaagcaaatttatagcagggagttccaggcgatgttagatgggttagaagatgaagacagc

SEQ ID NO: 5412 - DNA, 463 bp, Gossypium hirsutum
  Clone ID: GOSHI-09MAY01-C14091_1
acattttcaaatttttcattgaccgagaggtatagggatggttctccaatggcaacccaaattgattgtaacaacgaggaaagcttctcatatgccctccaaatcgtcacctcttcagtgctgcccatgtcgatgcatgcggcggttcagctggacatcttcggaatcatggcgaaatgcgggccagacgctgagctctccgccaaggagatcgcggcacagttggctaccaacaactcagaggcggcctccatgctggaccgaatcctcttagtgttagccagccatggaatcgtgggctgctccgtggcggatgaggaaaagggtaatcctcgtaggctgtacagtttgacgcccgtctccaaattctttgtgcggaatgaagatggggtttccttaggccctttgatggcattgattcaagacaaggtcttcattgatagttggtcgcaactgaaggatg

SEQ ID NO: 5413 - DNA, 428 bp, Gossypium hirsutum
  Clone ID: uC-gsflmaxxa054a02b1
atttcttccaaatcgacacctcttcactgctgggggcgggaatgtatgcagctgggggggctggacatcttcggaatcatggcgaaatgcgggccagatgctgagctctccgccaaggagatcgcggcacaattggctaccaacaactcagaggcattctccatgcttgacccaatcctcatagtgctagccagccatggaatcgtgggctgctccatggcggatgaggaaaagggtaatccttccatgctgtacagtttgacgcccgtcctcaaattctttgtgcggaatgaaaaaggggtttccttaagcccttttgttggattgttcaagacaagggcttcattgatagttggtcgcaactgaaggatgctattataggatgaggagctccctttgacaaggttcatggaacaaacccatttgaa

SEQ ID NO: 5414 - DNA, 521 bp, Gossypium hirsutum
  Clone ID: GOSHI-09MAY01-C14011_2
acgggtgactcttaagaggtctcaccgaggctattaacactgacgggagtgtatgggttctggaagcacgtttccaaccttgaccgtcgcgagagccgccgttacctggagatgttttatgctcttaagtaccgcaagctggctgaatcggttcctctggcagaggagtaaaacaaaggaagaggcgggttttccctggaggatttttctgagttcttcacaataaaataataataatcttttgttgttttcatatttatggtcggacaagaaaaagcctcttttgtatctcttttcctttttttttctttttttttgttgttttatttttcccggcattgttagaacatggagggggtactgcgcccctggattccaacaaaagattgtgattcccctcattttcttttttttatttgtacgtgtctcccaagtcccaactagtgacgccacctggtatgactagacctgagttatgtcagtttcggctacgccatgataaattttaagatccttttaat

SEQ ID NO: 5415 - DNA, 848 bp, Gossypium hirsutum
  Clone ID: GOSHI-09MAY01-C14011_1
gctacctgcaaaggtggaccagctgaaatcattgtccacggtaaatctgggttcaacattgatccttaccatggtgatcaagctgcagaaatccttgttgatttcttcgacaaatgtaaaaaggaaccatctcactggaatgacatctctgagggtggcttgaaacgtatccaggagaaatacacatggcagatatattcggagaggctattaacattgacgggagtgtatggattctggaagcacgtttccaaccttgaccgtcgcgagagccgccgttacctggagatgttttacgctcttaagtaccgcaagctggctgaatcggttcctctggcagaggaggagtaaaacaaaggaagaggcgggttttccctggaggatttttctgagttcttcataataataataataataataataataataattatcttttgttgttttcatatttatggccggacaagaaaaagcctcttttgtatctcttttcctttttttgttgttttatttttcccggcattgttagaacatggagggggtactacgcccttggattccaacaaaagattgtgattttgttttcctttttttatttgtacgtgtctcccaagtcccaactagtgacgccacctggtatgactagacctgactatgagttatgtcagtttcggctacgccatgataaaattttagatccttttaatagttttgggtttggttggacttaaaagttgggattaaaattttttctaaactcgacttgaataaaaatgttaaaatttaaatttaatctggttttattaaattttttatattattttataaaaaatataatacattaaaaa

SEQ ID NO: 5416 - DNA, 526 bp, Gossypium hirsutum
  Clone ID: GOSHI-09MAY01-C14341_2
cccacgcgtccgagcccgagttccatgaagcaagttagcgttgtttgggatgcctatgcggcaacaaaggatgctcatgggatttgcattctgacagagtgggatgagtttaaaaccctggattaccagaagatttatgataacatgcagaagcctgcattcgtcttcgatggccggaacatcgtggatgtagctaagctgagggaaatcgggtttattgtctactccattggaaagccattggatgaatggctaaaggacatgccagcggtggcataagactgtattctggaccatggttgagctacaactttataatctcgaggaaaacattatccgatagtatactttataacattcatttcttttagaattaagattatgggatttcaacttatattggattacttgggagagctgaaacattagtgtctggatctgtccttagccgccacagtatctgctttgttattagtttaatataataaaacatttaccatttaattttataccacactttacctta

SEQ ID NO: 5417 - DNA, 709 bp, Gossypium hirsutum
  Clone ID: GOSHI-09MAY01-C14341_1
ctccgccttcttcaaggaattttaactctcaattcgatagctcatcaaagaattggaattggttcctagttgaaggtggtgaaatcggatatgcagagccagcttatctgtactgggtgtcggagcattcttctttatcctagaggtgctaccagtgtttgctgtgcattatgcaatacaattactccccctgggatggaaatggctcaactcatatgtggaggttgtcgaacattgctaatgtatacacgtggagcagcaagtataagatgctcttgctgtcacaccattaatgttgcaccagcatccaaccagatttctcacatcacttgcgggcactgccgtacaactttaatgtatccatatggagctccatcagtcaaatgtgctgtctgtcaatatgttactaatgttggtatgggcaatgtaagggttccccttcccgtaaacagacctaatgggaaagctgccacagggtctatggctacgccatctgcttcgccaagccaaactgttgttgttgagaaccccatgtctgttgacgagagtgggaaattggtgagcaatgtcgtggttggcataacaactggcaaaaaaatgaataatccagtgtgatacttgagtttgattggtgaggaattgattgtgtatatgaagtttgaactggcaaaaccattagcattgtattcgaagggataagcgtgatgta

SEQ ID NO: 5418 - DNA, 561 bp, Gossypium hirsutum
  unsure (1)..(561): unsure at all n locations
  Clone ID: uC-gsflmaxxa091f04b1
cggttgtgtgggatttcaaaaaggaaaagaaaagggggcatatttttgaatttcgtggatctcatcgcatcgnattttgcaaaaatatcacagcatctaatttccttttgaataacatattaataatttatttttcttatattcaattcctccgccttcttcaaggaattttaactctcaattcgatagctcatcaaagaattggaattggttcctagttgaaggtggtgaaatcggatatgcagagccagcttatctgtactgggtgtcggagcattcttctttatcctagaggtgctaccagtgtttgctgtgcattatgcaatacaattactccccctgggatggaaatggctcaactcatatgtggaggttgtcgaacattatccaatagtatactttataacattcatttcttttagaattaagattatggtatttcaacttatattggattacttgggagttgaaacatgagtgtctggatctgtccttagccgccacaggatctgctgtgctattagtttaaaataataaaacatttaccattttattttaaaa

SEQ ID NO: 5419 - DNA, 807 bp, Gossypium hirsutum
  Clone ID: GOSHI-09MAY01-C14371_1
cccagcgtccgccccgcgtccggtactttagaaaaaaagatctactgcgtctccaaaggcccttcgatcgttagccaccaggaaaaccctaaccttggctctcaactccaccaggctggctcagtctcgagccttgcagaccttctcgctccccgatcttccgtacgactatggcgcactcgagcccgccatcagtggagagatcatgcagctccatcaccagaagcatcaccaaacttacatcactaactataacaaggctttggagcagctccatgacgctatccagaaaggagattcttccaccgtcgttaagttgcaaagcgccatcaagttcaacggcggaggtcatatcaaccactcaattttttggaagaatcttgcccctattcgtgaaggaggaggtgagcctccacatggttctttgggttgggccattgataccaactttggttcattggaatcattgattcagaagatgaatgctgagggtgctgctttgcaaggctctggttgggtgtggcttggactggacaaggagttgaagaagcttgtggtcgaaaccactgcaaatcaggatccacttgtgaccaacgggccaaatttagttcccttgcttgggatagatgtttgggagctgccatatctccgtccggacgtggacagatacttgagacgtatgaggcataaatgaaattgcagtaatgtcgaaaagagttctgaggtgtgaagaataaagcacttgcgagtgtgcaaaaatccggaaatatgtggtgtgagatattagccatgtaaaaaaaaaaaaaa

SEQ ID NO: 5420 - DNA, 536 bp, Gossypium hirsutum
  Clone ID: LIB3582-033-P1-K1-F4
ggaaaaccctaaccttggctctcaactccaccaggctggctcagtctcgagccttgcagacctgctcgctccccgatcttccgtacgactatggcgcactcgagcccgccatcagtggagagatcatgcagctccatcaccagaagcatcaccaaacttacatcactaactataacaaggctttggagcagctccatgacgctatccagaaaggagattcttccaccgtcgttaagttgcaaagcgccatcaagttcaacggcggaggtcatatcaaccactcaattttttggaagaatcttgcccctattcgtgaaggaggaggtgagcctccacatggttctttgggttgggccattgataccaactttggttcattggaatcattgattcagaagatgaatgctgagggtgctgctttgcaaggctctggttgggtggtcagtgattttgtttgctaagggttcacttgattttttggttccttgggcatccagtcataaatggtttgcatccgtatttgcttactcttactt

SEQ ID NO: 5421 - DNA, 818 bp, Gossypium hirsutum
  Clone ID: GOSHI-09MAY01-C14281_1
cggccgcgtgggttgaagagctacgcctaccagcaaccaactgcgtttaaatctttgtttttttattgctaaatataattgtttgatcgatccgcttgtttacgtttaccttcagctttgccttttccgtcatcgctttgaaaaatcactttcatctcatcgaaacttcctcaacatttcttctccttttcttttcactccccactccccacattggctctctctgcatcttaaagattcttagtttctgctgtgaaatatcacttcttgagaatggcagctacagcagcttctggccttcaactagcttcagcaagaccctgcattgcatcttctcgcagggtatttaaggctggtgctgccagtctagatgtcaattccaaagctgtgtcatggactaagctagctagtgcttgccatttatcacaatctttggagcctttccggcgcagttttgcatcgtcttcggtaaagtttaacaaagttgtgacaaaggcaatgtctgaatctagtgaaaataagccggtttctgggttgccaattgacttgaaaggtaagagggcatttattgctggtgtagctgatgacaatggatatggctgggcaatagcgaaatctcttgctgctgcaggtgctgaaattctagttgggacctggtgcctgctttgacatatttgaaaccaactgccacgttgaagttcgatgaatctcgattattgccaatggctcttattgagattaccaagttaatccctgatgcagcttgacaaccctgtgagtcctgagatttaaacaaatacgattgcagactgcaatgg

SEQ ID NO: 5422 - DNA, 362 bp, Gossypium hirsutum
  Clone ID: LIB3189-033-P1-K1-C11
cggacgcgtgggcggacgcgtgggcggacgcgtgggcaaagttgtgataaaggcaatgtctgaggctagtgaaaataaaccggtttctgggttgccaattgacttgaaaggtaagagggcatttattgctggtgtagctgatgacaatggatatggctgggcaatagcgaaatctcttgctgctgcaggtgctgaaattctagttgggacatgggtgcctgctttgaacatatttgaaaccagcttgcgacgtggaaagttcgataaatctcgagtattgcccgatggctctttaatggagattaccaaagtatattccctagatgcaatctttgacaaccctgatgatgtacctggagata

SEQ ID NO: 5423 - DNA, 789 bp, Gossypium hirsutum
  Clone ID: GOSHI-09MAY01-C14261_2
cccacgcgtccgatcacaaaaacacctattctcttgagtaactgtaacaaaattcagcaaatatggaagccaacaggggccagaacggtattcaacagctgctagctgcggaacaagatgctcagcatattgtcaatgctgcaagaaatgcaaaaatggctagactgaaacaggccaaggaagaggcagagaaagagattgctgaatatcgtgctcaagtagagtatgagttcaagaagaaggtggcggagagtagcggatactcgggggctaatgtgaagcggctcgagacggaaacagatgcaaagatcaatcacttgaaaaacgaagctgcaaggatatctcatgatgttgtacagatgcttttgaagaatgtgacaactgtgaggaactagggggtcttccatgaagactgatggtttaattttctactacattctatcaattcccaaaactcagctcatgcttgggaacaattttatgtcattattttatcatttgttgttatttttgtttgtgccatgttcctgttctgaaataaactccaatgtgtgccttctagaaatggtttctcttagtatttcttggaacttgatctgaattcttgatgagtcttgatctcagctcaatattgtttaatggattcattttgtctctctcctaaaaaaaaaaataaacaaaaaaaaaaaaaaaaaaaaaaagacaaacgttttagaggatcaaagtttaatccgcttgcctggcacggtcaaagcaaattataaaaaaaaaaaaaaaaaaaggggggcc

SEQ ID NO: 5424 - DNA, 774 bp, Gossypium hirsutum
  Clone ID: GOSHI-09MAY01-C14261_1
gaaagatacacctattgcgtcggttgaagatccattcgaccaagatgactggagctcatgggcttcgcttcagtcttccatcgatatccaactcgttggagatgatttgttagtcacaaatccaaagaggatatcggaagctattcaaaagaaggcttgcaatgccttgcttcttaaggttaaccagattggaacagttaccgaatctattcaagcagcacttgactcaaaagctgcaggatggggagtgatggtcagccaccgaagtggtgaaacagaggataacttcatcgctgacctttctgttggtttagctagtggccagatcaagactggagctccttgtagaagtgagaggttggccaagtacaaccagcttcttcgcattgaagacgaactcggaaatgtctgctatgctggtgaagctttcagatctccttagagggttaacttacaggaacaagtttctgcaccaaattagtatggagaaacgttttaacgagctctagtaaactgaggccgacctatagaaattttcaggaaccctaagagcttctcaagggaaaaaaacataatttgatcaactaggatagatttcagtttgtgggatctgaataatcaagttttggtataagttgtatttggagtgttgaatgaagactttgattagatgtgattctctgtaattctgctgaaccttagtaaagaggtattcaaaaataaatatatgttgtgatgttgtgtttttcaaaaaaaaaaaaaaaaaattctgcg

SEQ ID NO: 5425 - DNA, 517 bp, Gossypium hirsutum
  unsure (1)..(517): unsure at all n locations
  Clone ID: uC-gsflnu33B062d06b1
gccacgcggtccgcaacatactagctatggaaacctacaaactcatttctatccttctttccttcgcaattattgcattctccacttctgcaagaatgcttgatgagcaaccctcgaatccggtcgtgccacctgttgctacggccaccccaatagtcccacagcctaatcctactggagccgttgttggcaaccctgntgtggctgcaggtgcagccactggtcctattcccacaggaaccactgttgggaacccaggtgtaggtgctgcagccagtggtcccattcccacaggacccaatgttgccaactctggtgctggtgcagccactgctgaccaccccttgatcttcttcatgcatgatatcctaaggtgggtcaaaccccactgctatagcaatcactgggtgtggtcaacaaccctgcagtcaacggtcaacttgcattccccaaaccaaatggtgctaaccttccggtcaacaatggggtagacgaaaatagcggcaacaatggtttc

SEQ ID NO: 5426 - DNA, 457 bp, Gossypium hirsutum
  Clone ID: uC-gsflnu33B062d11b1
tttcccacttgttcgcaacatactagctttggaaacctacaaactcatttctatccttctttccttcgcaattattgcattctccacttttgcaagaatgcttgatgagcaaccctcgaatcctggtcgaagccactctgctggtaccgggcaccccaaatagtcccacagcctaatcctactggagccgttgcaagtagactatgagtggaagaagaaggtggcactgagtactatgatactcgggggctaatgtgaagcggctcgagactgaaacagatgcaaagatcaatcacttgaaaaacgaagctgcaaggatatctcagtgatgttgcacacacgctttagaacactgtgacaactgttatgcactgatatgctatgtggtgcagaccgcactgctattgcaatcactgcgtgggtcaacaacccctgctgtcaacggatgcttaggaac

SEQ ID NO: 5427 - DNA, 463 bp, Gossypium hirsutum
  Clone ID: LIB3147-027-Q1-K1-D12
ggaacttggaaatgtccgctatgctggtgttgctttcagatctccttagaggagttaacttacaggaacaagatgctcagcatattgtcaatgctgcaagaaatgcaaaaatggctagactgaaacaggccaaggaagaggcagagaaagagattgctgaatatcgtgctcaagtagagtatgagttcaagaagaaggtggcggagagtagcggatactcgggggctaatgtgaagcggctcgagacggaaacagatgcaaagatcaatcacttgaaaaacgaagctgcaaggatatctcatgatgttgtacagatgcttttgaagaatgtgacaactgtgaggaactagggggtcttccatgaagactgatggtttaattttctactacattctatcaattcccaaaactcagctcatgcttggaacaattttatgtcattattttatcatttggtgttatt

SEQ ID NO: 5428 - DNA, 442 bp, Gossypium hirsutum
  Clone ID: LIB3148-036-Q1-K1-G7
cccacgcgtccgagagggttaacttacaggaacaagtttctgcaccaaattagtatggagaaacgttttaacgagctctagtaaactgaggccgacctatagaaattttcaggaaccctaagagcttctcaagggaaaaaaacataatttgatcaactaggatagatttcagtttgtgggatctgaataatcaagttttggtataagttgtatttggagtgttgaatgaagactttgattagatgtgattctctgtaattctgctgaaccttagtaaagaggtattcaaaatttaaaaagtaaaaaatgattttgaagaagattgtacaaaaatggaacgaaaatatgattaaaatgttccgataggtttaaattttttctttaatcaagagcttgtaatataaaaaaaagcctattttttgttgaatgttaataacattgg

SEQ ID NO: 5429 - DNA, 366 bp, Gossypium hirsutum
  Clone ID: LIB3196-039-P1-M1-H11
caaaaacacctattctcttgagtaactgtaacaaaattcagcaaatatggaagccaacaggggccagaacggtattcaacagctgctagctgcggaacaagatgctcagcatattgtcaatgctgcaagaaatgcaaaaatggctagactgaaacaggccaaggaagaggcagagaaagagattgctgaatatcgtgctcaagtagagtatgagttcaagaagaaagtggcggaggcgatagacttgcttcgagacccagttatccttgattacaatatgagctaaaccattaaccatgtttgtggattatcagagtagcggatactcgggggctaatgtgaagcggctcgagacggaaacagatg

SEQ ID NO: 5430 - DNA, 279 bp, Gossypium hirsutum
  Clone ID: LIB3135-012-Q1-K1-E8
ctcggattgtaatttcggggtgggcgtacgcgtgcgcccacgcgtccggccgacctttagaaattttcaggaaccctaagagcttctcaagggaaaaaaacataatttgatcatctaggatagattttagtttgtgggatctgaataatcaagttttggtataagttgtatttgcagtgttgaatgaagactttgattagatgtgattctctgtaattctgctgaaccttgtaaagaggtattcaaaaataaatatatgtttggatgttggtgtttttt

SEQ ID NO: 5431 - DNA, 209 bp, Gossypium hirsutum
  Clone ID: uC-gsflnu33B112c04b1
cccactcgtccgctccaatgtgtgccttctagaaatggtttctcttagtatttcttggaacttgatttgaattcttgatgagtcttgatctcagctcaatattgcttaatggatccattctgtctctctcctcatcaaacaagccaaggctagttatcaaccctctacttcaactcccacagctaacacacagagctcggggggaccca

SEQ ID NO: 5432 - DNA, 291 bp, Gossypium hirsutum
  Clone ID: GOSHI-09MAY01-C15991_1
gaaggctacgcgcgtgccaaacaccttcctttttcttttttcaccgaacaacctaaaagaaaaaacgagagaagaagaagaaaactttgaactttcgcttcgacgattccacactggtactctcaacctcaagtgcctcactcaaacataaaagactcaaatcggatctatttattttaaaagcataccttgttttctttgaattattattattaatttggtttctcagatatttgattgaaatggagttgttagatggaaacttagagctcaaagagattcaaaagcttc

SEQ ID NO: 5433 - DNA, 654 bp, Gossypium hirsutum
  Clone ID: GOSHI-09MAY01-C15971_1
ccgcaatgtgtaatgaacgtaaatgagttgcgaatataaatatatggaccgttggatatacatacttggggcacatcgatccaactaaaggaatgagcttggtcaatgttcatggctgccattttgatcacataaaacaattcagaaactgaagcattatccttgaggtatcatgttggggctcacatagattgactaatctgttatctgtatattttgtaggcgatggattttgtctagctctaaattagaacatttgcctacaagttcaatcatttgttgattttaaactctgaattattgttgatttagactagactattcgactttgtgaaattgaattttggacttttgaaacttgattggaatttgggctaatttgctaaaaaaaattaaattaggttggtggatttgtcaccatttaagttttttatagatcatttactatcattttgtccaacatcaagactacaatattctggtaaatttgacatgcatcattcatttaaatcgtcttccttttccttctaaactttctcaaatcactctctgacatcagatttcaactttgtcttactctaacatctcctctccagtataaataagtgattttatgatgcttattcactaaggtctgagaaaacgggtgcatgc

SEQ ID NO: 5434 - DNA, 903 bp, Gossypium hirsutum
  Clone ID: GOSHI-09MAY01-C15911_1
cccacgcgtacgcaaaacctgtcggacaaacaagcggaagcaaagcagagactgagacaaagaatcccataccaacagctgcatcctgagccaatggcgtcaacaattctaaggcgagcaacctcatccgttatcaagtcaagtcttctaacggaagcgtcaaggagaagctatgcctcggttgctgtggggactgacattctgtctgccgcatcccaagttagtctccagaaagctcgaagctgggatgaaggcgttacctccaatttctccactacttctgtcaatgacatcttcaagggcaagaaagttgtcatctttggactacctggagcatacacaggtgtttgttcacaacagcatgtgcctagttacaagaagaacatcgataagttcaaggctaaaagaattgattcagtcatttgtgttgccattaatgatccttatgttatgaatgcctgggcagacaaactgcaagccaaagatgtgattgaattttatggggactttgatgggagcttccacaagagcctggaattgggaaaagatctctctgctgctttgcttgggcctcgctctgaaagatggtcagcctacgtggtcgatggaaaggtgaaagctctgaatgtggagggtgcgccatctgacttcaaggtttctggtgccgaggttattttggagcagatataaagagggtatggtatcttttgtttattccactcccaagaggtacgggggctctttgaggtaggaaaataaaatggttaagagcacttaataagtgtgtaggtttaaaacctatgttgttactgctttaagttttcaatgtttactgcttagagaacaaagtaaccgcacattgtatgaaaaccttatgaatttggtgaagagaggtctcctatt

SEQ ID NO: 5435 - DNA, 322 bp, Gossypium hirsutum
  Clone ID: LIB3584-002-P1-K1-C12
gctcgaagctgggatgaaggcgttacctccaatttctccactacttctgtcaatgacatctgcaaggtttcgttgtatagtttctctttcaatattatttaattcagtatgtattaattttgttttagaatttttcatttcagggcaagaaagttgtcatctttggactacctggagcatacacaggtgtttgttcacaacagcatgtgcctagttacaagaagaacatcgataagttcaaggctaaaagaattgattcagtcatttgtgttgccattaatgatccttatgctatgaatggctcggcagacaaactgcaagc

SEQ ID NO: 5436 - DNA, 958 bp, Gossypium hirsutum
  Clone ID: GOSHI-09MAY01-C15851_1
cccacgcgtccgcccacgcgtccgatgagctcggtaaggaatgcaaattccttgaaagtacaagaaattccaaagccatggaggtagaagagctggaaagaagtgttagaagcttggaatgtgagaatggaggacttaaagctcagttggcagcatatgttcctgcaattgtttctctcttggatagcgtgacatctttggagagccgaactcttatgcatcctaaacttcctacagattataatgaagaggaccccaatctggggactgaatttcatgctgaaaactgtcaaccaacaagtgaaggtcaaattggcttggttccaaatgccttttccgacttgcagggtatccatatgagaattaaagctattgaaaaagcagttctggaaatggaaaagcttgcaatgctggagaacttaaatctcaattccaaactagagactgcaacaagacagattgaggaattaagatatggaagcagctctagtggagaaagtgttagagcaaagaggcacgtaagtgctagacaagaagaggaggaacttggcaatgggctcagtaacaatgtcaacatgcagagaccaacacctgaaatatctgaagaaaatgagatgatgacaaaagacattatacttgatcaggtatctgagtgctcgtcttatgggttaagcaggagaggaactgctgcagaggttgatactgagacgcttgagttgtgggaaactgctgaccatgatgctaatgccgacctgaaagtcagcaaggcccagaagatggccactgcaccaactgactaccgacagattggaactgtgaaggcaggcaagagcagaactccctctacagaatctcttgtgaaggagttgggtgtagataaagagagctcgaagagatttgcagagcccaacaataacggaagcaagaggaagattttagaaagacttgattctgatgt

SEQ ID NO: 5437 - DNA, 458 bp, Gossypium hirsutum
  Clone ID: GOSHI-09MAY01-C15811_2
aaaaaataccccaaaccatcaagcaaaatcatatagccgctccttttcgcgctttctctctctctctgaaagtttcagctctagagcctctggcttcctcttctccttctttttgcttaccagataatgtaaaagaatataacaaagcttttcccatttataagcccaaaaggagcctttctttcttgtccttgaaaaagaatggctttgagtaggttctggcgttggcttcttatccacattgctctgtttttaagctcgcgttatgctgaggatccactcgctttctatgctctcgaggtcacttacatcactgcttctcctttgcgtgttccccaacaggttattgctatagataacacgttccctggccctactatcaactcaactaccaacaacaatcgccgtcgtcaatgttcgaaacaaattggacgaaagattacttatgcattggtctg

SEQ ID NO: 5438 - DNA, 762 bp, Gossypium hirsutum
  Clone ID: GOSHI-09MAY01-C15811_1
gctttcttcttctcctctatcttttgcctatcagatcatgtaaagctcagtagaggtgtagctgagttttccctctaaaaattttgtaatacaagcccaaaagattccttttttctttgaaaaatggctttgagtaggttctggggtcggtttcttatccacattgctctgctttcgagctcgtgttttgctgcggatccgtttgtcttctatgattttgaggtctcttacatcactgcttctcctttgggtgttcctcaacaggttattgctataaataacaagtttcctggcccaactatcaattcaactactaacaacaacgtcgtcatcaatgttcgaaacaaattggacgaaagtttactcctacattggtctgggattcaacagaggcgtagttcatggcaagatggggttcctggcactaattgtcctattccccctaagtggaactggacttaccagttccaagttaaggaccaaattgggagtttcttctacttcccatcactgcacttccagcgtgcggctggtggttttggcggctttatcataaacaatagagatattatacctattccgtttggctcccctgatggagacattacaattttgattggtgattggtacacacgcaaccacacggctttgagaaaggcacttgatgctggaaaagatcttgggatgccggatggagttcttataaacggcaaaggcccttaccaatataatgacactcttgtacctgatggcattgattat

SEQ ID NO: 5439 - DNA, 477 bp, Gossypium hirsutum
  Clone ID: GOSHI-09MAY01-C15801_1
cccacgcgtccgcccacgcgtccggagaattccctgttttcatttcttgtttaacaccaccacctccgtgcgcaactcagcttctacacgccggctactcacttcaacaaattcttttgaattgtttcttacgaatcgagtttgattttcttggaagtcgaaaatacgatggggtcggagctgatttatagaggctctgagacccagccttcttcagattcatattcgcccaaacccgtaaaaccatgggcctccgtcacccgccccatccattacctcctccgtgaacaacgcctcctcttcgtcttcgtcggcattgcgatcgccaccctgattttcaccgtcttcccaacttcacccgctccgtacgtcgctcctcattagccgcttcaccaccctgatccccgattccatcacctacttccccatcgagacccaacagaagttctcctccgcgcaccggcttcggttcgggtc

SEQ ID NO: 5440 - DNA, 669 bp, Gossypium hirsutum
  Clone ID: GOSHI-09MAY01-C15821_1
atcaagttttatccaatcgttcgtctctatggcttttcctctctttctggtgaagaagagagtgaacaaaatggagatggttaagtgttttatgattgtcctgattcttggtctttgccacgtgcccatggctgcaccattggaggagaagaagagtcacagaaagacttacatcgtgcacatggctaaatccgagatgcctccgagtttccagcaccatactcactggtatgactcctctttgaagtcagtttccggctcggctgcaatgctctatacctacgacaacgttatccatggattctctactcagttaactgatgaagaagctgagcaactcgagagccaaccagggatcctcgcggttttacccgaggtaagatacgagttacacacgactcgtacacctgagttccttggactcagtcaagctgctgctttgttccctgagtctgagtcggcgagtgaagttgttattggtgtgttggatactggtgtttggcctgagagcaagagctttgctgatacggggcttggaccaataccaagcagctggaaaggcgcgtgcgaatcaggcaccaattttacctccgcaaattgcaataaaaaattgataggtgcgaggtactttgctaaggggtatgaggctgccttgggtgcaattgacga

SEQ ID NO: 5441 - DNA, 591 bp, Gossypium hirsutum
  Clone ID: GOSHI-09MAY01-C115599_1
tgttcacgcgtccggtgctagttgacaaggatcttaagaacaactacgaccggatcgagctcgaagagatggttcaagtagcattgttatgcacacaataccttccaggccataggccgaaaatgtcggaagtggtccgaatgcttggaggtgacggcttagcggaacgatgggaagcttcacacagagccgaatcaaccaaatgcaagcctcctcatgaattctcatcgtcggaccgatattccgatctcaccgacgactcatcattactcgttcaagccatggaactgtctggaccaaggtgaagcagaaccaaccccttataaaacgtaactataaatcttttcttcttttctttccggagatttcagtgagacttagaaaattatagctaaaactcctatagctgcataatagcgggatagcataagatcaaagggctttgatttttttggctttggttttttactacaagtgtacagattttatgtctaagaagacattattgaagatctgagaggcctgagtgtggattaatagcgagagacggaacttctttcaatggggggcttgggatggtaattttaaaaa

SEQ ID NO: 5442 - DNA, 1123 bp, Gossypium hirsutum
  Clone ID: GOSHI-09MAY01-C15571_1
gggatggtggcgcgggggaggtaaaaaagcctaattatcttacatcgtccgccgtccgattcgacaccgacggtaccgcattgacgcggctgagtaccgcgcgatccttaagaacaagctccatcaagcctgcgctgctgttgctctctctcgtgcgatcggattgtgaaggcagcaaggttacgtactgcgccaagctgaaaaatcaagcgcttccgtctggtgatccgatgttcgaggctcctcaaagacacaggaacagggggaacctgatgctggtattgcggctgtttcaactacacaaaaaaaaccagggacacaaatgaggcaagccacaagtgggtcatcaagagaagattcagatgatggtgaacttgaaggagatactgaaaccactgaaaacatggatccagctgatgcaaagcgtgctaggagaatgcggtcaaatcgagaatcagccagacgctctagaagaagaaagcaagcacaaatgaatgaacttgaaacacaggttggtcaattaagagctgagcattcctcattacttaagcgtctaactgacatgaatcacaagtatgatgaagctgccgttgacaatagaattctgaaggctgatattgagacattaagagcaaaggtcaaaatggctgaagaaacatttaagcgggtgactggcattaaccccgttcttctatctaggcccagtgtacctagtgtaaccgtgccttttgttagcagcccattggaatcatccacaggttccgtgccattgccgccggacactaataagttatttcaccaaccagttcctaacattgctgctcccatccatcacccgagactagacaacagtttcacaggcaacaacctggttactcctatcgtgaatccacaaaccgaaataggagtggaaaatgttaacgaaacatctgcattgcagcatacgccgagaggcgtgcaaaagcagattggccctggtgtgagtccatgcgtacccatgcctggctgggaacctggactaccccatggggctgccacgaacaacaagcaaagctaaatattagctttagctgtttggtacgaactattggttgaaatctattcatgggcattgatcattctc

SEQ ID NO: 5443 - DNA, 446 bp, Gossypium hirsutum
  Clone ID: LIB3197-008-P1-M1-E6
cggacgcgtggggtactggacatgtccagcactgacacactgttacttctatggtcaaaatggctgaagaaacagttaagcgagtgactggccttaaccccgttcttctatctaggcccagtgtacctagtgtacccgtgccttttgttagcagcccattggaatcatccacaggttccatgccattgccgccgaacactagtaagctatttcaccaaccagttcctgacattgctgctcccatccatcacccgagactagacaacagtttcacaggcaacaacctggttactcctatcgtgaatccacaaaccgaaataggagtggaaaatgttaacaaaacatctgcattgcagcatacgccgagaggcgtgcaaaagcagattggcccttgtgtgagtccatgcgtgcccatgcctggctgggaacccggactaccccatggg

SEQ ID NO: 5444 - DNA, 538 bp, Gossypium hirsutum
  Clone ID: GOSHI-09MAY01-C15511_1
aaaagagggaaggaaggtaggaaggaaggaaggaaagaattaataaaataaaataaaagaaaatcgcagatcagacagagaaaaaccctaacctaaatctaaatgggtaagaagaagaaaagagttccgtcaaaggtatggtgttactattgcgacagggaattcgatgacgagaagatcctggtgcagcaccagaaagccaagcacttcaagtgccatgtctgccacaagaagctctccaccgccggtggtatggccatccacgttcttcaggttcacaaggagtccgtcaccaaggttcctaatgcaaaacctggcagagaatcgactgacattgaaatatacggaatgcaaggaatcccgcctgatgtgctggctgctcactatggagaagaagaagaagaagctccatcaaaagcggccaaactggatatcccatctactcagcttgtgggaggattgatgccagggccacttggtgttggatatcctcctcagtcaactttaggagcagtgcagccaatgtataatgctgcag

SEQ ID NO: 5445 - DNA, 539 bp, Gossypium hirsutum
  Clone ID: GOSHI-09MAY01-C15491_5
gctttatggagatattggcgacacttcaatcttgtggatgccattcccaatccgtcgaaagaacaactagtcgatattgttcaaaggcatttcatgtcacagcaaatggatgagctgcaggtgattgtgggattcgttcaggctgctaagaggttgaagaccgtttgcaaatgaacctcagacgatccaatgctaccagatactcagtatcggaatatcctcttccccccccccccgggggtacattcgttagtgatatctgtaacatatgtattcgtggatcatttatccttctcgttcttaattaagtaggtttagtattcgagttcaagttaatagagaggttcagttccattttggtagaatggtttaatgtagatataatccaaaacctgttttacagagaccctctaaagaagtcccctttgtggcttcttttctaaaagcttttgcttgaatgtatctctgacttggggaagtggatttcttgaattgtatatattcttatttattaaaaaaaaacaataaaaaaaaagaaa

SEQ ID NO: 5446 - DNA, 542 bp, Gossypium hirsutum
  Clone ID: GOSHI-09MAY01-C15491_3
ggataaaaataaagcaatttatttgagcaacactcttctgacaaccatttaggaaggagcaagaaaggaagaggcagaaaagggctcttctagtgatttaatgttgtacatttacaaaaaggagcttcaggtcattgtgggatttgttcaggctgcaaagagattgaagaccgtctgcaaatgaccctgatgagaatgttcagacgggttttgagttgggttgtcaatgctaacagaaacttggtatcctaatgtccttgtcccttagtagctatatctgtaatatatatatatgtatgtatgtacttgtggcttgtttatctttgcagtcccgctgttgagtaggttaatatttacttgaagctatagaggttctttcttcctttttggtagattagttatatgtagatatgatccaaaactgagttacaagagctctaagaaatccttgtgacttcctctctatgtactgcagacttggtgaagtggttttcttaagatgtaaaaaaaaaaaaaaaaaaaaaaaaaaaaaaagggcggcc

SEQ ID NO: 5447 - DNA, 657 bp, Gossypium hirsutum
  Clone ID: GOSHI-09MAY01-C15491_2
atttgttttttttttctctcactaaggaaaaaaacaccttttttctctttcaaaaggacagtttttttttcttacacacacaacaaaattccaataaattcccttaatttctcttagtttttgcttacgaaaatactttatacgtattcaccaatgcatgatctttcgatccaatgtaatttcgacccataaaacacgcttgatttgactcactgagttggagaaaaaattatgatagaagcaatggagagttccgtcgtcaatggcagtggtttcactcagttacaacagagctatggagatagtagtgaagaagagctatcggtgttgccacgtcacactaaagtggttgtcactgggaataaccgtaccaaatcggttcttgttggtcttcaaggtgtggttaagaaagctgttggacttggtggatggcattggctggttcttacatatggcattgaagtaaagctacaacgaaatgccctcagcgtaatcgaagctcccaccggtaacgaagaagatgatgaccttgagtttgggaacatgcaatggaacggatcagacttggcatcggatgacactcaaaagtcccatagatcaagacataagtcgcataaatcgacggggtcttctcacaaaactacgagcaggtctctt

SEQ ID NO: 5448 - DNA, 1768 bp, Gossypium hirsutum
  Clone ID: GOSHI-09MAY01-C15491_1
tgttttctctctctctcgcgctctctctctctctctctctctctctctatttcttctccacaaaaatcccatatttttttcttaatctctctctcctttgcttacgataataacatatacgtattcaccaatgcatgatcttccgatccaatgtaattttgatccttagctttgaattttttaccgagtttgacccacctgattgactcactgagttggggcttctttttgttggagaaactatgttggaggcaatggagagttccgtcaatggcgggggtttctcgcagtttcagagctgcggagacagtagtgaagaagagctctcggttctgccacgtcatactaaggtggttgtcaccgggaataaccgtactaaatctgtgctcgttggtcttcaaggcgtggtcaagaaggctgttggacttggcgggtggcattggctggttcttaccaatggcatagaagtaaagctacagagaaatgcacttagcgtgatcgaagctcctaccggcaatgaagaagatgacgaccttgaattcgaaaacatgcagtggaatggatcagacatggcatctgatgacactcaaaagtcccacagatcgaggcataagtcgcataaatcgacggggtcttctcacaagactacgagcaggtctttttcctgtgactcacagtctaagagttctgtttcgacaccccaggggtccacgaaagttgacctcagcaaacttgagatggctgctttgtggagatattggcgacacttcaatcttgtggatgccattcccaatccgtcgaaagagcaactagtcgatgttgtccaaaggcatttcgtgtcacagcaaatggatgagcttcaggtcattgtgggatttgttcaggctgcaaagagattgaagaccgtctgcaaatgaccccgataagaatgttcagacgggttttgagttgggttgtcaatgctaacagaaacttggtatcctaatgtccttgtcccctagtagctatatctgtaatatatatatatatgtagtgtatgtacttgtggcttggttatctttgcactccctctgttgagtaggttaatatttacttgaagctttagaggctctttcttcctttttgtttgattagttatatgtttatttattatccaaaatttgtgtttctagtacttttattttttccttgtgacttttttttatatgtattgtatactttgttatgttcatttctctctgttttatctatgtttattattaatattcttttctctcttcttttttctctcttttttattttttttcttttatatatattctttattatttttttttctttcttttattatcacttctacatctattttttatttcgtcttctcttatgtttcctttcttatttttttacatttttctactatcttttattatttatttctttttcatttattttctattatttattttacgttctatctctttataatctattttttatcttctctcctatatatatttttttccttatcttatttattttcttattttttcatttttctaatttcatttatttcttctcatcatatctcttatattatctttctttaacctatctcttatttcttattttatttgtctattatattttttactttttttttactttatttctttattatacattatttttctatcttatttattactttctctttatatcttcatttttttaatgtaaatagtttatttttttatatttatttttt

SEQ ID NO: 5449 - DNA, 529 bp, Gossypium hirsutum
  unsure (1)..(529): unsure at all n locations
  Clone ID: LIB3584-009-P1-K1-H12
cggccgccctggggggggggggggggggttttgagtaaaataaaacattaaaacgcttaaacatgctccacttcgtagcataagaaggttcttcctcaaacaagcctcactaaggaaaaaaacaccttttttctttttcaaaaggacagtttttttttcttacggggggggggggggttcactaattccctnaattnctcttagtttttgcttacgaaaatactttatacgtattcaccaatgcatgatctttcgatccaatgtaatttcgacccataaaacacgcttgatttgactcactgagttggagaaaaaatttgatagaagcaatggagagttccgtcgtcaatggcagtggtttcactcagttccaacagagctatggagatngtngtgaagaagagctctcggtgttgccacgtcacactaaagtggttgtcactgggaataaccgtcccaaatcggttcttgttggtcttcaaggtgtggttangcatgctgttgtccttggtgggtggccttggctggt

SEQ ID NO: 5450 - DNA, 421 bp, Gossypium hirsutum
  Clone ID: GOSHI-09MAY01-C15451_1
acgcccacgcgtccggaaaagtagcaccctacaagtacctttaattctgaatttgaatttgatagggtgggggattatgggttatgtttcagttatatgatttatttataatatataaatatgcagcatgctggtgcttgtgatgaaaaaggaaatccaattatcaaggactactatggcagcccgcttgccgcaagtggtaagccttacgacactatgttagtggctaaatctgaatgtgtctatactggttctggtgatcaacgttcctccatgtttgcatttaacatggaacaagggcttcctgtcatgcccgagtggctgttctgcaacagagtgaattctcgggcaagaaaagttgttgaaaattggtcctactcgcctttcttttaagggatgcatgggacatggctactgaaat

SEQ ID NO: 5451 - DNA, 392 bp, Gossypium hirsutum
  unsure (1)..(392): unsure at all n locations
  Clone ID: LIB3145-005-Q1-K1-F7
cggaaaacccggggggacgccacgcgtccgcccacccctccncaaaagcttaacattttcttagagaggggccaaatcgactctatacgccgcattaactatacagaccgagggattgaaggagatgataagaggacatctagaacaataattatccagaattcaagaaccccagggacacttgtgcatggtaaccaacatgacaatagcagtctgagcattggccgtgtaacagctggtatagagtttagtcgaccactgaggccaaaatggagtgggacagcaggtcttatttttcagcatgctggtgctcgtgatgaaaaaggaaatccaattatcaaggacttctatggcagcccacttactgcaagtggtaagccttacgacgatat

SEQ ID NO: 5452 - DNA, 449 bp, Gossypium hirsutum
  Clone ID: LIB3197-006-P1-M1-B4
gtttttgatgattcttttaaccctctttatgattcttcgagttgtcccttcgtcggcggtggcttcgattgccgaaaaaatggcagacctgatcggaattacctcaagtatagatggcagcctaatgactgtgcagtccccagcatgctggtgcttgtgatgaaaaaggaaatccaattatcaaggacttctatggcagcccgcttgccgcaaggtttatatgtctgtagccttgtgtttatatcttctataagattcatttacatcattagtttgctgttatcactattcttttaattttatttgcttgcttctaatcatctattaaatccccgttttttaaattgaaatcttaatgtagtggtaagccttacgacgatatgttagtggctaaatttgaatgtgtctatactggttctggtgatcaaggttcctccaagtttgcattt

SEQ ID NO: 5453 - DNA, 272 bp, Gossypium hirsutum
  Clone ID: LIB3493-016-P1-M1-A2
agtggcttcgattgccggaaaactggcagacctgatcagaattacctcaagtatagatggcagcctaatgactgtgcagtccccagcatgctggtgcttgtgatgaaaaaggaaatccaattatcaaggacttctatggcagcccgcttgccgcaagtggtaagccttacgacgatatgttagtggctaaatttgaatgtgtctatactggttctggtgatcaaggttcctccatgtttgcatttaacatggaacaagggattcctgtcatg

SEQ ID NO: 5454 - DNA, 544 bp, Gossypium hirsutum
  Clone ID: GOSHI-09MAY01-C15421_1
cccacgcgtccgcccacgcgtccatgaaaaactaaggtgatttcatatttattttttcgtgttctgatttagtttttttttctttgttcctacatatagatttttcacagaaaaataaggagaaaatgacttaccttaatgctggctccttcatgtctttgcttgcttcgtcgtaattgaaccttaagccagaatcttgaagcttctgagtggactcgtggtcgaacaaggccagattatgccttcatgcgatgttcatttgccgaatatggggatagatcgacagttgaaagatgccttaagttcggtcgaatgaataaagaggaataagctttaggtttttttattttttatttgcttttaagtggatgagtgttaattttagggttttcttttcctttcttttgatctggtgttaacaaagtgaaacagcatcgtttggaaacagagatccgcacgttgacctgtttggaggctcggatccgcgccttttcaccttaaaaggtcgatttgcacgtaatccctcccctcctgcgccgatctc

SEQ ID NO: 5455 - DNA, 849 bp, Gossypium hirsutum
  Clone ID: GOSHI-09MAY01-C15771_1
cccacgcgtccgcaaagcagaaaaacttttgatttgagttaaaatcttcagatctgtgaaagatgacgaattggtcttgtctcagaggccatagggatatcgttacgacaccaacacctggagcgccaaatggggctgatggacaacgatcggccgatcattatcaggtgaattcctcgagctcaatgatgaccggaggaaagaaaagaacccagcgtccggaagctaaaggaagaggcatcaagaagcagtgcctggcccgggtaaccggtggagaagagagtgtgggagagcttactgtacagcatagtgggaaaatcttcactgaccaaatcaacagaaggacgtgtaaagtcaaggaaaaactttgggatcggctacggaactgtccagaagttatatccatcatcaagcaaattgaagagaaatggccactgctatctgatctcgaaaaaattaaggagaataggagtgaaatcctaaccaagttcaaggcaggccgtttaaaagaggatggggcgaagcaggaattggacaaactaaaggagaggctcaatcatgtagatggacaactacaggagttgcacaaagcaaacaatcttgaggagttgaacaaagtaaagaaccttgaggaaatgttccttaatgaggataatgacctggagactcttcaaaaagagtattattctatatatccacgaatgaaagaagttgttgcgcctgatgatcatggaagtttgctaattcctgaagtattgtctaaaatgaatgagttggaaaacgaaatttatgccaaagacgacaacaaagtgaatgttcaagacttcaatggcttacaacaagcattga

SEQ ID NO: 5456 - DNA, 590 bp, Gossypium hirsutum
  unsure (1)..(590): unsure at all n locations
  Clone ID: LIB3582-014-P1-K1-D11
gcagcagcagctccttctcttctcttctctacaccacatcaaagcaatccgtgaaagatgacgaattggtctagtctcagaggccatagggatatcgttacgacacccacacctggagcgccaaatggtgctgatggacaaccatcggcctatcattatcaggtgaattcctcaagcttgatgttgaccggagagaagaaaagaaatcagaaagctaaaggaaaaggaaaatgcatcaagaaacagtgcctgccccgggtaaccggtggagaagagagtgtgggagagcttactgtagagcatagtgggaaaaacttaactgaccaaatcaacagaagggcctgtaaagtaaattctcttaactgaacttagccattcacatcaactgaagcaaaaaccatgagagagatttttctctctcttacttttgacacttgctttgtgtatatttaatgacataaaggtgaaggaaaaacattgggatcggctaagtaactgtccagaagttatgtccatcatcaagcaaattgaagagaaatggccactgctatctgatctncaaaaaattaagacaaaagagtgaaaatcta

SEQ ID NO: 5457 - DNA, 464 bp, Gossypium hirsutum
  Clone ID: GOSHI-09MAY01-C15761_1
caaaaaccctagggttctagccatttgcttcttcttctttttcactgtaggctttctgttctaaatgctattgcttttatatccaagattcaacctttcaaaagtagtgagcttaaaagaaaacaagatttggtaaaagctagaaactgaaaggcaatggagggtagattggcgaattcttggcgattgacagtgaacgacaagaatttcatcaaaactgcgttgctttctgaaattcgaatcgatggtcgaaagccctttgaattccgtaagatttcaatcaagtttggcagagaggatgggtcatcagaggtgcagctaggccagactcgtgttatgggaatggttactgctcaattggttcagccttatagagaccggcctaaggaagggattctttcaatcttcacaggattttctccaatggctgatccttcattcgagccaggccgtccaggagaatt

SEQ ID NO: 5458 - DNA, 549 bp, Gossypium hirsutum
  Clone ID: GOSHI-09MAY01-C115709_1
gtgagtagaagaattttgctcctttccttcaaacggtgattcatgcgggacttgtccgttgaaagaccctaaacccatatcaccattccggaaaggcaattaagcaaccctccttacctactctaagtaacctttttgtctaattaacctttttgtctttttcacttcatttccaaactcacggtgttgcagtagtggagcaatggaaggcgaaggatttgttgccgcaagcaaagtgaacatctatgaaggccgtgtcaccgccttcgtcatctgcacttgcctcattgctgccagtggtggtctgctcttcggctatgacctgggtatctcaggtggggtcacatcaatggagccttttctgaacaagttcttccctagtgttttggaacaacagagtaaggcatcccaaaccgagaaccagtacctgcaaattcgatagccaactactcactcttttcacttcttccctttaccttgctgctttggtcgccttcttctttgcctcattgttaccaggatctttggccgcataatttcatgttagct

SEQ ID NO: 5459 - DNA, 940 bp, Gossypium hirsutum
  Clone ID: GOSHI-09MAY01-C15731_1
cccacgcgtccgcccccccccccgtcgcttccaattatcttaaagcctgccatataatcatataaccaggctccgtcgtggtactcttcggccaccacaatgccgaaaatcgccttgggaacaagccaagaggctgctcagcctgactgcatcaaagcccttgtggtcgagtttatcaccactttcctcttcgtattcgttggagtaggagctgccatggccgccgatgagtcgggggcaaatgcgctggtgggattgtttgctgtggcggtggctcatgcccttgtcgtcggcgttatgatatcggccggacacatatcaggcggccatcttaacccagccgtcacgcttgggttgctattcggtggtcacatcacggtggtccgtgcgatcctctactggatcgatcagttgttggcatcttcagctgcttgtatacttctcaagtatctcaccggaggattgaacactccggttcacacattagcaagtggaatggggttccttcaaggtgttatatgggagattattctcacattcgcattgctgttcacagtgtatgccaccatagtagaccccaagaaaggttccatcgatgggctaggtccaatgctcactggcttcgtcgttggggccaacatcttagccggtggagctttctcgggtgcttcaatgaatccggctcggtcattcggaccggctctagtgagctggaactggaccgatcactgggtttactgggtgggacccctaatcggaggtggccttgctggctacatatatgagaacttcttcatcgtcagaacccatgttctccttccccagaatgaagccttttaagcttttaatttcagttacattagaatagccgctctgtgtgtgactttctatgtatcaactttttagtgtggttgttttctccactatagagctcatctat

SEQ ID NO: 5460 - DNA, 270 bp, Gossypium hirsutum
  Clone ID: uC-gsflnu33B025a05b1
agaggaccgcgcccaaattggttgatccacgcgtcttttctgtactccaccatagacagactacaggtgcatagagccggtccgcatgaccgatcactgggtttactgggtgggacccctaatcggaggtggccttgctggctacatatatgagaacttgttcatcgtcagaacccatgttctccttccccagaatgaagcctttttagagattaatctcagtcatcagaataccgcaatgtgagggcggcctttaatgaacccaagcgt

SEQ ID NO: 5461 - DNA, 343 bp, Gossypium hirsutum
  Clone ID: LIB3135-033-Q1-K1-F8
gccccccaaaggtgtggcatgaattctatgtttctgagaagttggttgactgtttccacttttaaattgtgtattttgtaggccattgtattattgtgtgtttcttattgtaatgaactgcaaagatgatctattacttctcagacggagctctttctactgtgctctctatcatgttttccacagtgcaataaaaatatgtttatagtctaaaaaaaaaaaacaattacataactctatttaaacaatttaaaaaaaatcctcttttttttaaattgaacttatttttaaaaaattctatcaccaactaaaatttatattgggggggccctttttaagaatc

SEQ ID NO: 5462 - DNA, 149 bp, Gossypium hirsutum
  Clone ID: LIB3197-011-P1-M1-H9
ctgacgcgtgggtttgcagttcattggaataagaaacacacaataaggcggtgggctacaaagatgatctattacttctcagacggagctctttctactgtgctaactatcatgttttccacagtgcaataaaaatatgtttatagtct

SEQ ID NO: 5463 - DNA, 554 bp, Gossypium hirsutum
  Clone ID: GOSHI-09MAY01-C15691_1
gctacgcgcccttaagttggcttgatcttcgcatctttcgccggctccaccgtctcaaatctccgggccaactgtttcgctcactctcttattggactgatcgaaggccaagtgcttcttcacttcatcggcggctattttcagattggtattttacaaattagagataattgtcaaaggatagagccatgagttgttttggctgttgtgaagaagataatatccacaatgccacagacaatggaggccaatacatggttaaaaactcagcaggaaatgttgggggttaccatacatctgaaactgcatcgaagagtgctcaaaccgtgaaggttcagcctattgaagtccctgctattttggcagatgaattgaaggaaatcacagataactatggtaacgatgctttgattggagaaggttcatatggtcgagtttattatggagttcttaaaagtggagaggctgcagcgataaaaaagttagatgccagcaagcaaccagatgatgaattttagcccaggtttccatggtatcaaggttgaagcatgaaa

SEQ ID NO: 5464 - DNA, 683 bp, Gossypium hirsutum
  Clone ID: GOSHI-09MAY01-C115669_1
taatcacggaagccttacaccccagaaaccattgcctacataaaatcacttgatgctgagcaagatatagcacttctgaaatcatacggcttggatgttcctctcgagtgtgctcgaacactccgtatctcaaccatgcttttgaagaaaggggtggagcgaggtctcactcctttagccatcggaagcatcatgtgtagggaaaacataaacaaggaatctgcgatcgagcagattgttaaagaagctcaggattccttacttccaggcatgagtgaagctgcgtttattcagagtgtctcggaagtcctcgattcttggcttgacaagctcacaaattgaaattgcctagttctttttcagccacaaaaaagaaataactaggtacaatttgttttcacataatgaagagtacattgttttttttttggactacaaattgtgggaatgtagatatggcttatccaagggcctaaagctttcattattcgttttgttttgttttgttttttttggttttctttcttttactctgtcaattaatacttgatatatcctatcagtatatcgaacagagtcaaagataatcgagttgttactcttctaagacactccatagatcacaggattatagctcaaaaatgagcaataaaacttgtacatattggtctcttcaaaaaaaa

SEQ ID NO: 5465 - DNA, 540 bp, Gossypium hirsutum
  Clone ID: uC-gsflmaxxa040b04b1
tttcacgcgtccggcgtttattcagagtatctcggaagtcctcgatccttggcttgacaagctcacaaattgaaattgcctagttctttttcagccacaaaaaaaatataaaaaataaaaataactaggtacaatttgtttgcattcacataatgaagagtccattttttttttggactacaaattgtgggaatgtagatatggcttatccaagggcctaaagctttcattattcggtttttttttttctttcttccttttactctgtcaattaatacttgatatatcctatcagtatatcgaacagagtcaaagataatcgagttgttactcttctaagacactccatagatcacaggattatagctcaaaaatgagcaataaaacttgtacatattggtcgcttctattctggaggtgtgtaaacctttattgttcagcattttgcagcgaaaagttatctcactgggcccgtttttcctaactcttcaggttgatttgtattcaacattattttacgttgtataacatttttttttg

SEQ ID NO: 5466 - DNA, 350 bp, Gossypium hirsutum
  Clone ID: GOSHI-09MAY01-C15651_1
gagatctgagtatgggtgagagtagggtgactgggaaggtaaagtggttcactgaccaaaggggatttggtttcataacgccggatgacggcggcgaggagttgttcgttcaccaatcgtcaattcgttccgacggttttcgtatcctcgccgacggcgaagaagtcgagttcgttatcgattcttctgaaggaggtcgtaccaaggctgttgatgtcactggccctaatgggaaccctgttcgtggcaccacgagatctggacgcagtggtggcggaggtggattcggcggtagaggaagaagaggaggttatggaggcggcggaggaggatgcttaagtgtggggaga

SEQ ID NO: 5467 - DNA, 415 bp, Gossypium hirsutum
  Clone ID: GOSHI-09MAY01-C15661_1
gactgttttgggggaatccaaaaccagtccaccaccggcggtttccttcattttctcactgtttctcactgctgcatgcctctttacaccattgggagctcaacagcagtcacccatcaagaccatagtggcgttggtgatggaaaacagatcctttgatcacatgctcgggtggatgaagcacacacgtcaacccttcaatcaatggagtaactggagatgaatgcaacccggcttcaacaaataacccgaacccggaatccatttgcttcaccgacgatgctgagtttgtggatccggatccaggtcactctttcgaagctgttgaacaacacgttgtttggttcttccaccattccttccatgtctggttttgtggaacaagcattggcaatgaccaagaacctgtctgaga

SEQ ID NO: 5468 - DNA, 522 bp, Gossypium hirsutum
  Clone ID: GOSHI-09MAY01-C15631_2
atcacctgaaactccaggggtaaagatatcagttgaaccacagactttgagttttagccaagcaaatgagaagaaatcatatacggtgacgttcagtggtagttcacagccaaccggtacgaacgtgttcgctcgtttggagtggtctgatatgaagtataccgtgggcagtcctattgcaattagctggacatgataggagaataaaggggatggacagtttttaaactttaaaaagttgaatggcttcttaaactcactcaacaagatgagatgggggttggttcaattgttttagtgttttgtagttgccagattcatgatagctaaaccagctaataatggaagctggggtcttaagtgtttgatgttattctctgagagagggaacaatgaaaactaggaacattggtaggttttctttctcagtatacagtgtattaatatgcttttaattgcttaaaaaaaaaaaaaatctcacatgtaatgttttttatagatcaatcaaaaatacggcctctg

SEQ ID NO: 5469 - DNA, 1868 bp, Gossypium hirsutum
  Clone ID: GOSHI-09MAY01-C15631_1
cggccgcgtggggtagaggtttagttgtacaaacatggctagttccggtgtccttaagttggtttccatgattctcatggtgtgcaattgacgagaccaaggaatcaagatcacctcgagatgatgatgggcatggtactcacacggcctccaccgctgcagggtcggtggtggaaggagctagcttgtttggttacgcacaaggaacggcgcgtggtatggccacgcgcgctagggttgctgtttacaaggtttgttggatcggtggatgtttctgtccagacatcttggctgccatggagatggccattgatgacaacgttaatgtactatccatgtccctcggcggtggcatgtctgattattacagggatagtgttgcaatcggatcttttgctgccatggagaaggggattttagtttcttgttcggccggaaatgctggtccagctccgtacagtttatcaaacctggctccgtggattacaactgtcggtgcaggcacactggatcgtgatttccctgctttcgttagccttggaaacggcaaaaatttctccggcgtgtcgctttaccgaggcagccccttgcctggaaagatgttaccatttgtttatgctggcaatgctagcaatgctaccaacgggaatttgtgtatgatggatactttgataccggaaaaagttgccggcaagattgttctttgtgatcgtgggatgaacgccagggttcaaaaaggagctgtcgttaaagcagccggtggtataggcatggttttgtctaacactgccgcaaatggtgaagagctggtagcggatgcccatttgctcccggcaaccgccgtgggtcaaaaatctggtgatgctataagagactacttgttttcaaatcctaacccaactgtcaccattctttttgaaggaaccaaagttggcatagaaccatcaccggtggtggctgcttttagctcaagaggaccaaattctataacctcggagatattgaaaccagacatgattgctccaggggttaacattttagcagggtggtccggtgcagtaggtccaacggggctggctacggataccagacgagtggattttaacatcatttcaggaacttcaatgtcttgcccacatgttagtggccttgcagggttgctgaaggcggctcacccagattggagtccagcagctattagatcagctcttatgactacagcttatacggaatacaaaaacaagcagaaaatgcaagatgttgcaacggggaaaccatccaccccgttcgaccatggtgctggacatgtggatcccgtttcagcgcttaatccagggcttgtgtatgatttgacagcggaagattatctgggtttcctttgtgccttgaactacacagagttccaaatcagatccctggcgagaagaaacttctcatgtgatgctagcaagagatacagagtcactgatctcaactacccttcctttgctgtcaattttgattcggtcatgggtgggtcgaatgttgttaaacacacccgaactctcaccaatgtgggctcgccaggaacttacaaggtatcggtatcacctgaaactccaggagttaagatatcagttgaaccacagactttgagttttagccaagcaaatgagaagaaatcattacgggacgtcatggtagttccagccaccggacaacgtgtcgctctttgaatggtcgtggaagttaccggagcagcctatgcattagctgacatgatagagataagggatgatgttttaacttaaagtgatgcttctaactactaacaaagaatagagtgtatgtttagttaatgatgccgttatatctaacactatatgagc

SEQ ID NO: 5470 - DNA, 390 bp, Gossypium hirsutum
  Clone ID: LIB3272-009-P1-K1-D7
aaatattataacatcggggatattgaaaccagacatgaatgctgcaggggtgaacatttcagctgggcggtccgatgcactaggcccaacagtgtatggtacttataccagccaagtatactctaacatcattgcaaggacttgaatgtcttgagcacatggtcgcggccttcgacggttaatgaaggccgctaacccagattggactccagcagctatcaaatcagctgttatgactacagcttatacggaatacaaaaacgcgcagaaaatgcaagatattgtaacggcgaaaccatccaccccgttcgaccatggtgctagacatgtggatcctgtttcagcgcttaatccagggcttgtgtatgatttgacagcggaagattatct

SEQ ID NO: 5471 - DNA, 447 bp, Gossypium hirsutum
  unsure (1)..(447): unsure at all n locations
  Clone ID: LIB3147-036-Q1-K1-A7
ctttctcctctatttttcaatgtattatatgcatgaacttgtgataaagagaatgaaacagaaataaaaaatatatatatcaccttcgtttcctgtaaaaatctctggtgtattattgcaaaaatattctgtgtacagtatttttggtatatctctctggtgttttttttctctatgcgtgtgtaagtttttcttgtgtaagtcctttctacagattgaaaagaaggctttgtagcctcgataaaccactacaagttttggaaagaaatctctgatttctttccgtattcgcttcgcatgtctgttgtgattttctttccttttcttgcaggcgaatcgcaaggatttcgttcgagcaccaatgactgcgcgctgatggngccagtgttggattgtagcgcatgacaattctggcgtgattcgggcgccgatggtggcgcgatgcat

SEQ ID NO: 5472 - DNA, 388 bp, Gossypium hirsutum
  Clone ID: LIB3197-002-P1-M1-A11
aaaaagcaaaaaaaaccctctgaaatttcccagacctctgagctccggccctgggccgatccgcttcgttcatcggacctccgtgttcagccccatgcgcatcaccaactccgccacacacggtggtcgggatccgaaaagcttcgctttttgcgacgaatctaaaggcgaatcgcaaggatttcgttcgagcaccaatgactgcgcgctgatggggccagtgttggattgtagcgcatgacaattctggcgtgattcgggcgccgatggtggcgcgatgcatggtggcgaagtcgaggagtcacagcgcactgatgaaggcgacgattgggccattggacctgaaaagtcgtgacatttggaacctcaaagcatctagaatccccct

SEQ ID NO: 5473 - DNA, 846 bp, Gossypium hirsutum
  Clone ID: GOSHI-09MAY01-C15151_1
cccacgcgtccgcccacgcgtccgctttttttctctctcaaatttactactactctcttagctctcctctgtttcagtctcctttttatttccataataagatcacaatttttttctcatttattttttattttcacttcattttttctcagctttaacaaataaagaagaaaaagattcaagtaatttataccttatggaatatgatacagagaaaacatgaagagaattcaagccaatcgataacatttcatcacctacctgttcttcttcgtttcagaaacttctgttttttgaccggccatgggaaagaaagggagtggatggttctcgacggtgaagaaagtgttcaaatcttctcacaaagacttgcctgacaaaaaaagagagaataatgtggagaaatggccaaatgaggccccggatgtagtgtcgtttgaacattttccggcggagagttcaccggacatcacgaataatgagagtgccatgtcgactcctctgaatgaagataggaaccatgccattgctgtcgccatggccactgctgctgctgcagaagcagctgttgcggcagctcaagctgccgctaaagtcgtccggttggcgggttatggacgacatctaaggaaaaaagagcgtgcacgcttatacagtcgtattatagaggctatctggctcggacagctttgcgtgctttgaagggactggtgaggttgcacgcactaatgagaggttatacgtgcgcaaaccaacgccaatgacaatgcggtgcatggcaacattaatccgggtgcggggcaaagtgcgagctcgttgggctgcgctaactgatcgtgaaaagac

SEQ ID NO: 5474 - DNA, 505 bp, Gossypium hirsutum
  Clone ID: GOSHI-09MAY01-C15141_1
tccctttctgtgtcggtcagagaaactccgaggtgttgggtctcaacgagcactccatgcaggcgctgtcctggcgcaagctctatttgagccgcgccaagctcaaagcctccagccggacctcggctctgctctccggcttcgccatggtggcaatggtggaggtgcagctggacgccgaccacgactacccgccagggctgctcatcgccttcagtgcctgcaccacggtgctggtggctgtgcacctgtttgcactcatgatcagcacctgcatcctgcccaacatcgaggcggtgagcaacgtgcacaacctcaactcggtcaaggagtccccccacgagcgcatgcaccgccacatcgagctggcctgggccttctccaccgtcatcggcacgctgcttttcctggccgaggtcgtgctgctctgctgggtcaagttcttgcccctcaagaagcagccaggccagccgaggcccaccagcaagccccccgccagtggtgc

SEQ ID NO: 5475 - DNA, 506 bp, Gossypium hirsutum
  Clone ID: GOSHI-09MAY01-C15121_1
tggaacgctgaagcacgctggtgcccctccgcaatttccgcagtcgcattttctcttgcatcgccagcgcatccctgagacaccatggggaaggtgaaggtcggagtcaacggatttggtcgtattgggcgcctggtcaccagggctgcttttaactctggtaaagtggatattgttgccatcaatgaccccttcattgacctcaactacatggtttacatgttccagtatgattccacccatggcaagttccatggcaccgtgaaggctgagaacgggaagctcgtcatcaatggaagccccatcaccatcttccaggagcgagatccctccaaaatcaagtggggcgatgctggcgctgagtacgtcgtggagtccactggcgtcttcaccaccacggagaaagctggggctcatttgcaggggggagccaaatgggtcatgatctctgccacctctgctgacgcccacatgttcgttatgcgtgtgaaacatgagtagtatga

SEQ ID NO: 5476 - DNA, 459 bp, Gossypium hirsutum
  Clone ID: GOSHI-09MAY01-C15051_3
cccacgcgtccgcaacatcgtggttggttgtcccctgagcagccgaccccccccccccccaaaaaaaaataagaccaacttttctcaccaataaaaatggtggccagcaagaaaacgaagaagacccatgagagcatcaacaacaggttggctctcgttatgaagagtgggaaatacactcttggttataaaacagtgcttaagtccctcaggagctccaaagggaaactgattatcatttcgaacaattgtccaccgctgaggaaatctgagattgagtactatgcaatgctctgtaaagtcggagttcaccattacaatggaaacaataatgatctaggaactgcttgtgggaaatacttccgtgtatcctgcttgagtattgtcgaccctggtgattctgacatcatcaagtctctaccaggtgaccactaagtcaatgaaggtctggttctctat

SEQ ID NO: 5477 - DNA, 612 bp, Gossypium hirsutum
  Clone ID: GOSHI-09MAY01-C15051_2
tctacagctgccgaactccgaatccagaaacaccaactgaaacataacaacaaaaatggcggccggcaagaagacaaagaagacccatgaaagcatcaacaacaggttggctctcgttatgaagagtggaaaatacactcttggttataaaacagtgcttaagtctctaaggtcctccaaagggaaactgattattatttccaacaactgtccaccattgaggaaatctgagattgagtactatgccatgctttgtaaagttggggtgcatcattataatggaaacaataatgatctgggaactgcttgtgggaagtacttccgcgtatcctgcttgagtatagttgatccaggtgattccgacatcatcaagtctctacctggtgacagctgagtcgtttgacagcagaacaatgttcgtttcttattatattggtcctcgtagccttcttatccttagttaaagaacaattactgtggatgctcttagcaaaatttgtagctttaaaatacaaaattttgtctggtaaatgaagacactgctggtgggctttcgtattatgttacatccgtctcttttgaatccttttaggaggcattttggtcatgtac

SEQ ID NO: 5478 - DNA, 689 bp, Gossypium hirsutum
  Clone ID: GOSHI-09MAY01-C15051_1
cccacgcgtccggaagaaccctgagccccccgcccccccaaaagaccaactaaactcaccaaaaataatggtggccagcaagaaaacgaagaagacccatgagagcatcaacaacaggttggctctcgttatgaagagtgggaaatacactcttggttataaaacagtgcttaagtccctcaggagctccaaagggaaactgattatcatttcgaacaattgtccaccgctgaggaaatctgagattgagtactatgcaatgctctgtaaagtcggagttcaccattacaatggaaacaataatgatctaggaactgcttgtgggaaatacttccgtgcatcctgcttgagtattgtcgaccccggtgattctgacatcatcaagtctcttccaggtgaccactaagtcaatgaaggtctggttctctatcacaccagaatgatgatgtttctttacttcctcacgatattatttccctttgccctcaaccccatttgtttaagaatatttggtatttttcttaatgttaagttgtggatgttcttgctaaaatttgtagcttgagtcaagattttgttttggttaatgaatattctgagttgcttgtttacctaaaaacataaaagaatgctaaaagataaagcataaaccaataaaaatcccgagaaaacacactaaaaatgcaatt

SEQ ID NO: 5479 - DNA, 529 bp, Gossypium hirsutum
  Clone ID: uC-gsflmaxxa004f01b1
tcgtctagatttaccaactgaaacataacaacaaaaatggcggacggcaggaagacagtggatacccatgcgtttcttctctttaatgacacgaacttttgtcagaatgtatagaaggaaaaaaaaagaagttttaaatagatttttggttttgttttcttctggattgagcagaagaagacccatgaaagcatcaacaacaggttggctctcgttatgaagagtggaaaatacactcttggttataaaacagtgcttaagtctctaaggttctacaaagggaaactgattattatttccaacaactgtccaccattgaggaaatctgagattgagcactatgccatgctttgtaaagatggggtgcatcattataatggaaacaataatgatctgggaactgcttgtgggaagtactttcgcgtatcctgcttgagtatagttgatccaggtgattccgacatcatcaagtctctacatggtgacagctgattcgttagacagcagaacaatgtgcggttattattat

SEQ ID NO: 5480 - DNA, 429 bp, Gossypium hirsutum
  Clone ID: GOSHI-09MAY01-C115399_1
ttgagatccaatctctctctgtgcataatcaaagcttcttctccattctctgtgattgaaggaaaataaaatggataagcctttgctgtttggagaaactagcaatggcggtggaaggcgagatcgtttatatcgtcgctctgaagctattacgtatggctctcattaccacagagcagctgccctcgtccatctggctgaggatggtgttggcctgcccgaacaaattcttgataaatcaagcttcggaagtgctgcacagttctacttcatgttcattaactttgatattatttggacccttaattattttgcattgggtgtcctaaactttcttgagaagccgctgtggtgtttgagtagttcatattcttgcagtgatagggactacttttttcttggccaggtgccttatttgaatgctacagg

SEQ ID NO: 5481 - DNA, 878 bp, Gossypium hirsutum
  Clone ID: GOSHI-09MAY01-C15291_1
cggacgcgtgggcggacgcgtggggttatgtgagagtgctgataatgaattgccaattagaagcagcaggtcacagggcatgaatttatcagtttggggtagaatcggtagctccagaagtagaatagaagcaaaagataaaattgatcatttaccctcagaccatcttgagaatgaaaccaagaaggaacaagaaccatttcctagctcacaggacacttcctgtcaagttaagcggatctgcagtgaggacgatggctccaaagttatggatttgtcattgaagtcacagatttattcgcatagtcgcagaaaacctactcaaaaggcactccgtacactgtttgtcaatgggattccccagaaatgcaacaaaagagaggctcttctgtctcattttcgtaaatttggagaggttgttgacatttatattccacaaaatagcgaacgggcattcatccagttttcaaggagggaagaggcagaagctgctcttaaggcacctgatgctgtatgggtaaccgctttattaacttctggtgggctaatagggatagcatacctgatatggcgtgaacagtggctgccagttctccaaagtggtctaacagcttctgggtgttccacctaacctgttgctaataaaggaaaggataatctcaatgtattgctcagagaagtagtggtgtccatgcgactgatgtgccttctttgaaatccctaatctggtatacgaatggtccccagctcacctctgtgcaaaattagagtcttggagcaatgaagaggactacgcagaacagaaatctggacagaagcgatgacttcgcgcagttgacaactgagaacatcagtatgtcaggtgatcactgctgacc

SEQ ID NO: 5482 - DNA, 1391 bp, Gossypium hirsutum
  Clone ID: GOSHI-09MAY01-C15271_1
ggcaagccttggttaatttatatcaagttgtggatgaagatgagaggtatgctaaactcgtagtggaagttggtggcattgtgaatgtgttagtaggctttcttgattcacctgagatggagattcaagaagaggcttcaaagattgtatctttactatcagggttcgatttgtacaagggggttttggttggagctgggattattgggcctttggttcgggttctggaaaatggcagtgagttgggtaaagaaggagccgctaggtgtcttcagagagtgactgttaattcagacaacgcatggtcagtgtcggctcatggtggggtgactgcccttctgaaaatatgttcaagcggtgagtttggaaggggaactgatcggtcttgcttgtgcgttgttgagaaatcttgttggggttgacgagataaagaggtttattgttgaagaaggtgccatttcaacgttcatcaagcttgcaagatcaagcccacgcgtccggcagataaattcaatggagttccttcagaatatggcttccggagatgactcagttcgtcaaatggttgttagagaaggaggggttcgtccattagtacgcgttttggatccgaaatcatcgacctcttcaaagacgagagaagtagcattgagggcaattgagaatctatgtttctcttcgcagagttgcataaacatgttgatgaatttcgggtttatcaatcaactgttcttcttgctacgcaacggtgaggcttcggttcaagaattggcactgaaacggacgcgtgggcggtcgcgcgcgccggcgcgggcgaaaaaggcaataggagatgccggtttcatgcctgaacttctcaaattgctcgatgcaaagtcatatgaagtgcgtgaaatggcaaccgaggcactctctagcttggtctcggtcccaaaaaatcgaaaacgattcgttcaagatgatcggaacgtaggctttcttctccagttgcttgatcaagaggatggcacccccgcgtccgaaaagctcttactttctatattaatgtcattgacaaattgcaacagtgggagaagaaaaattgccagttccggatatctaaagaacatagaaaagctcgctgaacctgaagtttatgatgccaaaaaacttgtcaggaagttgtctaccaacagatttcgtagtattctaagtggattttggcattcttgaatgtaatatttttgtttttgtttttgcttactgtatatctctgcataagcgttatgcaagtctcattaacttgtttttacaaatcttttaatgtcactgtatcctaaatccttctccttcgtaaaaagaaaaagaaaaagaaacgaaaacagcttttgacagcttttgtttacttgaat

SEQ ID NO: 5483 - DNA, 553 bp, Gossypium hirsutum
  Clone ID: GOSHI-09MAY01-C15201_1
ctaaatttcctcgcccatataaaaaccaataaaataaaagagatatatttcacatttatttttctggatttgggcctataaaaccactgaaaagatagtaacaaaatccaaaaatggcggctccggcagtggagggagtagccgtgacggccctccgatcggtcctactccgagtccgacaggcagctgaacgggcggctactcaacccgaacgggtccgggtcgtggccgtttcgaagactaaacccgtgtcactcatccgccaaatttacgacgccggtcaccactgtttcggtgaaaattatgtccaagaatttgttcaaaaagcccctcagctgcctgaggatattgagtggcattttattggacatttacagagcaacaaagttaaaacccttctcggtggaagggccaaatctagccttttttcagggtgttgataatgagaagatcgcaaaccatcttgaccgtgcagtttggagcctggagagaaaccctttggagatttttggacaaggtaatacaagtggagaaccatcaaaatctgggatag

SEQ ID NO: 5484 - DNA, 371 bp, Gossypium hirsutum
  Clone ID: LIB3197-002-P1-M1-B2
atttcctcgtccatataaaaaccaataaaatagaagagatatatttcacatttatttttctctaacaaaatccaaaaatggcagctccggcagtggagggagtagccgtgacggccctccgatcggtcctactccgagtccgacaggcagctgaacgggcgggtactcaacccgaacgggtccgggttgtggccgtttcgaagactaaacccgtgtcactcatccgccaaatttacgacgccggtcaccgctgtttcggtgaaaattatgtccaagaatttgttcaaaaagcccctcagagcaacaaagttaaaacccttctcggtggagtgccaaatctagcctcttttcagggtgttgataatgagaag

SEQ ID NO: 5485 - DNA, 980 bp, Gossypium hirsutum
  Clone ID: GOSHI-09MAY01-C16581_1
cccacgcgtccgcccaccggcgaagcgatttgcaatctcaactcaccgtttctcacgattggattctccttaaaatcatggctgctcagattagcaagaagcgcaagtttgttgcggatggagtgttctacgcggagctaaatgaggttttgacaagggagcttgctgaggatggatactccggagttgaagtcagagttactcctatgcgtactgagatcatcatcagagctactcgtactcaaaatgttcttggtgagaagggtagaaggattagagagttgacttctgttgttcagaaacgattcaagtttccggagaacagtgtggagctctatgctgagaaagttaacaacaggggtctttgcgccattgcacaggccgaatccctgcgatacaagctccttggaggccttgctgttcggagggcttgctatggtgttctcagatttgtcatggagagtggagccaagggatgcgaggtcatagtgagtggaaaactccgagctcagcgtgcaaagtcgatgaagttcaaggatgggtacatgatatcctctggtcatcccgtcaaggaatatattgattctgctgttagacatgtccttcttaggcagggtgtgctgggtatcaaagttaaaatcatgctggattgggatccaaagggcaagcagggtccaatgaccccattgcctgatctcgtcaccatccaccctcccaaggaagaggaagagtatacagaaaagaaggactttgaaccgcttgctcccccaaccaatatcgaggttcctgttgtggtttagagcccaccccaaatgagccttgaatgtagtgtttcactcaagttttcaactatttagttaaaggagatcactagatttctgccagtacggattactattttgcgaatgaggtggattttggtcgtgtttagtgtacttggtatattttaaaggaatattattaagcttatctgtttgctt

SEQ ID NO: 5486 - DNA, 434 bp, Gossypium hirsutum
  Clone ID: LIB3135-021-Q1-K1-F1
acgagatcaggcaatggggtcattggaccctgcttgccctttggatcccaatccagcatgatgttaactttgatacccagcacaccctgcctaagaaggacatgtctaacagcagaatcaatatattccttgtcaggatgaccagaggatatcatgtacccatccttgaacttcatcgactttgcacgctgagctcggagctttccactcactatgacctcgcatcccttggctccactctccatgacaaatctgagaacaccatagcaagccctccgaacagcaaggcctccaaggaagaggaagagtgtacagaaaagaaagactttgaaccgcttgctccccatgccaatatcgaggttcccgttgtggcttagagcccaccccaaatgagtcttgaatgtagcagttcactcaagctttcaactatttag

SEQ ID NO: 5487 - DNA, 774 bp, Gossypium hirsutum
  Clone ID: GOSHI-09MAY01-C16551_1
ggatattcaagagaaaaagaaaaacttagttccagaaagcgagtttgttgatgtactgttcaacgagccgttggagtcttcaactgttgaacagatgtttcttatgggtatgaacacttgtgaaggtgtggatattcttgatataagaccctgctccagtacacaatatagattagagcgtttccagaagcaggtccaaattatgaagaagtatcgggggactgcaaatgttcaacgtgcatggcttgcttcctctagaaaagcattgcctaccatcatgatgcatgggcttgcagactgccgtctttcttcaatcccagacctatatgccgctggtgttcatcttgctgcagcagaatttactaatggcagtgcaaagtattgtgatgttgacgaaaatggagtacagtacatgatattatgtcgcgtaataatgggaaagatggagcttcttttccctgaaagtggacaatgttttcctagcagtgaggatgttgatagtggagtggatgatcttcatcatccgaagtattatattacctggaacatgaatattaacacccacatttatccagagtttattgttagtttcaaactctcctcgaatgctaaagggaattcggttggaagtgaggctagtcatgctatttcaggtgtcactgcatcttcaaaaggagcccaaggttgtttaccagcatctgctggtgaattggggagtactaaacaccaaaattcagattcaggggggatcccaagaaaatgatcctagtctgg

SEQ ID NO: 5488 - DNA, 564 bp, Gossypium hirsutum
  unsure (1)..(564): unsure at all n locations
  Clone ID: uC-gsronu33B127c09b1
cctcacgcgtccgcccacgcgtccgcggacgcgtgggttaccatcgaatttttctttttaattcatctccttatgatggcgaactcacctactgttatccggccaccgccaccgtcaccacaaccaccgccacccttcttttcatcatcatcaccaccaccactttctctgcctgataacaccactagcagtactattatcccatcaccctcgccgttaccattctctttatcaccccaaatagaccccataggtcaaaacggaaacatttccatagtgagcatcaatccaccaccacctttccctgattcaccgagaagcgttgatttgtccccactcgaattcattcttgctcttatggcagtcataacgatcccagctatagtctacgctttctttttcgccgtcaggtgccctccttggtcttccgacgaacgccaagacaggtccagggacaaccatggaagtgctgtcgaagtaaccgagagaagggagcctgtttaggtcttagtatcgaaagaaactcactctaagataggncagtgattgcccgttggtatctgg

SEQ ID NO: 5489 - DNA, 518 bp, Gossypium hirsutum
  Clone ID: uC-gsflmaxxa061h11b1
tgtctttcaccatggaatcccgctctttaatacagatggtcatgatggcaagctcacgtactggtatagatacaccgtctccgtcaccacaaccaccgccacccttcttttcatcatcatcaccaccaccactttctctgtctgataacaccactagcattactattatcccatcaccctaaggcttaccattctctctatcaccgcaaatagaccccataagtcacaacggaaacatttccatagcgagcatcaatccaccaccacctttacctgattcacctagaagcgttgatttgtgcccactcgaattcattcttgctcttatggcagtcataacgaacccagctatagtctacgctgtatttttcacatcaggtgccctcctagttctttcgacgaacgccatgacaggtccagggacaaccatggtagtgctgacgaagtaaccgagagaagggagcctgtttcaggtcttatgtatcgaaaagaaactcactctaaagatctgggcagtg

SEQ ID NO: 5490 - DNA, 630 bp, Gossypium hirsutum
  Clone ID: GOSHI-09MAY01-C16531_1
tttatgtctaattaaatgtgtctccaataaataaacatgacatttatattgagctactggtcgcccctaaaaccttccaacttcaggaaattcgacgatcaaatcaaacagtcatggctggagttgcacctgatggatcacaatatgatgctcgtcaatacgacagtaaaatgaatgaattgattgctgatgatggaaatgacttctttactacttacgatgaggtctacgagagctttgataaaatgggtttgcaagaaaacctcttaagaggcatctatgcttatgggtttgagaagccgtcagcaattcaacaaaagggaatcgtgcccttttgtaaaggtttagatgtaatccaacaagcacaatcaggtaccggtaaaacggcgactttctgttctgggatcttacaacagctggattatggtttagtacaatgtcaagctttggttcttgctcccactagggagcttgcgcaacagattgagaaagttatgcgtgcacttggtgattatttgggtgtaaaggttcatgcatgtgttggtggaactagtgtccgggaggatcaacaatccttgcactggcgtccatgttgttgttggtaccccgggtcgtgtttttgacatgctt

SEQ ID NO: 5491 - DNA, 545 bp, Gossypium hirsutum
  Clone ID: GOSHI-09MAY01-C16401_1
cccacgcgtccgcccacgcgtccgcccacgcgtccgcccacgcgtccgcttttaagtttgagattggaagtgaaactaaaataactgagttaatatggcggtccaagttccgagtcgacaattattcatcgatggcgagtggagagagcccattctcaagaagcgactcccaaccatcaatcctgctactgaagagatcatcggtaacattccagcggctacagctgaagacgtggagcttgcggtggcggctgctcggagagctctttctagaaacaaaggtaaggattgggctaccgctcctggcgctgtccgtgccaagtatttacgtgccatcgctgctaaggtaacagagagaaaaactgagttggctaagcttgaagcaattgattgtgggaaacctcttgatgaagcagtttgggacattgaagatgttgctggatgttttgagtactatgcagaccttgctgaaggcttagatgcaaggcaaaaggctcctgtctctcttcctatggagacatttaagaggtttgggccttaggaac

SEQ ID NO: 5492 - DNA, 731 bp, Gossypium hirsutum
  Clone ID: LIB3582-035-P1-K1-A2
gcaggtccgaaccggagggtcgggccagacgtacgcgcacgcggccgagaggaggatgggcagtgaaactaacataactgagttaatatggcggcccaagttccgagtcgacaattattcatcgatggcgagtggagagagcccattctcaagaagcgactcccaaccatcaatcctgctactgaagagatcatcggtaacattccagcggctacagctgaagacgtggagcttgcggtggcggctgctcggagagctctttctagaaacaaaggtaaggattgggctaccgctcctggcgctgtccgtgccaagtatttacgtgccatcgctgctaaggtaaacatgccgtgaacttactagttgtgtaggattgtctaagtgtagactatttgcattcgttttatgatttcatcttgtaatttagctttttgaacttgctgagaacgtggtcccttaatatgagggcttaggggctcaatattatcaataatttcatattgtgatcccgtatgctgagtctatttgtaggttgcctgttgaactaagccatccaggcggttgaggcatatctggctatatgaaactgaaataagagaagccttcaatctacttcctgttgtttgtgtcttatttcctccaatccatagccttgtaatggttcccttgggatctccttacttcttggcccttctgattctgaatgaattgaagattatgcttatctttga

SEQ ID NO: 5493 - DNA, 591 bp, Gossypium hirsutum
  Clone ID: AW187261.1
cttttatttttacaattttcttttcccccgctcctgattttccttccctccaaacactattgcaaatgttgccatttctccctcttggaggcattgattggtgacgggcgattgaattctttttttattttctctcaaaagagaagtttaatggaattaaagataaaaaggggttgatttttctgtcccggaggctagctttcccgggaaattttgcctcctttttttaaatactctctctctcagcttccacggaacttttctttttgatccatcgatccaagaggaatttatgtagtcgtggatggatttaaaatgtaacggaaggaaaatttcattggaggatctaagattcatgagagagagagagagaacttttaatttattttcattgttttgtttagatttttttaaaaaaattgttaggaaataataagatcgcttgaacttgatatatggagtctgaaatattttcacctccaagagatttggtaaaatgttgtgattgcgcgtgtcccacttgttctttgattggtaaaccttcaagtacttggtttcgatctgtgaagcgaaaatatgatgaatttgaga

SEQ ID NO: 5494 - DNA, 416 bp, Gossypium hirsutum
  Clone ID: LIB3197-025-Q1-M1-C11
cttttccatccttttatttttacaattttcttttcccccgctcctgattttccttccctccagacactattgcaaatgttgccatttctccctcttggaggcattgattggtgacgggcgatttaattcttttttttttctctcaaaagagaagtttaatggaattaaagataaaaaggggttgatttttctgtcctggaggctagctttcccgggaaattttgcctccttttttcaaatactctctctctctcagctgccaccgttagttgcatttttttccccattcagtcctctgttttctagaaaatttatatttcggaacttttctttttgatccatcgatccaagaagaatttatgtagtcgtggatggatttaaaatgtaacggaaggaaaatttcattggaggatcta

SEQ ID NO: 5495 - DNA, 841 bp, Gossypium hirsutum
  Clone ID: GOSHI-09MAY01-C116769_1
ttttaaatgacgtaaatttgaagaaggaaacgttgaaattcgaagctgatgagctgaatcctgggaagttcttggtttctttcacgtttgatgctactgttgctggaaggattactgttattttctttgcaaaagaaggtgaagactgcaatctgacggcaatgaaggaaagtattctacccccagtaattgtgcctttcgaacaaggtctaggacagaagtttagactgccgtctggaacagggatcgatttctctatgtttgaggagtcggaattactgaaaatagatgaagtggatatctatcatctggctgtgaaagcagaggcattgcctcttaaccaaaatgtgtcagatggaaaccaggagtcaggagccatgaattctcagataactcaggcggtgtttgagaaggagaagggtgaataccagaccagagtaatgaaacagattctgtgggtgaatgggaagaggtatgagctgcaagaaatatatgggatcggaaattcagttgacaatgatgttgatccatatgatagtggaaaagaatgcgttttttgcctttcagaacctcgggacactactgttcttccctgcaggcacatgtgcatgtgccgctcttgtgcataggttttgagatgccagacgaattcggtgccctatctgtaggcaaccggttgagaggcttttggagataaaggtcaacaatggccctgatgaatgagatgagaacatgtttgttgaactatcttcctgtatagtattttggtgatatcattatgtcatgcctttctaataatcaaacaggagttataatcaattatacagtacatgatatgagc

SEQ ID NO: 5496 - DNA, 700 bp, Gossypium hirsutum
  Clone ID: GOSHI-09MAY01-C16751_1
attagatgttttgaatcatgtaaagatcaatgttgagcttgaaactcctatagctacacttagaagtgtcatcaaaagttcaaaatcagatttgtcattcagcaagcaagaattgaggactgcgaaggaaaaaatcacccaggcttttgtagaattctatagaaaacttagacttttgaaaagctactgcttcttgaatcagttggcattttccaagatcatgaagaaatatgataagatcacattgcgaaatgcatcgaaagcttacttgcaaatggtggacaaatcatatcttggcagttctgatgaggttagtaagcttatgggaagggttgaggatacttatgttaaacactttgctaatggaaatcgtagaaaaggactgaaaactctaagaccacaagctaaaaaagaaaggcataggattacatttctctatggcttcttctctggttgctccattgcactaatagtggccattattgtgagcatacatgctagaaatcttcttaagagtcaaggaagagatcaatacatggtcaatatatttccactttacagcctatttggttacattgtcttgcatatgctcatgtatgctggaaatgtattcttttggaagcgttatcgagtcaacttttcgtttatatttggtttcaagcaaggaacatagttgggatatagagaagtacttcttctt

SEQ ID NO: 5497 - DNA, 576 bp, Gossypium hirsutum
  Clone ID: GOSHI-09MAY01-C16741_1
cccacgcgtccgttcactcttcggcttattatccatgttttatctctaatttcaaaagtaataaagatgcccagatcctccattgatgctctgcaaatttccctacttcaagctaaggtattctagtatttggcctgtagttgattttaattgatttttcggaggaaggaagcagcattctgtttggttaatggggggtagtagttccaaggagggaagttggaggcagggttcttcctatcattcaaatccaccttcatgggattctcatcaggggtatcctcagacatcatatggtcaagaaaaccatagttttccgcctcaatatagctatgcagagccgcagtattatccgtattcacaaccagagccacagcagcattatccacccccgcaaccagagccacagtatcatccatctccacaagaccgtgtcggcgacaaaaagaagctacaaaggaagtattcgaaaattgcagacaattacaactgcttagatcaggtaacggaagcgcttgctattgctggtcttgaatcttctaatctaaatgttgtatcgatttcacaaagagcaac

SEQ ID NO: 5498 - DNA, 552 bp, Gossypium hirsutum
  Clone ID: GOSHI-09MAY01-C16711_1
cggacgcgtgggtgttcaaattgtgtcaaatgattcttctcctatggaagtggaacttgaagcttcctggttcttacaatgtcttcatgcttatttttgcttcttccttatcttcaccttgattacaattcttccacttttgtctctcttgtttagtttggtacccagaccaaagctgtggtgcacctgtgagatttgtcacacatatctgaatatgagttggtcaaaacaattcgacaatctttgcgattggtacactcacctgctaaagaactcgccagggaacaccatccatatccatgttctgggcaatacaatcacagccaaccctgacaacgtggagtacatgctcaaaaccagatttgagaatttgccaaaagggaaacctttctccttgatcttgggtgactctcttggtcgaggcatattcaatgtggacggcgattcctggaggtttcagacgaagatggcaagcctggagcttgtgaaactctccattaaatctttcgctcttgagatcatcaactgtgagatcaaagacaggcttatccc

SEQ ID NO: 5499 - DNA, 716 bp, Gossypium hirsutum
  Clone ID: GOSHI-09MAY01-C16681_1
atttcttaaaaacttaaactctccctctccctcgacaccgctcagtagttcatcaccctttcagaggctctccggaccgtgcctttagctccgacaacaacggaggaagagcaatcggtccaaacgtgaggtacgccctctctctcttactgttatctccttaaaaatgctcgatagaatctcaaaacaaaaacaacaaatcccaaaaaagggttgaactatgaacaatcaaaagagaaaaaaaaaatgaacccagaaattaccttttttggtgctttttgatttttgtattctgatttttgtattctgattgcgtatatttttttacagcatggtcttggtcctttttatagcgtctatatacagaatagaataaaataaaaataaaatccaaacaaatcgcccctgctctgtcatccttactttttttctctctgccccttttgtttggtgtctgtttttgctgcttttttgtgcgtctcttgcaggtacggagcgcagggtctggacgcggcacgtacggaggcgaaggcgcgcgtacgaagtatcaaacgtggcaccacgcacatggggagaggcgtgggtggcatcaacgcaggaggcttctgctgctgctagggttttcggcgtttgaagctgatttgggttttggccttctgtattctggctacggacttgggcatttgtatttagaaattgggcttattgtattgggt

SEQ ID NO: 5500 - DNA, 745 bp, Gossypium hirsutum
  Clone ID: GOSHI-09MAY01-C116679_1
gttccccatctggttttttattttctttttacgaagaattggggaggtcatggctagattattatcgtcaaacgcggtgttgaaggccatcgctactctcccagctgctctttctagtagaaacgtaattggatccttctacccgagtgggttgaaatactcaacatctgttcccggtgaccctggtacacatgaagattttagaccaacaaataagattcagagttctgatgtttctttgaaggatgttgttgagcaggatgtcaaggaaaatcctgtgatgatttacatgaaaggggtacctgattttcctcaatgtggattcagttcattggcagtaagagtgttgaaacactacaatgttcctttaagtgcaagaaatattctggaagatcctgagctgaaaagtgctgttaaagccttcagccattggcccacatttcctcagatatttattaagggagagttcattgggggttcagatattattctcaacatgcatcaaatggagaactgaaagaaaagctcaaggatattgtaggcagtccgaagctcgaataaatactgttgaatctcagaatggagtaggtttgctttaatgaaaattttgtgccctttttttttcgagatgataattaaggttatgttctatgttgagacctgctgttaaactcaatataaacttggctactttttaaaaaaaaaaaaatctggggggcgccaattccctttggcgttcatcctg

SEQ ID NO: 5501 - DNA, 293 bp, Gossypium hirsutum
  Clone ID: uC-gsflnu33B078h09b1
ttgatttagggagagttcattgggggttcagatataattctcaacatgcaccagaatggagaactgaaagaaaagctcaaggatattgtaggcagtccgaagctcggataattcactgttgaatctcaagattgtagtaggtttttgctttatttgaaagtatttttgtttgccccttttcttctctggaagatgataaagataaaaaggttccatatgttactaatgtatgatgaccttgacttgttaaaaactttcaaaaaataatcttatttgttctactttatttattt

SEQ ID NO: 5502 - DNA, 872 bp, Gossypium hirsutum
  Clone ID: GOSHI-09MAY01-C16191_3
ttctttcgtccgcccacgcgtccgcccacgcgtccgcccacgcgtccggggttctcctgatgagggagacgttcaacctggtgctcttatcacacttccgcctccgagggaagttgctaggcctgagatacaaagaaattctgcacctgcaggcaatctggatgaggaagaatgggttacagtttatggattttctcctgctgatacaaattgagctttgcgagagtttgaaaagtgtggtgtgatattgaagcatgttcctggaccaagggatgctaactggatgcacattctctatctgaaccgatctgatgctcacagagctctcagcaagaatggaatgcaaattaatggagcactaataatcggtgtgaagccagtagatccgatgcaacgcgaggctctaaatgaaagaatgagttatcaggggttcatgactttgcccccaccatcaagtagaacatcagagctgagcaattttcgaccatctcgcctatactatcttcaaaatggcaataccaatgcacgacagtcaggaagcgctgctattgcaaaccctacaaaatcactagggaccaaaatcatggaatacatgtttggatattagaaaaataaaaagctgttttcggtcactcacatgccctttgttctatttcataattgttggatggtgttccttccaaatattcatggaggacatacggttatgtcctgaacaaagggaaatgcaattgattgtgttgtaattgcagttgtaaaagactagaaaaccaagagtgtcttgaactattggtttgatacgattcaaagagtgcgtgagctatataattcaatttttgctttgatacaaaaaaaaaaaaaaaaaatcgcga

SEQ ID NO: 5503 - DNA, 1461 bp, Gossypium hirsutum
  Clone ID: GOSHI-09MAY01-C16191_1
cgtcatttgacgctaactcaaacagtattgaaaatccaaaatttgaaatttgaaagtacagggtttaggatttcaaatataaaattcataaaattcctttcacggttgatttgaaaagagctcccctcccgttcggttttgggaaaatcccagtagacctcaactcaactcaagtgctcatataaacgaaggagatgagcactgtagttcatagaactccaaaatcggggagacagtcattgttttaccaagatttggcctcaccgatctctgcccggagagggaaattctctagtcctggtcaagcggctgctgtctcagctttatggcaggagaattttggaggttcagatcttccacctcctccaatgtacaccttggaggaccgttcagatttttctcctgaatctggtatactggattatcctatgtctcccgaaatcaagtcagacccaagaacgccggtccgaagttctggacgtgacttctctactccagcaacgagcaagtcaagggctagcacttcatgggccagtacttaatgggcatcgaatcagcagagcccagggagttcgagttggtggtcaccccacgcgtgcggtagtgagcatgatgtcaagggaaagggctctcccgttgacggcatggctcagcctggtgcattgatcacacttccacctccgagggcagttgctaggccagagatacagaggaactccgtacctacagcaaatctagatgaggaagaatgggttactgtttatggattttctcctgctgatacaaatttagttttgcgagagtttgaaaagtgtggtgtgatattgaaacatgttcctgggccaagagatgctaactggatccacattctttattcgaaacgatccgaggctcaacgggctcttggcaggaatggaatgcaaattaatggagtactaatggttggtgtgaagccagtggatcaaatgcaacgcgaggcattaaatgaaagattgaatcatcagggcttcatgactttgactccggcatcaagtagaacatcagagtgtaacaatttcaggccacctcgaccgtcctatcttcaaaacggcaatgccaatgcacgacagtcggaaggtattatggcaagccctacaaaatcactagggaacaaagtcatggagtacttgtttggatcttaggaatctacatatcagcacaagacgggacgtataatttcaatagagtgaatttatgattccacttgaagtagcaattttccttgcaatgaaaattgttgcagatttttttgtaattgtttttgttgaaaattttattgtaagttcctttttttctttgaaggaattttatttgtcatctccaatcgcaaaatccccccctttacccccccccccccccatttatatttataaataaccccccccctaccccccccccccccttttttttcccccccccccc

SEQ ID NO: 5504 - DNA, 604 bp, Gossypium hirsutum
  Clone ID: LIB3829-017-Q6-K6-F2
tcgcactgtagttcatagaactccaaaatcggggagacagtcattgttttaccaagatttggcctcaccgatctctgcccggagagggaaattctctagtcctggtcaagcggctgctgtctcagctttatggcaggagaattttggaggttcagatcttccacctcctccaatgtacaccttggaggaccgttcagatttttctcctgaatctggtatactggattatcctatgtctcccgaaatcaagtcagacccaaaaagcccggttcaaagttctggacgtgacttctcaactccagcaaagagcaagtcaggggctagcacttcatttgctatacttaatgggcagcagaatcagcagagctcagcaagtttgagttggtggtcacccgcaaagaatagtagtatgagcaggatgacaagggaaagggttctcccgttgagggtgttgttcaacctggtgctctaatcacacttccgcctccaagggaagttgctaggcctgagatacaaagaaattctgtacctgcaggcaatctggacgaggaagaatgggttacagtttatggattttctcctgctgatacaaatttagttttgc

SEQ ID NO: 5505 - DNA, 348 bp, Gossypium hirsutum
  Clone ID: GOSHI-09MAY01-C116149_1
tcttttacgcgtccgcccacgcgtccggaggaatccaggaacaagcttttgcaagaaaatcagcagcttaatgaaaatatatctagcatgcagttacattattcaaaacctcgagaggaacagttcctccaattcccaatcagaagacgttgaaaagcaagcttctggcaatgaggacctgaaatctcagattgaagcagcaaatgtgtttgctcgacaaactgttgatggagaacgctgagcttgttgagaaggcgaatgtgttgtatgccatgcttgagcaacaaagtaaggccgcagaacattccaaggtcattgaaacgactaattctgtgcctcgatcccttg

SEQ ID NO: 5506 - DNA, 415 bp, Gossypium hirsutum
  Clone ID: GOSHI-09MAY01-C16111_1
aaaaaagtcccagaagctgaagactagtttgaaacgctccccacacaccacaagcaagccacacccaattacaccgaatcagctatgaggctatcggccctcggcttcttctgtttcttcttcgctccctctctctgcagggtaccatctgaaacacatgtaaagactgaaccagaacatgctagcaccccaccaagaggttggaactcttatgattccttttgctggaccatatccgaggaagaattcttgcaaaatgctgaaattgtttctaaccgtcttaagccgcatggatatgagtatgctgtggtggattacctttggtatagaaggaaggtggaaggggcttgcactgattctcttggatttgatgtgattgatgaatgggggaggccaattcctgacccaggaagat

SEQ ID NO: 5507 - DNA, 704 bp, Gossypium hirsutum
  Clone ID: GOSHI-09MAY01-C16051_1
ctgatggtccccatatcagcggctacatagcctggaaatccccgaacgcttctcctagtacaggttcactaagcggagcttctagtgttgagacctcagccgaaaaaacaaaaaagccactgtttcagcctgatctgaacaagtcaatcggtaaaatcattgaactgattgaaggaattggactaacatcttccgattcttctgacagttgtctagagaaaaatcaaactcccaaacaatcaccagctcatgcagactactttgttcgtgtttttcaatggaaaagttctgaaataagcaccgttctacaacattttattcgtgcatgtaacaatatgttgaataaaagggctggtcttgaaacttttgctgaagaactctcatttacctttggactgggattgggaactattgcgttaactcctaaggaagcttcgagtgcgagggataagatcaaaagacattttggttggaatgattcacaaagtgaaaaagaagttgcttatgcaagccatggtgtggaatcagatgtgacccacatttctaaagaacaaacatcacttgtagactcctttgcttctttgcctgatcagagtcacagtgttatccccccactggaggaagaaaacaagagattaaaagatgatctgaaggatatgaaaacgaggctggagtcagaaacagacaagagtgaggccctgatg

SEQ ID NO: 5508 - DNA, 599 bp, Gossypium hirsutum
  Clone ID: GOSHI-09MAY01-C16001_1
tttcgtacgcgtgggtttttatctcttttcatttctcttattacacgcccgctcaactattggcaaaaggactcaatcgttaagattttctcttcgagatacttaaacaaaatggccgtgaaaccaacagtagctttgagggcttttcttgtaggaggggtagctgtttttgcaaaagtagcaggtgcaatgaaggctgctggtggtgctaaactgggtgcagccgcagctgctatgactgtagcggcttctgctgcaatgacgggatcgaagcaggagcaaaaagatggatctaagcaaccttcaaaatgatcttccttttctttcgttctttctttcagcaccttgtaggcatttttaatgtaggtggcgtagtcagttgctcatgggagcttgtctagagaagatggctatgtttggaattctattttggtcatcacagagtttttttttttttaaatgacttgaaataagaaaaacctacacttttgatctgaattaaacttaaagaagattgcattattgccattcaaattcagatgtgaacgttctgtgtatacaatattagatccaatcgcataagatacagcttttggttc

SEQ ID NO: 5509 - DNA, 1203 bp, Gossypium hirsutum
  Clone ID: GOSHI-09MAY01-C16021_1
gagctctcaagttaaatgcttggaaacaacttgccttggaagagggaaaggaaattcctcctgaggctgatgctcaaaagttgatgctttatgcaagtgctgatcatgtattgcataagattttgcgctgggaaaccatagaaagtgaagtagatagattgaagtcgaggctctcacagatttattatgataatcttccaaagctaagaaaaccaatggaaggtctagaagaatggcttgatgctgtatctacggctcacatcccttgtgctgtggtttcaagtcttgatcgaaggaacatggttgatgctttagaacgaattggcctcaagaaatatttccaggcaataatttctgaggaagatggtatggagtcaatagctcatagatttttgtcagcagctgtgaagctggatcgtaaaccatctaagtgcgtcgtgtttgaggatgatccacgtggcattactgcagctcataactgtacaatgatggctgtggcattgattggctcccaccctgcgtacgatctagggcaggctgatcttgcagttggtagctttaatgagctttcagtgattaatcttcgaagattatttgctaacaagggttctactttcatggaccggcaaaagcagatcatagagaagactcctccgaaaaggaagcttacagttgataccatcttctgaatcattttcaccttcctttcatttcaaagttgcccctgtattttaagcgagagcgcagtttaggagatagttgtatgagccatgagtacatagttgcatgatccatggtactcttcattctcatggtatggagatacatacatgtatctggggctgagtccgagtaacaataggttcacagtttactttaaaatttgatttagttaggaaaatgttgccccatatatcattcgactgattgtacagtaattgagttgtcatcatgtgaacttcacaatatacagtaactgttggagcagacgaatctctggacaatctcggatggccattgtaattttgtgcagaatcagtgaaaatgataccctttttgcaaaaaaaaaaaaaaaaaaaaaaaaaaaaaaaaaaaaaaaaaaaaaaaaaaataaaaatatttaattttttaattattaataaaaatttattaattttattttataattttaataaaatttaaatttttttattttatattttt

SEQ ID NO: 5510 - DNA, 271 bp, Gossypium hirsutum
  unsure (1)..(271): unsure at all n locations
  Clone ID: uC-gsflnu33B023d03b1
cgtcngattgtacagtaattgagttgtcatcatgtgaacttcacaataaacagtaactgttggagcagacgaatctctggacaatccggatggccattgtaattttgtgcagaatcagtgaaaatgataccctttttgcacaaaataaaaaaattaataaaaataaaaaataataatataaaatcataattatataataattaataatatatttatctcatatataattaattaaatctttattacttaaatttaattataaatatacttt

SEQ ID NO: 5511 - DNA, 1566 bp, Gossypium hirsutum
  Clone ID: GOSHI-09MAY01-C16391_2
cccagcgtccggcagatcgtcggtaatcaccttcccgtgtagttttgtctggtggaatatgtcctattaccaagaagagatgctgaatacatagcagaagagtatgacatggaggacatagatgacatggatgaagagttccgcgccagagatatgtctggctcggagtctgatgttgatgaatttgatttctcgaataataaaatatctgatacttctgctgctgaagctagaagaggaaaagacatccagggaataccttgggatcggctcagcatcactagggcaaaagtacaggcaaactaggctagagcagtacaagaactatgagaatatcccccgctctggggaagtctccgggaaggattgcaagattaccaagaagggtgcctcgtactatgacttcaggctaaattcaagatctgtgaaatcaacaatacttcattttcagttgaggaacctggtatgggctacatcaaaacatgatgtttatctcatgtcacaattttctgtcatgcattggtcttcattgacacacaagaagcgtgaaattcttaatgtttctgggcatgtggcaccatccgagaaacatcctggaagtctgatggaaggttttacgcaaaccctagtcagtactcttgcagtaaaggataagctgctagttgctggaggattccagggtgaactaatatgcaagcatttagatcgacctggaataagcttctgctccaggacaacttatgatgacaatgccattacaaatgctgttgagatttatgtcactccaagtggtgcagttcactttacggcctcaaataatgactgtggagtcagagattttgatatggagaaatatcagctttccaagcattttcattttctttggcctgtcaatcatacttctctgagccctgatgggaaacttctaataatagttggagacaaccctgatattatgttggtagactctgatacagggaagactgttatgcccttgcgtggacacttggacttttcatttgcgtcagcatggcatcctgatggtgtcacttttgcaactgggaaccaagacaaaacatgccgaatttgggatgttcgaaacttgtcaaagtcaattgctgttctaaagggaaaccttggagcaatacggtccattcgctacacatctgatggtaagtacatggccatggctgagcctgctgactttgtgcatgtgtatgacgtcaaaagtgggtacgagaatgagcaagaaatcgatttctttggtgagatatccggcctatcctttagtccggacacagagtctctctttattggcgtatgggatcgtacatatggcagccttcttgagtatggccggcggaggaactacttatatcttgattccctaatgtgagttgatcgtgatgcgggcaaaacaagcatgttggtgtagtttatgatatttgaggaacttgtgtcatttcaagctgtagaagagggtttactgtagatgtaaaatgtaaaatgaaatgaaatctgtaactttaggtgattgctgttgaattagaattagtttttctgatg

SEQ ID NO: 5512 - DNA, 1125 bp, Gossypium hirsutum
  Clone ID: GOSHI-09MAY01-C16391_1
attttttggcccccactacgtcggtggaaaccttcccgtaagaatctctttcctggtgtagttttgtctggtggaatatgtcctattaccaagacgatgatgctgaatacatggcagatgagtatggcatggaggacatagatgacatggatgaagagttccgcgccagagatatgtctggctcggagtctgatgttgatgaatttgatttctcgaataacaaaatatctgatacttctgctgctgaagctagaagaggaaaagacatccagggaataccttgggatcggctcagcatcactagggaaaagtacaggcaaactaggctagagcagtacaagaactatgagaatatcccccactctggggaagtctccgggaaggattgcaagattaccaagaagggtgcctcatactatgacttcaggctaaattcaagatctgtggaatcaacaatacttcattttcagttgaggaacttgatatgggctacatcaaaacatgatgtttatcttatgtctcgtttttctgtcatgcattggtcttcattgacacacaagaagcgtgaaattcttaatgtttctgggcatgtggcaccatctgaggtctgtgctctggcagtgatttggcactttatctgacttaaacatcctggaagtctgatggaaggttttacgcaaactcaagtcagtactcttgcagtaaaggataagctgctagttgctggaggattccagggtgaactaatatgtaaggtaaggagagcaacttttttcccttcaatccttcattgacaaaaaagaggtcagaaagaggaataagcctttgtgcagtgattgcggagctgcttttccatgcaatatagctacttttcagtttttgcaagtcacttgaagcctaacatttatatcttaactgttatagacaatctattgttggacatatctgtgatcctgtaagatggatctgagtagaaggttctattatgcattttggagctaatgatcttgcgctcattctgttccaaacctcatttacttgtttgtcttggtttgaactacttactgcttaaaactttgtgaatgacaggtaaaaaaatttatttggatagtttcttttttcccc

SEQ ID NO: 5513 - DNA, 420 bp, Gossypium hirsutum
  Clone ID: GOSHI-09MAY01-C16321_1
gagaaaatgatgagaccatacccttgccaagagagagagagagagagcaaaagaaaccacagaggaagtgaatcgaaggcttaaacttaagcttaaaagatgctgagatttactcttttatggcttctcgttttctttttatctctcggttcatcttcagctcggcccgcaccttttgctatgcgcataagctgtggggctcgtcaaaatgtccgaacagcaccaacatatgcactttggtataaagattttgggtatacaggtggaattccagctaatgcaacaactccaagtttcattactcctccgctaaaaacactccgatatttccctctatctgaaggtccggaaaattgctatgggattaatagagtaccgaaaggacactatactgtgaggattttctttggataattaaac

SEQ ID NO: 5514 - DNA, 774 bp, Gossypium hirsutum
  Clone ID: GOSHI-09MAY01-C16221_1
cgctctgctttttctcgtgtgatcggaaaaaaaatcaacagtcatctaacggagttggaactcgatgggagaccgtggaggaggatgctgccctccgatggatctgttccgttcggaggcgatgcaattggtccagctcattatccccatggagtccgctcacctcaccgtgtcttacctcggcgacctcggtctcattcaattcaaagatctcaattcggataagagtccatttcagcgaacttatgctgctcagattaaaagatgcggagagatggcacgcaagttgcgttttttcaaggagcaaatgctaaaagcgggcttctcctcttcagcaaaatccttgggagaaactgacaatggttttgatgacttagaggtgaaacttggagaacttgaggccgaactggttgaaatgaatgcaaatggtgacaagttgcaacgtggttatactgagctgcttgagtataagcttgttttgcaaaaggctggtgagttttttacttctgctcagcgcagtgctacagctcagcagagagaaatggaatcacagcaaatgggtgatgaaaccctagaaactcctttattgcgtgagcaagaaaccgcaacagatttatcaaagcaagtgaaattggggtttattactggtcttgttcctagggaaaaatctatggcatttgagaggattttatttcgtgcaaccaggggtaatgtgttcctcaagcaagttcctgcagaggaacccatcacagatcctgtttctggagagaagat

SEQ ID NO: 5515 - DNA, 1028 bp, Gossypium hirsutum
  Clone ID: GOSHI-09MAY01-C17911_1
ctttcctcctccccccccgggcccttttttccttgtttagagaaaaatggagttgatggaccttttcattatcggtttggcacttattttcatccgtctatggtggcggtactcgtcggtcactggcggtggccctaagaacctccctccaggaccgcctcgttggccattcgttggaaacctgatccaaatcattctccaacgtcgacatttcgtctttatagtaggtgagctacgtaaactatacggtccaattttcaccttgcgaatggggcaacggaccatggtgattgttacagattcgagtctcatccatgaagctttggttcaaaaaggccacactttcgcttcccgtccaccggactccccgatccggctcgtgtttagcgtcggaaaatgcgctatcaactccgccgagtacggacctctctggcgaaccctgcgcaagaacctcgtcaccgagcttataacccctacgagagtgaagcaatgtagttggatccgcaaatgggcggtcgaaaaccatatgaaaaggagcagaggtgaggcttttgagaatgggttcgtggaggtaatgagcaattgcaggctcactatatgtagcatcttgatctgtttatgttttggtgcaaagatctccgaagaacggattaagaatatcgaaagcatactcaaagatgtaatgctggtaacatcgccgcagctaccggatttcttgccgatcctcactccgttgtttcgtcggctaatgaaagaggccaaagcactaagaaagaggcaattggattgcttggctccattaataaagaaccggagagcttttgttgagaaaggtgaaaaccctaacccagaaatggtgaggtccaatcggtgcagcctatatagactcactcttcggactagagccaccaacccgaggtccgttgggggaagaagagtacgttaccctatgttcagaggtgatcagtgccggtaccgatacgagtaccacgacagttgaatgggccatgcttaatttggtaatgaat

SEQ ID NO: 5516 - DNA, 1036 bp, Gossypium hirsutum
  Clone ID: GOSHI-09MAY01-C17931_1
ctcaatgttatgaccgaaccctggtgtcgcctgtttaaattcatttttccatttcttattaaagagaaaaacataaaagtaaccagttccggcagactcatggcgatgctcatcggtaatcctctcatcaaggctcgctttattagggtcctggtttcagccgccaccgccaccggcgacgcccccgtcatagtcgctcacaagacggcatcgctgaacagactcaaatccggcgccgaacgcgtctccgtttccgccaacatctacaaccaaggcttcacggcggcatatgatgtgagtctcattgataatagctggcctcaagatgcttttgatattgtcagtggcaacacttcacattcatggcagaagcttgatgccggtggtcatctatcacattcatttgaattagaggccaaaaggaagggaatgtttcatggtgctccagcagtcatatatttccgaattcccaccaaggctgttcaacaggaggcgtattcaactccaatcttgcccttagatatccttgaggaaagaccgcctgagaagaagtttgagtgggctaagaggttgatggctaagtatgggtctcaaatctccgtgatatcaattgtggttctgttcatctacctgataataaccccatcaaaagcaagcaagaagaagcgctaaaatagagtgcctccatttaatgcacaacatcctttctttgctagtttctgtttgcagttaaaatagggtctttggttgtgtctggattttctaatgagattagtgaaagatggagagattccaagttcttaggcctctacacttgatttcatgctacgtacacatcacttgtatcgtaggggatttaggacaaaactctatcggcatgcctgcatgtgacagcgacatcatatctcattttgcagttgtaatcgttacgaggggaatggcttgtggtttaaacatatgttcttgtacaatgccctttttatcgtcttaaaaaaaaaataaaaaaatttaatttttttattatattttttttttt

SEQ ID NO: 5517 - DNA, 489 bp, Gossypium hirsutum
  unsure (1)..(489): unsure at all n locations
  Clone ID: LIB3585-038-P1-K1-D12
cgtacacatcacttgtatcgtatgggatttaggacaaaactctatcagcatgcctgcatgtgacagcgacatcgtatctcattttgcagttgtaatcgttacgaggggaatggcctgtggtttaaacatatgttcttgtacaatgccccttttattgtcttaacactggtaatctagtaatggcgaccaagacaccgtctcccccccccccccgcccccccatatttcatctgatgggactaatttgaaatggctggggcaaggggtgttggtctctggatctacaactacaaatcctgctatatggatgagctagtaaaggatcaatgtgggtttgaaattatatttgtttgattgggaattctaatacttttttaaagataaatgaataatttttaaagatnaaaaaaaaaaaaaaaaaaaaaaaaaaaaaaaaaaaaaaaaaaaaaaaaaaaaaaaaaaacccctnnaaaaaaaaaaatananaat

SEQ ID NO: 5518 - DNA, 721 bp, Gossypium hirsutum
  Clone ID: GOSHI-09MAY01-C117829_1
tttacgcgtacgattatctttaacaacagtgggtccaaagaaaaaaatggggcttaaacctggtttatcagctttaatcaccggcggagcttccggcatcggtaaagcgttgagcttagctttggcggggaaaggattatttgtgacggtcgtagatttcgctgaagagaaagggaaggaagttgcttgtttagttgagaaagagaattctagatttcatgaaaagctggagtttccttctgctatttttgttaaatgcgatgttacgaatccaagagatattagcttagcgtttgagaagcatgtggcgacatacggaggatgggatggttgtattaacagcgccggcatcaatattccagtaccatttcagaacgatcaaagtgatggggctaagacatggaggcacaccattaatgtcaccctcgttgcagttatggattgtcctcgccttgcatttaagcctatccaagctctgcaaaccccaggggtgatattcaatacaggaccctggcctggctcttcccattttttcttggaacccatttactctgcttaagagaggtgtggcctggtaactagatccttcctcgtcaaacgtgaggatacgtgtcatggtcttgcctgaggttgtccacaaaatggagaaaactgacccaattgtatcttatggagcttgtgcatggatgtggaaaggtgcttcagctatctgtgaagcacg

SEQ ID NO: 5519 - DNA, 775 bp, Gossypium hirsutum
  Clone ID: GOSHI-09MAY01-C17551_1
gcaagggcgcaggttgctgctgcagctggtcaccctcagattgcagctgactcccttgctaaggtgcctgatatccagcacatgcctgccactgttgccactcttgttgctctcaaagaacgtgctggagatataaatggtgcagctgctgtgcttgactctgcaatcaaatggtggaaaactgctatgaccgaggacgaccagcttagtgttattatgcgagaggctgcatccttcaaactcaggcatggcaaggaggaggaagctgcccacctatacgaggagcttgtaaaaggtaacggaaatatagaagcattggttgggctgataactacagttgctcatgcaaatgttgagaaggctgaagcctatgagaagcaattgaagccattaccaggtttgaagggggctgatgtggatgctttggagaaaacttcaggagcaaaacctgttgatggtgcttctcgtgccgggcttgctgaagctcaagaggatggtaagaccaaggagaaaccgaagaaaaagaggaagagaaagccaaggtatcccaaagggtttgacccagcaaatccaggtcctccaccagacccagaaagatggctccccaagagggaaagatcaagttacaggcctaaacgaaaggataagagagcggcccaggtgagaggatctcagggtgcagtggttagagataagaacgaacctagtgctgcagctaccaattctaatacttcgaactcgaaatcaaaccaagctaccagttcaaagggagttt

SEQ ID NO: 5520 - DNA, 765 bp, Gossypium hirsutum
  Clone ID: GOSHI-09MAY01-C17501_1
ctttaatttaaaaactcaaaaaacagagtgaataaataaaaaacaaacccaccaaacaaaagaagaaagaagcagcagctcacaagaaaggtagaaagcaaagaagaaacaactacggcaccgcacctcacaatacaaagagaaagaaggaatcgagatattaaatcatagccaaaaccccagaaattgcaaaagagtgttttgagattgcaatggcagtgctcaattcttgtaagcttgtttggatctgcgccgtgatcgtggcggcggcgttgatggtggcagttgatgcgagcggtgaccaccactaccacaaccagcaaatcctgggttggattccgacccccaccagatcttcttgcaatggttccataggagaatgcttaggaggggaagaagagtttgagctggactcggagatcagccgccgcgttttgcaaaccaccaggtacataagctacggcgctcttcaaaggaacaccgttccctgctcccgccgtggtgcttcctattacaattgccagcctggagctcaggctaacccttacaaccgtggatgcagccgtatcacaaggtgcaggggctgagctttttttttttcctctttcgaaataaataatttccttttcagatttccatttctttttcttactttttgattgttatacatggagagatcgattgtagtcatgtttttagtatttttaatttttttaatgtctctgtaaaagatattgtattcttatatacttttttttgttcctc

SEQ ID NO: 5521 - DNA, 295 bp, Gossypium hirsutum
  Clone ID: GOSHI-09MAY01-C17451_1
cccgcgcggccgcggtcgcgtgggattttcttggaaaatggccgggaaagtgagttccaagagactaggagtgtttgcattgatgtttgtgttcgctatagggatagctgagcgtagaaagcttgagaaggagaatttgggtggtggttttggcggtggtgctggaggacggcttggcggtggctcaagaggccaatttgagcaccaagactttattgacatctccaacatcgatggctttaatgttcctatggagtttagcttcaactcctcagtgtgcactatggttatcaat

SEQ ID NO: 5522 - DNA, 518 bp, Gossypium hirsutum
  Clone ID: GOSHI-09MAY01-C17471_1
cccacgcgtccgcccacgcgtccgcccacgcgtccgcccacgcgtccgcccacgcgtccgcccacgcgttcgagcgtttagctgaaaaacccaatcccaacttgtttcttcatggcgtctccttcgctcttacagtccacatcctcctccttccacggcccctcccctttccttgcaccaccattctccgcgcgcctgccctacgctaaccccagaaatggatacgccggcgtcgtttcggtgagggcaacgggagagattgtgttggtggataaatcggaagccgaaaaaccctaccgtctcaaaactacttacctagacaaaattattcctttgcttaaagaagagttcaagtacaccaatattcaccaggttccaaagcttgaaaagattgtggtgaattgtgggattggagatgctgcccagaacgcgaaaggcttggaagccgcaatgaacgagatggcattgataacggggcaaagacctgtgaagacgcgagccaggaattctattgctac

SEQ ID NO: 5523 - DNA, 384 bp, Gossypium hirsutum
  Clone ID: LIB3147-005-Q1-K1-F12
cccacgcgtccgatcgaagtttttgatcaccatgagtataaacaatgaagctcctttcacggggcgtccgctttccttgcaacaccattctccgcgcgcctgccctactctaaccccagaaatggatacgccggcgtcgtttccgtgagggcaacgggagagattgtgttggtggataaatcggaagccgaaaaaccctaccgcctcaaaactacttacctagacaaaattattcctttgcttaaagaagagttcaagtacaccaatattcaccaggttccaaagcttgaaaagattgtggtgaattgtgggattggagatgctgcccaaaacgcgaaaggcttggaagccgcaatgaacgagatggcattgataacggggcaa

SEQ ID NO: 5524 - DNA, 676 bp, Gossypium hirsutum
  Clone ID: GOSHI-09MAY01-C17411_1
ctatgcagaggatgccatttcttttgccaatgtggatataatttctccagcacagaaactgttggctaaccagttgacatgtaatgttgtaccaggaaagagcctgcttgttactggtccaaatggtagcggaaaaagttctctcttcagagtacttcgaggtctctggcccattgtgactggaagactttataaacctatccactattttgatgaagaggctggatcgagttgtggcatcttctatgttcctcagcgaccatatacatgtctgggaactttaagggatcaaatcatatatcctctctctcgtgaggaagctgagatgagggaattaaagttttatggaaaagatgccataaacattcttgatgctcgattgaaaactattctggaaaagggccggttgaattatcttttgcaaagagaggatggcggttgggattccaatctcaattgggaagacacactctcgcttggagaacagcagagattaggcatggcacgtttattcttccacaagcctaaatttggtatccttgacgagtgcacaaacgccacaagtgtctacgttgaggaacaactttattgagtggcaaacgatctgggtataactggcattaccttatcacagcggtctgctctaatgccattgcatgctttggaatttagactt

SEQ ID NO: 5525 - DNA, 622 bp, Gossypium hirsutum
  Clone ID: GOSHI-09MAY01-C17421_1
atttcatcacaaaaggactccaaatttcctctctgtacttttcttcatttttattttctttatatttgttagtttagtatcaaatccatgtcggtttctggtatccatggccatgttctcgaggttactgttgttggatgcaatagattgaaagataccgaatggctttcaaggcaagatccttacgtttgtcttgaatatggcagcactaaataccgtactagaacttgcactgatggtggcaaagcacctgtattccaagagaggttcacattcacattgattgaagggcttagagagatcaatgttgtggtttggaacagcaatacattgacttatgacgattttatcggcagtggaaagattcaattgcagaaggttctttctcagggttttgatgatactgcttggtcacttcagactaaaaccggaagatatgccggagaagtacggctgataatgcattacggaaatgccaaaccgccaaccacaacatatgctccgacagcaccacaatatacagctcctcctccacatgtccctcaatattccgcacctccggcaacttatccagcttcttatccaccaccggctacaacatatccatctccatcaccatatc

SEQ ID NO: 5526 - DNA, 725 bp, Gossypium hirsutum
  Clone ID: GOSHI-09MAY01-C17791_2
cggccgcgtgggcggacgcgtggggcgttatctagtgggccgtgttggtcctgctgctcataggtcttataggtgcatcgttcgttatggataccgagatccgcgccaggagattgattcttttgaaacggacctagttgccagactggctgatttcatccgctatgattggcagcggacccggcacactactccttatgctgaagatgatgcttcccactctaatgaatcatcacgtgaacgtagattagcagcaatagggacagtaacattttctggcacaccaggttatggaattgaggaaagtgtggaaccagcaagtgtatctattggattctcaacagtagagagtgtgacggatgtgattgagatgcaggctgtgggtgcgggagctgttgaaagaagagttagatttgcgattgatgatgatgactctgaatctgatgggcaaaccaaaatgtatgttcagttggaagaagagctgagggacctgatgacagcccaagaagcagggactgcattcatactaggacacacacatgtggaagcaaagcaaggatcttcaattttaaagagattggccattaattttgggtacaatttcttgagaaggaattgccgcggaccagatgttgcactcaaggtgcccccagtatctttattagaggttggcatggtttatgtggtgtaagcttcccatctcatgtaactagtttttgtagctt

SEQ ID NO: 5527 - DNA, 1073 bp, Gossypium hirsutum
  Clone ID: GOSHI-09MAY01-C17791_1
tggctattagcattgggtccaagcttaggaattgctcgagtaccgggtattggtttagtttttaccgatctcacctctggaatccctgccaacttctctcgttttgtcacaaaccttcctgccttccattgtgtccttgtcttcgtgtgtgtaaaatcagtacctgttccatttgtgcccccagctgagcgctatcttgtgggccgtgtgggtccggctgctcatcggtcttataggtgcattgttcgttatgggtaccgagatgtgcatcaggatgttgattcttttgaatcggagctagtttccaaactggctgatttcattcactatgattggcatcgaagccagcacagtccccattctgaggaggatgtttcccactctaacgaatcaacaagtgaatgtagattagccgtgatagggacagttgcattttctggcacaccagcttatgagattgaggaaagtatgcaaccagcaagcgtatctattgggcgctcgccagtcgagagtgtcacacatggcattgggatggagcctgtgcatgccgttgaaagaagagttagatttgccatcgatgatgactccgaatctgatgtgaggaccaacatggagttgcagttgcgagaggagctacaagatctgttagcagcccaagaagccgggactgcattcatactagggcactcacatgttcgagcaaagcaaggatcatctgtttttaagagattggccattaactttgggtacaatttcttgagaaggaattgccgaggaccagatgtggcacttaaggtgccaccagtatctttgctagaggttggcatggtttatgtggtgtaagcctctgatgtaagtagttttggtagttttgcgtgttgcatatggccgacctgtaaagaaatatatataactggtccaagagaggttcgcctgctttcgtcacggtccgcacacggcttgttaggctaaagtgcctacatccgatgtaatagagaaatgaaattagttttatcacgaaattctcaaattgcacgtcggactcttttaacaagatgcaattattccttacc

SEQ ID NO: 5528 - DNA, 297 bp, Gossypium hirsutum
  Clone ID: AI725751.1
ttttttttttttttttttttggaactagcaagtacgtcttctttctttcacttcattatatttatgtttatgtatatatctctggcataaatataataagctacaaaaactagttacatgagatgggaagcttacaccacataaaccatgccaacctttaataaagagattggccattaattttgggtacaatttcttgagaaggaattgccgcggaccagatgttgcactcaaggtgcccccagtatctttattagaggttggcatggtttatgagatgggaagcttacaccacat

SEQ ID NO: 5529 - DNA, 327 bp, Gossypium hirsutum
  Clone ID: GOSHI-09MAY01-C17751_1
gttaaggaccaggaagagaaggcaaagagatgcgaatgcgttcaagggctgctgttgtctgcaattgttgatgatatcttataaagctgctgtaatttccggacaccggttcctgatggacatcaagttcagggaagagccttcatcccactttcaatctagggtttgttaagctgttagtggtgaatatcttgatgtatgtattaagcaaaatgttgaaataaggtgtagcaatgagtgtaatttttaatgttcgatgatggacttattttgaagttcttattttgtccaacaacatatttaagagttaaagtgatggagattaca

SEQ ID NO: 5530 - DNA, 544 bp, Gossypium hirsutum
  Clone ID: uC-gsflmaxxa026e10b1
gggagattctttttctttttttcttttgctgttgtaacactaggggttttttttttatgatcaattataatccttttgttgtaaagttcttattttcagagggtactttgggggattttattgcttggagatgatggagaacagtgaagaatcagcagtggatgatcaagggtcaggatggtttcaagtgaaaaagaagcacagaagcagctcgaagttttctgtacaaagttgggttggggggtattcgaccaaaaatgctaataatttggtgagaggtcggccattgtcgaacaagaagggtggagctgtgcaaggaaaatatagatctttgcttcgatcatctggggggaattcagatggacatacccaggatggttttgcaaattctactgccgagtcaaatgaagatgaaaagagcctttatcccactttcaataaggggtttgtaagctgttagtggtgaatatgttgatgatgtattaagcaaaatgttgaaataaggtgtagcaatgagtgtaatttttaatgttcgatgatggac

SEQ ID NO: 5531 - DNA, 718 bp, Gossypium hirsutum
  Clone ID: GOSHI-09MAY01-C17771_1
caacagctcactgttttctccgatattatcctaaattttcccgtgaaccaaaaggaaagatgatgaacccccctagcaactccaaaacccccaaaaatttctcgccattcaaacaaacccctcctctccaagacctccagcaagccttctcgaacatccagacccactgctcttctctcttccgacaaactcaaaatcagttaatggacgcttttaactccaccttttctcactttaatccgccttctttttctccaaaagggccggtttttgctcgaattgctgattctagcaagacccagattgctttgagtaaaaaaaacggtgatgccatgccggcagagaaattagaagagagattggctggggttccggtctatgccttgagtaactcagaggaggaattcgtgttggtttcgggtgtttcgacgaaaaaatcacttgggttgttgtgtttcaagaaggaggacgctgaggctcttttggaacagatgaagaatatggatcctggcatgcgaaaaggaggctctaaagtggctgctgttgctcttaacaaggttgtccagctgcaggttgctggtgtggcacttaggctggtaccagagtccactcagatcaagaatgcacttagatctaggagcttggtactaagaagtcaaaataagagctatcgaccagttttctttcgaaaggaggatttagagcaatcacttctgag

SEQ ID NO: 5532 - DNA, 1291 bp, Gossypium hirsutum
  Clone ID: GOSHI-09MAY01-C17691_2
attccctgtacgagggtatcgacttctactcaaccattacccgtgccagatttgaggaacttaacatggatctattcagaaaatgtatggaaccagttgagaagtgtttgagggatgccaagatggacaaaagcagcgtccacgatgtcgtgcttgttggtggttctactagaattcccaaggttcagcaacttttgcaagatttcttcaacgggaaggagctctgcaagagcatcaacccagatgaagctgttgcttatggtgctgcagttcaagccgctatcttgagtggcgagggaaatgagaaggtgcaggatctgttgctcttggatgtcaccccgctgtctctcggtttggaaaccgctggcggtgtgatgactgttttgattccgaggaacaccaccattcccaccaagaaggagcaggtcttctctacatactcagacaaccagcctggtgtgttgatccaggtgtacgaaggtgagagagcatcgtcaagggataacaacttgcttggtaaattcgagctctctggtatcccaccagctcccagaggtgtcccacagatcacagtgtgctttgatattgatgccaatggtatcttgaatgtgtccgccgaggacaaaaccactgggcagaagaacaaaatcaccattacaaatgacaagggaaggctttcgaaggaggaaattgagaaaatggttcaggaagcggagaagtacaagtcagaggacgaagagcacaagaaaaaggtggacgcaaagaacgcgttggagaactacgcatacaacatgaggaacacagtgaaggatgagaagattggtgccaaacttgctgcagcagataagaagaaggttgaagatgcaattgacgaggccatccaatggttagacaacaaccagcttgcagagtcagatgaatttgaagacaagatgaaggaattggagagcatctgcaaccccatcattgccaaaatgtaccaaggcgctggagctgacatgggtggcatggatgaggatgccccagctagtggaaccggcgcaggccccaagattgaggaagtggactaagaaatttctctccattcttttcgacccttacatttgttcctttagtcgtttcatgttggtttcttttttattggactttagacatgtttttgaggatacatgtttttgaggattttgtttgaagccaatttttgagtattttagttattggacacattgaactctggtgttattgccgggtacctctttgttatacaaattttccattggttttccttttg

SEQ ID NO: 5533 - DNA, 725 bp, Gossypium hirsutum
  Clone ID: GOSHI-09MAY01-C17691_1
ctcgtctcctgcagccattgttacccatcttcttcaagcttggcataccgtctcgcccccccgtccgcggccgcgtcgcccgacgcgtgcgttcgaattttacgttgttgcgttacgcgtcatccaactgtcccctctcaactttccaggttccctgctttacatctcctggagaacacagtcctcaataacactatgtcctcctctttttcttctttcgctcattcaaatagaagtggaggcagaggtcaagatatgaaacatgatcgagaaagatccagaggctgtggcggcggcggcagcaaagacaaaattgatgctcttggtcgactcttgacacgaattctgcgacatatggctactgaactgaatttgaatatgcgaagtgatggttatgtcaaagttgaagatttgctgaagctgaatatgaaaacatttgctaatatccctttaaggtcacacactgttgatgatatcaaagaggccgtcagaaaagataataagcaacggtttagccttcttgaggaaaatggggagcttttgatacgtgcaaaccaaggccacaccgtcacgacagttgagtccgaaagattattgaaacaaatcctttcagctgatgaagtgcaattttgcgtgcatggaacctataagaggaatttggaatcaattttggagtcgggtttgaagcgcatgaaaagattgcatgtcacttctcaagtggcttg

SEQ ID NO: 5534 - DNA, 464 bp, Gossypium hirsutum
  Clone ID: LIB3147-050-Q1-K1-A11
tcgtccaaccgtcccctctcaactttccaggttccttgctctacatctcctggagaacacagtcccctataacactatgtcctcctctttttcttctttcgctcattcaaatacaagtcagaggacgaagagcacatgataaaggtggacgcaaagaacgcgttggagaactacgcatacaacatgaggaacacagtgaaggatgagaagattggtgccaaacttgctgcagcagataagaagaaggttgaagatgcaattgacgaggccatccaatggttagacaacaaccagcttgcagagtcagatgaatttgaagacaagattgaggaagtggactaagaaatttctctccattcttttcgacccttacatttgttcctttagtcgtttcatgttggtttcttttttattggactttagacatgtttttgaggattttgtttgaagccaatttttgagta

SEQ ID NO: 5535 - DNA, 323 bp, Gossypium hirsutum
  Clone ID: LIB3493-035-P1-M1-D6
gcatggatgaggatgccccagccagtggaaccggcgcaggccccaaaattgaggaagtggactaagaaatttctctccattcttttcgaccctttcatttgttcctttagtcgtttcatgttggtttcttttttattggactttagttattgttttctggctttgaacatgtttttgagggttttgtttgaagccaatttttgagtattttagttattggaaacattgatctctggtgttgtacaaattttccattgttttctttttgaatcttccatttttatttttattttttgaaatttcagttcttaatttttagttca

SEQ ID NO: 5536 - DNA, 629 bp, Gossypium hirsutum
  Clone ID: GOSHI-09MAY01-C117699_1
cttcttcaatgtacagctagcatatgaatatttgtctgttgcttttgggatttgttccttcacctttagcttttctttcgtttaactcactgagcaaaagagggaaagctttgctcttttggggccgggcagagacaaggagaaaatggagaaagcattaactaaagtcgggagcttgaaagttggtgggttatggatctcaaagaaagctaaggaagagttctctaacatcactgcagatctgactactttctcaaacaccgttgaagagaaggcaaaatgggttttcaacaaactgaaaggaaagccaacgaaaagcttgccagatctccttcaagagtacaacttaccgccgggcctctttccccagaatgttatctgttacgaattcgatgaaaccaaggcgaagctgattgtttacatgtcctctccgtgtgaggtcagcttacaaggatttcctcggtcataagatacgcaacacgtgtgaaggggactctccttcggggaaagctgacaggcatcgaggaatgaaaacaaaggtcctatttgggttaaagtgacaattgtggcggttgaaggctataaatcaaacaaggtgtggtttactgctggagttaaaaatcaaggcc

SEQ ID NO: 5537 - DNA, 470 bp, Gossypium hirsutum
  Clone ID: GOSHI-09MAY01-C17601_1
acagtacaagccgaaagaaatattgcatgatattcacgaccagcatggagtcgctgggtcttatatgcaagcttggcctgggtaggaacggagtatggctgcacttcatgggacttttgaggaagggtatcgtcttcttcctgcatactgtgagcaaataacgaaaaccaatccaggaagtgttgcatcagttgttgctactcgacaagaaaattgtttccagtgcctctttatttcttaccgcgcatctatctacgggtttataagtgcttgcagaccacttctggaacttgataaggtggatctgaaaggaaaatacttgggttcatggctttgtgctgcaccagttgatgctgatgaatgtcttgtttcccttggcaattgctattgttgatgttgaaaatgatgaaaattggatgtggttcgtgtcagagttgagaaagcttctttgggtgaacactgaaaacatg

SEQ ID NO: 5538 - DNA, 423 bp, Gossypium hirsutum
  Clone ID: GOSHI-09MAY01-C17141_1
gtctggtgaaattcagggaactttcaatggcagtgctttacagatgctttggctgaataatcaactgcatggagggatgactggtccaatcgatgttgtggcaacgaatggagtccctcacaggtgtatggctgcacgggaaccacttcactggaacaatcccagagagaattggtaagttaactctcttgaaggatctcaatcttaatagtaacaaacttgttggcctaattcctattagtttagcaaatatgagactgcaaaacttagatttaaacaataatcacttgatgggtccaattccaatgttcaaagcatcaaaggtaacttttgcttcaaacaagttctgtcaagccactcaggggcttctttgctccccagaagttatggcacttaatagagtttcttggagtgggaattacc

SEQ ID NO: 5539 - DNA, 1438 bp, Gossypium hirsutum
  Clone ID: GOSHI-09MAY01-C17051_1
gcttgtgattgtttcatcttcttgttcctggaaaactatggagtaaggaagctggaagcattttttgcagtgcttattgcaactatggcagtctcatttcctgggatgtttggtgaaacaaagcccagtggcactgagcttcttcttggtgttttgattccaaaactcagctccaaaacaatcaaacaagccgtgggagttgtgggttgcattattatgcctcacaatgtgttcttgcactctgctctcgtccaatcacgagaaatcgatcacacgaagaaaggccgagttcaagaagctctcaattattactcgatagaatctgctgctgcgcttttaatttcgtttataatcaatctgtttgtcactactgtctttgccaaggcattttatggcacagaagtagccagtactattggtcttgtgaatgcagggcagtatcttcaagacaaatatggaggcgggttgttcccgattttatacatttgggctatcgggttgttagcagccggacaaagtagcactattactggcacttatgctgggcagtttatcatgggagggttcttgaacttgaagttgaaaaaatggctaagagcattgatcactaggagttttgctattgttcctactatgatagttgctcttgttttcgatacttctgaggcagcgctagatgtcttaaatgaatggcttaatgtgcttcaatcgattcaaatcccttttgctcttatcccactactttgtttggtttctaaggagcaaatcatgggtactttcaagattggctctgtgctcaagacaattgcatggctcgtggctgtactggtgatattgatcaacgggtaccttttatttgacttcttctctaacgaagtcactggcgtaatgttcacaagtatagtgtttgcatttaccggcgcatatatcgcatttattttctaccttgtttcttggggttttgcttcatccgcttggcgccgcttgtcacccgcgaaataggcagggaatccagtgatcaatcttacccttctcaagccacgagatcagcctatcgagttaggatcaatcaaacttcgctttcatagatgaatttctccagttaaaagcgtatgttcctttttggaaatgcatactcatatagggacttttatgtacaaagttcagtttagtaagctttgcatttttctggagtattcttaaaaaaaaaaaagcttgtaggttccatgttatggtgttaaagaatgtactgatcatatcctgctcaatgctataacactaaacattcatttgaaaatatttgaaggtaccaaaactatgtaactctttttattattataaataatgcagccataattttggttcaagctagctatatacgtgaaccagctttgaacaaatatgtaattcaattgttttgctggtttgccattcttct

SEQ ID NO: 5540 - DNA, 646 bp, Gossypium hirsutum
  Clone ID: LIB3543-042-Q1-K6-B9
gcgttcgcccagcgtccgggagttttgctgggggggctactatgatagttgctcttgttttcgatacttctgaggcagcgctagatgtcttaaacgaatggcttaatgtgcttcaatcgattcaaatcccctttgctcttatcccactactttgtttggtttctaaggagcaaatcatgggtgcggggaaaattggctctgtgctcaaggctattgatttatgcttaggttatacggtccatgcgtgatcttcaatttcatcgattttccaatattttggctggttgattttccctattcttgagcttccaatgacctcatgtctaaaatttgggcttgtactcggtctcttctgctttcctagagatttagggtaatgtagaaaaggaaatacagtgagatcattgacataccaacattgaagctatttcgatgaacaattgcatggctcgtggctgtactggtgatattgatcaacgggtaccttttatttgacttcttctctaacgaagtcactggcgtaatgttcacaagtatagtgtttgcatttactggcgcatatattgcatttattttctaccttgtttctcggggttttacttcatccgcttggcgccgcttgtcacccgcaaaataggcagggaat

SEQ ID NO: 5541 - DNA, 715 bp, Gossypium hirsutum
  Clone ID: GOSHI-09MAY01-C17001_1
cggacgcgtgggggaaatggcaggcgtcgaagcagggaaggaggaggaggcgaccgctgtgagaatcaccggaaaaagccacgtcaagccgggtaagttgataggaagaaaagagtgtccgttggtcacatttgatctcccctacctggctttctattataaccagaagctgctgttttacaagaacgacggtggtggtgagttcgaggacaaggttgaaaagctcaaggaagggctgagggtggtgttagaggagttttatcagctaggaggtaagctcgggaaagatgacgatggggttcttagagttgattatgacgatgatatggatggtgttgaagtggtggaagccgtggcagaggggattaccgtcgatgaattgaccggtgatgatggtacgagctcatttaaggaattgataccttttaatggcgtcttgaacttggagggtcttcacaggcctcttttgtccatacagttgacgaagttgaaagatggtgttgcaatggggtgtgctttcaaccatgccatcctcgacggaacctccacttggcattttatgagctcttgggctcaaatctgtaacggtacttcgagctccgtcgttgtgccgccgtttcttgatcggaccacagctcgaaacacccgcgtgaagctcgacctcagtccggttgtttcctgcaacggcgacgacgccaccaaacaaggccagcca

SEQ ID NO: 5542 - DNA, 487 bp, Gossypium hirsutum
  Clone ID: GOSHI-09MAY01-C17351_2
caaacaaaacccttttggaacagtgggcatctgcgatggttatggtgcctggctcaagtccgcaaaccgatccaagtctctcaaaacaaaaccccaggaaatgttgtctcaattcgccctttctttttttcggtaaatcccctttaaattcctcaaaaccccatgaacccctcaaatgccggcgccccctttccaatctctatgtcaagaattcaatgaaggcccctgttacttcttcttcatcaaattttgggttcaaggaattgttggaaactttcacggtggaagttcagaaagctgagaacaaacccctaaatgttcctttggttgctcctttcaccatagccacttctaggcttgataaagtggagaacgtggcaatcaggatcgagttgaaaaatggatgtgttggttggggtgaggctccaattctgccttttgttactggagaagatcaacctactgctatggctaaagccacaggggc

SEQ ID NO: 5543 - DNA, 591 bp, Gossypium hirsutum
  Clone ID: LIB3543-028-Q1-K6-H11
atctgcatggttatggtggcgggggggggggggggaaaccaatccaagtctctcaaaacaaaaccccaggaaagttatctcaattcgccctttcttttttcggtaaatcccctttaaattcctcaaaaccccatgaacccctcaaattccagctccccctttccaatctgtgtgggggggggggaattttttcccctgttacttcttcttcatcaaattttgggttcaaggaattgttggaaactttcacggtggaagttcagaaagctgagaacaaacccctaaatgttcctttgattgctcctttcaccatagccacttctaggcttgataaagtggagaacgtggcaatcaggatcgagttgaaaaatggatgtgttggttggggtgaggctccaattctgccttttgttactgcagaggatcaacctactgctatggctaaagccaagggggcctgtgacatgctcaagaattgttctttcttgactcttgaggcagtgctgggggagattggtgatcttttacctggccatcagtttgcttcagttagggctgggattgagatggcattgattgatgcgggtgcta

SEQ ID NO: 5544 - DNA, 683 bp, Gossypium hirsutum
  Clone ID: GOSHI-09MAY01-C117349_1
tccacgcgtccgccaaaccctaaataaacccgacccatatactgcagcctttaccacctctctataatttctatttctctctttcgtttctccatacccccctcttaaaaaaccaaagccaaagccaaagcaaaatccaactcgaaacgctatcttctttttgctctgtaaaaagatatctatggctgttgaagctaggcatcttaatcttttcccccctcagtttacaggaaacagggagacgatgaatccaattcaaggaaacgggaatatgtatcaaaccgagattggatatggggttccgttatcgggaaccacgacggtggcggaagggttgcttccgttgtataagtataactctacggctacggcggcgatgaaatcggagagtagcttgacgtacaacaacaatgttcttcctttaccgaggaagcgttcgagggattcgattaatccgatcctttcgtttccttcaccggttcaacaacaaagcaataataacaacggcaataataagacttgttttcttggtcatgatatttcttttcatatggagcaacaacagttggatattgatcgcatcatctcccaacatatggagaaaatgagggtggaaatggaggaaaaaaggaagagacaagccaggaagataatggaagcaatcgtaggtggagtgatgaaac

SEQ ID NO: 5545 - DNA, 676 bp, Gossypium hirsutum
  Clone ID: GOSHI-09MAY01-C17371_1
gtcattcacaagcttgtactgtctgtaggtttgcaattcattttatgggaaaatcgctgcccggcgcaaccaagcttcaacatctcgcaaaggttaccggcgccgcccaccatcttaacacaactgggaaaaacccaaaacccactactctgaaccggcggattataagtgaagacaacaaacccaattccaagaagaagatggagagctccagtgccagtcaacgcctcccactttccgaagtcgtctccgattgcgttaaacgttggttcaaagatactctcaaggaagccaaagccggggacgttaacatgcaggttcttgtgggtcaaatgtattatagcggttatggggttccccgagatgcccaaaagggaagaatttggatgacaagggcgtcgaggctgcggtcttctgtttggaaagtcagccataagcatccaggttataatgcgagtgattcagattcggatgaaatcaagggtgattcttgagtttaacatacttggtctctgcatttcgaacatttagaatcggtccgcatggtggtcatgcctgttttgtctccttgaaagttccttgttcctgtgttgtaactctttttttttttttgccccttctttcttgtaatttggtttttgtttttataaaaatttcctttttataaaaaaaaagt

SEQ ID NO: 5546 - DNA, 738 bp, Gossypium hirsutum
  Clone ID: GOSHI-09MAY01-C117359_1
ctcacgcgtccgcggacgcgtgggccggaacaggaattcttagcgcaggtctccatggtttcgagattaaaagacgaaaatgttgttcagcttcttggttattgtgttgatggatccctccgtttcctggcgtatgagtatgcctctaatggatcactccatgatagacttcatgggaagaaaggtgtgaaaggagctcagccaggtccagttctatcatggacacagagagttaaaattgcttatggagccgcaaaaggcctcgaatatttgcacgaaaaggcacatcctcatataatccaccgtgatattaagtccagcaatttgcttctttttgatgatgatgttgctaagattgctgatcttgatttgtcaaatcaagcccccgacgcgaccgctcgcctccattctacaagggttcttggaactttcggttatcatgctccagaatatgcaatgacaggaacacttagttctaagagcgatgtttacagcttcggtgtcatccttctagagctcttaactggtcgcaaaccggtagatcatacgttgccacgtggacagcagagtctagtgacatgggcaaccccaaaactaagtgaagacaaggtgaagcagtgtgttgatggtagactaaatggagaatacccttccaaagcacttgcaaagctggctgctgtggctgcattgtgtgttcatttgagctgattttcgaccaattgagcatgtagtgaaagc

SEQ ID NO: 5547 - DNA, 1026 bp, Gossypium hirsutum
  Clone ID: GOSHI-09MAY01-C17291_1
aaattattaagctataaaccaaatagagtttgggatgttctgccaactaaaacccagaagatgcgatgagctagtcaatgttcactcggaaagtactggcatcatttatggcatttaaatggagagaaacggttggtgactgttaacttcccttccgctttcaatataaattagaacagatcagagattggtccaattcattttgcatctatccttggggcttgggttctttattgactcaggttttcaaaaagctttctttggcttcattattcagctttgttgggttattagctttgagatttgaacatgggggaggaatacgatattgtgaatttgattgcgttgggagtgatctcatggacgacagtttttctacttgtccgaaaaatcttctccgaccgctcctttgaactttgcaaccgcattgtttctacaatccatgggattttggctgtgattttagcctcgctctctgttgaagattggagctgccctgtttgtcctttggcttcggcttctacgcctaagcagaggcaagttttggctgttaccgtcgcttatcttatatatgacctcatatgctgcctctttgacgtcaaattcactcttgacaatacagttcatcacttggtcagcatcgttggtcttgcagctggccttgcctttcaattgtgtggatcagaacaagttgctgccttattcataacggagatctcaagtcctttcctccacgccagggaactgcttaaagaattcggttacagggacaccgatctcaatttagcagctgatgtcctatttgctgtaatattctcagttgcaaggatggtgggtggaccttatctcactttcgttactctgacagctaataacccactacttatcaaggcaatggctgtaggacttcagttagtgagtgctttctggttctacaagattgtaaagatggtgaagtacaagcttactaaaagatggaagcaggtgggcatgcctggaaaattggactgaggctgtgttacatat

SEQ ID NO: 5548 - DNA, 1242 bp, Gossypium hirsutum
  Clone ID: GOSHI-09MAY01-C17241_1
gcaggcccaacaaaaaatcgggaaacattttaatttcgttgtttcaagtccttcgtagggatagcagatttgatttacagagaccaaagggggggaaatggcgatcacactgaacaatggatttaagatgccagtggttggtttaggtgtttggcgtatggatggaaaagacgttagagacctcatcatcaactccatcaagcttggttatcgtcattttgattgtgctgctgactacaagaatgaagcagaagttggtgaggcattgtctgaagcattcaaaactgggcttgttaagagagaggacctctttattacaaccaagctttggaattctgatcacgggcatgttcttgaggcctgtaaagacagtcttaagaagcttcaattggattatctggatttgtatctagttcactttcccgttgctgtaaagcacactggagtcggtcaaacggacagtcctttggacaaggatggagtcctggacatagacacgactatatcgttggagactacctggcacgcgatggaagatttggtttccaagggtttagttcgtagcatcgggatcagcaactatgacatctttttaacaagagattgcctagcttactccaaggtgaagcctgctgtaaaccagatcgagacacatccttacttccaacgtgattgtcttgtaaaattttgccagaagcacggaatctgtgttaccgctcacactccattaggaggtgctgctgctaatgcagaatggtttggaacagtgtcatgtttggatgatcccgtccttaaggcgctagctgagaagtacaagaaaaccgtggctcagatcgttctccggtggggaatccaacgaaacacggtagtaattccaaagacatcaaagttcgagagattgaaggagaatttcgaggttttcgacttcgagttagccaaagaagacatggacaaaatcaaagccattgaccggaaatatcggaccaatcaacctgccaagttttggggcatcgatctgtatgcttagagcgcgatgccgggtattctgtgtgtggcgacttacgttttttgaagaataagagcaaaaaaagtccatgacttgcatcagcaaagaaaaaaacttattattagattcatcaatcgcccaaagtttcttcttcttctttttttaaatgtacctaagtttcttgcatgttatgacatttacgttttatctgtatggattgagaataatttttcttt

SEQ ID NO: 5549 - DNA, 635 bp, Gossypium hirsutum
  Clone ID: GOSHI-09MAY01-C17271_1
gtttaattcttctttaattaaccgttaatcaaattgaagatcatacttattttggatttacgaagagaagtagctatcttttctttgattttcttgttcttgttaagtgatggaaaacaaagcggcggtgaggtttacattagggaagcaatcgtcgatggctccggagagagacagaggcgaagcggatgggaaagagaacgaggaaggagaggagatagacgaaggagttaggttgatgtacttggccaacgaaggtgatttggacggcattcgcgagctcttggactcggggatcaatgttaatttccgcgacatcgatgatcggacggctctccatattgcagcttgtcaaggacagaccgatgtcgtttccttgctccttcagcgcggcgctgacgtcgaatctacagatcgatggggaagcactcctttggcggatgctgtatattataagaatcatgatgtgattaaacttctggagaaacatggatctaagccttttatggctccaatgcatgtaaatcacgcgcgtgaagttccagaatatgagattgatccaaaagaacttgattttactaacagcatcaacattacaaagggaaccttctgtattgcattatggcgtggaacac

SEQ ID NO: 5550 - DNA, 577 bp, Gossypium hirsutum
  Clone ID: GOSHI-09MAY01-C10951_3
attgccgccgctgtcgtcgcaatggtgaagtttctaaaaccgaacaaggccgtgatcgtcctccaaggccgatacgccggccgcaaagccgtgatcgttagatccttcgacgaaggcacacgcgaccgcccttacggccattgtttggtcgccgggacaaagaagtacccgagcaaagtcatccgcaaggactcggccaagaaaacggcgaagaaatcgcgtgtgaaatgcttcgtcaagctagtgaattaccagcacctgatgcccacgcgctacaccctcgacgtggatttgaaagacgtggtcaccgccgatgctctccagaccaaggacaagaaagtggcggcttgtaaggccactaaagagaggtttcaggagaggttcaagacggggaagaacaggtggttctttactaaacttaggttttgaatgatttattctaatggtgttaaagctttttatgtagtttctttaacattttggatttgaattttgagtctgttgtgcaatgagatattttctgggtttcttattgatttttctcgtttctgttgcaaattcatataattatctgagt

SEQ ID NO: 5551 - DNA, 650 bp, Gossypium hirsutum
  Clone ID: GOSHI-09MAY01-C10951_2
gagaaccggagctactgtcgtcgccgccgccatggtgaagtttctgaaatccaacaaggccgtgatagtcctccaaggccgatacgctgggcgcaaagcggtgatcgttagatccttcgacgatggaacacgtgatcgcccctatggccactgtttggttgcagggataaagaagtacccgagcaaggtcatccgcaaggattccgccaagaaaacagcaaagaaatcgcgcgtcaagtgcttcgtcaagctcgtcaactaccagcacctgatgcccacccgctacaccctcgacgtagacttgaaagacgtggttaccgtcgatgcacttcagaccaaggacaagaaagtggcggcttgcaaggcgaccaaggagaggttcgaagagaggttcaagactggaaagaacaggtggttctttactaagcttaggttttgagggtatttacctttattatagtatctttttttgagaaaaaaaagtttgaatttggatctagtgtttcaagcattttgaattttaaggacggattttgaatctgttccgatgggatatttttatgtgctcttttgttgttatctgatgctatgttgcttactcattttcttagacattatggttattatctctcaaaaagaatctttagtat

SEQ ID NO: 5552 - DNA, 664 bp, Gossypium hirsutum
  Clone ID: GOSHI-09MAY01-C10951_1
cccacgcgtccgcccacgcgtccgccctcgcgtccgggcgtggagagaaccggagctactgccgtcgccgtcgccatggtgaagtttctgaaacccaacaaggccgtgatcgtcctccaaggccgatacgctgggcgcaaagcggtgatcgttagatccttcgacgatggcacacgtgaccgcccctatggccactgtttggttgcagggataaagaagtacccgagcaaggtcatccgcaaggactccgccaagaaaaccgccaagaaatcgcgcgtcaagtgcttcgtcaagctcgtcaactaccagcacctgatgcccacgcgctacaccctcgacgtggacttgaaagacgtggttaccgtcgatgctctccagaccaaggacaagaaagtggccgcttgtaaggcaactaaggagaggtttgaagagaggttcaagactgggaaaaacaggtggttctttactaagctcaggttttaagtgttttattggaacatgttttatgcttaagtagttttatcgaacaattttgaatttaatgacggattttgaatctgtttggataagatatttctgggttattatttttgttattttatggaacgtgatttgctcatttctataagaagtttaagcttttgaactaaaaaaaaaaaaaaac

SEQ ID NO: 5553 - DNA, 570 bp, Gossypium hirsutum
  unsure (1)..(570): unsure at all n locations
  Clone ID: LIB3825-028-Q6-K6-D1
ttttgcgccagngcgagatcaaagccgccgtcgccatggtgaagtttctaaagcccaacaaagctgtcattgtcctccaaggccgatacgccggacgcaaagctgtgatcgtaaaatccttcgacgacggcacacgtgaccgtccctatggccactgtttggtcgcggggataaaaaagtcccgagcaaggtcatcctcaaggactccgccaagaaaaccgccaagaaatcgcgcgtcaagtgcttcgtcaagctcgtgaactaccagcacctggtgcccacacgatacaccctcgacgtcgacttgaaagacaccgtcacagtcgacgcgcttcagaccaaggacaagaaagtagccacttgtaagactatcaaacaaaggctggaagagaggttcaaaacaggaaaaaacaggtggttctttaccaagcttaggttttaagtcttcctttccttttaacattttccgtagaacctcttatatcatttgcacttctcttggtgctgtacttattcagccttagatcgatacggaaaaaaagcttgagaattcgagtccttcgttgtttg

SEQ ID NO: 5554 - DNA, 396 bp, Gossypium hirsutum
  Clone ID: uC-gsflnu33B110c02b1
tttttatggactccgcgaagaaaaccgccaagaagtcacgcgtcaagtgcttcatcaagctcgtcaattaccagcacctgatgcccacgcgctacaccctcgatgtggacttgaaagacgtggttaccgtcgatgctctccagaccaaggacaagaaagtggccgcttgtaaggcaactaaggagaggtttgaagagaggttcaagactgggaaaaacaggtggttctttactaagctcaggttttaagtgttttattggaacatgttttatgcttatgtagttttatcgaacaattttgaatttaatgacgggttttgaatctgtttggataagatatttctgggttgctttaaaaaaaaaataattcatctttcatttctatgttcaatcaaat

SEQ ID NO: 5555 - DNA, 932 bp, Gossypium hirsutum
  Clone ID: GOSHI-09MAY01-C10941_1
cggacgcgtgggcggcggtggcagttatttcgacgataaatacggaggatataatgtcagcagatccgatttaggatccgatctctatggaaaccgatcggatagctattcacgatacggtgatgatggtgggtatggtgacggggtttatgcttatgcaggaggaaaggcggagccttatggggcacgtggtacagcctcaaaatcgtcgacttgggttcaattcgatgattttgggcgatctattaatatcccttctgggaaggactcgtctggtgggtcaggtttagccgccggtaagattttgagggcggtgccgaaggatgacacccagcaagatgtaaaaagcggtgtccagaaatttcgtgttaagttgttgtctgaaagtggagcacatggccccatggacgtactttgccagattggtttagatggtattcgtatgcttgagcctagcagcagtcgaatattgagaatatatcctcttgagaacatcacaagatgtgaagtgttggactcatctacctttgcattctggtccaaaagctctgttgacattgaaccaagacggatcaggttgcaatcaaacagttacactaccaatacccttctggatattgtaactgctgcaactgtacagatcaaggagatgggttggaaaagtcggcctcctgaatctgccaaggctgctgaacaacctgctagttaagaagagagggtttgctgattggatgaacattataaaacctggtgctgaggagaaagatcactgggtgcctgatgaagctgtttcaaaatgcactgcttgtgcaacagattttggggctttttgtgcggtagctcctctgcaggaactgtggtgatatttttctgtgacaaatgttcccatggtagattttctttatctgcttgtgagtgttctttcatatgtt

SEQ ID NO: 5556 - DNA, 1752 bp, Gossypium hirsutum
  Clone ID: GOSHI-09MAY01-C10911_1
tctcacttccttttttcagacaattatttttcttctttgtagaaaggtgtgatcttcaatttagcctcaagattactaaaattcaaaaccatagtcacccattcgattcaagattttcttttttgttttcttctttttttccccgaagttttggtttaaattctagggttttcgatagtcacccatgggagaacgcaaagtggaggatatgtcgttgtcagctctcttcgaacaagctcgtaagatccatcttacggtcacggagtccggtgctgatcaggtacaacctcttcttatgcttgattcattgttctttcgacgccgatctgatgaatatcaattccatgggttccgcaggatctggtaaagaaaggatgcgaggtgctggagaagtgcgaggacatgataaccaagctagggcttttctcatccaatgagaccaaagatgatatcagcaccaacaatctcaagtaccttctggtaccgttttatctggcagagctgacggaaaagcttgcgcaggaggtaaggatacagattctcaagatttcgcaagctaaattgaaggaattcatttcattttgtgaagcaatggaacttgtaccacaggaagagttggaagcttctgtgcaaggagcttcaaattcttttgctgaccgaagagctttgaagattgcttgttttagacgccaaagggctgcagaggcaaaacttacagaaataaaggagcggaaggagcggcgtggacgttcaacaaaagcagctaccttatccactcctgtggaggttggagaggactgatctgcttgatgatgatggggcaggaggaacgagaggcctggccttctgcgggcgcaggggctgtttgtaaggcttttgatctgcttgaaatgctgaagaaggaagaggaaatgctttctgcgataaaggagaaacagctcaaggatggggaaaaggaattttctcaggctatccttgatgatcgcaccaagaaagcagaggcatggcatcgtgatgctgcagctcgtgcacggtatactcaacctgcagcacctattacttgtgctacatttgctcaaaatgttattgaaggaagggcaaatgtatcgcaagcacatgaccacaaacaccagccaatgatctttggaccacaaagccttataggtgggagcctaacaagtgaaagggaaaggatggcagcacaggttttccaacctgcttatcggatgccaactataagcatcgaggaagctggtctgagggagatggaaatgatgaataagtggcaggagaggaatgcaaaaatgtttgaagaagctaactcagcatggtacaaggacaaaccaaagatgggaccaagtgaagatgatgaagacgatgatgctgcccaagagaaggcacgagcatgggatgactggaaagatgacaatcctcgaggtgcaggcaataaaaagcttactccctgcgggtgaaagtgaccagtagttcccatacttctcttgcaacgtattctttcaggcctactaaatgtggttttaggaatgtttcttaaatattttattttgcttataggttttgttcttaaaagaattttgtttgtttgctttggactctacataaaatgcatacatcaacttgattgtatgtaggtaatcacctagttgtcaacttagtatattgttttcggctttaacaaaatgtttagtgccaaactttgggaccgataattatatgaaataacaagcttgagtc

SEQ ID NO: 5557 - DNA, 431 bp, Gossypium hirsutum
  Clone ID: uC-gsflmaxxa088e12b1
ctttgtagaaaaggtgtgatcttcaatttagcggtaagatttctaaaattcgaaaccatagtcacccattggattcaagattttctattttgttttcttctttttttccccgaagttttggtttaaattctagggttttcgatagtcacccatgggtgaacgcatagtggaggatatgtcgttgtcagctctcttcgaacaagctcgtaagatccatcttacggtcacggagtccggtgctgatcaggatctggtatagaaaggatgcgtggtgctggtgttgtgctaggacatgattagcatgctagggctttttttattcattgtgacctaagttgattttcagttccaacattctctagttccttttggttctgttttatcttgcatttcttgcggaaattcttgtgcatgaggtaaggatttatttt

SEQ ID NO: 5558 - DNA, 428 bp, Gossypium hirsutum
  Clone ID: LIB3135-044-Q1-K1-G9
cccacgcgtccggaaacagctcaaggatggggaaaaggaattttctcaggctatccttgaggagcgcaccaagaaagcagaggcatggcatcgtgatgctgcagctcgtgcacggtatactcaacctgcagcacaggttttccaacctgcttatcggatgccaactataagcatcgaggaagctggtctgagggagatggaaatgatgaataagtggcaggagaggaatgcaaaaatgtttgaagaagctaactcagcatggtacaaggacaaaccaaagatgggaccaagtgaagatgatgaagacgatgatgctgcccaagagaaggcacgagcatgggatgactggaaagatgacaatcctcgaggtgcaggcaataaaaagcttactccctgcgggtgaaagtgaccagtagttcccatactta

SEQ ID NO: 5559 - DNA, 346 bp, Gossypium hirsutum
  Clone ID: LIB3166-031-P1-K1-H6
tctttacatctttttgaaatgcttttttttgaagaggaaatgctttctgcgatggaggggaaacagctcaaggagtggggacaagcaatattctcaggctatccttgacgatcgcaccaagaaagcagaggcatgtcatcttgatgctgcacctcgtgcacggtatactcaacctgctattacctattacttgcgctacattcgctcaaactgtttttgaacgaaggtcaaatgtatcttaagcacatgaccacatacaccatctcatgatctttttaccacattgtctttttttgtgggatcctaacatgtttttgtaaaaggtcggcattacaagtttttcaac

SEQ ID NO: 5560 - DNA, 694 bp, Gossypium hirsutum
  Clone ID: GOSHI-09MAY01-C10921_1
tgccaatcttcatccaaggttgaattttgacgttccaggtcttctcctatccaggtacatgtttttcttctttcgcaagagctttctttgctagaccatgtgcatgtgtgttttccgatctatggatgtgctgaaaagtaagatcttgaaaataggatttcttgttctgaatatcttttataatggcaccgatcaccgatttggctgttgaagtcgccttgctcttctttatgacggtttttgagtctcccattgattctaactgactgggatcctattgcaatccctaatttcatgccttctaatcatgcatatgcctctacctgcgaatggtgaggggacattatctgtggataactgtttttaacaccattagatttcccatcattttctaacctactagaccgtctttgattaaaagtctattatctgtgttgaataaattgatgaaattttattcatttcttgaatctggattacgtatactctcattctttaaactttgttacatttacttactgttagtaaatttctagcttcctatcagatattcttctattgagattattttaagtcttattcctttgatttttaatatattgtgcttttgtcttttcttgtcatttaaattttatctatatttatttaattcattataattctatatattcctgagtttcctgtcccatattat

SEQ ID NO: 5561 - DNA, 365 bp, Gossypium hirsutum
  Clone ID: LIB3120-008-Q1-K1-B3
ctttgctagaccatgtgcatgtgtgttatccgatctatggatgtgttgaaaagtaagatcttgaaaataagatttcttgttctgaatatcttttataatggcactgatcactgatttgtctgttgaagtcgccttgctcttttttattactgtttttgagtctcccatgattctaattgactgagatcataaagcaatcccctttcatgccttctaaacatgcatatgcctctgctgcaaatggtgagggaacatttcttgtgataaccatttttaacaccaagagattttcatcatattccaacctactaaaccagtcgctgatttaaaaagtactactattcaatgcttcatcaaatttgatc

SEQ ID NO: 5562 - DNA, 942 bp, Gossypium hirsutum
  Clone ID: GOSHI-09MAY01-C110899_1
cccactcgtccgcggacgcgtgggccgagccggcgcaggcgaaaaaagaaagaaaagttacgatgtggaggtccaagatggtagtagttggattgaactgctgaaatctcataggcttgctcaagtatcgttattccaaaagccaataaacaagattaaattggcggatttaatggtggcaacgaacaatttcgatgcggagaacgcagttatttcgaccaggactggagtttcctacatggcggtgttgccggcccgctcggccgcccccgcgtccgggttaagcacttgtaagcttagtgagaaacagtttaggtcagaaatgaataggttaggacaacttaggcatccaaatttggttccgctcttagggtattgcgttgtgggagatgagaggcttttagtttataagcatgtgcctaatgggacattgtattctcagttgcatggaggaaatcttattggttttgggaatgggaagtttgaggttttggattggtcaactaggcttaagattggcgttggtgttgctagaggcttagcttggcttcaccatgggtgccaaccgccgtatgttcatcagtattttagttccaatgtcgtgcttcttgatgacgatttcgatgctcgaatagctgattttggtctagcaagattgatggggtctcgtgattcgaatgacagttcttttatgaatggggatttaggggagtttggatatgtggctcctgagtattctagtaccatggttgcttcctggaaaggcgatgtttttagttttggggtagtgttgttggaactggttacgggtcaaaaaccgataggagttagcaatgcaaaggaaaggtttaaggggaatttggtggactgggttaatcaattgttcacactggtcgaacaaggatgctgttgataaagcattgttaggaaaaggctgcgacc

SEQ ID NO: 5563 - DNA, 427 bp, Gossypium hirsutum
  Clone ID: GOSHI-09MAY01-C10841_1
cgtcaacatcgacaagctctggtctcttatcccggaggacgtgaaagccaaggcgaccaaggatgccgctccgatgatcgacgtgacacagttcgggtactttaaagtcctcggaaaaggtgttttgccggagaaccaaccggtggtcgtcaaggctaagttggtgtcgaagaccgctgagaagaaaattaaggaggctggtggtgctgttgtgctcaccgcataggttagggttcttggttttattggatctgaatgacatttctgttagattattgttatgtttcgttttttttttgagttaaacttgaaatgagatttttaatatcgtttaattttggatcaaactatatgttttatgtgataagttttttgccttacaaaaaaaaaaaaaaaaaaaaaaaaaaaaaaaaaaaaaaaaaaaaaa

SEQ ID NO: 5564 - DNA, 534 bp, Gossypium hirsutum
  Clone ID: GOSHI-09MAY01-C10801_1
gatgtgaaagacttcttggacgattatgttgaacgtaatcaggaggactttgatgaatttagtgatgttgatgagcgctacggctctttagctttagacaaggtggatgctcttgaagatctggttgctattggtcctctttccaaggctgcaccgattcttggattgaagccatctttggcatcatcaacatctcaagggccggttggttcctccctggagcatgcagaagattcagcttcccaggatagtaattctgatatagcaaggactccaccttcgaaaagtagcgcaattacttctgctacagcaacaccgagtggaagccatccaatccctgctccactgaatctttcacctcaatagtttgtctggtgcttcaacgcccccaattgttctttccgggttcaaggttctgctcgaaagtgttttgggaaacacaggcaccaccaatccgtcatctcctgtaaatttgccaaatgctacaaaagaagaagatatcacaagcttccctggccgtaggccttctccatc

SEQ ID NO: 5565 - DNA, 448 bp, Gossypium hirsutum
  Clone ID: GOSHI-09MAY01-C10591_1
tatcctctccctctctctcttgtgctctctttcatttttccatagctttccttgcggtcaaatactaatccctttgtttttttgttctccctctctttaaaatttgatttttacagagcacgaaaagtaaaaagttatggcggaagaagaagaaacagagctgagcgatgatcaaaagaaaggaatcgccaaatggttcctcgtaaacgctcccgctggagaaatccaatatgtctccagagatttaaaattggttttgaatgatgatgatgtgtataatgaggcggcatcggaggcgtttcccgtttacaacaaatctcacctcatttccctcaaaatgcctggtggattcggtgatgtgttggttacatcatatggggagcttcaggataacgagtacctagaccccaagactgcccaagttgccatagtcgatcatgtcaaacag

SEQ ID NO: 5566 - DNA, 427 bp, Gossypium hirsutum
  Clone ID: GOSHI-09MAY01-C10581_1
cccacgcgttcgcccaacaacccaaacaagccaaaaaaaaaaggaatcgcctctacttctactttttacataatcctcactttcaattccctcactctgatcaagccgccatgtgtggaggtgctataatctctgattttattgctccggtgcggtcgcgtcggctgacggctgactacttgtggcccgatctgagaaaatcgcaatcgaaaaaggcttccagtaataggtactcgaagccggcgatcgatttcaccgataacttcgaggccgactttcaagacttcaaggatgataaatccgatatcgaagactatgatgttgatgatgttttggctgatgccaagccctttgcgttctctgccgcaaagaaagcatcttctactgtttctcatgctcaagcttgagaagtcttgcaaaagaaaga

SEQ ID NO: 5567 - DNA, 602 bp, Gossypium hirsutum
  Clone ID: GOSHI-09MAY01-C10571_1
cccggtcgacccagcgtccgggtagtgcatctgttatatttgaggaaattagaaggcgtggtctcaaagtttcagttgctggaatccctaaaaccattgacaatgatatcccggttattgacaggtcctttggctttgacactgctgttgaggaggctcaacgtgccattaatgctgctcatgttgaggctgaaagttttgagaatggcattggtcttgtgaagttgatgggtcgctacagtggttttattgcaatgtgggcgactcttgcaagccgagatgtggattgttgcttgataccagagtctcccttttatcttgaaggacctggaggactttttgaatacattgagaggcgacttaaagaaaatgggcatatggttcttgtgatagcagagggtgcaggacaggagctgctttctgagagcttgcaatcaatgacgcagaaagatgcttcaggaaacaagcttctccaggatgttgcgctatggatatcacagaggatcaaggaccacttctcaaaagaaaggaagatgacaataaacctcaaatatatagatcctacttatatgatccgtgctattccaagcaatgcatctgac

SEQ ID NO: 5568 - DNA, 629 bp, Gossypium hirsutum
  Clone ID: GOSHI-09MAY01-C10491_1
cggagcgtgggcggagcgtggggttcataataaggggaaccgaaaacggaaaagaaacgaaaaaggcaaaccctaggaaattcttagcttccgattttgattcattgaagatttacatttcgagatcgtaattcttcagtaacccagaggaactggttgttcttggccaatggcgaattccaaggggtcaactaacataagaaatttgatgttttctggcaagcatgccttacttcctcctaaaagtccatttcctacagtggcctcaacatataatgatagtgcccccaacagtgtaattggatcaaaagcgattcaaaaacctagagaaggaagtacataccaccagcgcacttcctctgaaagccttctgatagaggaacaaccttcttggcttgatgatctccttaatgagccagagactcctgtgcgcagaggaggtcatcgacgctcatcaagtgactcttttgcatatattgatgtatctaatggtcctaacctagattatgcagcacaggatgagtatggatataaaaatatgatttctggactttcttgggcgtctcaaggactttgatcaccacaattgcaaagatggtcggcttaactctttccgtgctgatgtgaac

SEQ ID NO: 5569 - DNA, 760 bp, Gossypium hirsutum
  Clone ID: GOSHI-09MAY01-C10451_1
caatagcaaaaagttcaaaaggaaaaccctaacaaataataagcttcccaaatgcaccgtcacatctacctatctcgtatagcatctccctagcgtcgtcgtttttcgtctctcccgccgatcagatcaggcctctcaccggcgagagattgtcacagtcttttctctactgtttattatcacgattcccaggaatgaaccaccatgctctgcaggcacagagaagggagatgaagcacaaaggaagaaatgtagtctggtcaattgcaatggacaagtgtctaattgaagctctggcagttcaggctaaaaatgggaataaaattgacaaatgctttaatgaaaatgcatatactgctgcttgtattgctgtgaattctcgttttaatttgaacttgaacaatcaaaaagtcattaatcgccttaagacaattaagaaaaggtacaaggtaatgagggatatgctaagtcaagatggatttaggtggaatccaaatacaaagatgatcgaatatgacagtgaacatctatggaaaagatatatagtggcacatcccgatgcaaaagggtttcgtggaaagcacattgagatgtatgatgagctaaagattgtgtgcggaaattatcaagccccgagtcgttgggctaagatgaaagacggaagtcatccaatgggataccagaattttgaaaaggattctgcttcttttgtatcgccaagctcagatgatttaagtgatacagatgggactgagtcctt

SEQ ID NO: 5570 - DNA, 376 bp, Gossypium hirsutum
  Clone ID: LIB3166-026-P1-K1-B5
ctcgagaaataataaataaacaaacatattagcaaaaagttcaaaaggaataccctaacacataataagcttcccaaatgcacggtcacatctacctatctcgtttagcatctccctagcgtcgtcgtttttcgtctctcccgccgatcagatcaggcttctcaccggcgagagattgtcactgtcttttctctactgtttattatcacgattcccaggccaatgaagggggaaatggaggggtttcatgaggcatagcctataggttttttattgaagttgcttttttgggacttcatttcagatgttgtttgacaaagtaatgtttattgatacaacattgtgccatcagttcaagaatgaaccaccatgacct

SEQ ID NO: 5571 - DNA, 584 bp, Gossypium hirsutum
  Clone ID: GOSHI-09MAY01-C10441_2
cccgaagttttttttgttcttcgctagggttattcttcattcaaagagaaggaataagatgcttcctctttctctactaaaaacggcccgccctcgcccccggttggtggaactgaaaaatggggagacatataatggacatttggtcaattgcgacacttggatgaacatccatcttcgtgaagttatctgtacttcaaaggatggagacaggttttggagaatgcctgaatgctatatccgtggaaatacaatcaagtatcttcgagttcctgatgaggtaattgataaagttcaggaagaaacaaagagtcgtgcagataggaagcctcctggtgtaggccgtgggagaggcagggctcgagaagatggtcctggtggaaggcaaccaaaaggagctgggcgtgggctagatgacggtgctaggactacaagtggaggccgagggaggggtggttcaggtggaaaaaacactggaggcagaggtagtggccggggtccgggctgatgcaacactctactttgttttggcggggggtaacatgggctattttaagaagcaggttgcatccccaggccggacc

SEQ ID NO: 5572 - DNA, 722 bp, Gossypium hirsutum
  Clone ID: GOSHI-09MAY01-C10441_1
cgcccgatccccccaaagcaaactctatttttaaaacagtgcgtgagatcggggaaaaaacaacacagtgagatcgaaattcaaactgaagcgtaaaccttgttccttcttctctctcgttgttattttttggttagggttattcttcattcaaagagaaggaataagatgcttcctctttctctactaaaaacggcacagggtcatcctatgttggtggaactgaaaaatggggagacatataatggacatttggtcaattgcgacacttggatgaacatccatcttcgtgaagttatctgtacttcaaaggatggagacaggttttggagaatgcctgaatgctatatccgtggaaatacaattaagtatcttcgagttcctgatgaggtaattgataaagttcaggaagaaacaaagagtcgtgcagataggaagcctcctggtgtaggccgtgggagaggcaggggtcgagaagatggtcctggtggaaggcaaccaaaaggagctgggcgtgggcttgatgatggtgctagggctgcaagtggaggccgagcagggtggctcaggtggaaaaaccatggaacaaaagtggtggccgaggtcaaagttgatgtcatgcttctttatattgggcaacgttgctatttttaaaactggttgcctccaattgaccgaagttggtttctatcctttttgttttttctgtcggagtggtttgg

SEQ ID NO: 5573 - DNA, 560 bp, Gossypium hirsutum
  Clone ID: GOSHI-09MAY01-C10471_2
aacacttttgctctgcatctttctttcatcccaattcataaccaaaggctcctgggttttttgtgtttactttcggtgttggaatcaatcagatggctttagaagctctcaactctcctacgcctcccgctacgcctactttccactttgaggataccactaacttacactgcctggaatcgttcaccaagcgtaagcgttccaagcgaccgcgtttcgatcatgttaccaccgaggaagaatacctcgctctctgccttatcatgctagcacgcggcggtgatgccaactccaccgacacttctgttatcccacagcgccatcgctctcctactccaaccgcctcaccaccgcctgcaccagcaccagcacctacctcaacagagcaaaaggttagctacaactgcagcgtttgcaacaagtcctttaactcttaccaagctttgggtggtcacaaagccagccaccgtaagctttcaggcggaaacgatgaccagtcaacgtcgacaaccacctctgccactgctggcggagttatttcatctgctttgaacccaagc

SEQ ID NO: 5574 - DNA, 788 bp, Gossypium hirsutum
  Clone ID: GOSHI-09MAY01-C10471_1
cccacgcgtccgcccacgcgtccgtccacgcgtcctgaaaaccttggcttattttcagtgcttcaatcagatggctttagaagctcttaactccccaacaaacgctgctgctccttttcacttccaagataccaatttacactgcctcgatgccttcaccaagcgtaagcgttccaagcgaccacgcttcgacgatgaccatgttcccaccgaggaagaatacctcgctctctgccttgttatgttagcacgcggcggtgctcctcgaaccacctccactaccttgactcaccaaaaacttggcacctacaagtgcagcgtttgcaacaaggcctttaattcttaccaggctttgggtggccacaaagccagccaccgtaaactttcaggagccaacgatgaccactcaacgccaacgacctcatccgccgttggatcaaacccaagcggtaggtcccacgagtgttcaatctgtcacaaaagcttccctactggccaggccttgggaggccataagcgacgccactatgaaggtggggctgccaataccggtggcattacatctgagggagtgagttcaacctcaaccaataccacccaaccgggactttgatctgaatataccagctcttcctgcttcccacggctaattattggtttcgcgtgattaaatgaagccccacctataagaacctgttttgtgcaaggcccccatatgagaactattatgccaatctttttcttatttgccatcaaggcttatggctatggacaggtattattatccc

SEQ ID NO: 5575 - DNA, 691 bp, Gossypium hirsutum
  Clone ID: GOSHI-09MAY01-C10401_1
gtgaaacacgaggaggtgtcgatcggagtgatgtgaaaccactacaaattattcagactgaaggtcccagttttcgtatcaatggaaattttattgcatggcagaagtggaatttccgaattggtttcactcctagggagggtctggtaatctattctgttgcttatattgatggtagtcgtggtcggaggcctgtagctcatcgattaagttttgttgaaatggtagttccttatggtgatccaaatgatccgcattataggaagaatgcatttgatgcaggagaagatgggctgggcaaaaatgcacattctcttaagaagggttgtgattgtttgggatatatcaagtactttgatgctcatgttacaaatttcactggaggtgttgaaacaattgagaattgtgtttgtttgcatgaggaggaccatgggatcttatggaagcatcaggactggagaactggtttagcagaagtccgccggtcgagaaggctaacagtgtcgtttatatgcactgtggctaactatgagtatgggtttttctggcatttctatcaggatggtaaaattaagctgaggttaaactcactggaattctcagcttagagcattgcagcctgttgaaacacggaaatatggcacgaccattgctcctggattgtatgcccctgttcatcaacactttttcg

SEQ ID NO: 5576 - DNA, 379 bp, Gossypium hirsutum
  Clone ID: LIB3166-025-P1-K1-E5
gcgtccggtaaaaatgcacattctcttatttgttttgcaatggttggagatataaaaggccgttattctcatttgacaaatttcactggaggggttgaaacaattgagaattgtgtttgtttgcatgaagaggatcatgggatcttatggaagcatcaggactggagaacaggtttagcagaagtccgacggtcgagaaggctaacagtatcttttatatgcacagtagctaactatgagtatgggtttttctggcatttctatcaggatggtaaaattgaagctgtggttaaactcactggaattctcagcttaagagcattgcagcctggtgaaacaccgaaatatggcacgaccattgctcctggattgtatgccc

SEQ ID NO: 5577 - DNA, 614 bp, Gossypium hirsutum
  Clone ID: GOSHI-09MAY01-C10431_1
cccacgcgtccgcccacgcgtccgcccacgtgtaattttccaaagagggtcctctctctctctctctctctttctggaatcagaagaataattcttcggcatctcagaacacttttatttttaattattcaaattatttttttacctttttttttcatataaaactaaaaaattcttttgttagtttagtttactgtaaatttgaaagcaaaatttttagattcagttaaaaaaaattcaaaatcatgacttcagctgtcgagatcaacggtgaacaactagttaacgctcttcccgatctctcgattcaagatcagattgaagtgaagaagaaaggggctgttgttgaagaaggttgcgaaaaccacagtggaatatgcgcgatttgtttagataagataatgttgcaggaaactgcactcgtaaaaggttgcgagcatgcttactgtgtgacgtgcatccttcgatgggcaacatacagtcagatgcctacgtgccctcagtgtaaacatccatttgagttccttgatgttcatcgttcgcttgatggcagaatccatgactactgttcgaggaaggtttgctacttctagagccacatgttaaaccatgat

SEQ ID NO: 5578 - DNA, 760 bp, Gossypium hirsutum
  Clone ID: GOSHI-09MAY01-C10421_1
cggacgcgtgggttttcccgagaaaattttttaccttttctttcccggaaaatctttcgatctaaggtttacattcgatggctattgggaggagttgttctctgcaaatcctaatattgaacttaatcgcttcaaacttgtaccaatcatgtgagtccttcttaactcctccaagctccattatcaatccttccaaagtcaaacaagtttcctggaaacctagggctttcgtctatgaaggcttcttaacggacctcgaatgcgatcatttgatctctctagcgaaatcggagctaaagagatctgcagttgctgataatgttagtggacagagcaagcttagcgaagtccgtacgagctcagggatgttcattcctaagggaaaggatcctattgttgctggtatagaggacaagatttcaacatggacctttctgcccaaagaaaatggggaagacatacaagttttgagatacgagcatgggcaaaaatatgatcctcactatgattattttactgacaaggtgaatatcgctagaggtggacatcgcattgcaactgtactgatatatcttacaaatgtgaccaaaggtggtgaaactgtattccctcaagccgaggaacctccacgtcgtagaactcctccaaaagatgatctatcggaatgtgcaaagaagggaattgctgtgaaaccacgaagaggtgatgcacttctcttcttcagtctcttcccaactgctattcctgaccagaacagtct

SEQ ID NO: 5579 - DNA, 628 bp, Gossypium hirsutum
  Clone ID: AW187571.1
cccgtttctctcttttcaacgcccattgccttctctctctctttctctctctcttggatcaacccacccagaaaaaatgagggggggaggggcaaacgcaaacgcaaaacacaaagaaccgtcatatttaccatttgtgagaatttctcttattttctttacagttttcccctatccttggttggacctttattgtttctttcttttattggtgcaattcttcttcatttcttcttctccttcaatgaatatcgtgatactgttgttggtttcatctatttattggtaaattaatcaagttctgatctggggttctttttggagagattccgtcaattgcttcaagtgattataaaaaacccataatttagatgggctgttggatagcttcattcggaggtaattgaacacttactcatcctataaagttttgagtttttctttttctgataccgtctgggttagtttactttgatctggagattgacccccgtcctacctattttagaatttttacatctttacccaacgaattggtttcctcacaattttgaattgttgccaaggaaccctaatggcacaaatataagattcctttaggttggaatttcatccacgcatctgattc

SEQ ID NO: 5580 - DNA, 513 bp, Gossypium hirsutum
  Clone ID: uC-gsronu33B031c05b1
cccactcgttcggctatatctttctctctgtcttgggtcagctcacccagaaaaaattactaaaaaaaagggcaaaggcaaaggcaaaggcaaagcacaaagaatcgtcatatttaccatttgtgagaatttcgcttattttctttacagttttcccctatcctcggatggacctttattgtttctttccttttattggtgcaattcttcttcatttcttcttctccttcaatgattatcgtgatgctgttgttggtttcatctatttttggtaaattaatcgagttctgatctggggttctttttggagagattccgtcaattgcttcaagtgattataaaaaacccataatttagatgggctgttggatagcttgattcggaggtaattgaagacttagtcattgttaaagttttgagtttttctttatctgattaccgctggttaggttcgtttgatcgggaagttgaccctcgttctacatatttaaaaatttacattttacccacgaa

SEQ ID NO: 5581 - DNA, 1504 bp, Gossypium hirsutum
  Clone ID: GOSHI-09MAY01-C10711_1
cgcagaattttttttttttttgaatgcgtgcttgcttcttgaatcttcactcactcattttttcacaaacaagcaagtcctttacagatcatctttctctctctcattttccacttgagcactttatttgccttttcgtgtttttttttcccctccgaagtttgctttttttgcagatcaaggaagaaagttatggcagaagaagaaactgaactgagcgacaagcaaaagaaagagatcgccaaatggttcctcctcaatgctcccgcaggcgaaatccagtacgttgccaaagatttaaaatccgttttgaataatgatgacgtctacgatgaggcggcatcggaagcatttcctgtttataacaaatctcacatgatttgcctcgaaatgcctggtagattcggagatgtgctggttacatcatatggggagcttcagggtaatgagtatctagaccccaagactgcccaagttgctatagttgaccatgtcaaacaggtttgtacagaggttagacctgccactgatgaggaacttcccactccatatgttgaggaataccgatgtgctctggaagcagaaatgctgaagtatgttagtgaagcttatccaaaaggttcttgttcagtgtactgcattaatggaaaagatgtggagggacccggatatgatttcgaacttgttgcagtgatttctgctgctagacttagcccacagaatttctgtactggaagttggcggtcgatatggaacattgagtgcaaagatgatattcaagttctggaattaaaaggcaaattgcaggtcggtggtgggtgcgcactattttgaagagggaaatgtgcaattagatgcaaaacatgaatgtagagattctacaatgtttcagtcccccgatgatggtgcaattgccatagccagtttaattcgccaccatgagacagagtacctggcatctcttgaggcatcctatttgaatttgccagatgccactttcaaggatcttcggaggaaacttccagttactcgggccttatttccatggcatagcacttcgctattcagcctgactagagagatatcaaaagagcttggaatcgggaagtgactagatcatacctgaaggcataaagtgcattcttttatgcataaaattgagttctaggaatactcattcaacggcctgcctgtatggtttgtgcagttttgagagtttacaactcttctttgcctgcctgtatcctttgtttggtgtgcaagttgtgttctcgcctaagagtgaaatatgttggtgtgctataccgcttcattctttacaagccgtgtgttacattggtttgttataattaacaacatttccaggtactattgatgtttgtggaaattttgggtacagatatatatgcctgaaattgtatgctcaggttcagtcttataaacccatggcaagtatttacatattaattgtaaattgtatcattttgctattatcaagtatttt

SEQ ID NO: 5582 - DNA, 380 bp, Gossypium hirsutum
  Clone ID: LIB3166-029-P1-K1-C6
tgagaatggtaattgtcctgagcaaatattcctatgcgaaagcttgtgaaggagggaggttctttagtcattatttacaatgggagtttacgatttgttggctcagtgactcctagcccgtgtgataacaaaaacgataattggtttcatatggttaatgctatttttaatttttctgtttgtttcagtcccctgatgatagtgcaattgccatagccagtttaattcgccaccatgagacagagtacctggcatctcttgaggttgttttcaatgtttggttaatttcaattccttgtgcttcctaccgttatctactgacagttgaggtataccgcaggcatcctatttgaatttgccagatgccactttcaaggtat

SEQ ID NO: 5583 - DNA, 368 bp, Gossypium hirsutum
  Clone ID: LIB3166-028-P1-K1-E8
ttctcttctgtttttaatataattttttttgttaattctaaaaattatattgagcgttcggccgtggatttctatggtagaaaaacagtaaagctaagagaaaaaataaaagttcttagtatcatcacctccgtctcactgtcccttgtctccctgggtgctgccgtcagcttctttggataaagaaagaggaggagaagtgaaagggagttagagggagtgtgccggcggcgcacgatggtactcggttccctaatctgaacttagctttttcttacttcatttcatgagctatggtggacctaaagagaatcctcttgttctttcgttcttcattgttcattctcttagcagattggcttgatttt

SEQ ID NO: 5584 - DNA, 334 bp, Gossypium hirsutum
  Clone ID: LIB3189-012-P1-K1-A8
acaccctcttctcttctgtttttaatataatttcgtcgttaattctaaaaattatattcacgttcggccgtggatttctatggtagaaaaacagtaaagctaagagaaaatataaaagttcttagtatcatcacctccgtctcactgtcccttgtctccctgggtgctgccgtcagcttctttggataaagaaagaggaggagaagtgaaagggagttagagggagtgtgctctctgtgcacgaaggtacttgtttattttaatctgaacttattttttttctacctttatattattggcttcgtttatccctattcattatatcttttttaat

SEQ ID NO: 5585 - DNA, 1102 bp, Gossypium hirsutum
  Clone ID: GOSHI-09MAY01-C10621_1
gtctaattggttcataaatgctcgagttcggctttggaaaccaatggtggaagagatgtatttggaagaaatcaaggaacaagaacagaatggttcagaggagaaaacaagtaaaagccataacaatgaagattcaacatccccacccgctccaccagacaaatctagcacagacaacaaacaggacagtgagatcccgaaatcagaacggttgttcctcaatgccggcttcaatggcttcagcgtctccccttatcggtaaccagtcaggattttccttcatcggatcatctgaattggaagggatcacacaaggcagtccaaagaaaccgacaaccactaatgaagttacaatgaaggttgacaaagatgggtacacattcatgggaggaacaactaataatgatttcatgggtggctttggacaataccccattggagaaataacaaggtttgatacagaacagttcactccaaggttttcaggcaatggtgtttcactcactttgggacttccccattgtgaaaacctgtctttatcaggcacccctcatcaaacttttctccctaaccaagccatgcaaatggggagaagggtcgacattggtgaacccaatgagtttgggtctataaacccttccacaccacactcttcagctgcatatgacaacatcaacattcagaacaggaaaaggtttgcagcacaattgttacccgactttgttgcctgactaaacttacaggggctgcttcacattttccaggaaaatgaatggtagtgtaaagataaaagaagaaaacgaatttcagcctagtataggtttttatactttgggccaagtacaatttgagtcctctagacagtttaggattctcagcatatatttgaggattgtatattaattttgtaatgggggattgggatagatggattgatatcatcaaattagttacttggggtatactctggtatattcagattcttgtccttttgcggtatgaatttattagtatttctttagcaaatttataaatttagttcttttttctgatgtttaatcagttgataagaacataaataagatggtgtcaccattttatt

SEQ ID NO: 5586 - DNA, 1401 bp, Gossypium hirsutum
  Clone ID: GOSHI-09MAY01-C10191_1
ctcgacaaatgaagcttccttaaacccatacccactaacgaaatttctcacatgggttcaaattacaatacagacgctattcgggagcagttcacatctcttatttagtacttattatcagtttccaaagcatattagcatctgctctctttcgctcggcatcttcagttcttcacttccccagtctccagcaatgggagaaaccgattctttcttctcgaacaaatcagcgaagatcttcgtagcaggccatcgaggcctagttggttctgccatagttcgtaaacttcagtccctaggctttaccaacctcctactccgcacccatgccgatctggaccttactcgccaatccgacgtcgaatccttcttcgccgatgagaaacctcactatgtcgtactagctgccgctaaagttggtgggatccacgccaacaacacttaccctgccgatttcattgccatcaacctccaaatccagaccaacgtcatcgattcctcttaccgccacggcgttaacaaaatcctcttcctcggttcctcttgtatttatcccaagtttgcgccgcaacccatccctgaaaatgcgctcttatccggtcccctggaacccaccaacgaatggtatgccgttgccaagatcgcggggatcaaaatgtgccaagcgtacagaattcagcacggcttcgatgctatttccgctatgccgacaaatttgtacggccccaacgataatttccatcctgaaaattcccacgttttgcccgctttgatgcggaggttccataaagccaaagtggaaggagcaaaagaagtagttgtttggggaaccggtagtccattaagggaatttttgcacgtcgacgatctagctgatgctgtggttttcttgctgggaaattatagtgggttggaacatgtgaatttaggtagcggattagaggttactattaaggaattagctgaattggttaaggaagttgttgggtttgaaggggaacttgtttgggattcttcgaagcctgatgggactcctaggaaactcatggacagctcgaagcttgcttcattggggtggaaggccaagatttctttgaaagatgggcttattgatacttataaatggtacttggagaacgtcaagcaatgatggcagagcaggcgatattgttggtttcttccctgatgaattttttgatcggggtatttgttgttttgtgattgttgtcattattatcatcgcctattggtcgtttattgatatgtttggatacgccgcggaataatttgaggttaattttgtaccaattatatggcatccaagttgagcatgaagaattcctttgctattattggatcaaactctctattgaggactgactagaatttctttttatttaa

SEQ ID NO: 5587 - DNA, 393 bp, Gossypium hirsutum
  unsure (1)..(393): unsure at all n locations
  Clone ID: LIB3166-023-P1-K1-B4
ccgccccaacnccanatttaaacttatctttttccacagtctgactaagggggagaagccgactcttttttctgacacaaataagcaaatatcttcgaagcaggccatcgaggcctagttggttctgccatagttcgtaaccttcagcccttaggctttacaaacgtgctactccgaacccatgccgatctggaccttactcgccaatccgacgtcgaatccttcttcgccgatgagaaacctcactatgtcgtactagctgccgctaaagttggtgggatccacgccaacaacacttaccctgccgatttcattgccatcaacctccaaatccagaccaacgtcatcgattcctcttaccgccacggcgttaagaaaatcctcttcctcggt

SEQ ID NO: 5588 - DNA, 357 bp, Gossypium hirsutum
  Clone ID: GOSHI-09MAY01-C10141_2
ggcattttcacgatgatattactgttattgtgttattctttaatcacgatcttatatccagaggtgccgtccaagaccctccagtatcgattcggagtgcactagaacactgatgatttataaaccaaatagatctctgcttcctctggttcttgctctgggagattcgaaatcgaacttgaacctttagtttggctaactgcccgaaaatgttaaaaagagagtgagcaggccaagatttagtgcaaattctatagtaatgctctacttaattcagcctaaacattttgtgacagtgctttattagatgaaacatgaatataggtgcttgatttcttctctaatgacgaaagactc

SEQ ID NO: 5589 - DNA, 1109 bp, Gossypium hirsutum
  Clone ID: GOSHI-09MAY01-C10141_1
cggacccgtgggggcggccctgaggcgtcgcgttacgtttgcgataacttgttgagccactttcgagccatgacagccgaatcggaaggagctgtcaccgctgagaccattcaaagagcttttcgacaaaccgaagaagggtttacggcccttgtgtcggagttatggagtactcgaccaaatatggcaacggtcgggacatgctgtctggttggggtaatatatcagcaaacactttttattgcgaatctcggtgattcacgcgttgtgctgggcaagaaagttggcaacactggaggaatggctgctatgcagttgtcaactgaacacaatgctaatatcgaggctattagacatgaactcaaggaattacacccgactgatccgcaaatcgttgtcctcaagcatggagtttggcgagtaaagggcattattcaggtttctagatctataggcgatgtttatatgaaacacgcacagtataacagggaaccgattaatgcgagatttaggcttcctgaaccaatgaacatgcctttattgagtgccaatccaactatcatttctcatcctctccacccaagtgattctttccttatatttgcttccgacggtctatgggaacacttgagcaacgaaaaagctgtggctatcgtccacagtcatccccgtgcgggcagtgccaaaaggcttgtcaaggctgccctacaagaagcagcccggaaacgagaaatgagatattcggatcttcgaaagattgacaagaaggttcgacgccattttcacgacgatattactgttattgtgttattctttaatcacgatcttatctccagaggtgccgtccaaggccctccggtgtcgattcggagtgcactagaacactgttgatttcatatggccgaatagatttctacttcgtccgggtttccccccctacatacacatgaaactgtaccaacagacgaccattccccgatgctccggctcgtatactgattatagggagagaattcacatctgtaaaatgattaaaaaaagtttggccaacatttactgcaataactttgttaactcatcagtgtatatctaattgaatgcttgtggta

SEQ ID NO: 5590 - DNA, 681 bp, Gossypium hirsutum
  Clone ID: GOSHI-09MAY01-C10171_3
gtttcaattcgacccgacgcggccgattatttctgtggcacatttttattctcctttcaagtttctcccgtctatccgcatgaggcacccaaagttaagtgcaagaccaaggtctaccatccaaatattgatttggaaggaaatgtttgccttaacatcttacgtgaagattggaaaccggtgctcaatataaacactataatctatggtttatatcatcttttcacggaaccgaattatgaggatcccctcaatcatgaagctgctgcagtgttgagggataatccaaagatgtttgaatccaatgtgaggagggcaatgtctggcgggtatgttgggcaaacctttttcccacggtgtgtctagctttagcaaggtcgctgaatgcgcaaatgcacgtcataaacacttgagcttccatgggttgtataatttacctgcaaattgccctctattgtctgctttgattttctcacttttcccgcaagcccacccagataaaaattccaacaatgtttcactctagcttttccccccctccccctgtcaagaatctggtggcatataactctcaatgtggaactaggatagacacaatagcccgaatttcatgcacttgcatattgtgtgacatctctctctctctctctttctgaaaatgaacccccttttgttcaaaaa

SEQ ID NO: 5591 - DNA, 872 bp, Gossypium hirsutum
  Clone ID: GOSHI-09MAY01-C10171_2
cattcataaaatccaaagcatccccctctctctcatggttcatttccattttttcttttggattctacaatcatcaaatttctctcaggcttttcatcgagcaggagctatgatacggctgttcaaagtaaaggaaaagcagagagaacttgctaaaaacgcaaatggcggatcacctatcaaaaagcaatctgcaggggagttgcgtttacacaaagacatttctgagctgaacctgcctaaatcatgttccatatcatttccaaatggaaaggatgacctgatgaatttcgaggtttcaattcgacctgatgaaggatattatttcggtggcacgtttttgttctccttccaagtttctcccatctatccgcacgaggcaccaaaagttaaatgcaagaccaaggtctaccatccaaatattgacttggaaggaaatgtttgcttaaacatcttgcgtgaagactggaaaccagtgctaaatataaacactgtaatctacggattataccatcttttcacggagccaaattatgaggatcccctcaatcatgatgctgctgcagtgttgagggataatccgaagatgtttgaatcaaatgtgaaaagggctatgtatggtgggtatgtggggcaaacctatttcccgcggtgcatgtagcttttacgaggtagctgaaagcgcaaactcgctatgttatggacagttgggtttctgtgggttgtataatttgtctggaaattaccctttgtcatcccctttgattttctcagtgaacctgagtgaaatattttctgcgggagcaagcagctgaaattctcgttgtgttttactttagctttcctaatgctatattgtatgttggcatggc

SEQ ID NO: 5592 - DNA, 881 bp, Gossypium hirsutum
  Clone ID: GOSHI-09MAY01-C10171_1
agaaaaagtgggtccatcctccactccagctttcgtgtcatttcctttctctctctttcctttacttttccttcaggcatccatatcctaaaccccctccttcgcccccttctcttcatcaatttccccttagtttctgcttttttctttaaaacaataaagatcccttagttccttcttttctttcttcggcttttcctccaacaggagttatgattcggctgtttaaagtaaaggaaaagcagagagaacttgctgaaaatgcaaatgggggagctcctaccaaaaagcaaagtccaggagagttgcgtttgcacaaagatatttctgagcttaacctacccaaatcttgtgctataacatttccaaatggaaaggataacctgatgaattttgaggtttcaattcgacccgatgaaggatattatttctgtggcacatttttattctcctttcaagtttctcccgtctatccgcatgaggcacccaaagttaagtgcaagaccaaggtctaccatccaaatattgatttggaaggaaatgtttgccttaacatcttacgtgaagattggaaaccggtgctcaatataaacactataatctatggtttatatcatcttttcacggaaccgaattatgaggatcccctcaatcatgaagctgctgcagtgttgagggataatccaaagatgtttgaatccaatgtgaggagggctatgtctggcgggtatgttgggcaaacctttttcccacggtgtgtctagctttagcaaggtcgcctgaatgtgccaaatgcccccttccttaaacactttaacttcctgttggttttgttaatttacctcgcaaattgcccctaatgttcggcttgatttctcact

SEQ ID NO: 5593 - DNA, 411 bp, Gossypium hirsutum
  Clone ID: LIB3149-035-Q1-K1-H5
cgtgccggtccgaaccggagtttcgggctcgacctacgcgcacatttttgttctccttccaagtttctcccatctatccgcacgaggcaccaaaagttaaatgcaagaccaaggtctaccatccaaatattgacttggaaggaaatgtttgcttaaacatcttgcgtgaagactggaaaccagtgctaaatataaacactgtaatctacggattataccatcttttcacggagccaaattatgaggatcccctcaatcatgatgctgctgcagtgttgagggataatccaaagatgtttgaatcaaatgtgaaaagggctatgtatggtgggtatgtggggcaaacctattttccgcggtgtatgtagcttttacgatgtagctgaaagcgcaaactcactatgttatgga

SEQ ID NO: 5594 - DNA, 1220 bp, Gossypium hirsutum
  Clone ID: GOSHI-09MAY01-C10101_1
gtcaaaatatcctcaacccacaaagacaccccagcgatgactttttcatcaggttgcttaaactccaaaacaattcccttctctccaacatcacactctctaaacacactctcctatccaacatccacatcatttaagtagtaacataaagaaagcaagctccacacactacggtcgcccggttccctcaccaaaacaaaacactttcttctttcttttttttctcctccccaccatgactgacagagtttacccttcatccaaacaacccacaaatggcaccgcccccaccaccacctccgccgccgctgccgccaacccttcgtttcccgccactaaatctcaactctatggagcctctcgccctctataccgtccgcaaaccaagcgccaccgttaccgccgctcatgctgttgttcttgctgcctttggaccacaatacttatccttgttcttatcctcctagtcgccatagctggtgctatcttatacgtcctttaccgtccccaccgccctactttcacgatctcctccctcaaggtctcgacccttaatgtaacctcagcttccaaggtcatcaccaacatccaccttaacgtcaccgccaaaaacccgaacaaaaagctcgtctacatttacgacccaatcaccatatctcttatcacaaacgacgagatcgatataggggagggttccttgggctccttcgtgcatggcaataaaaacacgactcttttgaaagctgccataacaagtagcaacaggcaagaacttgatgaggcttcagctggcaagttaaggagcggtttgaagagcaagaagggtctgccattaaagataaagctggacactaaagtgaaagcaaagatgggagcactgaagacccccaaggttgggattagggttgtttgtgaagggattaaagctactgctcccaaggggaaatcagcaacaatagcttcaacttctaatgcaaagtgtaaggttgatttgaggctcaagatctggaaatggactttatgattatgagagctcacgattagaaagaatgaagaagaaaaaggtttgctttaagaaatttgggtttttcattttttgggtgattattatatcttgtgtaaatttggcgattgattgtaatgattgggtatagaaaacagtgatttatattataattattatttattattttttagtttttattttgctctttagtttt

SEQ ID NO: 5595 - DNA, 408 bp, Gossypium hirsutum
  Clone ID: GOSHI-09MAY01-C10131_1
cccacgcgtccgaaaaggcttatgaaccctagcctcctctgctagggttcccacattcagccccccaccgccgccgcgtatttttcccaaccgcacgacgccgccgattgaaaggtacaaggcgaggcgaggaaggcgcgcaactcgcgcggagagggaccctgtccccgagtcgtgcggcgactggactgctggaggcggcggccaagaattttctgtttagtgtttcggtagttagggtgtttggaattttgggcttaggttataattttgttgggcctgtattttaaaattttgggctgtgtttttgtttgggtttattctctcacaggccgggcaaagattgggccctacaaatacttaataatacgatataaccttttttgtttttaatttttttttttttta

SEQ ID NO: 5596 - DNA, 600 bp, Gossypium hirsutum
  Clone ID: GOSHI-09MAY01-C10121_1
gtatcgatggtgtccaagctacttgagctgccattttctggcattttcaaccaaaatgctgcaaaatcttcctcacccatttctcattttacacctagaaatgctttcaaagttatggcaacgagtttcggtgcaaatgtttatcgctctcttggaatttcccattcttcttcttcaaacataagattttcaaagaagccaagggtggatgagagtgagaaccttactctcaacagtataagacaggccttaattcgacaagaagatagcataatatttagccttttggagagagctcagtactgttataacccagacacatataagcaagattcattctccatggatggatttcatgggtctttgtctttggttgagttcatggttcgggaaaccgaaaggctccatgctcaggttggcagatataaaagtcctgatgaacaccctttcttcccatcatatctacccgagccaatgcttccacctttgcaatatccaaaggttttgcatcactgtgctgcttcaattaacataaacaataaggtttggaatatgtattttgcagagcttctaccaagattggtagaagctggagatgat

SEQ ID NO: 5597 - DNA, 1040 bp, Gossypium hirsutum
  Clone ID: GOSHI-09MAY01-C10061_1
acccccatacatctattctgttaactcccagtctaatccctagttttattgcatgtaatcctgcatatgcctctgctataaatggatttgctacgtttgaatgagtaactgcttctgttgcaagtagtaccccttcctcgttccatgctattaaacccgatgccgatctgaaatcctgactgttgaaggttacatcaaaatgaataatggtcctaccgcttctagacacccgttctctttcctcctgagacgagctggtttctactgaaccatatgaaccagaggctacaacagaagagtcgaagttgttcatcagttcctctagcaaagacccatgcatttttggaagatatggtagctattctcttcatcacatccgcatctaggacactgggaattcctaacaacccttttgattttgaggttgctaaaagttgggataaagttccaagagatcctccatactgtcatttgaatttttgagggaatatgtaatttccataatttagtatagaaattttttcctcggtatgtaacattaatccattaggatcaaggttagtctgctgtaatagtttataagcactccttacggagaactcccctgtcggttctcctctccatacttgaaagtcctcttgtactgtctccgccagtgggatctgcaaaattttctccgcaatgaccggttggaagtccagatggaaatttgatcacctctccccaccctccatccacgtcctctttcaaggagtcctctcgcagcccaaatgctcttccagataaatgaaggtttaggaaggagcagcttggatggaagcaatggaggatccaacagctttggagtaagaagacaacagcagcagctgacccagcaagagatggagcaatactatcaacttaagattcaggagatccagttgaaggaaaccatcagaaagaagaaagaggagctcatcctcatggagcaggagttgacaagctgtcagcaactggatcaagaagatgaatactggacttgacccagtagaagaagcaaa

SEQ ID NO: 5598 - DNA, 373 bp, Gossypium hirsutum
  Clone ID: LIB3166-021-P1-K1-F3
atataatcgctgatcttcctaacaatttttgatcctgacatactctttctttcataaacgagctggtttctactgaaccatatgaaccagaggctacaacagaagagtcgaagttgttcatcagttcctctagcaaagacccatgcatttttggaagatatggtagctattctcttcatcacatccgcatctaggacactgggaattcctaacaacccttttgattttgaggttgctaaaagttgggataaagttccaagagatcctccatactgtcatttgaatttttgagggaatatgtaatttccataatttagtatagaaattttttcctcggtatgtaacattaatccattaggatcaaggttagtct

SEQ ID NO: 5599 - DNA, 1150 bp, Gossypium hirsutum
  Clone ID: GOSHI-09MAY01-C10011_1
cccacgcgtcccctcagcttaattcagctgaaaatggcaccttcatctctgccacaaacaccgccgtccgccgtggttattgtcctcttcttactcttctccacggcattgctttgtgaatcaaggttaagcttagattactactccaaaacctgtcccagtttcaccaaaatcatgcaagacaccataaccaacaagcaaatcaccagccccacaaccgccgccggtgcactccgtctatttttccacgactgtcttcccaacggttgcgatggttccatcctcatatcttccaccgcattcaacaaagctgaacgtgatgccgacatcaacttatctctccctggagatccatttgacctcattgttcgagctaaaacagcccttgaactcgcctgtcccaacaccgtctcttgctccgacatcctcgccgtcgctactcgtgacttagtcaccatgcttggtggaccgtactacaatgtttatctgggtcgcaaagattcacgagtttcatcagcttcttcactagaagggaagttacctaaacccaccatgagtatgtcacaacttataaatcttttctcttcaagtgggttcactgttcaagaaatggtggctttaagtggagcgcatacaattgggtgttctcattgcaaagagtttagctcaaatataagcaacgatacccattataatcctagatttgctcaagcattgaaacaagcttgttcaggttatccaaataacccaacattatcagtttttaatgatattatgacccccaacaagtttgataacttgtattatcaaaatctaccaaagggtttggggcttttggaatcagatcatggattgtatggtgatcccagaacaaaaccatttgtggaattgtatgcaagggatcaaaacaagttctttcaagatttcgctaaagctatgcagaagctaagtgtttatgggatcaaaactgggagaagaggagagattagacacaggtgtgatgctggaaactgagagctttttttttctttgttaattttggtttgttcttttgagatatatttattatacccttgtctttatttgtatcaattgtcacatcaggcttaaaatttatacatatttacatattctgtgttctgggtttcaa

SEQ ID NO: 5600 - DNA, 415 bp, Gossypium hirsutum
  Clone ID: LIB3135-040-Q1-K1-G12
gctgaaaatggcaccttcatccacggctcatacaccgccagccgacgccgttattgaggtgcgcttactcttctccaccgcattgcctctgtaatcaaggttaagcttagattactactccaaaaccagtcccaccttcaccaaaatcatccaccacaccatatccaacacgcaaatcaccaaccccacaaccgccgtcagaacactcctcttatttttccacgactgccttcccaactgatcctatgcttccatcctcatatcttacaccgcattcaacaaatctgaacgtgatgccaacatcaacttatctctccctggagatccatttgacctcattgttcgagccaaaacaacccttgaactcgcctgtcccaacaccgtctcatgctccgacatcctcgacgtcattact

SEQ ID NO: 5601 - DNA, 456 bp, Gossypium hirsutum
  Clone ID: GOSHI-09MAY01-C10001_1
gaaaatatggagtccactaaaatctcacctctctttctcatttgcatgcttttcatttcctccgccactcccattcttggttgtggttcatgtggcactggcaaagcaccaccaaagccccctaaaggccccattacaatccctcccattgttaatcccccaatcaacctccctcccattctaaatccccctgtgacagtccctccggtgacggtggttcctcccataattactaagccaccaagtgggaaaccttgcccgtcggccacttgccccattgacacattgaaattgggtgcatgtgtggatctgcttggagggttggttcacattggccttggtgacccacttgtgaatgcatgttgtccagtccttgcagggcttgttgagctggaagctgctgtttgcttgtgcaccactctgaagctaaaggttctcaaccttaacatttatgtg

SEQ ID NO: 5602 - DNA, 360 bp, Gossypium hirsutum
  unsure (1)..(360): unsure at all n locations
  Clone ID: LIB3493-052-P1-M1-B2
tgacgcctcgtcggccggatcgtcacccacctcgtactttttatgcatgcttattctcgcatccatctggtggggtattgcctgcaagacacaaaccctaagcccatacatcctccatgtaatcccatcaacctctccatctaaacccctggacgtcctccgtgacggtggttctccatattactaagcaccaagtggaacctgcccgtcgccacttgccccattgacacattgaaattgngtgcatgtgtggatctgcttggaggtttgtttcacaattggcccttggtgacccacttgtgaatgcatgttgtccagtccttgcggngcttgttgagcttgaagctgctgtttgcttgt

SEQ ID NO: 5603 - DNA, 1190 bp, Gossypium hirsutum
  Clone ID: GOSHI-09MAY01-C10381_1
gtttccacttttctctatattttaaaggctggaatcaaggctcctaggcaaccatggcatgatttacacaccagaattgaagggcctgccgcatatgatgttcttatcaacttcgagcagcggtggagggaatcgaccaagtggaaggatttctgtctactttgtgcaggaaaaatgccatcgaatgacgatgctttgattaggatagaacgaatctcttggatactaagtccttccttagctgtaacagaccacggcactacaataattccagaagatgaccccaaattgcatgttcttagtatcgatgatcgtgacaactgggatgttcagattttccgctccattgactcgggatcagtgaaaggatttccaagaccaatgagaaaacccgagaaccagaatcttttagtttcaaaaaatgtggtcatagaaaaaagcattcaaacagcttatatacaggcaataagatccgctcagcattacatatatatcgaaaatcagtattttctgggatcttcgtatgcttggccatcgtataaagatgcaggggccgatcatctgatcccaatggagctggcattaaaggttgctagtaaaatccgagcaagagagagatttgcggtatatatcgttattcctttgtggcccgagggtgatacaaaatctctttctgtacaggaaattctatactggcagtctcaaacaatgcaaatgatgtatgatatcgtcgcacgagaactcaagagcatgcagattacggactcgcatcctcaagattacctcaatttctattgtcttggtaagagggaagaggtcaccccggaaatgctcggtggaaaaggaacttcggtctctgactctgcaaagttcggtcggttcatgatatacgtgcatgcaaagggaatggtcatagatgatgagtatgtgattgtagggtcagccaatattaaccaaagatccatggctggtacaaaagacagtgagctagctatggctgcatatcaaccacattacacatgggctgaaaagaaaaaacatccacgtggtcaggtatacgggtatagaatgtccctatgggcagagcatcttggtgagctaaataagtgtttcaaggaaccagaaactctagaatgtgtgaagacagtaaacacaattgccgaagataactggaagaaaattacagatac

SEQ ID NO: 5604 - DNA, 1352 bp, Gossypium hirsutum
  Clone ID: GOSHI-09MAY01-C10341_1
tacttttccgcaacctcagctcacacatgcactggtgatggtaatgctatggttgcacgagccgggcttccactccaggatttggagtttgtgcagttccaccaatggaatatatggggctgggtgcctcatcactgaagggtctcccggggcggccggcgcgccccgaaatagtgaaggtgaacgcttcatgggtcgctatgcccctacagccaaggatcttgcttcaagggatgttggtgcgcgatccatgaccatggaaatcagggaaggtcgtggtgtaggacctttgaaggatcatatctatctccacttgaatcacttgcctccagaggtgcttaaggagaggcttccaggtatctctgagactgctgccatttttgctggtgtggatgttacgaaggagcccatcccagtcttgcctactgtacattataacatgggtggaattccaactaatcatcatggagaggtagttactatcacaggcagtgatccagattctgtggttcctggactgatggctgctggagaggcagcctgtgcatcagttcatggtgctaatcggttgggtgcaaattcccttcttgacattgtcgtctttggtcgggcttgtgcaaaccgagttgcagagatccaaaggccagggcagaagcagaaacctttggaaaaggatgctggtgagagaacaattgcatggttggacaaaataagaaattctaatggttctcttccaacttcaaacattcgattaaatatgcaacgagtaatgcaaaacaatgctgctgttttccgcacacaggaaacactagaggaaggttgtcagttaattgataagacatgggaaagcttccatgatgttaagttgaaggatcgcagtttaatatggaactctgatttgatagaatctatcgagttggaaaatcttttgataaatgcctgtatcaccatgcactccgctgaagctaggaaagagagcagaggagcacatgctcgtgaagattttacgaaaagagatgatgagaactggatgaaacacacattgggtttttgggagaatgagaaggtgagactggattaccggccagttcacatgaacacattagatgatgaagttgagtcattcccacctaaagctcgtgtctattaaaactcgtgctgtaatgcaaatgggttatgatgatccgacaattcagcccggcataagttatggagaacaaagatgcaataaaattacttgtaagcatattattttggcaatattcttgtgccattcatcaatcttggaactttctgtggttgaaagcatcaataagttcgaatgtgaatcagaattttgtatttgtttggtc

SEQ ID NO: 5605 - DNA, 607 bp, Gossypium hirsutum
  Clone ID: GOSHI-09MAY01-C110309_1
tccacgcgtccgcttaattagtccttcagttttgttattgccatttacatcgttaatcaatccttcttaacacttaattatggcagaaacccgtagctgtgaatttggaatttccggaatgaagagagcggcagcggctgatagctttgaagtggatgatgagatattcgtggccaagaaatctatgttgccaacactggcagtggcaccagcagcatgggaaaatgaccctgctgcctccttagccggtctgcgccatgaattcggtgagcatggtggcattaacatgtccattgaagcttccgccaccttcaccgtcatggaacctgagacaatgcgccgcatgttcactggcgaactgggccccgatcgtgatttcttcatttatagtcgtcacttcaaccccaccgtcttaaatctcggtcgtcaggtggcagccctagaaggaacccgagctgcctattgcactgctagtggcatggctgctatatcatcagtgatgttgcaactctgcagcagcggcggacatgtgtgggcgtcggcgaccctctacggaggaacccatgcacttttaacccatttcttgcccagaacttgtaacatcacg

SEQ ID NO: 5606 - DNA, 571 bp, Gossypium hirsutum
  Clone ID: GOSHI-09MAY01-C10291_1
cgctgcacttttcacaccttcttcactcccgcccagaaaacagaggcaggcagccatggcaaggatcaaggtgcacgagttaaggagcaaatcaaagacagagctgttgactcagctcaaggatttaaaagccgaactttctctccttcgtgttgccaaggtcactggtggtgcccccaataagctctccaagattaaggtggtgaggctatccattgctcaagtattgacggtgatatcccaaaaacagaaggctgctttgagggaagcttatacgaagaagaagtttttgcctcttgatctccgtcccaagaagaccagagctattcgccgccgccttaccaagcaccagcaatctttgaaaaccgagcgggagaaaaagaaggagatgtactttccgatgaggaagtatgccattaaggtataagcttgaaatttgacttaggatggatacctttatgttagtttcaaagtgactactcgaggttattggtgaagtcttgtgttgctgaattttcgttttcttcataacattccctattatggttgagtttcttacaattctgaatta

SEQ ID NO: 5607 - DNA, 196 bp, Gossypium hirsutum
  Clone ID: uC-gsflnu33B090b12b1
tggtagctcacggggagttcatggtgggtctcaaggtccacacaataaggagcatatcactctcatagctgttgactcagctcaaggatttaaaagccgaactttctctccttcgtgttgccaaggtcactggtggtgcccccaatatgctctccaagaataaggtggtgaggctattcattgctcaagtattgac

SEQ ID NO: 5608 - DNA, 615 bp, Gossypium hirsutum
  Clone ID: GOSHI-09MAY01-C10281_3
caaaagcacaggccttgaaggcttaaaaagcactgtaatctggggccccttttaagaagaaggccaagaagatccgaacaaaggttacgtttcacaggccaaggaccttgaagaaagataggaacccaaagtatccacgcattagtgccccaccaaggaacaagcttgaccattaccagattctcaagtttcccctcacaactgagtcagccatgaagaagatcgaggacaataacactttagtatttattgttgacatccgtgcagacaagaagaagatcaaagatgctgtgaagaagatgtatgatattcaggccaagaaagtgaacaccttgatcaggcccgatggcacaaagaaggcatatgttaggttgacgccggattacgatgccttggatgttgcaaacaaaatcggaattatctaagcagttggcgactaccttgttttgaatgctttattttttgtgttttgttgcaaggtgagactgttattttcaggttcagctggaagatttaagctttagttttttagttttttaaggttgtaatcttgctttactgccacttaatcatctttggtataaacttaagtcagaaggtatttaacatgttttc

SEQ ID NO: 5609 - DNA, 951 bp, Gossypium hirsutum
  Clone ID: GOSHI-09MAY01-C10281_2
ttcgatttactggaagaaaatcaggcccatgacggaaatgaacccaggttagcagcgcccattggacattaaagtaagttcgagaaccctaatcgcctcatcttccccactcttcccatcgagagctaactctagacgttttagccgctcgcttccccatctacagggtttacaaagggattgaggcagctgtaaccaatggctcccaaggttgagaagaaggcagatgcaaaggcacaggccttgaaggctgcgaaagcagtgaaatctggagccacttttaagaagaaggccaagaagatccgaacaaaggttacgtttcacaggccaaggaccttgaagaaagataggaacccaaagtatccacgcattagtgccccaccaaggaacaagcttgaccattaccagattctcaagtttcccctcacaactgagtcagccatgaagaagattgaagacaacaacactttggttttcattgttgacattcgtgctgataagaagaagattaaagatgctgtcaagaagatgtatgatattcaggccaagaaagttaacaccttgatcaggcctgatggaacaaagaaagcatatgttaggttgacacccgaatacgatgccttggacgttgcaaacaaaattggtattatctaagctagttggtagctaccttgttgagcatttattttccttttgtttgcaaagagaaattatttcgagacattgagcaggtatttttatttttattagcacttaaaagtttgtaatattgcattgttgttgccaattagccatctctggttcaacttaagacagaaggtgatttttgatttacatgctttggggcatttgtttaaaaatggttcactgcttgaatgttagctattaaaaaaaaaaaaaataaaaaaaataattaaaaaaataaaaataataaataaaatccaagatccg

SEQ ID NO: 5610 - DNA, 732 bp, Gossypium hirsutum
  Clone ID: GOSHI-09MAY01-C10281_1
ccccgcgtcccggcggccaaaccctaaactctcaagcagccgcagctagaaagggttattgaagtaagaaatttagcaatgtctccagctaaagttgacagcaagaaaaaggccgatccgaaggctcaagcagtgaaggctgctaaggctgtgaaatcgggtgtgacatttaagaagaagtccaagaagatcaggacaaaagttacctttcatcggccaaggactttgaagaaggaccgtaaccctaagtatcctcgcatcagtgcaacaccaagaaataagttggatcaatatcaaattctcaagtatcctttaactactgagtctgcaatgaagaaaatcgaggacaacaacaccttggttttcattgttgacatccgtgctgacaagaagaagattaaagatgctgtgaagaagatgtacgacattcagacaaagaaagtgaatacgttgatcaggcctgatggaaccaagaaggcgtatgttaggttgactccggattatgatgctttggatgtggcaaacaagattggaattatctaagcagatcaaccaatgtcttccttgatttcaacagttttgttagaacgattgactatgttaggactctttattttcgtgtctgcattatatgtgtaaggaactatgtttttactacttaaagtctgcatgggatttggtttagggttttacacacgatgtcctgaatgaatggattttacttttcgtttt

SEQ ID NO: 5611 - DNA, 612 bp, Gossypium hirsutum
  Clone ID: uC-gsflmaxxa076d02b1
tgtacgcgtccgcccacgcgtccgtccccatctacagggtttacaaagggattgagacagctgtaaccaatggctcccaaggttgagaagaaggcagatgcaaaagcacaggccttgaaggctgcgaaagcagtgaaatctggagccacttttaagaagaaggccaagaagatccgaacaaaggttacgtttcacaggccaaggaccttgaagaaagataggaacccgaagtatccgcgcattagtgccccaccgaggaacaagcttgaccattaccagattctcaagtttcccctcacaactgagtcagccatgaagaagattgaggacaataacactttagtatttattgttgacattccgtgcagacaagaagaagatcaaagatgctgtgaagaagatgtatgatattcaggccaagaaagtgaacaccttgatcaggcccgatggcacaaagaaagcatatgttaggttgacgccggattacgatgcttggatgttgcaacaaaatcggaatatctagcagttggcgatacctgtttgaagcttattttttggtttgtgcagggagactgtattcagatcagctgaaattagctagttttggtttta

SEQ ID NO: 5612 - DNA, 431 bp, Gossypium hirsutum
  Clone ID: LIB3829-018-Q6_N6-D3
aaaaccaaaaagtaaaatccattcattcaggacatcgtgtgtaaaatcctaaaccaaatcccatgcagactttaagtaggaaaaacatagttccttacacatataatgcagacactgaaaatgaagagtcctaacatagttaatcgttctaacaaaactggtgaaagcaaggaagacattggttgatatgctcaaataataccaatgttgttggccacattcaacgggtttaatttgatcccatcactaacatacgcattcatttttaaaaactgacccgttaattttttcacctgaacagtcccatctttacacaaccttttgcaaggtaccgattttcctgtttcaacttcatgagttctgaaaattatgaacagataaggaaaatccattctaggaatacctgcaaacagtttaccagaatgagcata

SEQ ID NO: 5613 - DNA, 759 bp, Gossypium hirsutum
  Clone ID: AI729531.1
gaaaccctaatcgcctcatcttccccactcttcccatcgagagctaactctagacggctcattagcttctccattgtcagaatttaaaagggtttgaggaagcagcaagcaatggccccaaaagtcgagaagaaaggagatccgaaggcacaagccttgaaagctgcaaaagcagtgaaatccggtgtcacttttaagaagaaagcaaagaagatccgaacaaaggttacattccataggccaaagaccttgaagaaagacaggaaccctaaatatcctcgcattagtgctccaccgaggaacaagcttgatcattatcagatcctcaaatttcccctcacaactgagtcagcaatgaagaagattgaagacaataacactttggttttcattgttgacattcgtgctgacaagaagaagataaaggatgctgtaaagaagatgtacgatattcacgccaagaaagtaaacaccttgatcaggcctgatggtacgaagaaggcatacgttaggttgacacctgattacgatgccttggacgtggcaaacaaaatcggaattatctaagcgtgttatcgttctgtatctagctgccttgtttcgagcatttaattttgtgtttgttcacaagagtaattatgcagttattttgagacttttgaacattgacttttaattttaactctcaaaaattgtagccctgcttaaaatccaacttgatgagttttcacttttaaaaaaaacgaaaaaaaattcccc

SEQ ID NO: 5614 - DNA, 372 bp, Gossypium hirsutum
  Clone ID: LIB3147-042-Q1-K1-H11
cggaaccgcaaggccgggccaggcctacgcgttcgcgtttttcaatatacagggtgtaaattggtctgaggctaccgcacccattggcccgcgaaggtgttaacaaatcatgcgcaaaggcccatgcccttgaagccgtcacagcagtgaattctgtaaccgcatttaagaagatggacatgaagattcgaaccaatgcttcatttcacaggtcaaagacctttaagaaagataggacctcaaactacctacgcattaatgctccaccaaagaacaagcttgatcattatcagattctcaagtgtcccattacgactgagtctgctatgaagacgattgaagacaacaacactttggctatcattgttgaca

SEQ ID NO: 5615 - DNA, 321 bp, Gossypium hirsutum
  Clone ID: LIB3135-005-Q1-K1-H4
cggaattggaggttcgacccaggcccacgcgtccgatagacaaaaaaggcatatgttatgttgacgccggattacgatgccttggatggggcagagaaaatcggaattatctaagcagttggcgactaccttgttttgaatgctttattttttgtgttttgttgcaaggtgagactgttattttcagattcagctggaagatttaagcttagtttttttgttttttaaggttgtaatcttgctttactgccacttaatcatctttggtataaacttaagtcagaaggtatttaaccattcttaaatatttaattattatat

SEQ ID NO: 5616 - DNA, 1633 bp, Gossypium hirsutum
  Clone ID: GOSHI-09MAY01-C10251_1
ccccgcgtccgccccgcgtccgcccgcgcggccgcccacgcgtccgtgacgtcctaaacgagatcctggcccgattagctcaacttgctaatgctaaagggaattcagagcagaggttgacggagtgcatgttgttggctctaaaatcgcggctcaactccgtagaaagctcgccgccggggactgagttgttcagcaaggaacacgctgcagcgactcagttgctctatgatctgtctccttgttttaagctcgggttcatggctgctaatcaggctatcctcgatgccactttggaccaaccaagctgtaataagttacatgttatagattttgatattgggcaaggagggcagtatacaactcttctccacgcgctctctgagcgtgggagagggaaccctgccatgataaagatcacttgtattgctgataatggtggggatgagaggttgaagacggttggctctaagctgagtctagttgctgagcggctcggagttcgtttaaaatttactgtggtaccgagtcttaaactcagcgatctgagtcgagagtcactcggctgcgaactcgacgagcctttggctgtcaatctcgcgttcaagctttatcgaatgccggacgagagcgtatcagtggaaaatccgagagacgagcttctccgtcgcgtgaaaagattggcgccgtgcgtggtaacgatagtggaacaagagattaacaccaatacggcgccgtttgcctcaagggtgggagaagcagttggatattacggagctttgtttgagtcgattgagtcgacctttgggagggagaactcagaacgagtgaaggtggaggaaggtctgttgcgcaaaattgccaactccgttgcgtgtgaagggagggaccgcgttgaaagatgcgaggtttttgggaagtggcgggcccggatgagcatggcgcggttcgagttaaagccgctgagtgaaagtgttgcaccctcgcggccggccagactcaattgtggtaacccgggattcaccgttaaagaagaaaacggagggattagctttggttggatgggccgaactctcaccgtcgcatcagcctggcgttaacttcacctttttctctctaatattggtattaattgctagaagaaaaagcgaacaaaattccagcaaacccaaataataaaaacttgtgtttggattcctcgaaatattctccgcctgcattttatttaatatttttccccccaatgcagcatggggtgggccatagggtggagtttgcctttcacagggagggctccactatgaagatctattttatgattctttattttatttcgtagttttaagtatttatatttagatatttaaaatgaaagcatataatactggttttttaggattagatattgaaattgtcgtgcaaaccacaatggcagaggtttcacgtgcacatgtttggatttgattttagaccttttaatttttgtttggttttcagtcaatttcttgttttaagaaaagaaaatttgtattatatataattgatattgataactattacaataaaaaaaagtgcatgatttatttttaatgatttttgaagttataatagttctcatttgattttttagaat

SEQ ID NO: 5617 - DNA, 581 bp, Gossypium hirsutum
  Clone ID: uC-gsronu33B011h10b1
tgatttccaggaaagatatgctgaaactgtcatagacagaatattttactatataaatagatcagaaacgggtcgtcttaccctccgggagttgaagcgtgggaacttaattgctgcaatgcagcatgtggatgaagaggaagatattaacaaagtattaaggtacttctcttatgaacacttctatgtaatatactgcaagttttgggagctcgacaccgaccatgattttttgatagacaaagagaaccttatcagatatggtaaccatgctcttacctaccggattgttgatagaattttttctcaggttccaaggaaatttagaagtcgggttgagggaaaaatgggctatgaagattttgtttactttatattgtcagaggaggataaatcttcagaacctggtctggagtactggtttaatgcattgatttagatggaaatggggtgcttacaccgaatgaaatgcaattcttttatgaggaacagttacatccgatggagtgtatgacccaagaaccagtgcctattgaggatatattgtgccagatttttgacatgattggaccagagaatga

SEQ ID NO: 5618 - DNA, 567 bp, Gossypium hirsutum
  Clone ID: uC-gsronu33B011h05b1
ttgatttccaggaaagatatgctgaaactggggtggacttaatataatactagggggggagatcacaaacgggtcgtcttaccctccgggagttgaagcgtgggaacttaattgctgcaatgcagcatgtggatgaagaggaagatattaacaaagtattaaggtacttctcttatgaacacttctatgtaatatactgcaagttttgggagctcgacaccgaccatgattttttgatagacaaagagaaccttatcagatatggtaaccatgctcttacctaccggattgttgatagaattttttctcaggttccaaggaaatttagaagtcgggttgagggaaaaatgggctatgaagattttgtttactttatattgtcagaggaggataaatcttcagaacctggtctggagtactggtttaaatgcattgatttagatggaaatggggtgcttacaccgaatgaaatgcaattcttttatgaggaacagttacatcgaatggagtgtatgacccaagaaccagtgctatttgaggatatattgtgccagatttttgacatga

SEQ ID NO: 5619 - DNA, 457 bp, Gossypium hirsutum
  Clone ID: uC-gsflmaxxa012b08b1
tccacgcgtccgcctacgcctacaacttctcttcccctcatcaaactcagaaagagggtgaaacctgcacataagcattataaaggtgatgtgggttcaaccaatagctaaaaaactagatgccaagggtaaaaattttaagaatgagaacataaaagtaccaacctgctacactgctggcagaacctctgcatctgcttctcaacaagagctttagtcgctttactatgaatctcacacactttatgccgacggtgatagtcctttgcattagaaagatcttccttacaattatcaacctgacacatggggtagctggtactcccaggcgatccaccacggacctttttgttaggcctagaaacaggctcttccacagaattcaatcccccacctagattcagttgcagtctctcatcatcatcatttgctgcagtggcctttttggatgttatag

SEQ ID NO: 5620 - DNA, 385 bp, Gossypium hirsutum
  Clone ID: LIB3166-046-P1-K1-F1
gggagtaccagctaccccatgtgtcaggttgataattgtaaggaagatctttctaatgcaaaggactatcaccgtcggcataaagtgtgtgagattcatagtaaagcgactaaagctcttgttgagaagcagatgcagaggttctgccagcagtgtagcaggtttcacccgctttctgagtttgatgaggggaagagaagttgtaggcgtaggcttgctgggcataatcgccgtagaaggaagacacaacctgaagatgtgacctcacggcttttactccctgtaaacagggataatgccgggaatggaagtttagatattgtcaacttgctgactcttttggctaggacacaaggtaaaactgaggagaaaagcattaatccct

SEQ ID NO: 5621 - DNA, 871 bp, Gossypium hirsutum
  Clone ID: GOSHI-09MAY01-C11901_1
ttcaaatcaaaatcatttccataaatccattttttcacgtagtcgcttcaaatacgttccagaatcaaaacaacgtcgtttcaagttcagatggaatcaacggcgaagccagcgggtggtagaaagggaggagtgaagaagaaggcagtatctaagtcggtaaaagcggggctccaatttcccgtgggtcgtatagctcggttcctcaagaaaggtcgttatgcgcagcgttacggcggtggcgctcccgtttatcttgccgccgtccttgagtatcttgccgctgaggttttggaactggcggggaatgcggcacgtgacaacaaaaagaacaggatcaacccgaggcacgtgctactagcagtgaggaacgacgaagagttgggtaagcttcttcaaggagtgaccattgctagtgggggtgttcttccaaacattaacccagtgttattacccaagaaaactgctgctgctgcatctgattctgaaaaagctaaatccaaatcccctaaaaaggcatagacattggatttgatgcaaacaatgtacaactctttttgcttctgtggtattctagtggtttagggatctcgccatttttttgtattatcttagaaatggcggatgataattggtgtgttggctttaaaactttgtactctgattccgcattttgtaaagtgctccaagcaaatggattgctttttttatttaatcattaaagaaatcctggcttaccgcagagcagcaagcctaaaaacaatccaaaaagagactctactaaatgttttgaaaaatgcctaagaaagcaataggatgaatggttattggtgttaaaaaaatcaattctctattttatcaacatacaatt

SEQ ID NO: 5622 - DNA, 647 bp, Gossypium hirsutum
  Clone ID: GOSHI-09MAY01-C111869_1
ttttttttttttttttttttttttttttgaatttatttaaagccctttgcatttgactgcaaacattttttctcttctctcatcgcccttcaccttctttcttgctttcttgctaaccaaaacctctctattccctttccattcccaccgctttccttctgctttccttttgattctctccacaaaaggaaaagaaaagaattccatctttcctttttctctccttctttattcccttattctttcctggctagctataattgtagttggaagctgtgggtaaattcagttcgatccaaggaaatgggggtttcagggaagccaaaagcggatgagggtctagattcacaaggccaaaaatgggttttagctgtgatttctatacgagctccattgaagcctatatacacaagtggtccattggagacaaataatgatgaacaaggtgacgactcatgttccaccactccaacgggtgaagatgccaaaattcaaacctctttgacttgtccgcctgctcctaggaagccaaagccttcttgaagtgtagctatgaagaagtgtagagagtttcactcctccgatttgagatgcctttatgcatgtcaagggaagcttgtaacgactattataacccagttgtagac

SEQ ID NO: 5623 - DNA, 506 bp, Gossypium hirsutum
  Clone ID: uC-gsronu33B081f05b1
ctggtgcgcctccaggtaccgccccggcataactggctggacccacccctccgcccatctttcatccgatcctttgcataagactgcaaagggtatttctcttctctcataggccttccccttctatattgctctcttgctaaccaaaacccctctattgcctttcccttaccaacgcttttccttttcgctctccttttggtcctctcccaaaaggaaaagaaaagaattccatcttttctttttctctccttctttattcccttattctttcctggctagctataatcgtagcctggaagctgtgggttaatctcagttcgatccaaggaaatgggggctccagggaagcccaaagcggatgagggtctagattcacaaggccccaaaatgggttttagctgtgatttctatacgagctccattgaagcctaatacacatgtggtccatttcatacaataatgatgaacaaggctgccactcatgttccaccactccaaccggt

SEQ ID NO: 5624 - DNA, 550 bp, Gossypium hirsutum
  Clone ID: GOSHI-09MAY01-C11851_2
gattgtgaattaaggaaaacgatcctgtttggtgcttttgtatgtgacaagaatggaacatggggagtttgttcgtgtaaggaccatccatttgaacagcaagcctcgagttctaacattgaagcaggttttgcactacgggcctacatgggagctgagatttgatccagagcctgcaatttggcatcgacagactatcaaggccttagattgtcagaacttatgaatttggtgtctttttttcagtttcccatcctttttcaggaaggaaccaattaactgagtcggatatattttcctggtattgcttgtggtcagttgttcccaacccagtgcagggttaagcttggttagcagatttggacccgacccagtgcacagaccatacggtgagttgtgttgtatagctgattggttttaagtttcatggtgagttttctgaatctgacactccaattaagactaagcatttatataatgtatgaaaaaaaattatacttcttgtatttactccaagttatatagacttgcatagataaatgattggatg

SEQ ID NO: 5625 - DNA, 1031 bp, Gossypium hirsutum
  Clone ID: GOSHI-09MAY01-C11851_1
gcgctggttaagaaagatccagttcgacttcaagttttacgtgttaaaggttgttgggggggatcaaaagctgaaaatttattagaacaaggtgacatggttttagcagtaaataaagagcctgttacttgctttcgagacatagaaaatgcttgtcaagcacccgcccgtccgcccacccgtccgccccctcgctcgaccatttttcggcagggacgtggaattgatcttcttgttggtaccgatgttagggatgggaatggcacagcacgagtgattaattggtgtgggtgtattgttcaggatcctcaccctgctgtgcgtgctcttgggtatcttcctgaggaagggcatggtgtttatgtggcacggtggtgtcacggtagtcctgttcatagatatgggttatatgccctacagtggattgttgaaattaatggaaaaccaactcctgatctagatgcttttgttaatgtgacgaaggagttgggacatggggagtttggtcgtgtgaggacagctccatctgaatgggaagcctcgagttttaacattgaagcaagatttgcactactggcctacatgggagttgagatttgatccagagagcgcgatctggcatagaaggatgatcaagaccttagattgtcgcaacttgtgaactgggtcatgtggtctaacttcttttcaggaatccacttcgaaattggcttggctgtggggatcaattgacaaattgatgaagactcagagagctggtgctgccattggtttctacctacagttgattggcttttgtacccaattggtggctgccaatgtgtgaggtttaagcttgaagaacgtaggttgacagtcaatccggtgaggcctaaagcatttattcagcaatttatatttattgttgtatgaaaatataaattaagtttcaacatctttcttatatataactttggtaaatcaaattatagacataggcaaatggttgcacgtaataaaacaacaaactttctttagtgtcgacgcggccg

SEQ ID NO: 5626 - DNA, 702 bp, Gossypium hirsutum
  Clone ID: GOSHI-09MAY01-C11861_1
cccacgcgtccgcgaaaacacaaactttcattctctcacacaaatatctcatcaagcaagagccttagggaataaaacatggcggtggcgggaatccttaacatccccaaactcccacttttctcgtcgcttcctttgcgtaaacaatcaaggccactttccatttccattaaagcctcaaattcccaaaccagtaccaaagaagaagaaaacccaagcttttcttcttcttcttcttcttcttcttctactactactacagctacaacttttgctcctcctcccaacttcaagccgccagagccaaagccatttgcaattaggcccgacaagacttgggatgttgttggggcatctcttgctttgttctttcggttgggaactggggtttttgtttctggctattcagcatctttagtttctgagaaggagattccaccaggccaatattctttaaaactaggaggctcgaaggtgaaagaaacatcgaaaataggccctcgtccggagaagcctatcgagatatatgagttcgaaggttgtccattttgtcgaaaggttaggaaattgttgcattttggacattgatgttctgtttatccttgccccaaaaatggtccgaattttcgtccaagttgctcaaatgggtggagagcagcagttcccttacatggtggatccgaatacaggagttgctatgtg

SEQ ID NO: 5627 - DNA, 360 bp, Gossypium hirsutum
  Clone ID: LIB3166-044-P1-K1-H2
ctttaacttccccaaattccaactttgttgtgggtttctttggggtaaccataaaaggccactttcaatttcatttaaggcctaaatttcccaacccggtcccaaggaggaggaaaccccaggctttcctcctcctcctcctcctcctcctccaactacaagaccagttccaactttggttcttcttccaaacttaaagccgccagagccaaagccatttgcaattaggcccgacaggactggggatgttgttggggcttctcttgctttgttctttcggttgggaactggtgtttttgtttctggctattcagcatctttagtttctgagaaggagattccaccaggccaatattcttt

SEQ ID NO: 5628 - DNA, 721 bp, Gossypium hirsutum
  Clone ID: GOSHI-09MAY01-C11811_1
gcatcttcccccgccgccttctctttttttacctcctttgccttccactctaatgtacggtccaaaaagcatggtcggacctaaaatcactatcaagttcctctgtagttacggcggaaaaatcgtccctcgttaccctgacggcaaactccgttattacggcggtgaaacccgtgtcctcgccgtcgatcgctccattcccttctctgagctgttggtgaagatgggagagatgtatgggtcagcggtgaccctacgttgccaattgcctacagaggatttagacgcgcctggttcgatcacttccgatgaggatctcgcgaatctcatcgaggaatacgatcgggtagcgtcgccaccctcttctataaagatcagagcttttcgttcgcctccgagatccaccaaaaaagatgtttctccgccttcgtcatcggcttcgtcttcaaagtcgtcatctacatccactcctagatactcctgcatacgccagatctcgaggactcccgttgcctatcctcttcgctcggaaaaatctgcggggaagatgatcccttactatggttcccatggtcaccatggcaaccctagccatatttaccttattcacagcgggaatcactggcaatagcagaagtccgaaacaaacgaaggatcatatagtttattaatccgttatggtcctcggcgaagatcaagtaaagagcaatactacccacag

SEQ ID NO: 5629 - DNA, 512 bp, Gossypium hirsutum
  Clone ID: GOSHI-09MAY01-C11801_1
cggggcgggcccaggcgtccggttttcttaatacacttgcaagaaggtttctggtgaggtctatttcgcgctttggccgggggtgtttggaattgtttgggctagtaacagtgagcccttgtttaacctctttggcttcttggtttgcatcggttccactgctggccgtgctttgaaatctgtcgttcaaggaatcttattaaccagtgaagctgaaaagttacattccatgaacttattgttgtacatggcacctatggcagccatgattttgttaccattcactctatacatcgaagggaacgttgcgagaatcacattagagaaagctaggagtgattctttcattgttttcttgttgctcgggaatgctacggtggcctatttggtgaacttggcaaatttcttggtcaccaaacatacaagtgcacttacattgcaggcgctgggcaatgccaaagctgctttagcagcattcgcgtcggttatgatctttccggaatacgatcacc

SEQ ID NO: 5630 - DNA, 1080 bp, Gossypium hirsutum
  Clone ID: GOSHI-09MAY01-C11831_1
ggattttgattttttttctttaaaaaaatggtggctaaatctcgggtatggcagccatgcaagaagaagaggtattttatcaatagcaagctttaggaagtgggggaatatagggaaaaaaattaaataataataaaaaggatttggagagacaacgatggcgactcgcagtagcggttcgagtcggacgtgtgtggggaaatatgagttagggagaacgttgggagaaggaactttcgcgaaggtgaaattcgcaaggcatttagagacgggagagaatgtacaattaagattcttgataaagagaaagttttgaaacataagatgattgctcagattaaacgagaaatttcaacaatgaaactcatcatacacccaaatgtcatccgcttgtatgaggtgatggctagcaagacgaaaatatacattgttctggaacttgtgactggtggtgaactttttgacaaaattgcaagcaaaggaaggttgaaagaagatgaagctagaaagtattttcagcagcttattaatgctgtggattactgccatagcaggggtgtttaccatcgagacctcaagcctgagaatttgctgctagatggtaatggagttcttaaagtttcggattttggtttgagtgctttacctcagcaagttcgagaggatggattacttcacacaacatgtggaacaccaaactatgttgctccagaggtgatcgacaataaaggctatgatggagctaaggcagatttgtggtcatgtggtgtgattctctttgtcttaatggctggttacttgccttttgaggactccaatttagtctctctgtataaaaagatatctaaggctgacttcggctgtcctccatggttctcctcaagtgccaagaaattaatcaagagaatcctagaccctaatcctttgacaaggataaccgttgccgaccttcttcagaatgagtggtttaagaaaggttttatcccacctcggtttgagcgagctgatgttagtcttgatgatgtggatgccattttcaacgaatcaagtgattctcggaaccttgttgaactgtgtgaa

SEQ ID NO: 5631 - DNA, 628 bp, Gossypium hirsutum
  Clone ID: GOSHI-09MAY01-C11581_1
tacttctttttcttgtttgttttatcaagctcctcttatttgtgctaatggagttcggaatacccttattccatatattcatcagctttcttcttgttttgttaattgcaattcgaagcgtgaggaaatctaaagctaggagtttaactcaaaggttgattccagggccacggaaattacctttgatcggaaatctgcaccagctcgctgattctactctaccccatcgcaccctgcgtgacttggctacgaaatatggcgccgtcatgcacctgcaactcagtcaagtttcaactgtggtcatttcttctgcagaaatggctgaagagattatgaaaacacatgatattgtctttgcttctaggcctttacttcttgcggccaagattataacttatgaatgcactgatattgtcttttcaccatatggaaagtattggagaaatctgcgaaaaatttgtacatcggagcttctgagtgcgtctcgggtcgcctccttccgatcgataagagaagaggaagtgttgaatctcgtcaaaaccataaaatcaaatgatgggttggctgtgaatctgagccaaaaagttttttcaatgacttatggcataacagcgaaggcagcctttgg

SEQ ID NO: 5632 - DNA, 378 bp, Gossypium hirsutum
  Clone ID: LIB3166-040-P1-K1-F5
cccactcgtccgaacaaatcagttcatttgatatctttctttcgagcttgtcttcggtgatgttactaactaacaatggagttgcagatatccttattccaggtcctcatcaccttcttcctggttttgtttatggcagcaatcactagtataaggaaatctaaagctaggaatttaactcaagggttgattccagggccacggaaattacctttgatcggaaatctgcaccagctcgccggtcctggtctaccacatcacaccctacgtgacttggctacgaaatatggcgccatcatgcacctgcaactcggtcaaatttccactgtcgtcgtttcttctgcagaaatggctaaagagattatgaaaacccatgat

SEQ ID NO: 5633 - DNA, 382 bp, Gossypium hirsutum
  Clone ID: GOSHI-09MAY01-C11571_1
cttccgttttcctgaatatatatatcctcttttaaacattttttggttctctcaatatcgggggttatggctttaccgacgagaaaattttcgtcaccttgggttatttttctcatattatcaattttcttagttgcgccatcgttttccggcaccgatactttcgttttcggaggctgttcgcagctgaaattcacttcgggctcacagtacgagtacaacgtcaactcgatactcacttccctagtcaactcagccatgttcacttcttacaacaacttcaccatgtcagcttccggtggtttcagtgccgtttacgggctgttccaatgccggggtgacctaaacaacctgactgtaaccgttgtgtagctaaagcgtt

SEQ ID NO: 5634 - DNA, 861 bp, Gossypium hirsutum
  Clone ID: GOSHI-09MAY01-C11561_2
ctggaatctctaagagtgagaatgtgtgaataaagttgcggacttgagaaccaatgctgagtgtttacaggcttttaaggaggatccagaggcactcaggtcatttcagaatttcatttccagtgccgatcccgacactcttgctgcaatgagtggcggtaaagttggagaggtgtcacccggcatgtttaaaactgcatcaagtatgatcagcaagatgtcacctgaagagctacaaaaaatggttcaattagcttcttcatttcaaggggaaaacccatatacaggtggatttggaactggacctgttcctccgaatgtgactcctgacatgcttaaaaccgcaaccgatatgatgaccaagatgccaacagaagggctccaaagaatgtgggaaatggcagcttctattaaaggaaaagattctatcccagcatcaacagctgtaaacggtagcaggctcgattcagatgctgaggtaacatatcccacatctcaaacatcatccatcaccagtgaaaatgttggtttcggtgaaactgcctcttctagttctagtcgtttcccaaattcaatgaatcctcagtcgagctttccaccaacatcaactgctgatctacaagaacagatgagaaatcaaatgaaagatccagccatgcggcagatgtttgcatcaatgatgaaaaacatgagtccggaaatgatggcaaacatgagcgagcaatttggaatgaagctttctcgggaagatgctgcaaaagctcaacaagctatgtcatccttatcacctgatgacttggataaaatgatgcgttgggttgataacatcccaagaggagccgaaggtgccaagaaagcaaa

SEQ ID NO: 5635 - DNA, 685 bp, Gossypium hirsutum
  Clone ID: GOSHI-09MAY01-C11561_1
gaagaatcaagggaatgagcttcataagcaagggaagttcaaaaacgcctctgagaaatatttgcttgcaaagaaaaacctgaaaggaattccatctgcaaaaggaaaaacacttttgctggcatgctcacttaatctcatgtcatgttatttgaaaacaaggcaatatgacgagtgtgtaaaagaaggttctgaggttttgtcttatgatgcaaagaacgttaaagctctttaccgaagaggtcaagcttataaagaactaggtcaatttgatgatgctgtctcggacttgagtattgcacatgaagtttcacctgatgatgaaacaatcgcaggtggctgcagagatgctgaggaaagattggctagagaaggcagtcatcaagcaccccggggagtggtaattgaagaaataactgaagaaactgtaaccacctctcctgctactcttcgaaggtcatctactgaacattcatcgaaacagccacgagaaagtactggaatcgctaagagtgagaatgggaataaagttgcggacttgagaaccaattctgagtgtttacaggcttttaaggaggatccagaggcactcaggtctgttccattatcacaaaatcacctgttaggtgatattcatttgcttagtctggtaatatcatattctatcttccatgagtggattatg

SEQ ID NO: 5636 - DNA, 447 bp, Gossypium hirsutum
  Clone ID: uC-gsronu33B153b06b2
cccttgcgtccgcccacgcgtccgcccacgcgtccgcccacgcgtccgcagtagcaggctcgattcagatgctgaggtaacatatcccacatctcaaacatcatccatcaccagtgaaaatgttggtttaggtgaaactgcctcttctagttctagtcgtttcccaaattcaatgaatgctcagtcaagctttccaccaacatcaactgctgatctacaagaacagatgagaaatcaaatgaaagatccagccatgcggcagatgtttgcatcaatgatgaaaaacatgagtccggaaatgatggcaaacatgagcgagcaatttggaatgaagctttctcgggaagatgctgcaaaagctcaacaggctatgtcatccttatcacctgatgacttggatagaatgatgcgttgggttgataagatccaaagagggagccgaggtgc

SEQ ID NO: 5637 - DNA, 498 bp, Gossypium hirsutum
  Clone ID: GOSHI-09MAY01-C11501_2
cccacgcgtccgccctcgcgcccgtcggcgcgcccggaactcgaaaaaatttgcagttcagaatttcgcaaagggcttacttgatgttgcggacaatttaggaagggcttctacacatgttaaaggtagtttctctaagatcgacgaatccaatgacactgctggggctgtaccgctccttaaaacactcttagaaggagttgaaatgactgagaagcagcttggagaggtatttagaaagtttggagtggaaaaattcgatcctagaaatgaaccatttgatccacacaggcacaatgcggtattccaaataccggataattccaagcctcctggcacggttgctcatgttttgaaggcaggttacatgctctatgatcgagttattcgaccggctgaggtcggtgttactcaagcaacggatgatggtgcaaccgagaataacacgggcgacaaagtctctgatgctggattgtaggttaagttgagtttttaatg

SEQ ID NO: 5638 - DNA, 920 bp, Gossypium hirsutum
  Clone ID: GOSHI-09MAY01-C11501_1
gccttccgaaaggacatgagggtgatgtagaaaaaatggtcaagagcctataaaaccaggtggggatacaaatcctggagaggctgaagttactgatcaagcaaaagatcaggttctgaaagtgatggtgaactatcaatggctgatatggtcaaacttgtccaggagaaagaaggactcttggaagtcaagcaaatggagattgaacaaatgaaggacaaagttgttcgcactcttgctgaaatggagaatgttatggctagaacaagacgtgaagctgagaactcgaagaaatttgccatacagaattttgcaaagggcctactagatgttgcagacaatttaggaagggcttctactcatgttaaaggcagtttcgctaagctagatgagtccaaagacactgctggagctgtacctcttttaaaaacacttctagaaggagttgaaatgaccgagaaacagcttggagaggtatttaggaagtttggagtggaaaaattcgatcctacaaatgaaccatttgatccacacaggcataatgcagtattccaagtaccagataatgctaagcctcctgtcacggtcgctcatgttttgaaggcggggtacatgcttcacgatcgggtaattcgacctgctgaggttggtgttactcaagcactcaacaatgatgccaactgaaaacaatacaaatgacaaaaggctctgatgcttgatgataagctagttagagtcagtggcaaatttttcaaaaaccttgccttatatacatgcatagtcattcaaaacttctttatttctatatttggccatcaatttcttgtttcactactcatagaagataccgctaggtaaagagggctttttgtacgttttcctctttctgaagtaaaataaaaagtacagtttttttggtg

SEQ ID NO: 5639 - DNA, 821 bp, Gossypium hirsutum
  Clone ID: GOSHI-09MAY01-C11521_1
cccacgcgtccgaataaatttcgtcacccatcccggtcgagctactcacctgatcgcataggttttatccgaatttggaccagatgaattttaatttgaattgattttatttaagattcagagaagagtcaagtatctgaagagggagctttgatcaacaaaattccatcaatggcgggggtttctttgaagtgtggggactgtggggctctgttgaaatcggtggaggaagcccaagaacatgccgaactcacctcccattccaacttctcagagtccactgaagctgttctcaatcttgtttgctcttcttgtggcaagccatgccgatccaaaatcgaaagtgatttgcatacaaaaagaacggggcatacagagtttattgataagactttggaggcagtaataccaatcagtttggaggttccaaaggtagctaaggagtcagaggaggctattgctgcaggtagcaccggtgagcctgaagagatggttgttccagaggttgacaaaaaactgcttgaagaactggaagcaatgggtttccctacagcacgagcaacccgtgcactccatttttctggtaatacaagtcttgaggctgctgtgaactgggtagttgaacatgaggctgacccggacatagatcagatgcccatggtacctgtcaacagacatgttgaggcatctaaaccttctcttacagcggaagagatgaaactcaaagcacaagaactacgggagaaggctcggacagagaagaagaagagaggataatggtacgagaaatggataacgagacgattccagtgggcaacgtt

SEQ ID NO: 5640 - DNA, 381 bp, Gossypium hirsutum
  unsure (1)..(381): unsure at all n locations
  Clone ID: LIB3166-039-P1-K1-H9
cccgtatccctcaccgagaaagcactttaaaagggtgaatcccaaaagccggatgatacattttttcatctatagattcagagaagagtcaagtatctgaagagggagctttgatcaacgaaattccatcgatggcgggggtttctttgaagtgtggggactgtggggctctgttgaaatcggtggaggaagcccaagaacatgcggaactcacctcccattccaacttctccgagtccactgaagctgttctcaatcttgtttgctcttcttgtggcaaaccgtgccgatccaaaatcgaaagtgatttgcatacaaaaagaacggngcatacagagtttattgataagactttggaggcagcaaaactaatcagtttgg

SEQ ID NO: 5641 - DNA, 682 bp, Gossypium hirsutum
  Clone ID: GOSHI-09MAY01-C11491_1
cttgctcaaaggtatgaagaactatacaaagagtacggtgtcaaatttttaaagggtgcttctatcaaaaacttagaagctggtcctgatggacaggtagctgctgttaaacttggagatggatctactgtggaagctgacatggtagttattggtattggagcaaaacctgcagttagtccctttgaagtggtaggattaaataatactgttggtggcatacaggttgatggtctgttccggacaagcgtacctggaatatttgcagtgggagatgttgcagcattcccccttaagatgtatgaccgtgtagcacgagttgaacatgttgatcatgctcgtcgatctgcacagcattgtgttaagtcattacttagtgcacaaactcacacgtatgattatctgccctacttttactcgagggtttttgagtatgaagggagccccaggaaagtttggtggcagtttttcggggacaatgttggagagacggttgagattggaaattttgatccaaaaattgctactttctggatagattctggtaaactgaaaggagttcttcttgaaagtggaaatgctgaggaatttaagctacttccggaacttgcaaggaaccagccttccattgacaaagccaagctcgaaaaggcatcttcggttgaggaggcactcgagattt

SEQ ID NO: 5642 - DNA, 393 bp, Gossypium hirsutum
  Clone ID: GOSHI-09MAY01-C11441_3
ccgcttgctcttcctcctcctccatggaagccccccctcaaggttacaggagaaatgtgggtatttgtctcatcaattcctccaaaaagggtgggattgatgacaatgaagatccaaaagttgcagccctcagagaattaaaggaagaaacaggtgttagctcagctgaaattctcgcagaggtaccttattggctgacatacgacttcccaccagaagtcagggcaaaactgaaacatcagtggggatcagactggaaaggtcaagctcaaaagtggtttctccttaaattcacggggaaagaagaagaaatcaatcttctgggtgatgggagtgagaaacctgagtttggtgaatggtcttggatgacaccagagcaaatagttgagcatg

SEQ ID NO: 5643 - DNA, 926 bp, Gossypium hirsutum
  Clone ID: GOSHI-09MAY01-C11441_1
gccgggtcgccctcccgtcccctttactccccttgccatcccagcgtacctcccaagcccatttgttcatatttctctccatcctcctgtacttgctcttcctcctcctccatggaagcccctcctcaaggttacaggagaaatgtgggtatttgtctcatcaactcctccaaaaagattttttcggcctcgagactagacattcccagtgcttggcaaatgcctcagggtgggattgatgacaatgaagatccaaaagttgcagccctcagagaattaaaggaagaaacaggtgttagctcagctgaagttctcgcagaggtaccttattggctgacatacgacttccctccagaagtcagggaaaaactgaaacatcagtggggatcagactggaagggtcaagctcaaaagtggtttctccttaaattcacggggaaagaagaagaaatcaatcttctgggtgatgggagtgagaaacctgagtttggtgaatggtcttggatgacaccagagcaaatagttgagcatgcagtggatttcaagaaacctgtttacaataaggttttggaagttttcactccctacctccattgatatttgcaaacatcaccatttctaatgtgttgagatcatagttggatacaataatttggattcagagtcaggactgagcacgattactacggtttgatggtaagaggttagttcttactatctgtaaaataaatgctccatgaattttggaatctagaccttggcccggttggttggtgttttttttacttggacttggatgtataatttttcttttcaagttcttccatgaaattggaaagtcattggaggttcatatctccatacttatgtgggacacaaatattgaatatgggtacttaaaaaagaattaaagagagagttggaac

SEQ ID NO: 5644 - DNA, 527 bp, Gossypium hirsutum
  unsure (1)..(527): unsure at all n locations
  Clone ID: AI730352.1
ggaaataaatggctgtattatggcggtccttttccctttactcccctttccatcttagcgtacctcccaagcccatttgttcatatttctctccatcctcctgtacttgctcttcctcctcctccatggaagcccctcctcaaggttacaggagaaatattttttcggcctcgagactagacattcccagtgcttggcaaatgcctcagggtgggattgatgacaatgaagatccaaaagttgcagccctcagagaattaaaggaagaaacaggtgttaggtcagctgaagttctcgcagaggtaccttattggctgacatacgacttccctccagaagtcagggaaaaactgaaacatcagtggggatcagactgganaggtcaagctcaaaagtggtttctccttaaattcacggggaaagaagaagaaatcaatcttctgggtgatgggagtgagaaacctgagtttggtgaatggtcttggatgacaccagagcaaatagttgagcatgcagtggatttcaaa

SEQ ID NO: 5645 - DNA, 725 bp, Gossypium hirsutum
  Clone ID: GOSHI-09MAY01-C11461_1
caaacggtgaagtaaagatgcagatgtttaagggtagaacggtaagtaaaaacagccgttgttgtttgattctaatttccgtagaccaactcccccttcttcctaggaaatcagacagacaacatctcctttttacaaaataaattgcttagcttttggttttgtttcagtcgagaaaacagacagttcattttttttccatgttctatcgatcggtggtgtttccttcaatctcagaaaggaaacggaattcaaacagaagcaaaaccgacactgtaatggcttcttcttcttcttcttcggctttgaaatctcagcctcttcataacttccaattgcatgaccttaaatgggccatgaaccacactagcaaccaccgccttcggaaactctccgattctttgcacaaatctcctcaacgtggagagagtggttctgagtccgacaataaccggaaggtcaatccggtgtgcgaagctcgctcaaagattggacattcttcaggtttttctcctgatcatagaactggaaaatcagagaggaaattcatcgatggttctgatgttttggttgattgtaactccgataagaaagttgatccatcggacgctagatcgaagatctatatacgttttccagccaagaatgacaagtctgttgacgaggttgcggatgtaggagatcagagcttgattactgaagacattgaagaattggttcccaaa

SEQ ID NO: 5646 - DNA, 776 bp, Gossypium hirsutum
  Clone ID: GOSHI-09MAY01-C11401_1
cccacgcgtccgcccacgcgtccgtccacgcgtccgaatggattgagacatatgggggcagttcactcttggaaactgtgtataaggctctagatgaggtgagcataacttcaaaagactacatgcaagtttcagctagtgacggttttaaaatgcctaagatatgcaggttgtgaatctctcggagtgtgaaatttacagttataatccggactctgatgcagatccctttctggagaaaggggcaatatggtccttcagtttcttcttttacaatagaaagttgaagcgtgttgtgagtttcagcttttgctgcttaagtaatttggtgggtgatggattccttgttgacaacttatgttctgaggaagatggtgaaatatttgataacatggacatgtaaccattaacatgtacatcctgcttgtacgtgtactgtagaaacccttagatatggtgtgtagttgtgtaattgcaatgttgctcacattgcgctagctgagtagattagctcttctatgtcgctgtgtacatgtagtaggtagttatgccatatgaaaatggaaaattgatattgatgtctgtaagaatgtgtggagtttgaatttaggttgatgaagatgttgaagacattataacttacctgactagctagctttgcgcctttgctgatagtcttatgtgctgatatatgttacaaacggcagctgattcttgtagaattgttggaaatgtagtgtgctattggatttgtgtcaaaaaaaaaaaaagggcgg

SEQ ID NO: 5647 - DNA, 656 bp, Gossypium hirsutum
  Clone ID: GOSHI-09MAY01-C11771_1
tgtaaatattggattgcttggatgtagcgaagtctcattattcgatcactgtacttcaccatggaacaccacttcacccaactcgacgacggcgcctccgccgacggcaaaccggcgtctaatttcggagcggcggttgcgacggtgctcctagctttgcttttacaaatattttgccgttgctgtcgctcaatttaccgtaatcatgtcaagaaatacaagttttcttcttcttccgccgccgctaacatggaccggtcgataatcgccgccgtggagaagatccttaaatacaagtttaaagacaaaagactcctggaagaagccttgacgcactcttcgtgccgcgaagacatgtcgtacgaaatactggagttcattggggacgcggcgctcggcttgggatgtagctacccatttttcatgttggagctcattatgaactctgaccagcttactcggattccgaaaaaaagtgtatctacatgatactgccgccgtggctaaatgcatgggcttaccgtttatcagatgaagacattgttttgttgacctatgttagaacatgtaggcagtaactagagagtattttacttgtaatccagtttatgtatatgttaatttatcggtctttaatataatattataaactctag

SEQ ID NO: 5648 - DNA, 603 bp, Gossypium hirsutum
  Clone ID: GOSHI-09MAY01-C11651_1
ggaaccctttccccctcgcttgcccacctccgtttcctccaaaacctctccgtcgccgataacaagcttaccggtcctatcccgacggagctcgctgtcctatccaatctccgttacctaaacctttccaacaatgttttcaatggttcctttcctacccagctttcccagctgaaaaatctacaggtactcgatttatacaacaataacatgacgggggagttgccggtttccgtcacggagcttcccaatttgcgtcacttgcatttgggagggaactatttcagcggtcagatcccgtcaagttacggccgttgggagcatcttgaatatttagccgtttcgggtaacgaactcagcggtaaaatcccacccgaaatcggcaacctaacgaagctgaagcagttgtacattggctacttcaatagtttcgaaggtggtttgccgccggaggtcgggaacttgtcggaacttgttcgttttgacgccgctaactgcatgttatccggtgaaataccgccggagatcggtaagttgcagaagctcgacacgttgttcctccaggtgaatgcactgtctggctccttaacttccgagctggga

SEQ ID NO: 5649 - DNA, 376 bp, Gossypium hirsutum
  Clone ID: LIB3166-042-P1-K1-D7
ctcactcctccaccagctctatcttctttacacaaccatcacagacatcaatgagacggctcctatcccctatgtatcaaaccttactatccaatctccgttatctaaacctttccaacaatgttttcaatggttcctttcctacccagctttcccagctgaaaaatctacaggtactcgatttatacaacaataacatgaccgcggtgttgccggtttccatcacagaacttcccaatttgcgtcacttgcatttgggagggaactatttcagcggtcagatcccgtcaagttacagccgttgggagcatcttgaatatttagccgtttcgggttacgaactcagcggtaaaattccacccgaaatcggcaactt

SEQ ID NO: 5650 - DNA, 1366 bp, Gossypium hirsutum
  Clone ID: GOSHI-09MAY01-C11641_1
gcggaaaagtgacaccatctaccccgcccctccgcccccgcgcccgggccggcggcgctggtgccgctggagggggcatggagtttgatctgtcggaagagatgctggcggtgataccgacggatccttacgagcaattggatctggcacgtaagataacgtcgatggctatcgcctcgagagtatcgaagatggaaacggagattgggaggatgagagcaaagattttcgaaaaggatcgtatggtttacgaattggaagagaaagtatcaagattgcagcaagcgaatcatgaggccgaatctcgattaaagcttgtttttgacgaaaatatgaagcttgcaaaggagcgtgattcattggcaatgaccgcaaagaaacttagccgtgatttatctaagttggagacttttaagcggcaattgatgcaatcgctgagtgatgataattcatctcaggctgaaactgttgatattgggacctgtgaccagtcagtccctaaagcctatccggacaaggatgatggggcgagtgactacatgtcgcttcgttcttccaatggttcgacggacttgggaagcacaactgatgaagcttcaagatatgctggacaaagattttctataactccatatatcacaccgcggctgacacctactggaactccaaaagttatatccacaaatgggtcccctaggggttattctactgctgggtctcctcagagaacctctgctgcaacatctcctaccaagtctcaatctgatgggcggacttcgttctcctcatggtacccatcaagccagcagtcatctgcagctaactctcctcctcgtaggggctcactgccagcaaggacccctcgaattgatggaaaggaattctttcgccaggccaggagtcgactttcctatgagcaatttagtgcttttttggctaacatcaaggaactgaatgctcaaaagcaaaccagagcggaaactttgaggaaggcagaagagatttttgggacagataacaaagatctgttcctatcatttcagggattgctaaatcgcaacattcactagatcttaaattatctcttcttgagataattttccattactggttgcttggttttagttgatggatttgtccaaacatcaaaagagctgccataatgtaatattagatgaaagataaaagcatcagcttctttttctttttcaagcaaattaatgtggttttgggctttgagactatatagctcctcccattcaagcagggatttttgtgtaaataaattactctgcttttgcctactctttatgtccctttttcttttgtttaaattgccattacaaggttattagttttttacttt

SEQ ID NO: 5651 - DNA, 385 bp, Gossypium hirsutum
  Clone ID: LIB3196-014-P1-M1-D1
tcgcccacgcgtgcgaaaaaattatttatttatttttctttacttcccattttaaatgttttccttttcccaacgaagtaaagcgacggaagaagtgacaccatctacgatgtctcagggtggcggcgccggtgccggaggaggaggtgccggtggagggggcatggagtttgatctgtcggaagagattctggcggtgataccgacggatccttacgagcaattggatctggcacgtaagataacgtcgatggctatcgcctcgagagtatcgaagatggaaacggagattgggaggatgagagcaaagattttcgaaaaggatcgtatggtttacgaattggaagataaagtatcaagattgcagcaagcgaatcatgaggcc

SEQ ID NO: 5652 - DNA, 377 bp, Gossypium hirsutum
  unsure (1)..(377): unsure at all n locations
  Clone ID: LIB3120-012-P1-K1-D6
tcgtccacgcgttcgtccacgcgttcgaagagacaccatctacgatgtctcaggggggcggcgctggtgccgcantatgaggcatggagtttgatctgtcggaagagattctggcggtgataccgacggatccttacgagcaattggatctggcacgtaagataacgtcgatggctatcgcctcgagagtatcgaagatggaaacggagattgggaggatgagagcaaagattttcgaaaaggatcgtatgatttacgaattggaagagaaagtatcaagattgcagcaagcgaatcatgaggccgaatctcgattaaagcttgtttttgacgaaaatatgaagcttgcaaaggagcgtgattcattggcaatgacc

SEQ ID NO: 5653 - DNA, 760 bp, Gossypium hirsutum
  Clone ID: GOSHI-09MAY01-C11671_2
tctcacgcgtccgcccacgcgtccgcccacgcgtccggacctccctccggttacagtccctccaattaacctccctccagggacggttcctccagtaactaagccaccaagtgggaaaccctgcccaacaccaccaaccaaggacacttgccccattgacacactgaaattgggtgcttgtgtggatctgctgggagggttggtgcacattggactaggtgacccggttttgaatcaatgttgtccggttctttcaggacttgccgagctcgaagctgcggtctgcttgtgcaccaccctcaaacttaaggttctcaaccttaaaatttatgtgccactggctcttcaactccttgtcacatgtgggaaaacaccccctcctggttacacgttgcgtctcttctaaaaccaaggttgctaggttgatggaatggacatgagaggatgtcgagcttttctctttgtttcttagttggattggaaatctgatgcagtgtttattgtaacaccaattaattttttttcttttaatagattgttgcaacttgcatgtgtgtttctgtatcttccacaaaaaaaaaaagaaaggtaaacgccatcaagaatgatatttgtctttggtcaagaaaaacgaagagtgtcaaaaagaaatgccaacagcaagaagaaaggcaacaaccacaatgccaacaaaggtgcttgaaacgattcgagcaacgaacaaaaacaatcccagaggcaatttcaggagtgttagcaa

SEQ ID NO: 5654 - DNA, 923 bp, Gossypium hirsutum
  Clone ID: GOSHI-09MAY01-C11671_1
ccaccgttccgacccggccctcccgcccgcccacgcgtccctttgggtttgaaaaatggagtccaacaccaaaatgtcagctcttcttttgctttgcatgcttttcatttcttcagtgacaccaattcttgggtgtggttcatgtgggaaagcaccacacaagcatcgaaagcctaagggaaagtcccctaaaggtcccatcactttgcctccccttgtgaaacctccaatcaagttgccaccggttgttcctccaatagttaagccacccattgacctccctccggttacagtccctccaattaacctccctccagggacggttcctccagtaactaagccaccaagtgggaaaccctgcccaacaccaccaaccaaggacacttgccccattgacacactgaaattgggtgcttgtgtggatctgctgggagggttggtgcacattggactaggtgacccggttgtgaaccaatgttgtccggttctttcaggactcgccgagctcgaagctgcggtctgcttgtgcaccaccctcaaacttaaggttctcaaccttaaaatttatgtgccactggctcttcaactccttgtcacatgtgggaaaacaccccctcctggttacacttgctctctctaaaaccaaggttgctaggttgatggactctatatgatggaatggacatgagaggatgtcgagcttttctctttgtttcttagttggattggaaatctgatgcagtttttattgtaaaaccaattattttttttcttttaaaagattgttgcaacttgcaagtgtgtttctgtatcttccacaaaaaaaaaaaaaaaaagaagcaatcaagaatgatatttgtctttggtcatgattttctgggattttcattttgttgctttcgctaactatatatatatatatg

SEQ ID NO: 5655 - DNA, 579 bp, Gossypium hirsutum
  unsure (1)..(579): unsure at all n locations
  Clone ID: LIB3829-022-Q6-K6-D12
gcgttcggtttgaaaaaggagtccacaccggggggggggggggtttgctttgcatgcttttcatttcttcagtgacaccaattcttgggtgtggttcatgtggngaaagcaccacacaagcatcgaaagcctaagggaaagtcccctaaaggtcccatcactttgcctccccttgtggaagccgggggggaagttgccaccggttgttcctccaatagttaagccacccattgacctccctccggttacagtccctccaattaacctccctccagggacggttcctccagtaactaagccaccaagtgggaaaccctgcccaacaccaccaaccaaggacacttgccccattgacacactgaaattgggtgcttgtgtggatctgctgggagggttggtgcacattggactaggtgacccggttttgaatcaatgttgtccggttctttcaggacttgccgagctcgaagctgcggtctgcttgtgcaccaccctcaaacttaaggttctcaaccttaaaatttatgtgccactggctcttcaactccttgtcacatgtggngaaaacaccccctcctg

SEQ ID NO: 5656 - DNA, 351 bp, Gossypium hirsutum
  Clone ID: LIB3493-049-P1-M1-E8
gaaaagaacaacagctgaacacaattgaaacatagcaacattgttcggcttcctaagaaatcaaaaattttctgttggaatcggaactatctttagacaagttggactccaaagattctaaactaaaaccataaccaataccctgtccaaatccgaacccaaggacacttgccccattgacacactgaaattgggtgcttgtgtggatctgctgggagggttggtgcacattggactaggtgacccggttgtgaatcaatgttgtccggttctttcaggactcgccgagctcgaagctgcggtctgcttgtgcaccaccctcaaacttaaagttctcaaccttaaaattta

SEQ ID NO: 5657 - DNA, 383 bp, Gossypium hirsutum
  Clone ID: uC-gsronu33B148a08b1
gcgcggttactttggagtccaacaccaaaaagccaactgggggggggtttaaaatgctattggggttttcaaaaacaccaaaacttgggaggggatcatgtgggaaagcacacaagcatcgaaagcctaagggaaagtcccctaaaggacccatcactatgcctccccttgtgaaacctccaatcaagatgccaccggttgttcctccaatagttaagccacccattgacctccctccggttacggaccctccaattaaccttcccccagggaccgctgctccagtaactaagccaccaagtgggaaaccctggccaacaccaccaaccaaggacacttgccccattgacacaactgaaaatgggtgcttggggggatctgct

SEQ ID NO: 5658 - DNA, 393 bp, Gossypium hirsutum
  Clone ID: LIB3147-023-Q1-K1-H10
cggaaaaaccggggcgggcgacgcgtacgcccacgcctccgagttaatccacccatttactctccctccggttacggtccctccaatcggggtttcttcaaggacggttgctccagtaactaagccaccaagtgggaaaccctgcccaacaccaccaaccaaggacacttgccccattgacacactgaaattgggtgcttgtgtggatctgctgggagggttggtgcacattggactaggtgacccggttgtgaaccaatgttgtccggttctttcaagactcgccgagctcgaagctccggtctgcttgtgcaccaccctcaacttaaggttctcaaccttaaaattatgtcccactgcttttcaactccttgcacaattggaaaaccaccc

SEQ ID NO: 5659 - DNA, 356 bp, Gossypium hirsutum
  Clone ID: LIB3148-016-Q1-K1-A6
accacgcgtaccgtaaaggttgggatttatgtattagcaccacaagcatgccattgcggcaggtgacatatactggggggtgtggaacatcaaatacttcactacactagcgtcgaaagcctaagggaaaatgctctaaaggtcccatcactttgcctacccttgtgaaacctccaatcaagttgccaccggttgttccttcaatagttaagccacccattgacctccctcctgttacagtccctacaattaacctccctccatagacggatccttcagtaactaagccaccaattgttaaaccctgcccaacaccaccaaccaaagacacttgcctcattgacacactgaaattg

SEQ ID NO: 5660 - DNA, 306 bp, Gossypium hirsutum
  Clone ID: LIB3146-024-Q1-K1-A11
ggttgctaggttgatggactctatatgatggtattggacatgagaggatgtcgagcttttctctttgtttcttagttggattggaaatctgatgcagtttttattgtaaaaccaattattttttttcttttaaaagattgttgcaacttgcaagtgtgtttctgtatcttccacaaagaaaaaaaactaaaaaatgcgctcaagaatgatatttgtctttggtcatgaacaaaacagaaaaaagtatcaaagagcaaaagccatacatgttggaaatatcttagaaccaataacctgaagaagttg

SEQ ID NO: 5661 - DNA, 265 bp, Gossypium hirsutum
  Clone ID: uC-gsronu33B029g01b1
atgtagtctaacaccaaaatgtcagctcttcttttgctttgcatgcttttcatttcttcagtgacaccaattcttgggtgtggtttatgtgggaaagcaccacacaatgtatctttgtctatgggaatgtttttttatgttatattactatttattttctagtgaaatattcattcatgttgctactttttttttcttttatttataattaatttatctttactaatttatattcaatttttcatattttctttttatttttata

SEQ ID NO: 5662 - DNA, 806 bp, Gossypium hirsutum
  Clone ID: GOSHI-09MAY01-C11601_1
ccgccttcactttcttctccttaattcttttttccgtcatcaaatgctttacaaggacgtgagaaaaaaaattgtctttttggtgctttgaagttgcaaagtagaaaaatgggaattccatcagaaataagggatgtttggatacagagaaaaagaaattccttcataattccttcccctgctgaagacgagaagaatttgagagccaagcaattctctcaagaaggaattcgtgccggtgtcaaggcggctgcggtcgccgccgttgtcagcgccgtacctaccttgattgcagtacgtaagattccttgggcaaaggcaaacctcaaccatactgctcaagctcttatcatcagtggagcatcaattgcggcctacttcattaccgtagataaaactgttttggaaagtgctaggagaaattctcgagcacagttcgacaaaactgtttgaatgctagaattgaaggtattcagtggcgaaggttctcaggacaagtatgatacatgtcaataagtttaaagctgttgtatgccatgcatccactttttttttcttttttttttctgtggaattttatcatcaattaagcagtttaaatgtatttaggtgatgttttatgtttcagtttataggcatgagattatataatccttttatgacctttaacatggaactcagttgagttctttcatggagttttggttgggtttactttgtttaattgcatgtttgtggagaataaagatggtggagggtagtaacaaagcatgagcagttaaaagtatggtgattttattgctttg

SEQ ID NO: 5663 - DNA, 652 bp, Gossypium hirsutum
  Clone ID: GOSHI-09MAY01-C11621_1
tgatggcagccaaaacagtcacaagaggaaaagggatactgcttcctatagtgaatgcagtgtggatggaaacattataaagattagattttccttgaaaaagccccgggcatctgatgcatcaatcagcagcgaagaaccagcctgctctagttctggtaggacagattcaattcaagagccaagttgttccgccgcttctgtgcctgaactgaagcggcggcttgatgatggaaggaaggagcaaggctcctcttcttctggaacattgctgaaggctgcattgcagtataaaaccttcattgaggattggatgccacctcttctcgaagctgagctgaataatgatggtgatgaagactggcttctaactaagaagcagctagggaaacccgcggccaaaagacctgatgacaatgaccatacatgtgttgcgagtgcaagtttgcacccgagtgcacattttcttccggcagctgagatttatgcactgccttatacagttccattttgattccgcttagtggaggggctgtctttttgttctcccctgcaaagagcggcttcgtggcgggattgggtttgggtggcgaattctaacttgtacagtcttgagaatttactaatagaaacaagagaaatttttgccaaa

SEQ ID NO: 5664 - DNA, 532 bp, Gossypium hirsutum
  Clone ID: GOSHI-09MAY01-C11191_1
cccacgcgtcggtgtttatatttccttctctctttttttcgttttgcttcagcttatgtctctcaactaaaaaaaaaaatgactgctcaaacagacaaagaggtcgaagagatcctcgccgctcatctcgatcaacagaaaatccattctgagcaacccgaacaacctgtagttgaagatgacgacgacaacgatgacgacgacgatgatgacgatgacaaggatgaagatgatgccgaaggccttcatgacgtagacggaactggtaggtcaaagcaaagcagaagtgaaaagaagagtcgtaaagcaatgttgaagcttgggatgaaaccgattcccggggttagcagggtcacaatcaagaagagcatgaattatcttattcgtcatctcctatccagatgtcttcaagagccctgcatcggatacatatatagtgtttggagaggctaagattgaggacttgagctcacaactgcagactcaagctgctgagcagtttaaggctccggatctcagccatgtgatctcc

SEQ ID NO: 5665 - DNA, 640 bp, Gossypium hirsutum
  Clone ID: GOSHI-09MAY01-C11121_1
gacataacaaatagaaaaagagggaagaaaacctgctgtccccaaccccactctctcttttttgtgctttactcctctgcttgcctttagccgttattattacaatcacttcgccgacaaccaccgtccacgacggttccggacacaacctagttccagatttggaccctccgcccaaaacccaacaaagattctcttccaagccactgcctttaccattgcatgacgacgattcactcttccgagtcgcttcccgtgtcaactcaaaactccctcccggttcacccaaaaagattgcatttttattcctcactatttcgcctctgcctttcgctccgctttgggagctttattttaaccaaacccccaaagatctcttcaatgtttatgtccatgccgacccgagttacccttacgacccgccgttctcgggtgtgttcgctcaccgagtcatcccttcaaaacccgctctccgtttcaccccgactctcgcttccgctgcccggaggttattggctcacgcgctgcttcatgaatcgttccaattacatgtttgtcctcttgtccgcctcttgcattcccattcactcttttgccttcacctacaaaacgctcactcggtcaaagaaaagctttatcg

SEQ ID NO: 5666 - DNA, 636 bp, Gossypium hirsutum
  Clone ID: AW187181.1
aaacgctttgaaaaaaaaaaaaaaaactaaagaggaaattggtgtcaatttttttttttttggctttgttactgcatttctgatttcccctgtttgaaatttttggtagttaaagtcatcaaaaaggaatgaaaaaatataggaatggggaaatctgggacttcgagcacgaggtggcggtggcgacaaaccggccggttattttaggattggatggtggaaccacttctactgtctgcatttgtatgccaattatgcctttctccgacgcccttcccgaccctctccccgttctcgcccgtgccgtcgccggctgctccaatcataacagcgttggcgaaactgcggccagggaaacattaaagcaagttatggcagatgcactttcaaaatctggttctaatcgatctgcagttcgagctgtttgtttagcagtatctggggttaaccatcctacagaccaacaaagaatattaacctggcttagagacatattccccacccaagtaaagctctatgtgcaaaatgatgctgtggcagctttagctagtgggacaatgggtaagctacatggttgtgtactaattgctggtactggaaccattgcctatggattcacacaagatggcagagaat

SEQ ID NO: 5667 - DNA, 636 bp, Gossypium hirsutum
  Clone ID: uC-gsronu33B041h03b1
gagccatcaaaaaggaatcaagagatatcagaatggggaaatctaggactttgagcacgaagtggcggtggcaacaaacttgctagttattttaggattggatggtggaaccacttctactgtctacatttgtatgtcaattatgtctttctctaacgcccttcccaaccctcttcctgttctcgcccatgccgtcactggctactccaatcataacagtgtcgacgatactatggccagggaaacattagatcaagttatggcagatgcactttcaaaatctggttctaatcgatctgcagcatacatttcatgtcttctttttgcaatggcattttaaggatgcctttttttttcttattcttagaatgcttataagttatgactctgtgagaaatatgtcaagcctgaagatggtgtaggagcaaaagagtgaagtcaagtgacgaaaaattgagtgaatatgaatatgccgccttggatgacgaaatatcacccgaaaacagatctttaggcacatattatgccttgcatgctcgctccaaaattggcttggggtggacatgatgttcagctccaggaaaacagacccagggacatgtggaaaatcctactaccccttttggcattactttc

SEQ ID NO: 5668 - DNA, 1573 bp, Gossypium hirsutum
  Clone ID: GOSHI-09MAY01-C11031_1
ttgacatctactatgtgtgataagagaacatttcgcgctcccgtcgggtatttccgcgagaaatacaatgtggtgcttaaatatccagccttgcctgcacttcaaagtggaagccaagctagacctgtctacctgccaatggagctttgtagtatcgttgagggtcagagattcacaaaataactaaatgaacaacaagttagatctctgctgagagcaacttgtcaacgtccgaacattagggaggggaatattacaaagatggtccaggtcaataattttgaggtggaggagcttgttactaaagaatttggaatgcatgttcgcaaagaacttgcattgattaatgcacgagttctgaatcctccagcgctaaagtatcacgatagtggacgtgacaaatttgttaatcctagctgtgggcaatggaacatgatcaacaagaaaatggtcaatgggggtaaagttgatttcgggtcttgtgtgaacttctcctctgaatattggaatatgtcagaagacttctgtgcggggctggtgaatatgtgtaacagcaaaggaatggtgtttcgccaaactccttcaattgcaatgcgatcagctcgtgctgatcgaattgatcagactctcatggatgtatacaaagagtctgctggcttgaataagccacttcagttgttgatcattatcttacccgataagactggttcttacggaaaaataaagcgaatttgtgagacggagctaggtattgtttcacaatgttgtaagcctgtgcaagcttcaaagtttagcaaccaatattttgaaaatgttgctctcaagatcaatgctaaggttggggggcgaaatactgtgctgagcgatgctgttttaaggagaattccgcttgtgactgatgtccctacaatcatttttggggcagatgtcactcatccgccgcctggcgaagactctagttcttctatagctgcagtcgttgcttcaatggattggcctgaggtaaccaagtatcgtggaatcgtctcagcacagactcaccgggtggaaataatccaggatctttataaacaaactagggatccacagaagggtttagttgagggtggaatggttagggaattgcttcttgctttcttcaggtcgacgagacaaaagccttctagaattatcctctatagagatggtgttagtgaaggacaattcagccaagttttgctttatgaaatggatgcaattcggcaggcttgttcctcgctacaggaaggatagatgcctcgggttacatttgttgtggttcaaaagaggcatcatactcgcttattccctaccgatcgcaacataactgataggagtggcaatatattaccaggggacgagcaagtccacacattaccacgttttgtttgatgaaaatggcttcactgctgacatcttgcaagtgctcacaaacagtttatgttacacgtatgtgtttactcctttctctataatcctgatatggggtgaataaataatgctttagatcagcactaggaattatatagtaataattttactttgtggacaggta

SEQ ID NO: 5669 - DNA, 1131 bp, Gossypium hirsutum
  Clone ID: GOSHI-09MAY01-C11021_1
cggccgccgtgggctgggactctgcctcctttgtgcaattccagtgatgaccaagatgcaagttggaatgtgtctatgaaggcttgcatcaccccgtactctgcaagggtgcacaaagaaagatggatggactacccccgcggccgcagaggcttactgctgcgccacctcgccttgaagaaattggggggggctctgaggaattccatgaagatactaaaatatggcattttagagtgattgagtattggaaacagatgaaatctgttatacagaagaattccatcagaaatgtcatggatatgaactcgaaccttggagggtttgctactgcactcaaagataaggatctttgggtaatgaatgtggcttctgtcaaaatgtctgcaagattgaaaattatttatgaccgaggcttgattggaacagttcatgattggtgcgaagcattttctacatacccacgtacgtatgatcttcttcatgcctgggcggtgttttcggagattaaggagcgcggttgtagtccggaggacctcctgattgaaatggataggatacttcgtcctgatgggtttgtcattataagagataaacactcagtgataaattacatccagaaatttatcactgcattgcggtgggatggctggttatctgaggttgaacccagaactgatgctctcactggtggtgaagaacgagtgttaatagcgagaaagaagttgtggactgatgggtttatgacaatgtgaatgtactttctctctcagataataacaggaccaaagctcaagagtaattggcatcacgcgcgatgtgcaaactatagacggatataatgcctgctggttgctgcaaacagccgcaatccatgaagaaaagatagagcgaagctcagccttagacatttgttttgcactcaatgggatgtatttgttgaaagtaccgaaaatcactttcgtctattgtgctccgtttccatatgtatttgtaaacaatttattcccccttggctgacctgttttaaaggcccaattttctttgcgcgttaagtacatgtctgaaccttgtcctaaaggtgtaacccaaaagcatattcgagctgaaatagttaagatgttctattcc

SEQ ID NO: 5670 - DNA, 419 bp, Gossypium hirsutum
  Clone ID: LIB3135-036-Q1-K1-H1
gaatgtgcaaactatagacggatataatgcctgctggttgctgcaaacagccgcaatccatgaagaaaagaaagagcgaagctcagccttagacatttgttttgcactcaatgggatgtatttgttgaaagtaccgaaaatcactttcgtttaatgttcttgttttcatatgtatttgtaaacaatttattcctccttgaaaaacctgttttaaagtctcaaaaaaaaaaaaaaaagaaaaaaaaaaaaattaataaaaaaaagacaaaaaaaaaaaaaaaattaagatagaaaaaaaaaaatataaaacctataaaattaaagagaaaaaaagacaaaaaataaaaaaaaaggggggcccttttaaaaggtcccaggtttatatacccgtgcttgcaaggaaaaattttttttatggg

SEQ ID NO: 5671 - DNA, 344 bp, Gossypium hirsutum
  Clone ID: LIB3148-016-Q1-K1-A12
cccacgcgtccgcccacgcgtccgatcacgtttaatgtgcaaactatagaatgatataatgcctgctggttgctgcaaacagcggcaatccatgaagaaaagaaagagcgaagctcagccttagacatttgttttgcactcaatgggatgtatttgttgaaagtacctaaaatcactttcgtatattgttcttgttttcatatgtatttgtaaacaatttattcccccttgaaaaacctgttttaaagtcccaattttctttgtgcattaagtacatgtctgaccctgcctaaagtgtacccaaaaaccttaatcaagttgaaatagttaaaatgttttccccc

SEQ ID NO: 5672 - DNA, 940 bp, Gossypium hirsutum
  Clone ID: GOSHI-09MAY01-C11341_1
cccacgcgtccgcccacgcgtccgcccacgcgtccgctttaagcctttttttttttaaaaaaaaagaaagaaccccttaacctgctctgttagggttagttcagcatgcagccgccaaaccaccatccattcgatggtcgacggagtgaacaacggccagatttcgccaaccgaggccgtgactacggtgatctggtaattttgctcctttttttctttatttaaaaaaaaacctcgaatcttatgatattcttttaaaaaacgaaacaaactttgaagatttaaacaaaatctcgataccattcgaccctcgcccacatctatatatttttgagatgttcgggctctcatcggcgtcgattcgagtatccacttcatgtattcatgcctaaattgtaagctaatcacaagaaacgaaaaaaaaaacaaatttggaaatcaccttccaataactttcgtcttgatttcttttgatatccagtgtgcctcccaaaaaaaaaattacaatcgattccccctggctttatagccgaatgttcaaataaaaatacaatttttctttttgctttcgtattggctattgttgctgctgtttgcttgttttttttcgcaggtacggagcgtgtgttggcacctagcgtgaggcgtacggaggcgcacgtggtggacgtacagtagctgctggtggctgcggcgctaagcagaggctagggtttctgccttgattttttggtttttgggctgtagagtatttgggccttgtaaatggacttgtaattaatttttatttagtttattttttgtttagtgggcccgggcaaaaatgggcttttacaatttcatattctaattttgaattgtttaaaattattattttatcgtatttttattttaaacataattgtctatctttaacttataaataaaagttttcattaat

SEQ ID NO: 5673 - DNA, 417 bp, Gossypium hirsutum
  Clone ID: LIB3145-024-Q1-K1-E10
cccacgcgtccgcccactcgtccgcccacttttccgcggacgcgtggggtaattttgctgctttttttctttatttaaaaaagaacctcgaatcttatgatattcttttaaaaaacgaaacaaactttgaagatttaaacaaaatctcgataccattcgaccctcgcccacatctatatatttttgagatgttcgggctctcatcggcgtcgattcgagtatccacttcatgtattcatgcctaaattgtaagctaatcacaagaaacgaacaaaaatacaaatttggaaatcaccttccaataactttcgtcttgatttctttagatatccagtgtgcctcccaaaaaaaaaattacaatcgattccccctggctttatagccgaatgttcaaataaaaatacaaattttcttttt

SEQ ID NO: 5674 - DNA, 1044 bp, Gossypium hirsutum
  Clone ID: GOSHI-09MAY01-C111349_1
aagtttgggggacttcatttttctttgatcaatataaacctatctgggtatttctaagatttcctaaatctctatgaatccgattctgggtcttctccaaattcactaattttcaatacccagatttccttttacaattctctttgaaatttcgttgtcaaaaaatgatgggattctattaatatatcagggttttcaaagtttttttttcatttctctcaaagaaaaaatgactagtgcgaccttttcatcaagtttattggggtcgttccctgtagttacatcaactaggcattgtgatttgggcaaagaaaggagcaaattttgttgtttcaatgagaaaaaggagcaaagaaatgttatctgtgcttgtatggctcctcctactaaaaacctgggacgtgatgaattccatggaactaaatttactgaatcatccaaatatgggaatttcagcaaggaagtgaagcatgagaatgattctgatgttctcatcccacgccgccgccctcgcgtcccatttggagaaaaacatatcttgcgaggtgtgagcttcaagattaggcatggtgaagctgtgggaattattggtccttccggcactgggaaatctacgattctgaagattattgctggacttcttgcaccagacaagggagaggtatatattcgaggcaaaaagagaatgggtttgattggtgatgatgagatatctggtcttcgaattggattggtttttcagagtgcagcactttttgattctttgaccgttggtgaaaatgttggtttccttttatacgaaaattcatgcatgtctgatgaacaaatttcacagctcgtgacggagaccttggctgctgttggtttaaagggagttgaagaaagattaccttctgagttgtccggaggaatgaagaaaagagttgctttagctcgttctataatttgtgacatctccaaagaatcaattgagccggaggtgcctttatatgacaaaccaacagctgggctcgatccaattgcatcgactgttgttgaagatct

SEQ ID NO: 5675 - DNA, 814 bp, Gossypium hirsutum
  Clone ID: GOSHI-09MAY01-C11361_2
cggacgcgtccgcccacgcgtccgaaaaaaaaaaaggaaagaacctagggcgctctctcaattctgcgccgaccaacagcctttcaaaggtctgttcctctgcccatccttttgactcatgtgagagtcaatcaaggcctccttgagtcgaagggctcatgagcttcgtttgtagccccgaatcgccacttagcttcaatcatggtgaaacaagcgtggattcaagggcctcaaatgcaggtgagcgtcgttttccatttttatttacattcaatcaagaaaggggcagatgggaagataagagagaaataagggacgaagattgcgagtaaatcaccttctttttcgttttctattgcttctgtttgcgtaaatgcgcgtaacccgttacaagcaattctcttcaggctttatagccgagagacaaaagagaaaagaaaagaaaaaaaagaaaatgaaaaatcatttctttgttttcttgcacgtatttgctgttgtggtttgtccttttttttggcaggtacaggtgtgcgctggcgtacggggcgtgctggctgctgagacgctggtatcgtacggagggcgggcgtggcacgacgtggttgctgttcgtgaaggctgcggtgcgaggaccccttttgccctagggtttgccgaagcttagcttgggtttcgggctgtttgggtctgttccagttattgggcccttatatttgggctatggggctactggtttttttttgtaattggactaagtattagtaatagagtcatgcaattggacttatgctatgtaattggactttaagtattt

SEQ ID NO: 5676 - DNA, 574 bp, Gossypium hirsutum
  Clone ID: GOSHI-09MAY01-C11361_1
cccctgcagtaccggcccatattcccggtcgccccagcgtgcgcaaaaaaaaggaaagaacctagggcgctctctcaattctccgccgaccaacagcctttcaaaggtctgttcctctgcccatccttttgactcatgtgagagtcaatcaaggcctccttgagtcgaagggctcatgagcttcgtttgtagccccgaatcgccacttagcttcaatcatggtgaaacaagcgtggattcaagggcctcaaatgcaggtacaggtgtgcgctggcgtacggggcgtgctggctgctgagacgctggtatcgtacggagggcgggcgtggcacgacgtggttgctgttcgtgaaggctgcggtgcgaggaccccttttgccctagggtttgccgaagcttagcttgggtttcgggctgtttgggtctgttccagttattgggcccttatattcgggctatggggctactggtttttttttgtaattggactaacgtattagtgataggagtcatgcacttggacctatgctatgtaattggactttgagcatttaacggactgttatgattgtgc

SEQ ID NO: 5677 - DNA, 617 bp, Gossypium hirsutum
  Clone ID: GOSHI-09MAY01-C11291_1
cggacgcgtgggttttaaaacaatttatattaaaaactcttccaaaactctctcaacccccaaaccaaacgcagctccagcgaaccccggccaccggggacggcgccgctatctatggtggctggaaaatgccgaaatgtccctttttttcctttcttttaaaacccaaacttaaatctaatggtgaaaaccttaaaaaatagggagaaaaggctcaacctacgtccctttgacttcttgtgcgcctacttcaaagcatgaacgaaaacccgaaggggtttttgagactttcacgacggaggaaatcttcagtgacggtgatgcacgaacgaagcgggtcagtttgaccctttttattcttcttactttgtgctttttttattaaaagatttgtccgaaagaataagataccagaactccacaccaggaaaaaatcaatacccttctaaacttttgttctgttatcttttgattctcaaatgtgcgttaaaaaaaaacaatgaaattggtgtggcttttaaagccggaatgccagttgttctttattgctttttaatttttcttcctggtcctcttctgtctgttctttgttgttgcttgttgcccttgtttttttc

SEQ ID NO: 5678 - DNA, 319 bp, Gossypium hirsutum
  Clone ID: GOSHI-09MAY01-C111289_1
ttttgatttatataccaaggaggctccttcaagaagcgggtacctacattcttgcattttggtcctagaagtcggataaagtttacaatttcctcccttttttttgccaaaaagggctacaaattctaattagcatagtttttctttggtcatattgagtatgctttgcccacgaattcgccttagcttcaaaattttttatatgggttatattattctggtaatagaatgtttattaaattttaaaacaaaaaaacacaaaaaaaccaacacacaaaaaaacaaaaaaaacacaaccacccccaaaaaaaaaaacaaa

SEQ ID NO: 5679 - DNA, 646 bp, Gossypium hirsutum
  Clone ID: GOSHI-09MAY01-C11241_1
ctctacttcacaaaattagggttcatattcacgccaaatcgatcagatatggggggaggcagtgcccaaaagtccaagacggcgcggtgaaagaaacctcgagaaggctaaagccggcgctaaaggaagctcagctcgaatctaacaagaaagctatgtcgattcagtgcaaggtatgcatgcaggaatttatgtgcacaacatccgaggtgaagtgccgggaacatgcagaagcaaagcatccaaaatccgatgtgtctgcatgtttccctcatctaaagaagtgatgtagttggagcaagaaaattctactgttagatatagacatttgtttggatattagttaatgtaaagcctcaaccgtgatttatagatactatgggactatttgtgcctgccccaagagtgaggaaccaattgatcctcaaacccttacaaatggacaaattgagatcggttcattcctgcttcaatggtaaagtgaacattgttgttattttagcattgtctcttggaaaaagctgctgtgaattggtttcttttagcgttgtccgtttgtatgtcatttgctggttccattctcttgaacattaaccgtcttaagtagtaattaatttgtaatgtggggactccaataacctttggt

SEQ ID NO: 5680 - DNA, 504 bp, Gossypium hirsutum
  Clone ID: GOSHI-09MAY01-C11211_1
acttgacatgctggtggaaagtaacttggatctggaggacctatccaaggattcgatggccatgctttctgagattcagctgctaacccgagcagtgaaaagaacgtgtaggaagatggctgacttgctcatacattattctatcagtagtaacgatggatactcgaataagtatatctttccaccgaatcttgagggtgctggtggaatcacacctttacatttggctgcatgtacatctggttccgatgatatggtagatgtgctgacgaatgatcctcacgagattgggttaacctgctggagttcccttctggatgcaaatgggcagtctccatatgcctatgctatgatgagaaacaaccattcttacaacaaattggtggctggtaaatatgctgacagaaggaatggtcaattttctttgactattggtgttgaggatcagcactcatgagtgtctgcagtgcagttaaacaagataagtttgcagttcaaacaaga

SEQ ID NO: 5681 - DNA, 303 bp, Gossypium hirsutum
  Clone ID: GOSHI-09MAY01-C12951_1
agaacggcgggtcgcacgccgtccaaccccacccaaatccaaccgtaaaatctccttcgtggaacccactcaatgatccggcggctaattatccttccgtgggttataactgcaatccccctcccagtccttgtcccgtcgattccctttaatcgttccaccgttacctcccgtcaaacaatttcaagtcgtccgacttctttgagggaggattcggattttcctgttgacgcgttctcgtgtgaccatttccctatgtatgagttcaaagtgaggaggtgtgctcctggcatgtcacattac

SEQ ID NO: 5682 - DNA, 924 bp, Gossypium hirsutum
  Clone ID: GOSHI-09MAY01-C12961_1
gttatccatatttttcaagcctggggaacgattctctgagatcgttggaagtccatattatgtggctcctgaggtgctcaaacggaattatgggccagaaattgatatatggagtgctggagtcattctctatattttgttgtgcggggttcctcctttttgggctgagtctgaacaaggcgttgcacaggcaattcttcgtgggttaatagatttcaaacgggacccatggccaaatatttcagagagtgctaagagtctagtccgacaaatgttggaaccagacccaaagctccggcttactgcaaagcaagtgcttgagcatccttggctccaaaacgctaaaaaagcccccaatgtgcctcttggtgatgttgttaagtcaaggcttaaacaattttcaatgatgaacagattcaaaagaaaagccctacgggttattgctgagttcttatctgttgaagaagttgaagatatcaaagttatgttcaataaaatggacactgacaatgatggcattgtttcggtcgaagagctgaaagccggatttaaaaattatggttcacagcttgcagagcctgaagtgcagatgctcattgaagctgttgatgctaatgggaagggaacattggactatggggaatttcttgctgtttctctccatctgcaaagaatggccaatgatgagcatcttcggaaggccttttcttactttgataaagatggcaatggttttattgagcccgatgagcttcgggatgcattgatggaggatggagcagatgattgtacaaatgttgcaaatgacatcttccaagaagtggacactgacaaggatgggcgcatcagctatgatgaatttgcagccatgatgaaaactggtacggattggagaaaggcatctcgacattactcgagagggag

SEQ ID NO: 5683 - DNA, 1029 bp, Gossypium hirsutum
  Clone ID: GOSHI-09MAY01-C12931_1
caaccctttattctgattattttatgatcactataaaaaccccgttctagggctccgtctcttcctttctgtgattcaaatccccaatttgaagccacctgcctgcccctttctcaattcgccggaatgaagctcatcatcaaaaccctaaaaggcagtcactttgaaattagggttcagcccaatgataccgttatggctgtgaagaaaaacatagaggatatacaagggaaagacaattatccatgtgggcaacagctgttgattcataatgggaaggttttgaaagatgaaactactttagctgaaaataaagtatctgaggatggttttctggttgtcatgcttagcaagagcaagtctttgggttcaactggagcctcttctgctcagcctgcttcatcaactccatctaccactgttcctgcttctgcgccttcttcaaattctacacctgccacaggagctcctgcacaagcatctcaacaaaccgatacctatagtcaagctgcttcgaatttagttgctggtaataatcttgagcagactatccaacaattgatggatatgggtggaggcaattgggacaaagaaactgtaactcgtgcacttcgagctgcttataacaacccagagcgagcagtggattatctatattctggaattcctgaattggcagaagtggctgttccagtgcctcattttccttcaagtcaaaccactgaatccggtgctgccccagttgctcctgtttcaggggctcctaattcatcacctttgaacatgtttcctcaggaaacactctccggtgccgatgctggaggacttggatccctggatttcctccgaaacaatcaacagttccaagcattgcgttcaatggtgcaatctaacccacaaattttacagcccatgctttaggagctgggaaagcaaaacccccagcttttaagactaattcaagaacatcatgccgagtttcttcagctaataaatgaacctttccaggttcttaaggggatttatttg

SEQ ID NO: 5684 - DNA, 1638 bp, Gossypium hirsutum
  Clone ID: GOSHI-09MAY01-C12871_1
agagagatacccaccctttttcttttgttgttgttgttgtcatggcttctctgcctttcatcttcttcttatctttctttataatctccacaacattgacgtcagccggcgccgccgccgccaccatcaaactctccctctctcccttccctcacccttcttcctcccatccttaccaaattctcaacaacttagtcacttcttctgttgcaagagcccaccacctcaaacatcccaaagccaaggccgataatactacctcttctcttctcagggctcccctatttcctcacagttatgggggctacactatctccctcaaatttggaactccgcctcaaacccttcctttcgtcatggacaccgggagcagcctctcctggttcccttgcacctctcgttacctttgttcccaatgcgcattccccaatgttgaccctgcaaaaatccccacttttgcccctaaactttcatcttccagtaagctcgtaggttgtagaaaccccaagtgtagttggctttttggccccgacgttgagtctcgttgccaagactgtgaacccacttccgaaaactgcactcaaacctgccctccttacataattcaatacggtttaggttccactgctgggcttctattagtagaaaaccttgttttcccccagaaaaccttccaagatttccttgtcggatgctccatcctctccaaccgacagcccgctggaatagccgggttcggtcggagcgctgagtctataccctcccaattaggcctcaagaaattctcttactgtctcgtttctcgccggttcgatgacactggcgtcagcagcaacatgttgttggaaaccgggtcgggttccggtgatgccaagaccccaggccttagctacacaccgttttacaggaaccaagtggcttcaaacccagttttcaaagagttctactacgtaactctacgtaaaattctggtgggcgataagcacgtcaaagttccgtacagttatttggtcccaggatcagacggtaacggtggcaccatagtggactcgggatcaacattcacttttatggagagaccagtgttcgaggtagtctcgaaagagttcgagaaacaaatgggaaattatagaagagcgcgtgaaatagaaaacagatcgggtttagccccatgcttcaacacttcgggctatacttcaatagaaatccccgaattgagtttccagttcaaaggaggagccaaaatggcattgcctttggttaactatttctcatttgacggtgatgataaggttgtgtgtttgatgatcgtttcagacaatgtggtcggccaaggctcacacagcggtcctgcaataatactagggagctttcagcagcagaattattacatcgaatttgatatcgcaaacaataggtttggatgggctgaacgaagctgtgcgtgagctgcactttgttattttgtgttttggccatgaatatgaaagtcatctttttcttttgcttctatttttaatggaatggtgacaaaagggttattagcttcttttttctgtcatttttaatcaaaaagtttgattatattgaaaattttaatgcatcaatatacttttctccccctcttcctcccccccc

SEQ ID NO: 5685 - DNA, 613 bp, Gossypium hirsutum
  unsure (1)..(613): unsure at all n locations
  Clone ID: AI729845.1
cggccgcgtcnacgtcnacncggcagcaaaactnncatctcccactaanctcntaagttgtaaaaaccccaagtgtaattggctttttggccccgacgttgagtctcgttgccaaaactgtgaacccacttccgaaaactgcactcaaacctgccctccttacataattcaatacggtttaggttccactgctgggcttctattagtagaaaaccttgctttcccccagaaaaccgtccaagatttccttgtcggatgcgccatcctctccaaccgacagcccgctggaatatccgggttcggtccgaacgctcagtctgatgcctccccattacgcctcaagaaattctcttactgtctcgtttctcgcccgttcgaagactctggcgtccggaccaacatgtcgttggaaacccggtcgggtgccggttatgccatgatcccccgccttagatacactcccgtctactcgaaactagtggcggccaaccccatgctcccagacttctagtacctagctccacgttgaatcccggtggggcaagaacccttcaggttaccgtgcagttactctggtcccatgatcagacgagtagcgtggccccattcctcc

SEQ ID NO: 5686 - DNA, 455 bp, Gossypium hirsutum
  Clone ID: LIB3197-031-Q1-M1-E2
ccggccgatgccggtcacccaccgtcgattgttttcttcttcatcttcttctatcttgcttataatctacacagcagtgacgtcagccggcgccgccgccgccaccatcaaactctccctctctcccttccctcacccttcttcctcccatccttaccaaattctcaacaacttagtcacttcttctgttgcaagagcccaccacctcaaacaccccaaagccaaggccgataatactacctcttctcttctcagggcttccctatttcctcacagatatgggggctacactatctccctcaaatttggaactccgcctcaaacccttcctttcattatggacactgggagcagcctctcctggttcccttgcacctctcgttacctttgttcccaatgcgctttccccaatgttgaccctgcaaaaatccccacttttgcccctaaacgttcat

SEQ ID NO: 5687 - DNA, 258 bp, Gossypium hirsutum
  Clone ID: uC-gsflmaxxa091f08b1
cccacgcgggcgggcttacacggcggtcctgcaataatactagggagctttcagcagcagaattattacatcgaatttgatatggcaaacaataggtttggatgggctgaacgaaggtgttagtgagctgcactttgttattttgtgttttggccttgaatatggaagtcatctttttcttttgcttctatttttaatggaatggtgacaaaagggttattagcttaaaaaaaaaaaaaaaaaaaaaaaaaacaaaaa

SEQ ID NO: 5688 - DNA, 1649 bp, Gossypium hirsutum
  Clone ID: GOSHI-09MAY01-C12861_1
tccacctataagaaaggcgtaaatctcccggccgcgtccccggccgcctcttccgtcttcaaacacttcgaatcgttttccaattactctgacaagatgcaaatctttgttaaaaccctcactggcaagaccatcaccctcgaggtggagagttcagacaccattgataatgtgaaggctaagatccaagataaggaagggatcccaccggatcagcagaggcttatatttgctggcaaacaacttgaggatggccgcacgctagccgactacaacattcagaaagaatccacccttcacttggttcttcgacttcgtggcggcatgcaaatctttgtcaagactctcactggaaagacaattaccttggaggttgaaagctctgacacaattgataatgtaaaggcaaagatccaagacaaggaagggatcccaccagatcagcagaggcttatctttgctggaaagcagcttgaagatggtcgcaccttagctgattacaatatccaaaaagagtccaccctccacctggtacttcgtcttcgaggtggcatgcaaatctttgtcaaaactctcactggaaagacaattaccttggaggtcgagagttcggataccattgacaatgtgaaagccaagattcaggacaaagaaggaatcccaccagaccaacaaagattgatttttgctggaaaacaacttgaagatggaaggactcttgccgattataatatccagaaggagtctactctccatttggttctccgccttcggggtggtatgcagatctttgtaaagactcttaccggaaagaccatcactttggaggttgaaagttccgataccattgacaatgtgaaggcaaagatccaagacaaggagggtatccccccagaccagcaaaggctcatctttgctggcaagcagctcgaagatggtaggacattggccgactacaatatccaaaaggagtctacccttcatttggtgttgcggctgcgtggtgggatgcagatctttgttaagactcttactggaaagactatcactctagaggttgaaagttcagacaccattgacaatcttaaggcaaagattcaagacaaggaagggatcccaccagaccagcaaaggctcatatttgctggcaagcaacttgaagatggcaggacattggctgattataatatccaaaaggagtctactctgcatcttgtccttcgccttcgcggtggtttctaggtaaggattgtttgccgttgttggtggccttttttggttttaaataatgtgtctggaagcttatctgggattattattagctatgtggttttcgaactttcatgggttactgctattagatctttgttttaatattttaagtttgtctttggacgctattatgaatcgtcaacttcgatgttcaaatgccttcaacttctgtttggtacgttgaacctctgatatttggatgtcatttttggaattctttcatcttaatcctccaaagcatgtaaagatctacttatatatataaaaatatattgcattaaaaaaaaaaaaaaaaaaaaaaaaaaaaaaaaaaaaaaaaaaaaaaaaaaaaaaaaaaaaaaaaaaaaaaaaaaataaaaaaattgggtcctcgttat

SEQ ID NO: 5689 - DNA, 722 bp, Gossypium hirsutum
  unsure (1)..(722): unsure at all n locations
  Clone ID: LIB3826-001-Q1-K6-E8
ccgggttcgtacccacgtccgttccgcaaggaatgcaaatnnctttgttaaaaacccctcactggggcaagnaaccatcacnncctcgnagggtggnagaaggttcagnacccaccattgatnnaatgtgaaggggctaagaatccaagnnataagggaaggggatnncccaccggnnatcagcagnnaggctttanntctttgnnctggcaannacaacttgnaggnnatggccnnngcacgcttagnnccgacttanccaacatnntcagnaaagaaatnnccaccctttcactttnnggttcttcgnactttnncgtggnncggcatgccccaaatctnnttgtcaagaactncnntcactggnnaaagnaacaattnnaccttggnaggggttgaannagctctgacnnacaatagnnataatgtaaannggcaaagaatcctaagacaagngaagnnggatcccnnaccagannncagcagaggcttttatctnnttgctgnngaaagcagnncttgaagaatnnggtcgcnnaccttagnnctgattacaatanntccaaaaagaaagtccacccttccacnnctagtannnttcgtcttcgaggggtggcatgggcaaatcnnnttgtcaaaacttctcnaactggaaagaacaattacnncttggaggggtggagagttcnnggataccatnntgataatgtnnngaaagccaa

SEQ ID NO: 5690 - DNA, 761 bp, Gossypium hirsutum
  unsure (1)..(761): unsure at all n locations
  Clone ID: LIB3828-005-Q1-K6-C11
aaagatccacccttcacttggttcttcgacttcgtggcggcatgcaaatctttgtcaagactctcactggnnnnnnnnnnnnnnnnnnnnnnnnnnnnnnnnnnnnnnnnnnnnnnnnnnnnnnnnnnnnnnnnnnnnnnnnnnnnnnnnnnnnnnnnnnnnnnnnnnnnnnnnnnnnnnnnnnnnnnnnnnnnnnnnnnnnnnnnnnnnnnnnnnnnnnnnnnnnnnnnnnnnnnnnnnnnnnnnnnnnnnnngnnnnnnnnnngngnnnnnnnnnnnnnnnnnngaaatacaattaccttgngagttgaaagctctgacacaatagataatgtaaaggcaaagatccaagacaaggaagggatcccaccagatcagcagaggcttatctttgctggaaagcagcttgaagatggtcgcaccttagctgattacaatatccaaaaagagtccaccctccacctagtacttcgtcttcgaggtggcatgcaaatctttgtcaaaactctcactggnaaagacaattaccttggaggtggagagttcggataccattgataatgtgaaagccaagattcaggacaaagaaggaatcccaccagaccaacaaagattgatttttgctggaaaacaacttgaagatggaaggactcttgccgattataatatccagaaggagtctactctccatttggttctccgccttcgtggtggtatgcagatctttgtaaagactcttaccggnaaanaccatcactttg

SEQ ID NO: 5691 - DNA, 459 bp, Gossypium hirsutum
  unsure (1)..(459): unsure at all n locations
  Clone ID: uC-gsronu33B114a12b1
tctcgttttgaactgacggacctggatttgtgcgctgatagtgtttcaaatgaaatttcgggttaacacgcgaaaacaacgggataaaaatttgacagtatgccctaaaatcatgaaataaaacctgccaccatagaaatgataattatttgatctactgaaatatgacatggaaaatacatgtctgtgaaacttgcctgataattatgcatattcaagattatgaactactactcaaataaatataccttggacctatagaaaaatcatggtcacgatctntccggcataaatgaattggaatgaattatatctaagaagaaaccaaaaagaaaatgatttggttccctgacatggaaatatgaaactatatttgatacgttgatacaaggaaaattatgtggattaagaccagggataaatttaagagagacatggcgagaaaaaaaattggcaata

SEQ ID NO: 5692 - DNA, 458 bp, Gossypium hirsutum
  Clone ID: uC-gsronu33B114a06b1
tcgtttatgaattgacggacctggatttgtagcactgaagtgttcccatgaaaatccatcgaaatctcgcgaaattcaacgggataaaaatagaaaatgataagtacttaaaatcatgaaattaaacttgaaatacatagaaatgataattatttgatatactgaaatatgacatggaaaatacatgtatgtgaaacttgcctgataattatgcatattcaagattatgaactactactcaaataaatataccttgaacttatagaaaattatggtacatgaaatattgtcataatgaattgaatgattcatatttaagacgaaacaaaaagaaaatgatatgtaccatgacatgtaaatatgaaactatatttgatacgttgatacaaggaaaattatgtgtattaagacgagtaataaatttaagagagacatggcgagaaaaataatttgtcaat

SEQ ID NO: 5693 - DNA, 775 bp, Gossypium hirsutum
  Clone ID: GOSHI-09MAY01-C12591_1
gtgttgccaaaaaagcgaaaccgagagagacggagagatgttgaagttttcttagtggggggcgacgggccggtatcaagccttggttcaatgtagattcgcggggtcatttggtccactctcttctcgccggcgtagcccacgcgccgtcgtctcctgctctcgctccaacctgacgcctattcaagctgttctgtcgtgtcagcaacaggtcggggcagatccggtggaatctgagttggggagtttggctgaccggctccggttaggtgggttgactgcagatgggttgtcttataaagagacgtttattattaggtgttatgaggtggggattaacaaaactgccactattgaaaccattgctaatctcttgcaggaggttggaggtaaccatgctcaaaatgttggattttcaagagatgggtttgctaccagtcccactatgcgaaaattgcatctcatatgggtgaccgcacgcatgcatattgaagtatacaagtaccctgcttggagtgacgtgatcgaaatagaaacgtggtgccaaaacgagggaagaatcggaaccagaagggattggatcctaaaggatgtcgctactggtgaagttataggaagagctacaagcaagtgggtgatgatgaacgaggacacgagacggttgcagaaagttagcgatgatgtcaaagaagaatatctggccttctgtccacgagaacctcaattaccgtttccggaggagaacattagaagttggaaaaaaatttttaaataa

SEQ ID NO: 5694 - DNA, 388 bp, Gossypium hirsutum
  Clone ID: LIB3145-038-Q1-K1-F12
ccgagagagacggatagatgttttatttttcttattgcaatgcgacggaccgtagggcaagccttgggtgaggggagattcgcggggtcatttggtccactctcttctcgccggcgtagcccacgcgccgtcgtctcctgctctcgctccaacctgacgcctattcaagctgttctgtcgtgtcagcaacaggtcgggtcagatccggtggaatctgaattggagagtttacgctgaccaactcctgttttgacgcttgactcttaatggggggtgggatttactttacgcttttagttggcacgggggctcgggattaacaaaactgccactattgaaaccattgctaatctcttgcaggaggttggaggtaaccatgctcaaaatg

SEQ ID NO: 5695 - DNA, 420 bp, Gossypium hirsutum
  Clone ID: GOSHI-09MAY01-C12581_1
atttattggagtttgaatcccctctcgttaatcaaattagggtttcttgaagccaaatcgaccagacatgggaggaggcaatgcccaaaaatccaagatggctcgtgaaaagaatctcgagaaggctaaaaacgcagctaaaggcagccagctggaaacaaacaagaaagctatgacgattcagtgcaaggtatgtatgcaaacgtttatatgcacaacatcagaggtaaagtgcagggaacacgcagaagcaaagcatccgaaatccgatgtgtatgcttgcttccctcatctcaagaagtgatgtatttgaagcaagaaaatgccatatatatattatagaattgtttggaatatcttttcccttatcatgtaaaacctcagctatgatttttaaacccaggttgatgtgtgtggaac

SEQ ID NO: 5696 - DNA, 553 bp, Gossypium hirsutum
  Clone ID: GOSHI-09MAY01-C12551_1
atcgctgtcgagggtcatcagctatgggctgttggctggcaaaaagcagtctcacagattggacccaattttgtctggtgggtggtagctcagagtgtcttctatcacttatataatcaagtttcatacatgtctctggatcaaatttctcccctgacatttagcattgggaacacaatgaagaggatttcagttatagtgtcgtccatcatcatcttccacacacctgttcagcccattaatgctcttggagctgccattgccatccttggaaccttcctttattcacaggccaaagcagtgagaaaggtcaaagaatttcaagattttttgttggactgaccaacaataaaaaagggggctttatgaaatatttggaaggaattcactgaagatgatgctaatgggcttagttttgatgcattccacatgaagtcctggagatggaagcaacaagttaatatgatagtctttgcaaccttcaatgctactaattaactagtagatttttattttacattttgtaagttgaaacaaagggggggggggtgca

SEQ ID NO: 5697 - DNA, 633 bp, Gossypium hirsutum
  Clone ID: GOSHI-09MAY01-C12561_1
taaaggctggcaggactacaatactcttgagcatcatcatgaacagaaattgcgtgagcggctacttgtgaatgggaaccagcagtttagcttactgcctgggcagtatccaggacaatcagcctggacaggtccttattttgtgtgaaatcaatatgcaagtgtagctggtgagaaggaacttcactcattttccacctcttggttttgtaatttgattgtaatgctttctaaactccttttcacataacctgttcattctagatttgtttttgttctcaaggttcttgagaatggttactgtgaatgtattgcttccatttgcctgccaagttcaagtccaactttgaggcactgtcagtgttgagtttttgatggagcatgggaagcattggcttccagcaggcacttgctgctagacaaatttagccagatttgtagaggaagattgaggaaatcaatcaatcttatgagatgcggaatttgcaagggagtaaatgccttaaccagtcactttgggatggagatagaaggcctaaataaagatgatctgttgatttttgaggctatctatcttgaggagttttggtgaaataaacttggtttagtatgctatataactttccaaatgtc

SEQ ID NO: 5698 - DNA, 724 bp, Gossypium hirsutum
  Clone ID: GOSHI-09MAY01-C12511_1
gcaaaaccttcaacgaagcttctctcacgacccaaaggcggggattttactctttctcctcccctaataaacttgcaagttgcaaagggtctcatccactgcgttctttttcgacctcctcatcgtcgtcaaaggttgggtttttgggatggtatttagcgaagctcgaatccaatcctattattacaaaatctgtcacaacttcccttatctttgccgctgctgattttacttcacaggtaagtctatatattttcgttttccctcaatccaattctcaattatgcaaacaagggtctgggatgttctcaatttgatcggttttggtaaaaataggagccttttgttttgagaaagtgatgttaaattactcgaaagtatgtctcttggcctagttctattgaattctaggtgtttctttgatgtttgcatttacaatcgttacacattaagggaaagaattgctttgcaacaacccaattcttatcttttgttgaattatccttttaacttttaagttaacttccaaatggtgtttacatcttcatttctgtgatgctattgtttgatccgttgatttaccataataatgtttccttctcatatgtataacatctttggttatatgatcacatcagcttctagttatgactcgattcggacattacggatggctggaatatgattgcttctcttggggccatcacacatctttggtttaacc

SEQ ID NO: 5699 - DNA, 366 bp, Gossypium hirsutum
  Clone ID: LIB3166-053-P1-K1-D4
ctgcctccttcgactctcttccgatacccattcgctcttccatggcaaaacctggaacgaagcttctctcacgacccaaaggcggggattttactctttctcctcccctaataaacttgcaagttgcaaagggtctcatccactgcgttctttttcgacctcctcatcgtcgtcaaaggttgggtttttgggatggtatttagcgaagctcgaatccaatcctattattacaaaatctgtcacaacttcccttatctttgccgctgctgattttacttcacagatgatcacatcagcttctagttatgactcgattcggacattacggatggcttgatatggattgcttctcttggggccatcaca

SEQ ID NO: 5700 - DNA, 516 bp, Gossypium hirsutum
  Clone ID: GOSHI-09MAY01-C12501_1
gccatttccaagttcttctattgctgccctgataatgcttttcaggttgcgggggcggggacctcatattcacttttgcaaagattaggtgccgtaatgcgcaacggggccaagctttttgcagtaggcacaacttcttcactggttgggacagcggtcacaaatgctttgattaatgcaagaaaggctgttgataagtcttccggagcagaagttgaaaatgttcccatactatccaccagtgttgcctatggtgtatacatggcagtttctagcaacctcaggtgtgtaaaatttagacattaagttctgtaatttattaaagttatataatctttccaattaagccttagttctgttggccctgttgatattgtaacaaccaagagaaagtgggttcaaatgtgcttaatgggattttcccttcaatttaaaattcagaagttataggtaacaaaaaaaaaaaaaaaaaaaaaaaaaaaaaaaaaaaaaaaaaaaaaaaaaaaaaaaaaaaaa

SEQ ID NO: 5701 - DNA, 657 bp, Gossypium hirsutum
  Clone ID: GOSHI-09MAY01-C12531_2
tcctctcgtccgcccacgcgtccgcccacgcgtccgatcaaatgccaaattcgttgctttccatttatcgaggaaaactcagttcagtcgtggattcagtttttctgtttttaacatagttagttgaagcaagcaatcatggcaaggaagatgttggttgatggagacttaaaccaaacgaataacgagggagctgaatatgattttgacttgtttgtcatcggtgctggaagcggtggtgttcgcgctgccaggttctccgctaactatggagcaaaggttgggatttgtgagctcccatttcatccaatcagctcagaagtcattggaggggttggtggaacgtgtgttattcgtggctgtgttcccaaaaagattttggtcgatggagccgcgtttggaggtgaacttgaggatgctcggaattatggttgggagttgaatgagaaacttgattttaattggaagaagcttctacataaaaagactgatgaaataatcagattaaatggaatttacaagcggttattatcaaatgctgcctttaaattgtttgaaggctagtgaaagattgttggttcaaatgaatttgatgtcacataacttttattgttccaaattgttcctttttatcaaaacatttttactttatttctt

SEQ ID NO: 5702 - DNA, 667 bp, Gossypium hirsutum
  Clone ID: GOSHI-09MAY01-C12531_1
ccctaattcctgtttcccttcttccacaaatccctaaccccttgcccgactgccctcctaccttttttctcaacctccacctccggtcctcttcctccaatctccatcaccactccttagtgtttccatttcgaagtgaatcatggcgaggaagatgttagttgatgaggaaatgaaccaaacgaatcaagaggaggctcattatgatttcgacttgtttgttatcggtgccgggagcggtggcgttcgtgctgccagattctccgctaactacggagctaaggttgggatttgtgagctcccatttcatccaatcagttcagaagtcattggaggaggttggtgggacgtgtgttattcgtggctgtgttcccaaaaagattttggtctatggagcggcatttggaagtgaacttgaggatgctcggaattatggttgggagttgaatgagaaacttgattttaattggaagaagcttctacataaaaagactgatgaaataatcagattaaatggaatttaacagccgtttataatcaatgcctgttttaaattggtttgaagggaagggaaaaattgtccgtccaaatgaatttgaggttgaccacctggatggcaccatttgtcctattcacaagaccatttacttattgcaactggcagcct

SEQ ID NO: 5703 - DNA, 430 bp, Gossypium hirsutum
  Clone ID: GOSHI-09MAY01-C12441_1
ctttttacttgctttctttccgtttcgaagatggatattaagaaacgattactccttccatttgtatgctattttctttcagtttcccagtttttccacgtctgccatggtgatgttgggactgctgcccagtacagccctccatatttacctacggcgtgctttggggaagatcaaacccagttcccatcaagcaatctgttcgcagcagcaggagatgggatatgggacaatggagcatcatgcggaaggcaatacctggtgagatgcataagtgcttcccagccagggacttgtgtccccgaccaaactatccaggtcaagatcgttgattatgctcctaccgctctctccccaccttccgctcaatccaccaccattgtcctttccgaaactgcttttggcggaattaccaatatacccatggact

SEQ ID NO: 5704 - DNA, 1018 bp, Gossypium hirsutum
  Clone ID: GOSHI-09MAY01-C12461_1
ttttgttccctcaatgcctgctttgactcgatgttcatcacggtcaaaagtttcgggtgtatttaagaaaaaggagaagtttcaaaaggcacagagcaggaaatctcaggttgggaccacaaatggtaatggctcgttcgggattccccagctatactgtcgcattaatactcttcagcatattcgaacggagttggatgtcttggcaaaacggacaattgtgcatcttagaagttctgaatctcataacaacaatattgccaatgggacggggaaagcattcgaactttcagctgctgcttgtttggaagggatacaacaactgtgtgaggcaactgcatataaggtcatcttccaggatctaagtcatgtcctctgggatgggctgtatgttggggaagtttcatcatctagaattgaaccttttcttcaggagctcgagctctatttggagggactttcattaactgtgcatgacagagtcagggcgccagttgccacggttgtggtgaaagcttctttcgatggtttccttctggttttacttgctggaggtcctgctcctgctttctcccctgcaagattatgaaacaattacccgaagattttaagttgcttgacggattttattttggtccaatggtgatggacttccggctgatttgatccaaaagttttcaacaacagttaaagccatcctccctttatttcatactgaaactgacagcctgattgagcaattcaaatacatgactgcagagagttacggttcttctgctaaatccaagcttccattgccaccaacatcccgtcagtggagtcccacggaaccaaacacactcttgcgagttttgtgttaccggagtgatgagacagcggctaagttccttaagaagacatacaacttgcccaagaaactctaacaatttcattttttctggtgaaaacagtcaaatgatgcaattcttaggtattataaaagggttgaggtgattcttgttgcatccccataatgtca

SEQ ID NO: 5705 - DNA, 588 bp, Gossypium hirsutum
  Clone ID: GOSHI-09MAY01-C12411_3
cactcaatctggtggtgtaaggccttttggtgtatctctactagttgctggatatgacgacaatggtccacatttgtatcaggtggatccatctggctcttgttgctcatggaaagcctcagcgatggggaagaatgtctctaatgcaaaaacatctcttgaaaagagatacactgatgatatggaacttgatgatgctgtgcatactgctattttgactctcaaagagggatttgaaggacacatctcacggaaaaacattggaatcgggattatcggtactgacagaaaattcagggtgcttaccccagctgacattgatgattatttggctgacgtggagtaactggtcttcttattccagacttatctacaagtggttattttttatgcaacatttgttttggggctttccaattcggtcaaatgttgttagttcatcactggaattgaacacaaaacttcaccaatgtctgcatgatgctagaactgtaatcgaatgagttataaaatttgggtttacttcaattggtctatacaatcactttcgagaataatttaactttgaatttatgcgaacttttttct

SEQ ID NO: 5706 - DNA, 600 bp, Gossypium hirsutum
  Clone ID: GOSHI-09MAY01-C12411_2
cccgcgtccgcccccacccccgccccgcgtgcggcccgcgtcccatcctctcccgacgtttcccaattttttcccttccagatttctacttcttcttctggtacgtccttcaggaaagctagttcagatcgagcacgccttgacagcagtaggatcgggtcaaacatctcttggaatcaaagctgcttatggggtagtaattgctactgagaagaaattgccttcaatcttggttgatgaaacctctgttcagaaaatacagtgtctggcaccaaatattggagttgtttacaggtttcttttcattctgcaattatctggaaagctcggttattctgttcttttagttggcgatatattggatctgattaacatgcatattgcattaaactgcttgaaaatcaaatctgcaactatctctgtgtttcgccaatgtcttgagcaagtaccagttcatgtgcatctatgacattgttgacttaccaaacagggagttcaaaaaggagcaccctaagttactaacttcacgtttcataagctggtctatcgtagaatactcattttctaaatatcgactatccagtacatgaacattttttg

SEQ ID NO: 5707 - DNA, 1036 bp, Gossypium hirsutum
  Clone ID: GOSHI-09MAY01-C12411_1
aaaaagaaagtttttcgatctattgaatcgcggagcgtcggaatacacggcaactgtcctttgtcccgcgcgtcggcacaaacacccccaaagtatatcacttttctttctttacaatcttcatttgttcagatttttgaagttctcataccatgggtgacagtcagtattcattttctctcacaactttcagtccttcgggaaagctagttcagatcgagcacgccttgacggctgtcggttcgggtcaaacatctcttggaatcaaagctgctaatggggttgtaattgctaccgagaagaagttgccttcaatcttggttgatgaaacatctgttcagaaaatacagtgtctgactccaaatattggagttgtttacagtggcatgggtcctgattttcgagttttggttcggaaaagtaggaagcaagcagaacaataccataggttgtataaggaaccaattccagtaacacagcttgtaagggaaactgcagctgtgatgcaggagttcactcagtctggtggtgtaaggccttttggtgtatctctactggttgctggatatgacgacaatggtccacaattgtatcaggtggatccatctggttcctatttctcatggaaagcctcagcaatggggaaaaatgtctcaaatgcaaaaacatttcttgagaaaagatacactgatgatatggagcttgatgatgctgtgcatactgctattttgactctcaaacagggatttgaaggacaaatctcagggaaaaacattgaaattgggattattggaactgacaagaaattcagggtactaaccccggctgaaattgatgattatttggctgaagtcgagtagctttcttctttctcgagactatcaagaagtgttcctttttatgcaacatttgttttgagaccgtacatttcagtcaaaaatgatttactttacgtttctggtatactcatgtttttagctttgttgcacctcaattttaagggcatgctcacatgctcctgttggttatagggaat

SEQ ID NO: 5708 - DNA, 399 bp, Gossypium hirsutum
  Clone ID: LIB3272-021-P1-K1-A10
gtttttgtattttatcaattccgtttctccttaaatcaaaaccatgggagacagtcaatattcattttctctcacaactttcagtccttcaggaaagctagttcagatcgagcacgccttgacggcagtaggatcgggtcaaacatctcttggaatcaaagctgctaatggggtagtaattgctactgagaagaaattgccttcaatcttggttgatgaaacctctgttcagaaaatacagtgtctgacaccaaatattggagttgtttacagtggtatgggccctgattttcgagttttggttcggaaaagtagaaagcaggcagaacagtatcattagattgataaggaaccaattccagtaacacagcttgtaagggaaactgcagctgtgatgca

SEQ ID NO: 5709 - DNA, 360 bp, Gossypium hirsutum
  unsure (1)..(360): unsure at all n locations
  Clone ID: LIB3493-018-P1-M1-D8
gagaaaagatacactgatgacatggagcttgatgatgctgtgcatactgctattttgactctcaaagagggacttgaaggacaaatctcagggaaaaacattgaaattgggattattggaactgacaaaaaattcaggctgtaaagctactgctaaggttggatgctgagaatccggattcacatcgctgcttgaaagtcgaagttttggaagttcaggtcaggtagaaggtattgttgctctcacagctcgtcgaagtgggctgcatcctggtactcggtatttggctaggggcattaattcctgttttagcacaggtggtggcagncgatgcaaatcttgtcttaaccactaagggca

SEQ ID NO: 5710 - DNA, 678 bp, Gossypium hirsutum
  Clone ID: GOSHI-09MAY01-C12431_1
gaattccgggtcggggacgcgtccgcgacagttccaccaacctctccctcttgtctaggttcattgtctcttcccaaagagatatgaaggcgtcattgaaaggcacatacaccaatgacaagagcaccgccgtcgtttccctttccgccaacgctggcgatatcaagctacgcgcttccctgactgatgcgacattcatcaagggtcccagcctgaacggtttgactcttgctgttgaaaaacccggcttcttcatcatcgactacgatgtccccaaaaaggatttttggtttcagttcatgaactcagttagggttgcggagaagccgttgaagcttacttacattcacggcagaggggacaaccggaccgtgttggacgggacactcaccttagactctgccaacaaggtgtcggctaattacatgtttggtacgaggaactgtaaggtcaagtacagttactcgcacggaggggctacgacttttgagccatgctatgatttcgggaagaatgcgtgggattttgcaatttcaaggagagtgtatgacgatgtttttaaggcaacgtatcagacgtggagcagggatttggctttggagtggtcgaggaactctaagtttaatgggacttttaagatttcagcatccgtcaatctggccgaagaaactaagatcc

SEQ ID NO: 5711 - DNA, 713 bp, Gossypium hirsutum
  Clone ID: GOSHI-09MAY01-C12781_1
cccacgcgtacgatttccaagcaaacaaaaatccccaagcggaatccaagaagacgacgataccgccttacatgaaagccatttcaggctccttcggcggtatcgtagaagcctgttgtttgcaacccatcgatgtcatcaaaaccaggttgcaattggacaggatggggaattacaaagggatcgttcactgcggcgccaccgtgtctagcaccgaaggggtgcgggctctttggaaaggattaacgcccttcgctactcacctcacgcttaagtacgcgctccggatgggatccaacgccatgttgcagagcgcgttcaaagactcggatactggcaccttgagtaacaaagcgaggtttttatctgggttcggtgctggggttcttgaggcgcttgttatcgttactccctttgaggtggtgaaaattagactgcagcaacagagaggactaagtcgagagcttctaaagtacaaaggccccatacattgtgctcatacaatcatccgtcaagaaggcctttttgggctgtgggcaggagctgccccaaccgttatgcgtaatgggacaaaccaagctgcaatgtttacagccaaaaatgcttttgatgtggtattatggaagaaacatgaaggcgacgggaaagtccttcaaccatggcagtctatgatatcaggttttcttgcgggaacagctggtccagtatgtact

SEQ ID NO: 5712 - DNA, 555 bp, Gossypium hirsutum
  Clone ID: GOSHI-09MAY01-C12641_1
gatttatcttaaagaactgtcctttttcgtccatcgaaaaaatagacctgccatttttctctgctattttccattattaccaaacaaagagtttcttccattaaaaaaagaaaaaagaaaaaagaaaaaaaaaaggaaaaagggaactgaattctttgacggagagaagggttaggcgttatggacggcaatactacggaggctgagcggtggttgacgattgcggagaagctgttggcggcgcgtgatttgcacgggaccagaaccttcgcgatccgagctcgtgaatcggcccctatcctcgccgaccaaatcctagccgtgacggacactctcataacggctcaatctaactctcaagactggtacgggatcctccaactcgtgccgttaactcagtccatggaagttgtggcgagtcagtataggaaactcgcccttcttttgaatcctgggaggaacaggctctctttcgcagatcaggcgtttcgatttgtttccgaagcgtggaatgtgttgcgaacccttctaagaggcccgtttacgataacgagt

SEQ ID NO: 5713 - DNA, 415 bp, Gossypium hirsutum
  Clone ID: GOSHI-09MAY01-C12611_1
cccacgcgtccgcccacgcgtgcgggagcataaataaacgtttgggttttcgcgtatatttatcaagaagccaaaaattgacacgcttcggttttcctttttccgtgtagttttgcttccttcgcttacttatcctcttctttgcttctgacattgttcctacactcaggaaccaaataggaaattagggttcttgttctgaaattcaatgactttttatgatggtaatagtgacggtgagggaggacaggtggcgccaccgctgaaagtaagagttgagggtgacgatgatggtgttaatggaaaaagggtaactttgagacagcgattattggaagaatgtgaagcagaagagaggtatttgttggtaaaggagcctgctttttcttgtgtacagaaaaggtctatttggttt

SEQ ID NO: 5714 - DNA, 525 bp, Gossypium hirsutum
  Clone ID: GOSHI-09MAY01-C12151_1
cgcgtccgaaaatggtaagaacctttgagacgcattttttttcactggcacagttcgggatgaaacggcgtgcttcccttgcaaacatctgcaatgctggaattgagacagaaaagatgggtgaggtatctgcacaagcttgtgtcaacattcctttaggacattgggtgtctgttgagaaagggttcagcgcataaaatgtagcagaattgtcaactgttggaagaccttaactttgatgatgttgtatttcataatgtgctttcctaagagatatgtctttatttataaactctctgcattttttatgattattcatgtgattgctcctgcccaaaattgttgggtagccacgctgaaccagacatgcttcatttaaattaatgtgcttcagttatgattcaaatgaaatattgcaaagcctaaaatgtgatctttttggtgtaacatctttcaacttggattcgaatttaaaaaaaaaaaaaaaaaaaaccctgcaggccggggggttcccctggttttaga

SEQ ID NO: 5715 - DNA, 717 bp, Gossypium hirsutum
  Clone ID: GOSHI-09MAY01-C12161_1
cccacgcgtccgaaaaaaagaaagaaaggaaaagcatttctccaagacctccaaaaatcaaccccaatacaaccccatttgcggattcctcttcttcttctttgttctttgttcttcatcttcttcatcattttctgtgtttaacccacaaatttgctgctccttcagctaataacagaagcttaacaatctctctctctctctctctcttttttaacaccatgttcacttgttattagaaagctttcaactcctctgtcccttttctctgctttgctcttcacacacatttttttgaggctacattattctaaaaccacaacacaacctagctaattgacctaaagatgacaaagataagtcccgatattgacgaaacaatgctgaaagagtcgattgtggctgtttcagctgatgtgagttttgcttcggaccactttccgaagtataaattaggacctgataatcagattttggaggagccaagaggggataacaacggtccgtcgctgaaggaggttcttgaaagggaaacaacacaattgtccgagcagcacaagcgactctcagttcgtgaccttgctagtaaatttgacaagaacttaaccgctgctgcaaaatttgccgatgaggccaagcttaaagaggttgcttctttggaggggcatgttcttttgaagaaacttagagacgccttagaatctttgagaggtcgaa

SEQ ID NO: 5716 - DNA, 425 bp, Gossypium hirsutum
  Clone ID: LIB3197-019-Q1-M1-C12
cggacgcgtgggcggacgcgtggggaaaatgaagaagaagaaggatatagttgcagtctataaagggaaataagatatatacctttattattatggcaaaagaaggaaaaatatgatatcagccttgttattcatcattttttctttagattttttttgctttatttgttgtgaaatgtacagatgttggagtttgtagctgaactttagtacttggtagctgcttatttggatctgtagaaaaccatttagatttatagctaattgacctaaagatgacaaagataagtcccgatattgacgaaacaatgctgaaagagtcgattgtggctgtttcagctgatgtgagttttgcttcggaccactttccgaagtataaattaggacctgataatcagattttggaggagccaagaggggataac

SEQ ID NO: 5717 - DNA, 431 bp, Gossypium hirsutum
  Clone ID: GOSHI-09MAY01-C12131_2
catttctaacgtattctttgaatattatttctataataatatcaaagccctccctggttttctctgattttccctcattttccgggaaaatcttttttcttcctcattccgctaatctcatttactttcttgattccttatttttattttcttctttttttttgtgtttcaagatctgcatggtgaagtccattttcgcagcataaattttgttcctttacatagaaaggaaaaatccaactttaaatctattaaaaatattcttctgaagggatcggcgtggggattttggaggttaagggtaaaacggaagtgctgctcccgttgtaattgagtcctctactgcttcttttgagggaggagcccgggcctcggcctcggcgggtttaaagctcccacctttgaaactatcaaatctaccttttttttcg

SEQ ID NO: 5718 - DNA, 1256 bp, Gossypium hirsutum
  Clone ID: GOSHI-09MAY01-C12131_1
gcgggattccccgctgggtgtaagcatatcaatatgcgcggctgaaccaacccgcccggggatttggaagtttagggtaaaacggaagtgctgctcccggttgtaattgagtcctctactgcttcttttgagggagtagccggggcctcggcctcggcgggttttaaagctcccaccttttgaaacctatcaaatcttaacctttttttttcgaatcttcgtttagttagtctcagattcattgtagggatgccggccctggcttgctgcgtagatgctgctgccgtagcgcctcctggttacgcggctttctttgctggggacagctcccttccctcggcggtccctttttccgcctccaccgccgacgccgctgattccaactcaacccattggtccccagcgcactcctccgctctctaccgcatcgacggatggggagccccctacttttccgtcaataacgccggcaatatcaccgttcgtccgtacggaacggacactctggcccaccaagaaatcgatttgctgaaaatcgttaagaaagtctcggatccgaaatctgtgggcgggctgggtttacagcttcccctcattgttcgggtgcccgatgtgctgaaaaaccggctcgagtctcttcaatcggcttttgaatcagccatccaagcccaaggctacgagtctcattaccaaggcgtttatcccgtgaaatgtaaccaagataggttcgttgttcaagacatagttaaattcggggcgcccttccgcttcgggcttgaggccgggtcaaaacccgaacttctccttgccatgagctgcctttgcaagggaaacccagaggcgttattggtctgcaatggtttcaaacatcctgagtacattttccttgccttgctaccatggaagctcgcgtatgaacactgtgattggttcttgaaaatgaggagggtatatggttatttaatatcttcaaaacttattgttctcccctgattggcttccgctcttcttataccaaactatggtgtttttctcgtcctcttattataaatggatattgcttttattattctctcttttatgatttaaaattctaataatgtgcatcttattttatactgacatttttaatttgactatatcctcacaatcatcatcattatgttcatctttactatatctcttaatgatcattcttcttctctataattgtacttctagcttcatcatctttctttttcataattactgttttc

SEQ ID NO: 5719 - DNA, 652 bp, Gossypium hirsutum
  Clone ID: GOSHI-09MAY01-C12081_2
aaccaaccctactcatgaaaatgttgaggatggtgtcgaagaagctgctcgggattccctccccatcgcctcccctacagactctgccacgtctttaccaccagaatgtcatcgatcactacaacaatcctcgtaacgtcggttccttcgacaagaacgaccccaacgttggtaccggcctggtcggcgctcctgcttgcggtgatgttatgaagttgcaaatcaaaatcgacgaggattcgggcaaaatcgttgatgcttgctttaaaaccttcggttgtggctcggccattgcctcttcttctgttgctactgaatgggtgaaagggaaaagcatggacgaagtgcttactattaaaaacacggagatcgcgaaacatctatcacttcccccagttaagctgcactgcagtatgcttgctgaagatgcaattaaggcagctgtgaaagatgctgaagctaaacgtggcaaaatgaatggtaattccaaggctgctgatgcctgatgtatgtggatatgctaaggaaagaactctggaaactttgattatcatctaatcgtatgtaaagttagaagatagcatgcacccgggggggggggggggggggggggggggggggggggcggggggggggggggggggggggggta

SEQ ID NO: 5720 - DNA, 781 bp, Gossypium hirsutum
  Clone ID: GOSHI-09MAY01-C12081_1
ttcggaacctagaaagctctttctttggcagtgaaaattgaaaatcgacggcgaaaatgttgaggctggcgtcgaaacggttgcttgggctaacgtcaagggagatcccgtcacggtccgttcagattctgccacgtctttaccacgaaaacgtcatcgaacactacaacaatccccgtaacgtcggttccttcgataagaacgatccgaacgtcggcaccggtttggtcggagctcctgcttgtggcgatgttatgaagcttcaaatcaaaatcgacgaggaatcggggaagattgttgatgcttgctttaaaacattcggttgtggatcggcgattgcgtcttcttctgttgctactgaatgggtgaaggggaaaagcatggacgaggttcttaccattaaaaacacggagattgcgaaacatctatcacttccaccggttaagctgcattgcagtatgcttgcagaagatgctataaaggcggccgtaaaagacatggaacttaaacgtgccaagttgaagggcaattcaagtgctgatgctgctaatgcacccatcgagaaggctgctgatgcctgatgtctgtttatatgcccgattgtaaaaaagtctgaacggtttgcttacagagagcatgtaaggtaagactaaaataatcccagggggggacattctgaggacacatgtaatgttacttgtttggaaggtatgttcttgatcaatggaaaattatgtaagtgaataaatcattggcccagtgcgtatactatcgtttgaat

SEQ ID NO: 5721 - DNA, 906 bp, Gossypium hirsutum
  Clone ID: GOSHI-09MAY01-C12011_1
gttgtctccttggcaaaggtggcgccattatagctgaaatgaggaagtcatctggggctcatattcgaatattgggaaaggatcaggttccaaagtgtgcttccgaaggtgaagaagttgttcagattaatggtgatcatgaaactgttcgagatgctattatgcaaataacatctaggttgcgacatcatttctttcgtgatatgtttccttctattaaccatccttcaaatcccggtttcatggaccaaggacccccattcccttcgtttatgggaaggagagaattttcacctccggtaggtccttttcatcattttgatgcttttggtggaccacctccacatggtggttttcacccccatgatcctccttttatgcgcaatattcatcgaccaggcatgcctcctcatatatccgaaagaaaaccatggggtcctcagggatatttaggcatgccagatttctctggaccaccccaccgaagaatttccggttttggaggaggaagccaaccggctgttatcacaagcacaactattgaagttgttgttcctcgttcccttgttcctataatttgcggagaagatggcgcatgtttaaaacagatacgtcagatttctgatgcgaaaattacaattaccgaacccaagcctgcagcaactgaaactgcaattacaatatctggaacacccgaacaaacgcatgcagctcagtctttaatacaggcatttgtgatgagtgagactgaatctacttgaactaataataaggtaatcatcttcagttatattcgatggttgattctacttcatcacttactacaagttgtgattactgatttgatatccggtccttgttctaaaagctcattgcataatccgttgatcatgctggttggacatt

SEQ ID NO: 5722 - DNA, 615 bp, Gossypium hirsutum
  Clone ID: GOSHI-09MAY01-C12001_1
cggacgcgtgggcgagtcgaagacgaaaccctaaatccaagccccctcccccttcaccaccggcagcagaaatgaagtacaacccacgtgtctcctcctctcgccgtaagagccgcaaggcccatttcacggcaccttcgtccgtccgccgtgttttgatgagcgctccactctcgaccgatctgaggtccaaatacaacgtccggtccatgcctgttcgcaaggacgacgaggtccaagtcgttcgcggtacctacaaaggccgcgaagggaaagtcgtgcaagtgtaccgacgcaaatgggtgatccacattgagcgtatcacgcgggagaaagtgaacgggtcgaccgtcaacgtcggtatcaacccatcgaaggtcgtcatcaccaagctgagactcgacaaagatcggaagtcgttgctggatcgtaaggctaaaggacgcgctgcggctgataaggataagggtactaagttttcggctgaggatatcatgcagagtgtcgattagggttatctcatgcagagtgtcgattaaggttatccccttttttttaatattaatctaaatgttttttggtatgttatcaattagggattgcgctgctgttgag

SEQ ID NO: 5723 - DNA, 543 bp, Gossypium hirsutum
  Clone ID: GOSHI-09MAY01-C112019_1
tctttttgcgtcctgaagaagaagcaacaaatggtgcggagagcaatgctgcttgccggagccatgtatgagtatggacgaggcaacgaaaaacaagcactagaaatactcggtccagattttgatgcttatagttttaagattattggggcatctgatgaacagcttgatgtatttaatgaagtctggtacactatgttgctgaatactggacaagttaccaaagcaattgaatcaatcgagaaacagataccgaagagggaaggggctcctttcctgtggcgtctgctggagaaaggttataagctgactggcaggcaggaagccgcgactattggtgagagggccagactgttggaggcagcatatttcaactagcctgaatgtgcactagtagctacatatatgatatagcatttgtattaagaacagattgaatcaccgttccagtcaccaccgtaatgaaactagaatgtaacatgtcctttaaatttgcatatttacattacatcgtctgatatgtaatacgggtaaattaagcta

SEQ ID NO: 5724 - DNA, 416 bp, Gossypium hirsutum
  Clone ID: uC-gsflnu33B145a10b1
tcggttccacgcgtccgggcacttggatttgaacttattagcgctgagttagttcaattcggtcttcaatgtggatatttattatcttgtggagttgaaccaagtacaggtagtcatttcatgtgcttaacacttaggtctatattttgacaggtaggggatgctttcagttctgcaaatatatgaataaggaccaaaattcactggtggacagaaagctcgctcatattggtgagagggccagactgttggagacagcatattttaactagcctgaatgtgcactagtagctacatatatgatatagcatgtgtattatgaacaggatgaatcactgtttagtcaccaccgtaatgaaactagtatgtagcatgtcgcttaaatttgcatatttacattacattgtctgatatgt

SEQ ID NO: 5725 - DNA, 931 bp, Gossypium hirsutum
  Clone ID: GOSHI-09MAY01-C12341_1
cccacgcccccgcaaccaaatacctttagttttttttaagctttaaaatctataattgtttacctttttgcttcacttgattgttaaatctccatggctgccaaggtttttgcatattttgtcgctttggttgctgtcttcagcgtcgccaaatctgaccctgatctcctccaagatatctgcgtagccgatacatcttcaggggtgaaggtgaatggatttgcatgcaagaaggatgccgatgtaacggaaaatgatttcttctttagtggcttagccaagccggcggtggtcaacaactcggtgggatcggtggtgaccggagccaatgttgagaaaatcccagggttgaacacccttggggtgtcgctttctcgtattgactatcaacctggcggacttaacccacctcacactcacccacgcgccaccgagatcatctttgttctcgatggtgaattggatgtggggttcatcaccactgccaacaagttgatctccaaatccttaaaaaaaggagacattttcgcgttccctaaaggtttggttcatttccagcagaacaacggcaaagaaccggcatcggtcatctccggcttcaacagccaattgccgggaactcagtcgattgccgttaccttgtttggttcaacaccagcagtgccggaccatgtgttgaccaaggcattccaaattggtaccaaagaagtcaacaagatcaaaagcagactttcccctaagtaagaaaaaaaaaaagaagaagaaggtaatttgagttttgaggtgaaaaatcataaaattgtttctttggagttgaataatgtaatttaaattaccaaaataagttcactttgaggcaatataatcaacatactatcatgtattgaatatttgaagtatttcacacgatatttattttatgaggtttggt

SEQ ID NO: 5726 - DNA, 616 bp, Gossypium hirsutum
  Clone ID: GOSHI-09MAY01-C12311_1
ctttgttgcagctttctctggttctactgataatttgttagatttgagttcgactgttcctgctatactgccatgggcacaagttttctataatgttcaaacaactgtgaatacagaaattaaaaatatattttctcgtggagaatttacggttcttagagaacttcttgctgttgataattgtgccaataaattgtatcctttgcttcaagacgggttcagtcctgctcgagagggatcgttcaagcattccgcttcagatttgaggaagacggcagagaaactatcgcaagggctggataatctttcaaaggtagtagatgactttttcaaaatagttttgtctgggcgtgatgctttgctttgtaatctaagagcaggttgtgcttccccaaattcagttctgggaagaaacaccgacaagcaaagtgtgaggtgaatcatgaatgaagtagagctaaactcttctgtatacagatggtttaggtatgagaccttctgttttctaactaatagggatatgcaaccttgtttgggtaatgaaagtatttattgggtgagttgttaggtgtgtacatgtatttggaccatcctatggcaaatgctatataaaaag

SEQ ID NO: 5727 - DNA, 362 bp, Gossypium hirsutum
  Clone ID: LIB3166-050-P1-K1-H7
taattgtgccaataaattgtatcctttgcttcaagacgggttcagtcctgctgaagaggaatcgttcaagcattccttttcaaatttgaggaagacggcagaaaaactatcgcaagggctggataatctttcaaaggtagtagatgactttttcaaaatagttttgtctggtcgtgatgctttgctttgtattctaagagcatgttttgctttctcaaattcagtttttttgaagaaacaccttctttgcaaagtgtttttgtttaacaagaatgtattccagccaaacttttgtgtatacatatgttttttgtatgagaccttttgtctttaactatttgtttatacacttttttttgttt

SEQ ID NO: 5728 - DNA, 815 bp, Gossypium hirsutum
  Clone ID: GOSHI-09MAY01-C13981_1
ctcgtattcatcttcttacatactgtttgtcagaaaaaaaaaacatgaaaaccaaagtcttttactgttgtttggtcttgttttttctgggttttcagggttatgttgatgcaagactattagtagaatcaaaaccggatagagatgatactgctgcttatgctcgttggttggtctcccagaattcttgggggattttaactacattatcaattgagttggaagggtcaccatttgggaatgtcgtctcgtttagtgatggggtacctggaaaaggtactggtgtcccatatttctatttgacaacccttgatccaacagcaagaaatgcattaaaagaccatcggtcctcactcgcaatcagtgagtatccgcttggaacctgcagcaatgctgacccagaaagccctgtgtgtgcaaaaatcacactcacgggaaggttggtcctacttgaagcaaactccgaagaagcagagttcgctcgaactgcgctgttcacaaagcatccggaaatgaaggggtggcctaaaggtcacgatttccaggttttcaaattggaaattgaagacatttttatgattaactggtttggcggccctaaaccgctcacagttgatcaatacctcaaatacaaaatgaacatatttgccatcgataagtgaaaaaagtgaaatacaatgctgaactccattcttgtacatgattatattgcaagtgaatgtaaactgtgtttaatgaaaacttgtaaataaattgaactattgtttatggtttgtgctattgaagtaagaaataatccgaagccaaaaagaaaa

SEQ ID NO: 5729 - DNA, 874 bp, Gossypium hirsutum
  Clone ID: GOSHI-09MAY01-C113999_1
cccccagttagttctgaagtcggtggtctgaggctcttcatcgatatctctgttccacgaaacgtgggatcctgtgtctcagatgttgaaggtgcacgtctctacaatgttgatgacctgaaggaggttgtagctgctaataaagaggaccggcttcgaaaagcaatggaagctcaggccattattgccgaggaatcgaaacagtttgaagcatggagggattcactggaaactgttcctaccatcaagaagttgagagcctacgccgagagaattcgacttgcagagttggagaaatgcttatcaaagatgggtgaagatatcccaaagaaaacaaggaaggcagtcgacgatctcagccgtggtatcgtcaataaacttctccacggtccaatgcagcacctgagatgtgatggtaatgatggtcgaacccttaacgaggcccttgagaacatgaatgcgcttaacagaatgtttgggctggagtcagatttgtcacttgttgaacagaaaattagagccaaggtagaacaaagccaaaagtaggaattgaatacagaatctctcaccctacaatcaactacacttccttgcaatcgaatcagtggtcagttgtaacgtagtagctaatcaatttgaggtccttgtgggggcatctttcaattcattaattggtgtaaaacaccattgcttgactctgatttggcttcaccatttctacaatggtttttagaggtctttcggctatgtagattgcagcatgaggtaagcttgaaccctgtatgggttcatcagtagaattttattgatattaaggggaacaatattaatcattggtaataaattactacttatttatagtgctgggattttt

SEQ ID NO: 5730 - DNA, 633 bp, Gossypium hirsutum
  Clone ID: GOSHI-09MAY01-C113979_1
gttgcatctgtttccggtagtatattttcaaggctagtgatgggtgctgtttgtgaccttttgggacctcgttatggttgcgcatttttggtcatgttatcagctccaaccgtcttttgcatgtcgtttgtttcggacgctggagggtatatcgctgttcggttcatgatcggcttctccctagctacatttgtgtcttgccagtactggatgagcacgatgtttaatagcaagatcattgggctggtcaatggaactgcagccggatggggtaacatgggaggaggtgcaactcagttgttgatgcccttagtttatgacattattcgtcatgctggagcaactccattcactgcttggagaatcgctttcttcattcctggatgtcttcatatcatcatggggatcctggtcttaacacttggccaggacttgcccgatgggaacctaagcagtctacaaaagaagggtgatgttgctaaggataaattcggcaaggtgctatggtatgccgtcacatattacaggacctggatttttgtccttctttatggctactctatggggagtgaactgtcaacagataatgtcattgctgaatatctttgacaggttcgatctcaactccacaca

SEQ ID NO: 5731 - DNA, 294 bp, Gossypium hirsutum
  Clone ID: GOSHI-09MAY01-C13911_8
ccatttcacagaagccgaaggaagacagcgatggtgtctttgaagctgcagaagcggctcgccgctagcgtcctcaagtgcggtcccggcaaggtctggctcgggcctaatgaaatcaacgaaatctccatggccaactccaggcagaacgttaggccccttgtcaaggatgggttcatcatcaggaagcctactaagagtatctcttaatcttttcaatttttattctctatctttttctctacaatataattatatactattataataattattcaactttatttatttatt

SEQ ID NO: 5732 - DNA, 930 bp, Gossypium hirsutum
  Clone ID: GOSHI-09MAY01-C13911_6
cggacgcgtgggcggacgcgtgggcggacgcgtgggcggacgcgtgggtttcaactcacacggacgggagggagacgagaaaaggaagacaacgatggtgtctttgaagttacagaagcggctcgccgctagcgtcctgaagtgtggccgtggcaaggtttggcttgatcctaatgaaatcaatgaaatctccatggccaactccaggcagaatgttaggaaacttgttaaggatggttttgtcatccggaagcctaccaagattcactcccgatctcgtgcacgcagaatgaaagaggccaagagaaagggtcgtcattctggctatggtaagaggaagggtaccagggaggcaagattgcctacaaagatcctttggatgtggagaatgcgagtactaaggcgtttgcttcgtaagtacagggaatccaagaagattgacaagcacatgtaccatgacatgtacatgaaggtgaagggtaatgtatttaagaacaagcgtgtcttgatggaaagcatccacaagtccaaggctgagaaggcaagagagaagacactctcagatcagtttgaggccaagcgagctaagaacaaggcgagcagggagagaaagatggccagaagggaagaacgccttgcacagggacctggtgtgaaagcagcacctgcagctgcaccgcaacaggccgagggagttaagaagtcaaagaagtgaatgaagtaatgttttgtttttctctgtaggagtttgaatgcaaaactcggttttcattttgtgttttagatctttagttttatataattatagaattttgatgaaaccactgagctgttataagaaatggaagatgtttgtggtattgtttattagtataatgtactattatgttgaatgtgctatgaaatatttctgatcttaaacttttgttt

SEQ ID NO: 5733 - DNA, 833 bp, Gossypium hirsutum
  Clone ID: GOSHI-09MAY01-C13911_5
ctcgtgccgttcgatttttccatttcacagaagccagaaaacagaaatggtgtctttgaagctgcagaagcggctagccgctagcgtcctgaagtgcggtcgcggcaaggtctggctcgatcctaatgaaatcaacgaaatctccatggccaactccaggcagaacgttaggaaacttgtgaaggatgggttcatcatcaggaagcctactaagattcactcccgctctcgcgcacgtaggatgaaggaggccaagagaaagggaagacactctggatatggtaagaggaagggtaccagggaggcaaggttgccaacaaagattctttggatgaggagaatgcgggtactgaggcgattgcttcgtaagtacagggaatccaagaagattgacaagcacatgtaccatgacatgtacatggaggtcaagggcaacgtgtttaagaacaagcgtgtcttgatgtgaaagttttcacaagtccaaggccgaaaaagcgagagaaaagactctatccgaccagtttgaggccaagcgtgctaagaacaaggcaagcagggaaagaaagatggccagaagagaggaacgccttgcacagggacccgttgagaagaccgcacctgcagctgcaaaccaacaggccgagatggttaagacagtgaaggcgaagaagtgaatgaaatagcgaaaatcagtaaacttcatgtcttaatcccttttatttttttcccgtggcagtttgtgtgcaaaactcagttttcattcatgttaaaattttgagtcatacattacagaattttggaaacctcagagctgttatattaaaatgaaggtt

SEQ ID NO: 5734 - DNA, 583 bp, Gossypium hirsutum
  Clone ID: GOSHI-09MAY01-C13911_4
tacatatacagaaacgttaaatattgagcagcgtattacccatatttaaaagtcacttccgagtttgggtaacatagcatttacatactaagctatattttgatgtctagaagattggcatgcccttttatggattttgatttggatgatgcttctagttgggttattttgcgactgaatgctggttttctttatcatttcagggacctggtgtgaaagcagcacctgcagctgcaccgcaacaggccgagggagttaggaagtcaaagaagtgaatgaagtaatcttttgtttttctctgtaggagtttgaatgcaaaactcggtttccattttgtgttttaaatctttagttttatataattatagaattttctcgcgtccgctgagctgttataagaaatggaagatggaagatgtttgcggtattgtttattagtataatgtactattatgttgaatgtgctatgaattatttctgatcttaaacttttgtttactataatctcattatcatgtcctaaaaagttttctttttgggtcatattgtttttttgactttataatatttagcaatatttcat

SEQ ID NO: 5735 - DNA, 877 bp, Gossypium hirsutum
  Clone ID: GOSHI-09MAY01-C13911_3
cagttagctgcacaccaaagagagggagagagagagagatggtatcgcttaagctccagaaacggctctcagccagcgttctaaagtgtggaaaaggaaaggtttggctcgatccaaatgaagtcaacgagatctccatggccaactctcgccagaatataagaaagctggttaaagatggttttatcatcaggaagccaaccaagattcactctcggtctcgcgcgcgccgcatgaaggaagccaagagaaaggggcgtcactctggttatggtaagcgcaagggtacaagggaggcaaggttgcccacaaagatcttgtggatgaggaggatgcgtgttctgagacgcttgctccgcaagtatagggaatcaaagaagattgacaagcacatgtaccatgacatgtacatgaaagtcaagggtaacgtgttcaagaacaagagagttctcatggagagcatccacaaatctaaggctgagaaggccagagagaagacgttggctgaccagtttgaagctaagagggctaagaataaggcaagcagggaaagaaaatttgctaggagggaagagcgtttggcccagggacctggaggaggagaaaagccagttgcagcacagcctgcggcagctgtgcaatcagccgtgggttccaagaagtcaaagaagtaaaaaaaaaaaaaaaagtaagatttcttactgaagagtactgatcgaacgtgacttttagatatttagtaatgtcttaagtaattttgttgagccaatgttgtgtttttttgggttgatatgaacttttgttcttttaggcggattaagctttaaatgtttattattattatcagtttactgatttgtttttttttttcccttaa

SEQ ID NO: 5736 - DNA, 930 bp, Gossypium hirsutum
  Clone ID: GOSHI-09MAY01-C13911_2
cttgtttcttatccccccccccgccccgcgtccgcccgagcgagagagagagagagagagagaaacacagagagggagaaatggtttctctgaagctacagaagcggctctccgcgagcgttctaaagtgtggaaaaggaaaggtttggctcgatcctaatgaagtcaacgagatctctatggccaactcccgccagaacataaggaagttggttaaagatggttttatcatcaggaagccaaccaagattcactctcgatctcgtgctcgtcgcatgaaggaagccaagagaaagggacgtcactctggatatggtaagcgcaagggtacaagggaggcaaggttgcccacaaagatcttatggatgagaaggatgcgtgtacttagacgcctactccgcaagtacagggaatcaaagaagattgacaagcacatgtaccatgacatgtacatgaaagtcaagggtaatgtgtttaagaacaagagagtcctcatggagagcatccacaaatccaaggctgagaaggccagagaaaagacattggctgaccagtttgaagctaagagggctaagaataaggcaagcagggaaaggaaacatgctaggagggaggagcgattggcccagggacctggaggagtagagaagccagttgcagcaccacctgccgccactgctcaaccagctggtggttccaagaagtccaagaaataaggaggccatctggcgaagaagtgtgagccatgaatttagaaacatgtccaagtggtttttttgtcgagccagtctgctgttttggtcattatgaacttgttttaagttggattaaggtttcatgattttgttctcagtttccatgctgttttgtttacttttttctgcacatttatttatttttgctatggtttcattgattttctaaaaaaaa

SEQ ID NO: 5737 - DNA, 963 bp, Gossypium hirsutum
  Clone ID: GOSHI-09MAY01-C13911_1
aaaattcgtaccgttaatgcccctccactttcttcccccaaaaccctcgatttccggtcacacggacgggagggagacgagaaaaggaagacaacgatggtgtctttgaagttacagaagcggctcgccgctagcgtcctgaagtgtggccgtggcaaggtttggcttgatcctaatgaaatcaatgaaatctccatggccaactccaggcagaatgttaggaaacttgttaaggatggttttatcatccggaagcctaccaagattcactcccgatctcgtgcacgcagaatgaaggaggccaagagaaagggtcgtcactctggctatggtaagaggaagggtaccagggaggcaaggttgcctacaaagatcctttggatgaggagaatgcgagtactgaggcgtttgcttcgtaagtacagggaatccaagaagattgacaagcacatgtaccatgacatgtacatgaaggtcaagggtaatgtgtttaagaacaagcgtgtcttgatggagagcatccacaagtccaaggctgagaaggcaagagagaagacactctctgatcagtttgaggccaagcgtgctaagaacaaggccagcagggagagaaagttggccagaagggaggaacgccttgcacagggacctggtgtgaaggcaacacccacagcggcaccccaacaagccgagggagttaagaagacgaagaagtgaataaataaggaagatggctcgacttaatatgttaatggcttttgttttctttataggagtttgtttgcaaaacgctggttccatttatgttgactcacataactataaattagggaattttggaaacccgggtgctgttttatttaatcaggatgcttatgatattgagtgtattattattattcaatgacgatgcatgcggtatgaattagaaaaaaaaaaggtgaggagttagaaataaaactc

SEQ ID NO: 5738 - DNA, 436 bp, Gossypium hirsutum
  Clone ID: LIB3149-035-Q1-K1-B7
gtaagatgcatgatgattttcttgctctatcttatgttattcggactttttactttccttgaaagtgtacctttcaaacacttatccacaacaacataacatgcagttatgatcttttaaatatataaaaaaaaccctcagaatattcatagattttatctgtgtaaacagggtctaaatttggatttttttgacatttgcaggggagttaagaagacgaagaagtgaataaataaggaagatggctagacttcatatgttaatggcttttgttttctttataggagtttgtttgcgaaactctggttccatttatgttgacacatataactataaattagggaattttggaagcccgggtgctgttttatttaatcaggatgcttatgttttaaaaatataaattcttttataatattttttattttaaataatt

SEQ ID NO: 5739 - DNA, 568 bp, Gossypium hirsutum
  Clone ID: GOSHI-09MAY01-C13921_1
gatcaaatccctaacttaccactcttctcgctatgcaccccactggaacccctaaattaatctttcctgaacaacatccaaataccttactttctcatttttcctttttccccatcccaacccaatatggaacaagaaactcggcaaaagatcgaggaaacggtgaaggatatgctgagcaaagccgatatggaagagatgactgagtttaaagtccgagtcacggcctctgagcggcttgcaatcgacctttctgattttagtcgcagaaaatttattagggaattagtggagtcttttcttctctccactgtcgaagaaaatgtggatgggaaacaacccaataccaagcccgtggaagaggaggctaaagaagctgttaaggttaagaaagaaattgagggggatggaggtcgtattatttctagcagacaagacgaatgtggttgttcatgattttagaggaaaaagttatgtatccattagagagttctatgtgaaaaatggaaaagagctcccatctgcaagaggagttagcttggtaagtgaaacctggtcaactttaaag

SEQ ID NO: 5740 - DNA, 537 bp, Gossypium hirsutum
  Clone ID: GOSHI-09MAY01-C13841_1
aaaaaaaaaatccatccatcatgtctccaatttatatctagctttatatccttacttatcatcggttccatgggcgttgccgtcgccggcgccggcaagacgcacgtcatcgatttccgatggcctaacctctacccagaaggcatggcctgggacccattagcccagcacttcatcgtcggttccctaaaccaccgtacaatccactccgtgtccgacgcaggcgttgtcgaaactctgatctccgatcccgccctccctgaaaacgttactgttttaggtctgacggtagatttcactaaaaaccgccttctcgcttgcctccactctgtttcccctctccctccattcaacgccctcgtcgcctacgacctccgcacccgccggcgcctctttctctccctcctcccctccgaccccgattcccccatcgcctcaatccgccgcgggcgtgaccttgccaaccacgttgccctcgacttcaagggcaacgcttacctcaccaactcgggcggaaacttcatctggaaaggtaac

SEQ ID NO: 5741 - DNA, 508 bp, Gossypium hirsutum
  Clone ID: GOSHI-09MAY01-C13821_1
tgctgattgggggagctgaaaacctattatttcatcaacatatagaaaattaaaaaaaatcgaacggcgataatctctggcgatggttcgaccgacggcgataggcaccgcgaacagatcgtcatcagcgatgtcctccatgacaaccaccgtgacgatcgagaacacctcgggcgcgtcctcctcgtcgtcgcagcctcaagaagccctcgtcctcgaactccgccctaggaagaagaaagttacgtggaaagaaggcaccgtggacaacgaattcatgaacaagaagagttccaagatctgttgtatttaccataaagaaaagcccttcgacgaagacgacagtgatgacgacggacatgaccatcatcatcaccatcatccatccaacggacatgattcctccaaggatggctgcaggcccagcagcagctccagctccagctccagcgcctgattctgtttccaatctgtttctctaaaactttggtttggatgcaccgaaccg

SEQ ID NO: 5742 - DNA, 461 bp, Gossypium hirsutum
  Clone ID: uC-gsronu33B138h01b1
ttgttcgccgattctcattttcccttctatgccgtttcagatcctagcctccgcccgttcgactcctattcgcagaggagaagaaggcgtcatcggctcacccgcgaaggtaagctctcctcccttttccttctcttttcttttattcaaaaaaaatgaatcaaacaaaacccgaaaagaaaaccccaaatgaaaaaagaaatcagatgatgcatgagaacgattcaaaaatcaccttttttttgaattgatttcgtgtttttgatacaatatgcgtgggtattccccctttcaatttttcgtaatggctttatatagccaaaaaggaaatacaaaatccctatttttgtttttcttttttctctgctattacaattttcgctcaatttgttgtgctattttttttcatctgtttctgcgtgtgctgctgctttggtctgcctttgttgcgttgctgctct

SEQ ID NO: 5743 - DNA, 240 bp, Gossypium hirsutum
  Clone ID: uC-gsronu33B049g12b1
tcgcccatgcgtccgcccacgcgtccgggagagcgccgtttctcattttcccttctatgccgtttcagatcctagcctccgcccgttcgactcctattcgcagaggagaagaaggcgccatcggctcacccgcgaaggtacggatgtgcgcgggcgtgcgtacggcgtggtccctggtgtgagatctgcaccgttcttgcatagatttctcttccggcgtttgtcttcttatactcacca

SEQ ID NO: 5744 - DNA, 779 bp, Gossypium hirsutum
  Clone ID: uC-gsronu33B042e08b1
ttcctcgcgtccgcccacgcgtccgcccacgcgtccggaggaaccaaatattttgaagtacataaagattgcagctagcttgcctgagaaaactgtacgtgatgttgcactgaggtgtaggtggatgcaaataaaggtactttttggaaattggcagagaaagcgtagaaaacctgaggaacataatgcgggaaagaaggtaaacaacaggaaggataagctggtggaatcatcttctaagatgactatgccttcatctctgccaccaaccatggctgcatatcctctcatgatgcgtcatctggatcagaatggaagaacgccttctgaaggaatatgtggtacaactatgcatcttttgaagcaaaatgctcaaacttttagtcaaatcacatccaatctttctcaatacaagttacaggataacattgacctcttttgttacgcaaggaacaatattaccgccatgctaaatgacatgagagagatgccaggattaatgagccatatgccaccattgcctgtatctgttatgagggattagcaatggcctcttggctggagcaacaatgtctgcccgtaatgagttgcagtccgggttgctggccaaaagtggatcgagacccacctaagcaaaattgttcaatatgaatctgcgtttattattaatggggttaaggaaagcttttaaaaaaaaaaaaaaaaaaaaaagggggcgtttaagtccaagtattcggtgatgaactatatttttttggacctaattattttggcgtttt

SEQ ID NO: 5745 - DNA, 494 bp, Gossypium hirsutum
  unsure (1)..(494): unsure at all n locations
  Clone ID: uC-gsronu33B137e02b1
attacattgacctcttttgtcacgcaaggaacaatattaccgccatgctaaatgacatgagagagatgccaggattaatgagccatatgccaccattgcctgtatctgttaatgaggatttagcaaatggcctcttgcctggagcaactaatgtcttgcctgttaatgagtttgcatgtgctgggttgcatggccaaaaaagtggagtcgtagacaccaccataagctaaaaatttgttcaatttatggaatctgtcgntatatttatctaattgaggtttcatgcaaagccttctttatgctggttgggaatgtaaactttccgggttgatctgaatttttcgctctttttggtcttacactctgttctcattattcagcttcaccaatttgcatttagtcatgtagtcatcttacagctgcttgactgcttggtgatgtctattctcctttcacaccattgatgacttacagctgacttacaggtcagcatg

SEQ ID NO: 5746 - DNA, 362 bp, Gossypium hirsutum
  Clone ID: GOSHI-09MAY01-C13431_1
cccacgcgtccgcccacgcgtccgcccacgcgtctcttttggtccgtttcctctctctctgtctgtgacgagtttgcttgattgctttcaagaaacatctgcttttccttacaagactttttttaaaaatcctcgctgagtaatttctttttcctatggcccgaccagaggatgagtactaggcgttgcttttgtagctctgccccgcggccatggctggttgcgggtctaggcaaccctggtgaggaatataaaggtacatgacacaatgtgggttttgagatgattcgacgcttttgctaaagctcaaggcattgacttgaatactctttattgctaggttattctttgttcattgtttt

SEQ ID NO: 5747 - DNA, 619 bp, Gossypium hirsutum
  Clone ID: GOSHI-09MAY01-C13741_1
gagaaaataaaaagatgtattattgaaaatatttttcaagatttggtcctaacagatattatatgatacgacatgagatggtcgggatcagggatgggcttgggtcaggggcgttacttctttcgtgaaagagcagcagcaatgccaccagcaatcagcccagcagcagaaacagcaatgccaataccaatcacaccatctttcgtaattcgatcttcgattgccttcttcagagattgtgcctgcctccattcaggttctaccattaaacactgctccacaagctctctgctcctcgaatagtcacctcttcggaaatgcccaacagccagatgataaagcttctctcgcattttcagtggatcggtagtgctggctattgaagcttcgagcatagctatcccacgttctacatcttctgttcgtcgtgagtgaacaagagcccatgaaaaacgtgtgagacattcgttttttgactcatcagaaccattatcagccccagcagcctccctttcacatcctgcaatgatatcagcatcgcaccaaggaagctgatctgaaccggagaagaaattagtcactgcatcgaagaatttccctacctttgcttcaaatgttc

SEQ ID NO: 5748 - DNA, 541 bp, Gossypium hirsutum
  Clone ID: GOSHI-09MAY01-C13771_1
cgaacccttggccggacccgtgggttgggctaaaaaaacctaacttccctgagcttaaaccctcgttggctgtcaaacccatagttgtttctttgaattgtagaaaaaaaacagcctttggtactttttgggggctcaaaaccctaacattccctgtgaaacccatagcagttttccttgcattgaagaagaaaaagaacagcctttggtactagaaaccagtgctgcaatatggaatcatcacaagctcggcgggttttaacgaagctgatgaaggttttaactttgaggccccatcaccccgtttcaagggcagcaccttcgtcatgtgtcttgcaaacgcgccttttcagcgatataaaacgacccatcactgaaaatgaatccatcaggagcaatgaggatgatgatggggctaccgaacatatttccaaacgacccttaaggggtcgaaggcctttcaatccggcttttaaagaaaccgaaggggccagctttgatcggaatcggtcctcggttcaatcccccaattgccaaattt

SEQ ID NO: 5749 - DNA, 624 bp, Gossypium hirsutum
  Clone ID: GOSHI-09MAY01-C13761_1
tttcagaacaagaagtagaataagaatggataacagcgagggcaacaattcccccagcttgatctctcgtgagaagttgggagaggtggcaacctgggtcagcgccactgtggtctccgcctttttctcctctctcgagcgcttctcctgcgttaacctctccaccaacgaccctgacgatgacgacaatcccgacgaggccaaggaccgccctctcacctactcctgaatatctctctcggtacttgccacgtcatagactctcttgctttctcttgatttagggtctttgtatacagaaccaagaaaaaagtattaaggaaactttaaatgctctctatatgtgttggtcctcctgattgaaaagggaactcttgtgtaataaaggcctttttttttttggatatttaatcatctaagtctgttggtgctgtgttttctcaaaagtcacaagtcaaaaccctcgatcaaacaatatggagcttgaatttgattcctaggttttgttatggaactgtcttttccttatcagttaaagggagttactgtgtgtgtgtgtgttttgaatattgaattgtaatcttttgaagctatgcaatgagttcatattaagatgattgatgg

SEQ ID NO: 5750 - DNA, 547 bp, Gossypium hirsutum
  Clone ID: LIB3828-023-Q6-N6-A3
gcgggggggtggtttttttaaaacaatctccatcaatcatcttaatatgaactcattgcatagcttcaaaagattcaattcaatatttaaatcacacacaccacacagtaaccctcctttaactgtataagggaaaagacagttccacaacgaaacggggggggggttcaaactccatattgttcgatcgggttttgacttgggacttttgagaaaacacagcaccaacagacttagatgattgaatatccaaaaaaaaaaaggcctttattacagaagagttcccttttcaatcaggacgaccaacaaatatagagcatttaaagtttccttaatacttttttcttggttctgtatacaaagaccataaatcaagagaaagcaagagagtatatgacgtggcaagtaccgagagagatatttaggagtaggtgagagggcggtccttggcctcgttgggattgtcgtcatcgtcagggtcgttggtggagaggttaacgcaggagaagcgctcgagagaggagaaaaggcggagaccacagtggcg

SEQ ID NO: 5751 - DNA, 518 bp, Gossypium hirsutum
  unsure (1)..(518): unsure at all n locations
  Clone ID: LIB3825-030-Q6-K6-D5
ggnatacagcgagggcaacaattcccccagcttgatctctcgtgagaagttgggagaggtggcaacctgggtcagcgccactgtggtctccgcctttttctcctctctcgagcgcttctcctgcgttaacctctccaccaacgaccctgacgatgacgacaatcccgacgaggccaaggaccgccctctcacctactcctgaatatctctctcggtacttgccacgtcatagactctcttgctttctcttgatttagggtctttgtatacagaaccaagaaaaaagtattaaggaaactttaaatgctctctatatgtgttggtcctcctgattgaaaagggaactcttgtgtaataaaggccttttttttttttggatatttaatcatctaagtctgttggtgctgtgttttctcaaaaaaaaaaaaaaaaaaaaaaaaaaaaaaaaaaaaaaaaaaaaaaanaaaaaaaaaaaaaaaaaaaaaaaanaaaaaaaaaaaaaagggggcggccgtttt

SEQ ID NO: 5752 - DNA, 663 bp, Gossypium hirsutum
  Clone ID: GOSHI-09MAY01-C13711_1
ccgatcttgacatcagatacatgattaaaatctgcaagatgcttggtttggcagctcttgtagaggtgcatgatgagagggaaatggaccgcgttcttggtatagaggggattgaacttattggtatcaataatcgtaaccttgaaacatttgaggtagatatcagtaacacaaagaagcttcttgaaggagagcgtggccagatgattcgcaagaaagatataattgttgttggagaatcggggctttttactcctgatgatgttgcttatgtccaagaagcgggtgttaaagcagttttggttggggagtcgatagtgaagcaaagcgaccctggaaaaggaataagtggactttttggtaaagacatttcgttatgagttcacacagggaaaagtggactctggatgtgtgcttccgagacttcatttacaattactaagtgcagttaatcgatcagaatctttcagcatgttgaatccatatttccaagtggagcatctttacataatctttgtaccttgattgtataaattataatactaatagaataaattgcggatgtgcatttctgttctcgtgttttttaatcatttacttttccgtaaaaaataaaaaaaaaaaccccatttttttaaaataaaaaaaaattatatttaaaaa

SEQ ID NO: 5753 - DNA, 343 bp, Gossypium hirsutum
  Clone ID: LIB3197-056-Q1-M1-B12
cggacgcgtgggggagagcatggccaactgatccatcagaaagatataattgtagttggagaatctgggctatttactccagatcatgttgggtatgtgcaagaagctggtgttaaagcagttttggttggggaatcgatagtgaagcaaagcgaccctggaaaaggaataaccggactttttggtaaagacatttctttgtgagttgtaacaataagtcggatcgagtatgggtgtgcttcttgtatcagttacttttcggtattggaacagttgtattatatgaaaaacaatgctcaacatgagttattactaaattaatgacataaatttcatgtatcct

SEQ ID NO: 5754 - DNA, 1421 bp, Gossypium hirsutum
  Clone ID: GOSHI-09MAY01-C13721_1
ccaagctctctctatccccgtctatacacctatattattaccctctctacactctcttccatcggttcccctacccagtacttgagagatatgggtctctcaagctcctttccttcatggattttttcttctgtattctgagctaagcaaagacaagaagatggcaatacagcaatatgaacagcagcaacaacaacaagagaatcacccttccttcttgctagatgctctctactgtgaggaagaagcggatgcaggggaagttttagaggaagagagttcttgtgtgggctgtaacaatggcggaaacccttcatttttcccactgttgttgttagagcaggatttgttttgggaagacggggagcttctttcactttttgctaaagaaacagagcagcagccgtcttgtttcaatgtgggaaccgatgagtccctagcaatggctcgccgagaggctgtcgagtggatgcttaaagtcaatgctcgatttggattcaccactctcacggctgtactttccattaactatttggacaggttcttaagtacctttcagtttcaaagagataatccttggatgatccaactcctggctgtcacttgtctctctttggctgcaaaagttgaagagacacaagtgcctctgctcctagacctacaagtggaggagacgaagtatgttttcgaggccaaaactatacaaagaatggagcttttggtgctctccacactgaaatggaagatgcatccaattacacccctttcatttctagatcacatcataagaagacttgggttgaaaacccacctccttgggagtttcttaagcgatgtgagcatctcctcctctgtgtaatcactgattcaagacccatccattatcttccctctgtattggctactgcaaccatgatgcacgtcatagaccaagttgagcttttcaatcccattgactaccaaaatcagctgctgagtgttcttaaaattagcaaggaaaaagtaaacgattgttacaagctcatccttgatgtatcaacaagaccccaggcccaaggcaatggtggtgcatgtaagaggaaggtggaggagagggttcctagcagccctagtggagtgattgatgctgcatttggcagtgatagctcgagcgattcttggggcacggtgtccttatcgcctgagcagcagccaccttttaagaagagcagagcccaagagcaagtaatgcgtttgccatcactcaaccgagtctttgtagacattgttggcagcccttcttaattatatctcccttctctctctccctcgctctctccatctctttctttgtcccaaaaagatctatatttattatgcttatgttcccttttggttcaaggaatcaaatgttaagttaaaaaaatgaaaaaacaaagtaa

SEQ ID NO: 5755 - DNA, 426 bp, Gossypium hirsutum
  Clone ID: LIB3189-015-P1-K1-B4
ccaagctctctctatccccgtctatacacctatattattaccctctctacactctcttccatcactggccctacccagtacttgagagagatgggtctctcaagctcctttccttcatggattttttcttctgtattctgagctaagcaaagacaagaagatggcaatacagcaatatgaacagcagcaacaacaacaagagaatcacccttccttcttgctagatgctctctactgtgaggaagaagcggatgcaggggaagttttagaggaagagagttcttgtgtgggctgatacaatggcggaaaccctgtattttttccactgttgatgttagtgcaagatttttttttggtatcttttatttgtttcttttattttttatcttataataatattattacatttatctaactattttattt

SEQ ID NO: 5756 - DNA, 473 bp, Gossypium hirsutum
  Clone ID: GOSHI-09MAY01-C13191_1
ttccggattggaggttcggcccacgcctacgcgagcgctctgatttcaaaagcaaaaaggaatccttattcagagcagcaatggcggacactgtcatctctctcgataagctcaaagccttctggaactctcaagtccacgatgaagaaaactgggctcacaatatgaaactgctgcgagccgccggtttatttgctggatcgattcttctaatgcgcaattacggtgatctcatggctatataaggaattgaggattgattaagaggttcggagtaagctcagtttggaaatggatgcatctgttactttaggaactatatacatggttaatgatgatattgaaacaactttagtaactttttgaagtatgatgctcatatatgcttctaaatgttttggaatttgaatgaaatgaacccacttctggatttattttgaatgaaatggatggctttcctaacgtacggaacg

SEQ ID NO: 5757 - DNA, 425 bp, Gossypium hirsutum
  Clone ID: GOSHI-09MAY01-C113199_1
tttgtattcaactcgacgagttgcctattcgatcgccgcgtgccagtcctttgcctgcttacctcacccgaaagggaggctttgattaggctacccgtcaaggttgtttagtttacgtatgtatctttctttctttctctcttggtgtaagctacgtgttgcgtttctattggtggttatggttgagatcgacggtctcaggtgacgaactcgttttgctaaaaaaacccgttttaaaagaaaaaattgctcttctctataaattagtgaggtaattctgcgtctagaattttctttttattttttacttgaatgtatttgtacaaaggtttaggaaaaaaatggaaaattgcattgtagaactttgaataatataatgtttacttttatttgctggtaacaaaacaacaccattttaatccaca

SEQ ID NO: 5758 - DNA, 596 bp, Gossypium hirsutum
  Clone ID: AW187764.1
agaggattgcctgtctttggatccttcaaaattagagttgtatttgacaaaaccaaagaagaaaaaaaatggagagattgccttctgatatttgtcttaagattttctgtttcttggatcatcagaaccttgcttctgccctacaaggttagcctactaaatcaacccacgattttatttttctttttggggtttagattgattttatctcaaattcaagatgagaggtttgcttgatttcctgaattgtgtatcaagcgcctaaatttgtggttttctatttttctgggttatgaaattcaaattaaagcattgggaattggggttgtaaagtttgcaggaaatggaaattgttgggttcggataacaagctatggtgtaacctattcagagaaagatggggagtggatgaagctgcattttttgcccctgaacccttagaatccacatcttggaaacatgtttacgagacacaagaccgatgtgatcgggttggattgtaagttatagtataacctttaatctaatccatttatgggcattcgcaattaaaaataaatgatgatatgtatgtgtgttgggggtatggggctgac

SEQ ID NO: 5759 - DNA, 517 bp, Gossypium hirsutum
  Clone ID: uC-gsronu33B126d11b1
ttctaccaaagaggattgcctgtctttggaggggtcaaaattagagttgtattggacaaatccaaagaagaaaaaaaatggagagattgccttctgatatttgtcttaagattttctgtttcttggatcatcagaaccttgcttctgccctacaagtttgcaggaaatggaaattgttgggttcggataacaagctatggtgtaacctattcagagaaagatggggagtggatgaagctgcattttttgcccctgaacccttagaatccacatcttggaaacatgtttacgagacacaagaccgatgtgatcgggttggattggggctgaagataatcaaagaagggggagattactttcttgtacatcaaggtaaaatccaacgctacctgggttcaaggattaaaaggaaaggggtgaaagagtgtgagttcagcacaacatcgaatcatgtggaggaaccctgtcgagggattctggataaaatactcttcttcttgggcgaccttgaagctgc

SEQ ID NO: 5760 - DNA, 1093 bp, Gossypium hirsutum
  Clone ID: GOSHI-09MAY01-C13081_1
atttagtggaagtataaatggtatataagtatatacatgtataaattattggattaattaaagatatgtataagatatatgtatatatataaggttcgaatgattatataagtatatatatatgtataaactcatggatttgatttgtgatatgtttgttataattgtatatatagattcgaataagcatgcaaatatacatgtatgtgttgtgtattgaatttagatatgtcattatataagtatatgaggatcgattatgcatatatatatgtataagttcttgttttgaaattgagtatgaatttatacatttatatggtagatttgaatatgtataaatgtacatgtataatttcttgaattgaaattaggtatggaattatatatgtatacatgaggtcgaatgtgaatgcatatgcatatgtataagttttgtattgaattaatggtatgaaattattagcttagattattttaatatgttcgaatgttaaatgtatattatttaagtatattataagctaatagtatgataatagtagtaggatccaaaatataaggttatgtataaatatgtttggtggaatcattgagttatgaagctggaattgataatacaaattatatatatatccatgtgttcaaagagaaagattataagttttgagctgaattttacgtatggatttatatccataaatagttcgaatacgagatacaacttatgtgaattgagatttcaagctcagtgcctagaaggcttattgccagtgagataattcagactctatgtctagcaagctggatgccggtgaaacaattcagactctatgtctagcaggctggatgccgatgaaacatttcggactttaagtctagcaggctaaaagccagtatactgaatcagatttaaagatcaagcttcaagcttgaggatcgtcagcaagatcatcactctatctactctctcggtattaaaatgttttaaattttaactatgacatgtatagactagataaatgttttgaaggtcatactttattatattgtatattaatttaatagccatacggaaatggtttatttcctt

SEQ ID NO: 5761 - DNA, 411 bp, Gossypium hirsutum
  unsure (1)..(411): unsure at all n locations
  Clone ID: LIB3189-003-P1-K1-G8
cccacgcgtccgctgatatgtaaatgtattggttgtaaagtttgatgagtatttataaatacatttgattatatgcatgtcatatatatatatgtactctttgatatgaatgctatgagttcatatatttggttataaataagatgtttatgaataacaatattcaaatggtaatatatgtagtattcgcgatttcattaagtatacgtaggaaattatataaattattttatatttagttatgctgtaaacttacaaggctataaaaagttactttgtttgtttatgtctttctgttttatagatttaaagatcaagcttcaagcttgaggatcgtcagcaagatcatcactctatctactctctcggnattaaaatgttttaaattttaactatgacatgtttagacta

SEQ ID NO: 5762 - DNA, 497 bp, Gossypium hirsutum
  Clone ID: GOSHI-09MAY01-C13041_1
gcaactgggagctcggatcagtttcagtggccaagttagaaattaccaacgaacaatttcacaagtggtgaacctgcttggggatgaaacttcggcagcaaattatttaagcaaatgcatttactcgatcggactcggcagcaacgattaccttaacaactatttcatgcccctttattactccaccagcaggcagtatacccccgagcaatttgctgatgttcttattcaacaatacactgagcagcttcaggctttgtataactatggggcaaggaagtttgcgttgattggggtgggtcagatcggttgcagtcccaatgaattagctcaatacagtggagatggtaaaacatgtgtggagagaatcaatgctgcaaaccggattttcaatgtcaagcttaaagggctcgttgatcaattcaacatcgactattccgatgccaaattcatctacatcaatgcttatggaatttccaagatcattacaagcaacc

SEQ ID NO: 5763 - DNA, 653 bp, Gossypium hirsutum
  Clone ID: GOSHI-09MAY01-C13011_1
gttgtttcggagtgaggtttcagatgataatgattcacagggttcaacaccttgttcccccactgttctaggttctcttgaggatggagggtctggtggtaatggccaggcatttgagcggcagctatcgaagcttagctcgttcaatttcaagccaaatattaggagatctgggcagatacccattccacccgaagaattaagatgtccaatatctttgcagcttatgtatgatccagtcataattgcctctggacagacatatgaaaggatctgtattgagaaatggcttggtgatgggcatgacacctgcccgaagactcaacagagactttcacatctctctttaacttccaattattgtgtaagggtctcattgctagttggtgtgaacagaatggagttcctattcccaatggtcccccagagtctcttgattttaactactggagactggccttgtccgagtctgagactgcaaattcaagatcaatggatagtgtcggttcatgcaacttaaagggggctaaggtggttcctttagaggagagtgctaacgctgaggaagtggaaggaaatgaagctgaaaatgaaaatgagtcttcgtgtccacaggaggaaacttctgagcttaatgtgctagaaagttatca

SEQ ID NO: 5764 - DNA, 502 bp, Gossypium hirsutum
  Clone ID: GOSHI-09MAY01-C13391_1
ctgactttttccctcctattccttccttcttttcttttctctcctgtcatttccttccatttcctgttattttcaccatgccctttcctttcctcctcttcttttcctccatgttcctctcctttccttccctttccttctctcaacaaacccctcccaaaggatatttaattaactgcggcgcaaccaggagatcggtgatccacggccgagtatggttacccgacggtaacttcatatccgccggaacatccaaaaacctaactgtccccggcttagtccccacgctctccaccgtccggtcgtttcctctcgagaacaagaacctccggcgtaagttctgttacgtggtgcgtgtataccgtggcgcgaggtacttgattaggacgacttactattacggtggagtcaacggcttggattttgattcgccgccagtttttgatcagattgttgatggtacgttttggagcgtggtgaatacgaccgaggattatgggaa

SEQ ID NO: 5765 - DNA, 305 bp, Gossypium hirsutum
  Clone ID: GOSHI-09MAY01-C13311_1
gagctgcttctcttgttgtggagtggaggtgcagctaccgtactggtggccttggtggcaatagcaacaggcaatggcaaatcattgagggcgtttggtgaattatttgtcaggcaaagctggtgccaacatgcaaaatattgctgaagaaatacaaaaagttggcatagtaaatgtttcagctcatattttctacatttagagaactagcagttgctacagacaactgctatcccgattggctgataggtgaaggtggctttgggtgggttctataaatggattcattggtgaaaccttgatca

SEQ ID NO: 5766 - DNA, 835 bp, Gossypium hirsutum
  Clone ID: GOSHI-09MAY01-C13301_7
gtgtgagggaggagagttgtttgacaggattgttgcaaggggacactacactgaacgggctgctgcagtggttatgaggacgattgtcgaagttgttcagatgtgtcataaacatggagtaatgcatcgttatctcaaaccagagaattttctgtttggaaataagaaggaaaatgcgccattgaaggcaattgattttgggttgtcagtcttctttaaacctggtgaacgattcaatgagattgtgggaagcccatattacatggctccagaggttcttaaacgtaattatggtccagaggttgatgtctggagcgctggagttatcctctatattttactttgtggtgtgccaccattctgggcagagactgagcagggggtggcacaagcaattattcgctctgttattgactttaagagggacccatggcctaaggtttcggacaatgcaaaggaccttgtaaagaaaatgcttaatcctgatccagagcagcgtcttacagcactggaagtgcttggacatccatggcttacaaaatgccaagaaagcacccaacggtccgttgggtgagactgtgaaagctaggctcaaacaattttcttgtatgaacaagctggagaagagagctctaaggggattgctcccatttgcccctccggtgtccagtttttattgattatatgttgcattattaaatgttttccagggccctggtgctggaactagctctaacttacctcctgtaggtgcaattgctgatagtcagtcaggcatgttctatttttcttgctcctgattttgtctggtcatttattgcaatagtttattttt

SEQ ID NO: 5767 - DNA, 410 bp, Gossypium hirsutum
  Clone ID: GOSHI-09MAY01-C13301_5
gttgattcacgcgtccctgatagaattggaatagccaaggaagaatttcatgccattttagaggtattcttatgtctatactggctagtcgtgtttgcatacagagattgagcagggggtgacacaagcaattattcgctctgctattggctttaagagggacccatggcctaaggtttcggacaatgcaaaggaccttgtaaagaaaatgcttaatcctgatccagagcagcatcttacagtacagaaagtgcttgaacatccatggctacaaaatgccaagaaagcacccaacgttttgttgggtgagactgtgaaagctaggctcaaacaattttctataatgaacaagctgaagaagagagctctaaggggccctggtgctggaactagctctaacttacctcctg

SEQ ID NO: 5768 - DNA, 914 bp, Gossypium hirsutum
  Clone ID: GOSHI-09MAY01-C13301_4
ctttacccttctcccttcctcacgtctggaaccttttttttttctttctttttcccatttccttcctgcctcttcactaactttacccttcctcacatctgaagctctatcaacgccttcgccctcgacgctttcgccttctcaggttagggtcatattccatttttttaattattattttgatcatcttccaacagatcgacttcagatgggtggggtagtctctacaattccaacttcgatgcgccatttttttgaactcttttttggagcgattgggtttaatgtaaagactgtacaatacaacaacatcaagtttcaagtatgagatttaggtggtcagataagcttctgggcatattggagatgctatttcccaaatacgcaggcattaatttatgttggtgatgcaagtgacacaagaaattattcgctctgctattgactttaagagggacccatggcctaaggtttcggacaatgcaaaggaccttgtaaagaaaatgcttaatcctgatccaaagcagcatcttacagtacaggaagtgcttgaacatccatggctacaaaatgccaagaaagcacccaacgttctgttgggcgagactgtgaaagctagggtcaaacaattttctataatgtacaagctgaagaagagagctctaagggtgaagagaccagaccttctggttggtcttcagcagatcctacacacaggaggcattctggcctgattgcaaattctagaagtttagctaaacaaaaaggtccagtagataatgatctttctgctgctaaagatcctatggtgataattagtattattttgtattttggatttgggctatgactatttgaccaaaactgtcattatattttgtatttgaccagtagctaatgtctttctacactgc

SEQ ID NO: 5769 - DNA, 439 bp, Gossypium hirsutum
  Clone ID: GOSHI-09MAY01-C13301_3
ccacagaatagccattcctcacgtctcagtttcaacggtacccttctcccttcctcacgtctgaaacctctttttttttttctttttcccatttccttctagcctcttcactaactttacccttcctcacattgaagctctatcgatgcattcgccctctcaggttatgccatattctatttttttaattattattttgatcatcttccaacagatcggcttcagatgggtgaggtagtctctacaattccaacgattgggtttaaggtttaatgtagagctgtacaatacaagaacatcaagtttcaagtatgagatttaggtaagttaaagttaataaatcggaaatagcagctaatgtagtttatacaaatggagttcaatttaatttatcgaatcattgaaatttacccttattcttttacttaaaattgaatca

SEQ ID NO: 5770 - DNA, 567 bp, Gossypium hirsutum
  Clone ID: GOSHI-09MAY01-C13301_2
acttgccacacccgatcctgagtagccgggtcgctccgctcgttccgtaattagtggtagcaattgctaaaggaatcaacagggaagaaatgggtattgtttttactcggatgttctcctctctgttcggtaacagagaagctcgaattctcgtactgggtcttgacaatgctggcaaaactactattctctatcggcttcagatgggtgaggtagtctctacaattccaacgattgggtttaatgtagagactgtacaatacaacaacatcaagtttcaagtatgggatttaggtggtcagacaagcatcaggccatattggagatgctatttccccaatacacaagcaataatttatgttgttgattcaggtgacactgatagaattggaatagccaaggaagaatttcatgccattttagaggaggatgaaccttaaggggccattgcccctatttttgcgcacaagcaggatctacctggtgcgcttgatgctgctgccgtgaccgaggctttggagttgcacaaattaaaaaaccgtcagtgggcaatatttaaaacatgtg

SEQ ID NO: 5771 - DNA, 938 bp, Gossypium hirsutum
  Clone ID: GOSHI-09MAY01-C13301_1
cgcttgttccgagacctcttcattcgtgaaggtttccagtttgattacgtgtttgattggacaatcctaaagtatcagcaatctcagattgccaatcctcctacccgtgctcttggccctggtgctggaactagctctggcttacctcctgcaggtgcaattgctgataggcagtcaggtgaagagaccagaccttctggttggtcttcagcagatcctacacgcaggaggcattctggcctgattgcaaattctggaagtttagctaaacaaaaaagtccagtagctaatgatctttctgctgctaaagatcctatgttgtctagttctaatttcttgcgttcaagtggatcttcgaggcgagctgctgtttctagcagtcgtgatgccgcagcaatcgcagttagtgactctgaacgctctcactttcgtacaaccgatgcaactgcagggccgttccagaaaatctccagtgggcaaagaaactcgcctgtgttatcatcagagaacaagcggccatcttctggtaggaacacctcaaatataaataatgtacagtctgctgtgaggggcattgaaagcctgcattttagaaacgaagaaaggttacactattagcgtactacctactcagcctgcctgaatctcctgctgccaacaaaatctatgatggcatacttggagcagaagctgttctgtttattgtgtttttataaaaatctgagacgagacgactgaagttgagaattatacctgtaagtagtaataaagagagaatgaatgaggaagagtgggacgtccaatgatagaaattataaaacctagggcccggtacttttgtctaaatataaacagcttcccttttttaatctttgctagcttctgttaaatgtacttgtgtagatcatgtaacatattttaaaattcaaccgcaggct

SEQ ID NO: 5772 - DNA, 357 bp, Gossypium hirsutum
  unsure (1)..(357): unsure at all n locations
  Clone ID: LIB3197-019-Q1-M1-C5
cccacgcgtncgccctacccacagaatagccattcctcacgtttcagtttcaactttacccttctcccttcctcacgtctgaaacctcttcttttgttttttcgttctttttcccatttccttccagcctcttcactaattttacccttcctcacgtctgaagctccatcaacgcttcacccttgacgccttcgccctctcagcgattgggtaatatagagattgtacaatacaacaacatcaagtttcaagtatgggatttaggtggtcagacaagcatcaggtacttgtttttaagctatgtgttctcaaggaaacatcccaatacttttggtacagatgagattttcaattgat

SEQ ID NO: 5773 - DNA, 320 bp, Gossypium hirsutum
  unsure (1)..(320): unsure at all n locations
  Clone ID: LIB3189-007-P1-K1-H5
gaagtagtctctacaattccaacgattgggtttaatgtataggttgtacaatacaacaacatcaagtggcaagtatgggatttaggttgggcaaagtggaaatcctgcagctgttggggttgtattgtcaaacatgactgntgcatttgactattggcttttgggtgtggaggaaccttttgtctttgaaccctaccacaaagctctgcgaaagccaattgtctactatatggttggtcaaattatatcccgcctttgattgatttcagaaattcatatgttggcaatcttttttttttttttgaaatagaggagaagct

SEQ ID NO: 5774 - DNA, 320 bp, Gossypium hirsutum
  unsure (1)..(320): unsure at all n locations
  Clone ID: LIB3189-017-P1-K1-G1
aaggaagcaacagggaaaaaangggcaccgccnccacccggaagggccccccactgatcggcaacagagaagctcgaattctcgtactgggtcttgacaatgctggcaaaactactattctctatcggcttcagatgggtgaggtagactctacaattccaacgaattgtgtttaatgtagagactgttcaatacaacaatatcaagtttcaagtatgggatttaggtgggcagacaagcatcaggccatattggagatgctttttccccaatacatcagcaataatttatgttgatgattaagtgacactgatagaatt

SEQ ID NO: 5775 - DNA, 206 bp, Gossypium hirsutum
  Clone ID: LIB3146-022-Q1-K1-G1
cccacgcgttcgaaatgcttaatcctgatccagagcagcatcttacagtacagaaagtgcttgggcatccatggctacaaaatgccaagaaagcacccaacgttttgttgggtgagactgtgaaagctaggctcaaacaattttctataatgaagctgaaatgaacaaaaaaaaaaaaaaaaaaaaaaaatgcaaccaattctaac

SEQ ID NO: 5776 - DNA, 319 bp, Gossypium hirsutum
  Clone ID: GOSHI-09MAY01-C13291_1
ttccactcgaaattcctcagattcagaaatcagaactatcttcctctctctctctaaaattcgttgtgtttctctctctagaaagaagtttccatcgtcgattccgccatggacgcagcagcgccgccgtggctcgtctactgcggtgtcgatcccctccgcttctcttgcccgcgctctaacagagtatctattcgtactcgaaccagaccggttctcgctgtagcaaccgaccctaaacctactcgtaagactgcgtctcagtcctctccttcaaacaacaacgtgaacggctccttcaagtgctccttatctaaaa

SEQ ID NO: 5777 - DNA, 537 bp, Gossypium hirsutum
  Clone ID: GOSHI-09MAY01-C13251_1
gggaattacgagaggaaactggagttgagtctgctgaaattatcgccgaggttccgacatggttgacatatgattttccaactgcagtaaaggccaaagtgaatcgactctggggaggcgaatggcacggaaatgcgcagaaatggtttcttatgaaattaacaaaagacgagagcgaaatcaacttagcaaccggagagggagaaccggaatttgccgagtggaaatgggcaactcccgaagaagtagttgagcaggcagtggattataaaaggccaacatatgaagaagttatgaagacctttcagccatactttagtgataatggcaaagccaccaaatgtaaatcaacaaaatggtgaatgcaatggtcgtaaaagttctatgaagaatctatattaagagttggatcgtattttgttatttttatttataaagtgggtaaattaatctctgttggttagaataaagagaaaattaatttttctattaaaaaattttatttatttctacagttaaaaataggtctttgcacat

SEQ ID NO: 5778 - DNA, 717 bp, Gossypium hirsutum
  unsure (1)..(717): unsure at all n locations
  Clone ID: LIB3582-031-P1-K1-D8
cccacgcgtccgagaatatnngagaaccctaatcaacagctagataggtatttcaacagtttcaaagagttggcgtggaagtcgacctttgtcagaattaagaactgctgaggaagctgctgccaatgtatcaggcccagtttcagaggctgatggccaagtcaatgaaggagaggttcatcctgatgctgcagaacaaatgcagaagcctctaactgctggctcaacagaagcagaagagttggagaagtatgttgccattagagaagaactatataaaaaggccaaagagctcgattctaagatcattggttttgaaacagctatcagaaggccttactttcatgtgcggcccctcaatgttgctgagcttgagaactggcataactacctggactttgtagaaagagagggtgacttcaataagttaagtaacatctgctgcatcatttgccttattggctaaatcgttgggtgaagcaactttttaaaacgggaaatgtactgagactaaagcatggaccttcgatttggtttctttgaggctaagtactttaaacgcttattttttcagtggacatttttaggtggtcaaattatatgaaaggtgccttatagcatgtgccaattatcctgagtactggatacgatatgttttatgtatggaagccagtggaagcatggatcttgctaaaaatgcacttgtgcgtgctacgc

SEQ ID NO: 5779 - DNA, 399 bp, Gossypium hirsutum
  Clone ID: LIB3166-008-P1-K1-G2
cccacgcgtccgcccacgcgtccgcccacgcgttcggacttgaataaggtggtgaaattgtgtgaaaggtgcctgatagcttgtgctagttatcctgagtactggatacgatatgttttatgtatggaagccagtggaagcatggaccttgctgataatgcgcttgcacgtgctatgcaagtctttgtcaagaggcaacctgagatccatctttttgccgctcgattcaaagagcagaatggggacataccatgtgctcgagctgcatatcaacttgttcacaatgaaatttcacctggttttcttgaagcaattattaagcatgcaaatatggaacgccgtctggggaaacttgaagatgccttctctttatatgagcaagctattgccattgaaaaa

SEQ ID NO: 5780 - DNA, 697 bp, Gossypium hirsutum
  Clone ID: GOSHI-09MAY01-C8942_1
attctatatatgttctatttttttttctcattctctttgaaaaccacttcatatttagcaggatgataagaactcaaaacataaactaacttacaacaacaaaattccccaacttaggtatatttaaaaaaaaatcatgggaagaggtagggttcaattaaaaaggattgaaaacaagatcaacagacaagttactttttccaaaagaagagctggtttattgaaaaaagctcatgagatctctgttctttgtgatgctgaagttgctttaattgtcttttcccataaaggcaaactctttgagtactccactgattcctgtatggaaaagatacttgaacgctatgaaaggtattcctatgctgaaagacagcttgttgctactgaatctcaacctcagggcaactggtccatggagtataatagacttaaggcaaaggttgacctcttgcagaaaaatcacaggcactatatgggagaagatttggactcactgagtctcaaagagctacagaatttggaacaacagctgatactgctattaaacacattcgatctaaaaaaaaccatctcatctcgagtcaatctctgagcttcagagaaaggagaagggcatacagagcaaacgccatgctagcaaagcagatcaaggatagggagaaaacgtggcgcagcacagcagtcgcagtgggggcag

SEQ ID NO: 5781 - DNA, 514 bp, Gossypium hirsutum
  Clone ID: GOSHI-09MAY01-C8962_1
cccacgcgtccgcaaattcagagcttcctccaaacatggtcttagctcaagtctcagcttccctttctcttaccgttcatgatgtctcccctatcatctctccaaaaacaacccacaaactttctcgtgtacccatttccagtttttcaggaactggttccatttttgccactggttcccctttcttgataagggaatcatttaaccaaaggaaacctgtatgtaaagcaacaacatttaccattacatgtgagcaaagcaccaaggggggtagcaccaacagtttggatgtatggcttggcaggcttgctatggttggttttgcagtagccattactgttgaaatatccactggcaaaggactcttggagaattttggccttacaacacctttgcctacagtggccttagcagtgactgcgttggttggtgttttgacagctattttcatctttcaatcaacctctaaaagttcttaagatttatatgtttaatgctgggttctttttttggg

SEQ ID NO: 5782 - DNA, 554 bp, Gossypium hirsutum
  Clone ID: GOSHI-09MAY01-C8912_2
ccctcgcggccgtttaccttttagaagcaccatatgtggatcgaaagaaagattcaaatctactgggtcttaggcgaacctgtattatgttgatggaatgtcttagctttttgttaaggaatatggatatggcttctgtttctgctttaatctcagaagatgttagggggcaagcaaagttaattgctgaggaatggaaaccaaagttggatgctcttgacatggatgctagtaatggtaattcattggaagctcatgcattcctgcaacttcttgccacttttggtattgcttctgacttcaatgaggaagaactgtcaaggctgataccaagggtctctcgtcgtcgtcaaacagctgatctcttgccggtcccttggtttgtctgaaaaaatgccaggtgtaattgaagttctggtgaataatggaaggcagattgatgcggttaatctggcttttgcatttgatcttacagtgcagttcttgcctgtacctttactgaaagcctacttgaaagaggcaagaaaagcttcttcacctgttaagcctggaaa

SEQ ID NO: 5783 - DNA, 1090 bp, Gossypium hirsutum
  Clone ID: GOSHI-09MAY01-C8912_1
ggaattcgagacaaaaacaaggaaagctcgagaaatgctacagaagcgtgaagcagctgttgtagctaaagaacaatcctcattggtgaggttacaagaaaagagagatgctgctgttttttccattactaatgctttagagaagcacaggaaattatcatctgggcagcctgctgataatggagataatggtgaactctcagttgaggagaaacaacctgaggatatcaaaagttcttttgagaatggaaatctcgaggtgaaatcttatcctcaattggtaaaactatgtgaagaaatggactctgaaggactacagaagtttatttcagataatcgtaagaaccttgctgctctgaaagaggaaattccttgggcgttgaaagctgcagcaagtccagctcgcttggtcctggaatcgttggaaggattttacccttcagaagttgatggaaagaaagatgcaaacctattggggcttaggcgaacttgtattatgttgatggaatgtcttagtgtcttgctttctaatctggatatggtttctgttttggctttgatctctgaagatattaaggaacaagcaaagctaattgctgaggaatggaaaccaaagctggatgctcttgacatggatgctagtaacggtaactcattggaagctcatgcttttctgcaacttatcgatacatttggtattgcttctggtttcaacgaagaagaactttcaaggctgataccaatggtctctcgtcggcgacaagcagctgatctctgccgttcccttggtttatctgagaaaatgccaggtgtaattgaagttctggtgaaaaatggaaggcagattgatgcagttaacctggcttttgcattcgagctaacagagcagttttcacctgtgccattactgaaatcctacttgaaggaggctagaaaagcttcttcacctgtaaagcctggaaatgcctctcccactgcccagactgaagttagtgaacgggaattgactgctcttaaggctgtgattaagtgcattgaagaacataatctggaggaagcaataccctgtcgatccacttcagaaacgagt

SEQ ID NO: 5784 - DNA, 843 bp, Gossypium hirsutum
  Clone ID: GOSHI-09MAY01-C8892_2
atacaaactaccacatggatctaatagctgggctagcaaacatgagggccaggaactacagggttcctgaggtggataagctgaaagcccggtcgcgtgcggggagaatcatcccagcaagtgctacctccacagccatggccaccggtcttggctgcctagagctttacaaggctcttgatggaggccacaaggtagaggactaccgcaacacttttgcaaaccttgcactgcctctgttctccatggctgagccagttccacccaaagtcatcaaacacggtgacatgagctggaccggttgggaccgatggagcccgagagacaacccaactttgagagaactcatccaatggctgaaggataagggcttgaatgcctacagcatatcttacggaagttgcttgctgtataatagtatgttccctcggcacagggagcgaatggacaagaaggtggtagatctagcccgggaagtggcaaaggcagaactgcctccgaatagaaagcatcttgatgtggtcgtggcttgtgaggacgacgacgacaatgatgtcgacattcctcaggtttccatctacttcagctaaggcctaaggttgtttttctcatctctcgttccctgctgcttggggttgtgatctaaaagcacgaaacttttacagtgttattaaaatggatatttcttttttaaagtaaattcatcgtaacttttaagtttccaatatgatgttcttccctaattgtttggtcctcatcttgttttgatttgctgttcatcccgtgtaataatcttcttcatccagtggaccgattcccattaaatgaaaaaaaaaaaaaaac

SEQ ID NO: 5785 - DNA, 1005 bp, Gossypium hirsutum
  Clone ID: GOSHI-09MAY01-C8892_1
gcatattccagttgttgtgtgtgcgcacagtagaaccaaagccatggctgggattaccaccagcttccctttcaggaccatcccaactcgacccaccaagaccatacctttacttctctcttccctccaatccaagctctttggtatccatgtccgcaaccctaacagtttctcctctcctcttcactgctctgctactataaatgcccgttacggtgctgattctcggttctcgcctcccggtcgttctaagaagaatgatgaagaccaggcacttgatttatctgccatcaggtcggattctgtcagacttattgatgaggagcaaagtatgattgggatagtctctaaaagccaggctattcaaatggctgaagatgcagggctcgatttggtgatattatcccctgatgcagatcctcccgttgtcagaataatggattataataagtatagatatgaacagcaaaagaagaagaaagtacagcagaagaaaactaatcgcatggatttgaaggaactgaaaatgggttataacattgatcaacatgattattctgttcgtttgaaagctgcaaggaagtttctgaatgatggtgataaggttaaggtcatagtgaacttgaaaggtcgagaaaacgaatttagaaatatggctatggaactcatcaggcgttttcagaatgacgttggggagcttgcaactgaggaaagcaagaacttcaaagacaggaatatattcatagttttggttccaaataaggctgttgtacaaaaagctcaacaagatcccggaaagaaaaaagataaaccgaccaaaaatgaagtctcagctggtgtctgaatatggaaatttggtggcatatcaatcaggcagggagattaagttcttctaccatggggtggccacgtccttgaaagtctttgtataatgtatagtatattagtctgtcacaatttgtattgaatattggttctatttaataacagaagtaacttttcttt

SEQ ID NO: 5786 - DNA, 352 bp, Gossypium hirsutum
  unsure (1)..(352): unsure at all n locations
  Clone ID: LIB3135-012-Q1-K1-F2
ggaggccacaaggtagaggactaccgcaacacttttgcaaaccttgcactgcctctgttctccatggctgagccagttctacccaaagtcatcaaacacggtgacatgagctggaccggttgggaccgatggatcctgagagacaacccaactttgagagaactcatccaatggctgaaggataagggcttgaatgcctacagcatatcaatcaggcagggagattaagttcttctaccatggggtggccacgtccttgaaagtctttgtataatgtatagtatattagtctgtcacaatttgtattgaatattgcgtctatttaataacagaagtnaccttttctttattc

SEQ ID NO: 5787 - DNA, 327 bp, Gossypium hirsutum
  unsure (1)..(327): unsure at all n locations
  Clone ID: LIB3166-007-P1-K1-E5
cccgcgnccgccacgcgtccggccttgtgaggactactacttcttttatgttacattcctaggtttggctgtctttactaaggcctaagttgtttttctcatctctcattccctgctgcttggggttgtgatctaaaagcacaaaacttttacagtgttattaaaatggatatttctttttttaaagtaaattcatcgttacttttaagtttccaatttgatgttcttccctaattttttggccctcatcttgttttgattcgctgttcatcatcttttatatttcttctttatccattttatagattccctattttaaaaataaaa

SEQ ID NO: 5788 - DNA, 940 bp, Gossypium hirsutum
  Clone ID: GOSHI-09MAY01-C8842_1
tggaagtgtgggttttcctggtagttcgccatcacatcctgttgaaattgcttcccacaacattttttctcatgttggtggcatggatttgatgaaaaatggtggggtacactctcctcagcagatgtcccacctttaccctggcaggaaccctatgatttcaatgccgacgtctcttgattctcctaatgaacgtgttagaagcttctcacaccgtagaaatgaactgaattctagtaatgctgataagaaacaatatgaacttgacattgaccgcatcatacgtggggatgacagcagaacaacacttatgattaaaaacatacccaacaagtacacttcaaagatgcttctggcagccattgatgaacattgtcgaggaacttatgattttatttatttgccaattgacttcaagaacaaatgcaatgtgggctatgcgttcatcaacatgattgatccgcaacagatcattcctttccataaggcatttgatggcaaaaaatgggagaagttcaacagtgaaaaggtggcgactcttgcttatgctaggatccaaggaaaggctgctcttattgctcatttccagaattcaagcttaatgaatgaggataaacgttgccgccctattctctttcatactgatggcccaaatgccggtgatcaggagccctttcctatgggtaccaatattcgatcaaggccagggagacctcgaacatctggcactgaggagaaccaccgccaaagtagttcttcaactttagctaacggggaggaatattccaatggggcagaatcattgggttcttcgaaggattctgattgagcagtctgcttatccagctctaactttaaaaaaccctttcagagtactgaaacttttatctacccgactctgtatttgagggtggcttgatgacttcttttttttcttttt

SEQ ID NO: 5789 - DNA, 722 bp, Gossypium hirsutum
  Clone ID: GOSHI-09MAY01-C8822_1
gagatcaataatattgatttttatttttctcacttttatgaattacttgcagatgctccagatcccccttcttctttctctgggaaaattatagagtgttcttgggatcctgatgaacatgtgttgggctaagtcggatcagggcagataagtcgactcccaatgatatcaatacttttaggaaggttttgctaagtatcagggataacatcacagaggaaatcttattaaatgagataaatgagattattcagttgcccatgtatgctgatagaataaggattgacagcaaggcacgcatgcatgcaaatgcagcacgacgcaggtaaccgaacagcatgctggctggtgtgtagttgattcgattgaggtattggatgcttgggtgtgcctttgattgcatgcgtggtccaagtttctgttggttgcaacttgagagttatgtgcatacctaagctggtgagggcatcatgtaattagctatctctcctgttagtcttgtagggtgagttgtatgatcctgggtggtacattagttgaatagttgggccacattcaggttggaaactatttttcttacagttcgttcagatgaagaggattaaattagggtaaccaatgtatattagtgtatttctttttctagtttctcccctgtactggtgatcccttgagtaatattaaaagtagccattttcctgtcaaaaaaaaaaaaaaaaaaa

SEQ ID NO: 5790 - DNA, 1412 bp, Gossypium hirsutum
  Clone ID: GOSHI-09MAY01-C8592_1
agtaaatacatactttactgtcaacccttacagcaaggccttagaaaatgcaagggacatcgaatttgatcgtgccgatattgaggggaatacacaaaatggaccagctgtgagattaccttttgcatccctatttgatacccttggcatgtgcttggctgatgagactgctgtccttttactttactcattggtgcaagggaactctgactttttggagtatgtactactgcgaacagatttggatacattgttgatgcccatcttggaaacactatacagtgcttcgaggaggacatcaaatcaaatatacatgttgctgattatactcctcatacttagtcaagactcttcattcaatgctagcattcacaagatgatactgcctggtgttccatggtataaagagcatctccttcatcagacatcacttggttccctgatggtcataattttgataaggactgtccagtataacttgtcaaagttgcgggatgtctatcttcatactacttgtctagcaactttggcaaatatggcacctcatgtccatcgtttgagtgcatatgcttcccagagacttgtcagcctcttctatatgctttcacgcaagtacaacaaattggtagagctaagggacgataaactgcaaaccaaagccatctcaacaggggatggccttgtagaagatatgtcagcagaattgcaaatttataccgactttttgagaattgtccttgaaatattaaatgcgattttgacatatgcactgccacggaatcctgaggttgtctatgccattatgcacagacaggaagtttttcagccattcaagagccatcctcgctttgctgagctgcttgagaatatttataatgtattagatttttttaacagtcgtatggatgcccaaagaatggatggtgaatggtctgtagaaaaagtcctcctgttcataattaataattgtcgatcttggcgcggtgaagggatgaagatgttcactcagttgcacttctcgtatgaacaagagagtcatcccgaggagttctttattccatacgtttggcaactcgtcctatcccgctgtggattcagttttaacgcagatgctataactttgttccccgtcggtatgcatgccaataaagaaatttactatgatgaaatgaatacgaaccaaaacggggagttgaatgaacaaagggttctgtttgatccgtaaaaagaaaagaaaaaaaaggcattttataccattagcttgtgcttatgcatgtacgtttgtggtgtattctgtaaatacataaaaaatgataaaaatagcagaaaatgtattcttggtaattcttttctggttatatatgtttgaaacacttgagaggggcccttttttgaagtagattaatttttaa

SEQ ID NO: 5791 - DNA, 439 bp, Gossypium hirsutum
  Clone ID: GOSHI-09MAY01-C8582_2
atgcaatcgaatagaaataatatcctctcatttgatggagattatgggacgcagggaatggctacatcctcaagagcactgaggaccccaagagatagggcaagaacaatcacatcgttgcccgtatctccttgttcaagccccttaagatacggtccagtacacaggagttgttttctttctcctcctcatccagcttatcagtttgtaggacagagtggtcataacttaggcgacttctctgggaacacatcaagaccaaacccgagatacactcatgatccttggtttgaagcgccacaactaaaagtacaaacaacaggcacctcgccaagaacaagacctatttgagattattgtaaatagaagtaggatagagtatcatcaatgttccactccctattttggtaaatctggcaaattacattttaacttaaat

SEQ ID NO: 5792 - DNA, 968 bp, Gossypium hirsutum
  Clone ID: GOSHI-09MAY01-C8582_1
gggacgcatggaatggctacaacctcaagagcactgaggaccccaaggtactaacaatctgacatataatgtttcatttttctctacttggcatacatgcatcaaagttcttcagtaagttgcctatattgtatttgcgcacagagataatgcaagaacaatcacatcgttgcccgtatctccttgttcaagccccttatgctgcgctcctgtactcaccccttgttctccccctcctcctcatccagcttatcagtttgtaggacagagtggtcataacttaggcgacttctctgggaacacatcaagaccaaacccgagatacactcatgatccttggtttgaagcgccacaactaaaagtacaaacaacaggcacctcgccaagaacaagacctatttgagattattgtaaatagaagtaggatagagtgcctccgatgttccactccctattttggtaaatctggcaaattacattttaacttaaaaggattctcggaatggtgaatatatgggggacggtgggacttttgttgcatgggaaaagatgaagctggtagaatgtattttatattgtaacaacatatatattgttgattatttttggttgtatatggaaggtgatgactttcatttgtaacgttgacgatgttgtatactactagttcatcaaagtagtcaaataccattaccagtcaaaacacaaaagacacagattgggagcttcactttgaagcaggtatgaatcgaggggtgagggagtggggcatgtattgtgcctttgcacggagacatgcttcgtaaatgatggagaaaagaggggtgatcatgtctgcaaaaagatgatcaacaagaatgggatttgccttgtgtgacgtagagggggaaaacagggtcgtactttgatgtctgcaaatgcacgttggggaccgacatgcgacttatctagtcattttgtttgtcacg

SEQ ID NO: 5793 - DNA, 1232 bp, Gossypium hirsutum
  Clone ID: GOSHI-09MAY01-C8502_1
tcctaatttattttacaactgtggttttatgctgtagaatgggtatttacgtttgatctttgcattagaatcatcaaataagggagagtccgatggggatataagccgtgagaggttagataggttatcaaggatgactgaaatagaagatcttcagggaccaaatactcttccactagcaccgctttgcattaaggtgactcctgtgatcaagtggttttaatagatgcttttctgtagataccttatttgtgtgtgcccaaaaccaggaccctcgggattattttgactctcaacaagctaatgcacttagaacttctggagatgcacttggtggaattgaacaaataaaatgcggtttgagcacccaggaggtgtatggttctttaagggagtccatctcatcgattaaagctatggggttgaaggagcctattgtcaaacctgaagttgctcatcaagtttttgatgctttgaccaatagtatctccaacaccaaatatcatattgggaaaaatcctcaagagagtgttctggacagacttccgaggaaaactaaggaggagctattgcatcattggacatcaatccttgaactactcaaacatttttgggcatcatatcctatcaccaccacttacctctatgtgaaggtaaacagattaaaggatgccatgtcaaatatctatccacagctagaggctctagatgctgctattcaacattatgaagcaagcatgcagaagagatccgcacaaagtggagagagaccaaacggatatgtgtagggaaacattactgttgtcacaatacatgtcttcttcttgcatacacctgtataactgcacccccaatgtggtgggtgttttgccgtctaggctctcaaaaagagccaaagatcaattttgttacggatggggttttaattttgcccctttgacgtcaaaacaaacatcacagttacatatgcaacatttttcggaaattactcgatgagaagagccttgtgcatcttttgtggcaggatactctcatcaagcctgatttctttcgatttgtattgcaataactgattagggttaagtattttggtcttctctagctatgagtaatcctttaagctttaaattctagctggattgagctaaacatttaagacgaaagttccatcaaacaagtgaattgtttttgagtcttgagttttttaactttccaggaatttcttatattct

SEQ ID NO: 5794 - DNA, 654 bp, Gossypium hirsutum
  Clone ID: GOSHI-09MAY01-C8482_1
caaaattggtccgtcagtcgggtcagttcatgttagtgttgttcagtcgggtccgatagtgatttgcaaaaccacttgcagtttagaaagagctccgatcgatctcactcaacagttaggtcaatagccgcttttgcaaatcgcctaaaccaagccaaaaaagcccccaaaactcgacaaggccatggtagttgctagttccaacccccacaacaaggagatgcaaatccgtagaagaataagcaacatattcaataaaagagaagaggattttccatcactgagagaatacaatgattacttggaagaagtggaagacatgatttttaaattgattgaaggaatagatgttcaagctattgagggagaaaattaccaattatcagcaagaaaatgctgagcagattatgatcaatcaagctcgtaaggctgaagatttagctgctgcaatggcagcaagcaaggggatcccagtacaggccgatactgatgggaactcacaagcagggtttgtagctggtacccaaggtcaatatgcaccgacagttgctggaggacagccacgaccaacaggcatggcaccacaaccggtaccacttgctggtgggctggacatgcatggctatgctcttgatgatgaggaaatgatgaggc

SEQ ID NO: 5795 - DNA, 553 bp, Gossypium hirsutum
  Clone ID: GOSHI-09MAY01-C8462_1
cccacgcgtccgcttttctgggcaaggaaaggaaataattaattccctgaaaaaagttaagaaatttttggatcaatctgagattttctatttctttttctttgcagaaataaactttcccggctgattctcacgctaattttttttttcaaatttcattctcttattttattttattttatttcatattttgggagagggagaacgatcagcgaaaatgaatatattcagattagcaggggacatgacccatttgtttagtgttcttgctttgcttcttaagatccacacaatcaagtcttgtgctggcatttcactgaagactcaggaactctatgctattgtctttgctactcgttacttggacatattcactaatcatatctcgccttataacacaatcatgaagctaatattcctgggcagctctttctcaattggatggtacatgcggtataacaaaatacaccgtagatcttatgataaggaccaggatacatttcgacattatatccttatactgccttgcctgattcttgcccttcttataaac

SEQ ID NO: 5796 - DNA, 959 bp, Gossypium hirsutum
  Clone ID: GOSHI-09MAY01-C8772_1
ctttgtttctatcttgcattaaagccctggattgtgcagaaacaagaaaacaattttctatgaaaggcaagtggttgtgaactgtctctttgtgtggagatactgttgcttcttttcaatggtttagcaacttgcaatggggagattggctttttggaagactaaggttatgcatcgaagaaataagatattgcgttgattgaagcgatcttatttaattctatttgattcatgatgggtaaggaaaacttgcctcaaccagttaatggaggtgtcagcaatgatagttgctcaaatgctgacattgatgattctggaacttattcgcggtatagtctagacaaagaggcaggtttgcctacttgtcgtgtgtgccagtgttcagaatctgacaaaaggggggatgctgctttaggatttttgggcatcactcctcccttagcggaagcagttaaaagcaaaggagaagctaagcctgataccgaaggagttccaccagatgttgaaagtgatgagtctcattctaagagtcttccgagagaatctgggtttgttgagttcataagccctgaaggagaggttttcatctgtagtactgagttagaaatgggctcctgtcaacatcaggatgcattaattgaacttggttgttcttgcaaaagtgatcttgctctagtgcattatgcttgtgctctcaaatggtttgttagtcatggatctactgtttgtgagatctgtggaaatcctgcaaaaactatcaggacttctgattttaagaaagttgtagtttctttgaaagactatgaagcattgagagaaaggactgccagtggtgatcctaatcctgcccaaattcattcaagttcaggtgtaaaccctgatgctgttgctgctatttggaggcaacgactaagtgaagattcattgtggtcagtccacatggttataacaacaacaat

SEQ ID NO: 5797 - DNA, 1054 bp, Gossypium hirsutum
  Clone ID: GOSHI-09MAY01-C8702_1
agaagctgcaaggaagcgagctgctaagtctggcaagatacttgaagtgcaagaaacattagagcaacgtgttgtggaagctgccatgcctactgaagccttaagatttttgtttgcaacagaaactgaacctactgctgacggaggaaaggataagagcaattcctctagtgtgacacctggcgagaagcgcaagcatgatgctatagagtcaaaggcagaatctggggctacagatgaacaagtggttctttggcgtgctaatattgatgagtttatacggcatcttaggcataaggcttgcattgagaatgtgagggcgcgcttcgatgatggagctgttattgtctttggtgcaatgctggaagcaactagaagtgcagagaagaaagttaaaacagagaattcagttccagtgtcactcagttccatttacgaagaggtgataaagagtgaagaaggtcgtaatataacctttgatcgtgttagagcctcccttgttcagttgagttgcccaccctttgtaaaagcagcaaatgagtcgtacagtgttgatttcaagaaaataattgaactagctcagcatgaggaggtggaatctattgtgttgaaaagatatggaagggatgcatatagaatgttccggctactatcgaacagtggtcacctacttgaaaccgataaggttgcagatgccacatttgttgaaaagaaggagacgccaataattctttataaactgtggaaggatgattatttgcaattggagaaattacagataggagttaaacaaacaccgttccagttgtggaaggtgaacaagagcactctgaaggtgcatgttctaaatgagatgttccatgctgcctttaatttgagccaacgagtggcattcgagttggaacaagaaaaggagctttccaatgtcctgcaagataagcgtgttaaccgactaagaaaacgcttactcttggaatcatcacaaataaagcttgatgatgccatcatgcttttccatgacttctgacggagccataccatttcctggggttag

SEQ ID NO: 5798 - DNA, 746 bp, Gossypium hirsutum
  Clone ID: GOSHI-09MAY01-C8732_1
ctttcctgcatccgggttcccactgtggaaattgttgtgtttaatcatttgagagctatgaagtgttttacattccccaattggtataaaaaagatgaaccaaagacccccagatcactttcaaaccggtctctgaactccatgtgcactgatcgcgaaatagcgaggtctggatctgaattgaactctcagaatgtctcaggcgtgagcagtgagtcaatggggcggtcctattttcctagcatgtctcaaagacctagcaatctcagagtgttcacagtttctgagcttaaatctgcaaccaagaactttagccgctctttcatgctcggagagggtggatttggctgtgtttacaagggttctctcaagagtcctgaagatccgtctgaaaagattgaagtagcagtgaaacagcttggtaaaagggggttgcagggccacaaggagtgggtgactgaagtaaatgtccttggtgtggttgagcatccgaatcttgtgaagctagttggttactgtgctgaagacgatgaaagaggaatccaacggcttttgatatatgaatatatgcctaatagaagtgtggaaaaccatttatctgtgcggtcagaaacaactctttcctgggcaatgagatttgaaaatagcccaagatgctgctcgtgggttagcatacctacatgaaggaatggagttccagatcatctttagggattttaaatcatcaaatatccttctagatgagc

SEQ ID NO: 5799 - DNA, 1698 bp, Gossypium hirsutum
  Clone ID: GOSHI-09MAY01-C8682_1
cccccgcgtccgatttcctttcaattttcctcccctttcttctcatttccttccttcaatggctaacgttctacagacttctttccttccttctacttcttcccttcgccggccctccatttccggttccaaagggaagtctcaatcccttcaagtgaaggccaagatacgagagattttcatgcccgcactcagctctacaatgacggaaggtaagatcgtgtcttggatgaagtcggaaggggacaagttgtctaaaggggagagcgttgttgttgtggaatccgacaaggctgatatggacgtcgagagtttccacgagggattcctcgccgctattatggtggaggaaggcggcgttgctcccgtcggttctgcaatcgccctcttggctgagactgaagacgagatcgctgaagccaaagctaaatcgcagtcttcttcgaatagcactcctcaggtagtagaagaaaagccaaagcaaattgaagaggcggctccggatgttccggctgctgctgctgctccatcagttccggtcgcaaaggctgtaactttggggtccgccgtacatccggcttcggaaggagggaagaggatagttgcctcgccgtatgccaagaaattggctaaggagttgaaggtggatttgggaacagtggtgggggagtggaccattggggaggattgtggctaaggacgtcgaggcagctgcggtagcagtaccggtggctgcttctccggcgaagccagatcctgtggctcctgggattgaattgggaacagtggttccttttaccacaatgcagggtgctgtgagtaggaatatggtcgagagcttgtcagtgcctacgttccgagttgggtacaccatcaccacaaatgcacttgatgccttgtacaaaaagatcaagtccaagggtgtaacaatgacagcattgcttgcaaaggcaactgcacttgcattggttcaacatccagtggtgaactcctgctgtagggatggcaacagctttacatacaatagtagcatcaatattgctgttgctgtagctatagatggagggttgattacaccggttctacaagatgctgataaggttgacatttatacattgtcaagaaagtggaaagagttggttgataaggcacgggccaagcaactgcaacctcatgaatataatacaggtactttcaccctgtctaaccttgggatgtttggtgtggaccggtttgatgccattctgccacctggaactggagcaattatggcggttggagcttctcagcccaccgtggtggctagcaaggatggccgcattggcatgaagaaccaaatgcaggtaaatgtgacggccgatcaccgagtgatctatggtgctgatctagctgcattcttgcaaacactggctaagattgtggaggatcctaaagatcttaccttctagtgtgggacaatttgtgtttgtagcatgctccctgtttttgaaatcactagagatgaaaatttttaggcgttatccagttgagaacaagacacatttctatacttactcgactttatccactcctttttttttctttacttcaccctttctattattaattataaagtttccgtttgttttctgatcgtatttggatcattattcggttcaatggatgattacttacgcaagcaatcaaattcaattattt

SEQ ID NO: 5800 - DNA, 858 bp, Gossypium hirsutum
  Clone ID: GOSHI-09MAY01-C8652_1
aactttttagtgcaaaacgccttgagtcatacgagtatatccgaagagaagaaatgagagttgtgctaaaagggttggacgaatcattccgtgtcccaatttgtttgaaagatcgtctttcagatttgagtcttaatgtaataagtaggatggtgttcgggaaaaagtatacagaggggactggtgaaaatgagattgtgaccccgaaggagttcaaggagatgcttgatgagttattcctacttaacggagtattggatattggggactcgattccctcgctaagggtcttggatttgcaaggcaatattaagagaatgaaggccttgagcaagaagttcgacaaattcttggagcatgttttggatgaacataacgctaggcgaagagatgttaaagattatgttgccaaggatatggtggatgtgcttttgcaacttgctgatgatcccaatcttgatgtcaagcttgaaaggcatggagtcaaggcatttagtcaggacttgatagctggagggaccgagagttcagcagtgactgtggaatgggcaatttcagagatgttgaagaagccagaaatatttgccaaggctacagaagaactagacagggtaattggcagggaaagatgggtagaagaaagggacattgtgaacctaccttacatcgactcaattgccaaagagactatgcgtttgcaccctgtggcacccatgctagtgcctcgcatgacccgtgaagattgtcaagtagatggttacgacattctcaagggcactagagctcttggtaaatgtgtggacatttgggagagaccccacggtttgggataaccccaatgaatttttccctgagaga

SEQ ID NO: 5801 - DNA, 604 bp, Gossypium hirsutum
  Clone ID: GOSHI-09MAY01-C8642_1
ctcatttttctgtcatgtaatcggatgattgtaaattggaacggaaggaaaaaataaaaaatcatttcgtttctgcgagtttgtttgaattaatagctaaaaggaaaaacaaacaaaattctattgcaataggaaattactgtaaatcatcaaactttggaagcagaattagggtttctatttttgttgctctgtttctctatccattgtatttcgctaatggaagctgatgtatccatttccttctcaaaccctaacagaaacatatctctttctttcgactgagatttaggattatttttggatttaaaaaaataatttttggatgaagatgaatggtgttgggggattatggttatggtttctctgtttactgggtgtttgtgggatgacatcagctagtgtggtgctgattgggaacaacactactctctcttcgacgatgttgagctaatttcgttgttgtgggtggtacttttcagctccggcattgagggacaggaaatgtgggatatatattggcaaacctctgagcctgttcgattgagtataagtgaaaaggttccatttacttcccttggctgttataagaaggcatttgaga

SEQ ID NO: 5802 - DNA, 525 bp, Gossypium hirsutum
  Clone ID: GOSHI-09MAY01-C8152_1
tttggattcaacgattctcttccctttcatgaccacgagtatgtctcgtagctgctctcactgtggaaacagcggccacaactctcgtacgtgcggtgaagttgttgccggtgatgcaagcaatggcagcggtggaagtggaggaggagaagagaagggtatcatgttattcggtgttcgagtcatggaagggtcgttcaggaaaagtgttagcatgaataatctttctcagttcgatcaacctcaggtttctaacgccgatgctggctatgcttctgatgacgttcttcatggatctggaataggaagaagccgtgaacgcaagagaggtgtaccatggacggaagaggaacataaattatttttattggggttgcaaaaagtagggaaaggggattggagaggaatttcaagaaattgtgtgaagacacgtacaccgacccatgtggctagtcacgctcaaaagtattttcttaggcgaaataacttgaatcgaggccgtcagatctagttttatgattaaca

SEQ ID NO: 5803 - DNA, 533 bp, Gossypium hirsutum
  Clone ID: GOSHI-09MAY01-C8162_1
tcggctttcaaatcgcctctctttcatccaacttcatcgttcagtcgttctcaaggggcattccctttcttcagcttccaaacacaataccttaccctcaacaaaccacctaccatcttacgctgctctaactcttccaccatttcttccaccactaatggtaataacaacaatatggcagggcttccggtgaagaagaagaggaaacggtataggaaacagtaccctggagagaatgagggcattactgaagagatgagattcgttgccatgggacttcgtaatattaaaggtaaaaaggtcagttccgattctgtttctgactctgaaaccgacactgaaaataccccaagcgatcaagagaaagaagatgattctgaaactgtgaaaagcggtgaaaatggtggtgatggagaagcagagacttggagtcccactatggaaggatttcttaagtacttggttgatagcaaattcgtcttcaacactattgagcgcatcattgatgaatccgatgatgttgcttatgccta

SEQ ID NO: 5804 - DNA, 610 bp, Gossypium hirsutum
  Clone ID: GOSHI-09MAY01-C8132_5
ttcccggtccaccacgcgtccgcatttttaagccgaaaatcacagctttggaagcagatttctagggtttctttcgctagcagccgaaccaccagggttgtggtgatcaaccagcatgcacacagtacccatcctccccgttgaaggcgctcgaccatgcctagagaaatttggtaagtattttcttccccccgtttttattatttttttaaaaaaaaacttcaaattctcactcttttttctttaaaaacgaagataggttcatagagcaaagattcatcactacttgttccctcgcctttacctcagtatttctgaagtattcgggctttcattgggatcgactcacatactaaaaaaaattccgaaccaaatgaaaaaaataaactaaaaaaaagaattcataagagaggacaaaagaaaaggcttgaaatcacctttgctaatcttaaattgctttttctctattctctgtgcgtgtgtacagatacagtgtacgtaaaaatttgtggattacatcacttgcttttatagccagattttcaaaataaataaaatcttaaaaatcctattttcctgctgtcatttgctgtgaaatctgttattggct

SEQ ID NO: 5805 - DNA, 1016 bp, Gossypium hirsutum
  Clone ID: GOSHI-09MAY01-C8132_3
cccggttcgacccagcgttcgttttttaagccgaaaacacagccttggaagcaaatttctagggtttcttttgctagcagccgaaccaccattattttggtgatcaacagcatgcagatagaactcatcttcctcgttgaaggcattcgaccatgcctagagaaatttggtaagtattttcttccctccctttttattgtgtaaaaaaaaaaaacttcaaacttcacattattttaaaaaaaaaaaaaaaaacgaagataggttcatagagcaaagattcaacactatttgttccctcgccttcacctcagtatttttgaagtattcgggctttcattgggattgactcacatacaaaaaaaaatccgaaccaaatgaaaagaaaaataaaaataaaaataaaaaaaataaactaaaaaagaaatcataagagaggataaaaaaaaaggcttgaaatcacctttgctgatttaaaattgctatttctctattctctgtgcgtgtgtacagatatcgtggtcctcctttacatttgactatcctcagctttatagccgagaaaagaaaagaaaatcaaaaatacaaattttcttgctgttgtgtttgtgctgttctttttgtttgtctctactgctgttgctttttgttttgcaggtactggtctgttggcatgcgcacggggtatgggtctaggctggagtggcatgggggtacagaggtggtacggagaccgaggatgctgaggtccaaacacgtgctgctagggcttcagtcttggtttagtgttctgggcctatcgggccttgtaaatttgggccaagttttaaaattgggtttgggtctgatagggttatttaatggactgaggtttatttatttatttattgtatatttaggtttctagtgggcccgggcaaatttggcccactacaatacatattcacttgtatatggacatggaaattagctcatgttggtgtaggttatgacctaccaaattgtgcatgttatgttcc

SEQ ID NO: 5806 - DNA, 539 bp, Gossypium hirsutum
  Clone ID: GOSHI-09MAY01-C8132_2
gaaaaacacagcctgggatctaagtttcctgggtttctttttagcagccgaatcaccattattttggtggccatctgcatgcaaaaagcacccgctttccccgttgaagacacttgaacaagttttaaaagggtttaccgaagagaaaaaagaaagacaaaatggaaaataaattccaaatataattcccgttcccttccatttgttgttctgccatttttgtttgtatctgccgttatggggtggtgtttgcgcgtgtatgagagcatggcgctgctgagggtacagaggcggtacggaggccgaggatgctgaggtgcaaacacgtgctgctagggcttcagtctttgtttaatgttctgggcctaccgggccttgtaaatttgggccaagttttaaaattgggtttgggtctgatagggttatttaatggactgaggtttatttatttatttatttattgtatatttgggtttctaatgggcccgggcaaatttgacccactacagatataatttaaataaacaaatttaagtgtt

SEQ ID NO: 5807 - DNA, 877 bp, Gossypium hirsutum
  Clone ID: GOSHI-09MAY01-C8132_1
gtcgaccctgcccccccttttctttgtttatcagtcgaatcccagggtccctttaggctccgatctatcaccatgacaggggactaaaccatccgagccttggagtcccttttttagccttaagaccccctcgacagttcgattcctgcgaagaggaagggatctcgcggcgtgctttcaaggtaaggtctcctcttctttttggtttgatttccctttttaaaaaaaaaacaaaagcgaatggctaaaaggaaacgatcagtcgaagaactcagaagaaactcgagaagaaatgaccttttaggattttaatcgcctttttgtattgcgtattgagccttttgtattctctcttaacgtaaacttttacaattgattctcttcaggctttatagccaagagaagaagagaaaaaaaaataaaatatacaatttttccatttttttctgtctgttattttcttgtatgcatttgctgctgtggtttgtccctttcttcgcaggtacaggtgtgcgctcgggtacggggccgtgtgctggcgcgggcatgactgctgggcggtacggaggccagggctgaagcttggctggttgcggcgcatgggaaagaaacctagggttctaaaatttctgggccatttgggccaatgtgattttgggtctcgggtttatttggggattgggtattggttgtggggcattagttattgggtctaggtattagtgttttaatttgggtcaaagcctgttaatagactgttataaggtttaagttctggtcttgtaattgggctttgattggttattggcccgtgaactattgtaattatttggactttggactgttaatatttatatttaattattatttatttaac

SEQ ID NO: 5808 - DNA, 545 bp, Gossypium hirsutum
  unsure (1)..(545): unsure at all n locations
  Clone ID: LIB3828-001-Q1-K6-A5
cggtcgcgtgggcgnaaaacacaaccttaaaatagatttctagggtttttttgttagcagccgaaccaccatcgttttggtgatcaatcaacatgcaaacagtacccatcctccctgttgaaggcgctcgaccatgcttagagaaaattagctcagttgtacggagaagatgacccggtgacatggacgccacacactgggatctcgcgtgggaaaccgtccctctggtgcccttccagtgtattccaggagctgctactaaaattctctttcttttgggctctttcgggtttgggctagatttaggatatgagtttattagaattgggttttaggacttattgtgtcatgggttattttggtaattgggttgggtctatattaaaggattttgggtttaagttattttggcccaaatatttgtaactggacataggacttctgaatttgaattctttatttatgggtgttttttattcaatttatttgtttggcctattttaatattttaaaagggcctgggcaaaaaaaaaaaaaaaaaagag

SEQ ID NO: 5809 - DNA, 362 bp, Gossypium hirsutum
  Clone ID: LIB3165-025-P1-K1-H12
cccactcgttcgcccactcgttcgcgtactctttttttttggccgaaaatcacaaccttagaattagatttctagggtttttttgttagcaacctaaccaccattgttttggtgatcaattaacatgcaaacagtacccattcttcctgttgaaggcgctcgaccatgcttagagaaaattagtaagtattttcttcctcccgtttttatgttttttaaaaaaaaaaactttaaatcttacattattttctttaaaaacgaaaattggttcataaagcaaagaatcattacttcttgttttctcgcctttacctcaaaatttttgaagttttcgggcttttattgtgttcatatcacatact

SEQ ID NO: 5810 - DNA, 248 bp, Gossypium hirsutum
  Clone ID: LIB3148-030-Q1-K1-A7
gcaaatttctagggtttcttttgctgccacccaaccaccattgttttggtgatcaagagcattcaaacagtacccatcttcctcgttgaaggcgttcgaccatgcctagagaaatttggtacagagtttgttggcatgcgtacgggtagtggaggtatggggctgtttcttggttgtggcgcattagttattgggtctaggtattagtgttttaatttgggtcaaagcctgttaatagaccgttatat

SEQ ID NO: 5811 - DNA, 954 bp, Gossypium hirsutum
  Clone ID: GOSHI-09MAY01-C8122_1
ggcccctagaatcctccataactgttttctagtttccatccaagggccaccctctcagctgggcctaacactaatcctaacaccaatttcctctcccccaccgatcaatctaatcacgaccgggaatctatccctcccatgcaacatcacccttcttccgaaacggactccgatgctaaccctaattttcactccccacttttgaacccccccgattcggttcctccagccgtggctccgtcgtctcttctccacctctccttcaaccaggatcatggctgctttgccgccggcactgaccatggcttccgaatctacaattgcgatccatttcgcgagatctttcgccgagacttcgatcgcggtggcggtatcggggttgttgagatgctttttcggtgtaatattttggctcttgttggtggtggacccgatccgcagtacccgcctaataaggttatgatctgggacgatcaccaaagccggtgcatcagcgagctttcgtttcgttcggaagtgagatcggttcggcttcggagggaccgaatcatagtcgttttggaacagaaaattttcgtttacaattttgtggatttaaagctcctacaccagattgagaccatcgcgaatccaaaaggactctgcgcggtgtctcagggagcagcatcattggttttggtttgccctggattgcaaaacgggcaggtcagggtggagcattacgcctcgaagaggactaagtccatcatggctcatgattcgagaattgcgtgctttgcgctgtcgcaagatggccagttgcttgctaccgctagcactaaagggacgctggttcgcatttataataccattgatggaagcttgctgcaagaggtaaggaggggtgcagatagagctgaaatttacagtttggcattcttttcaaatacccaatggttagcagtttcacgtgac

SEQ ID NO: 5812 - DNA, 484 bp, Gossypium hirsutum
  Clone ID: GOSHI-09MAY01-C8062_3
tcttgctcctccacagcaaaagcgggtcttctctctctagaaaacttctccttcccctttgtaaaaacagtgctcaaaatctcccgtcccctgttttcttcaatttgcttctccaaaaagctctttgtttttgtagtagtagtagtagtagttcagatcttcgtcatcataagtactatatttacgcttttgtttttgcagataaaaaacctacgctgatggctggtcgttacgataaaaatcctttcgacgaggaagaagaagaagttaatcctttcgctgatacaacagcaagagggaaggcacctggccagtctaaatttggaggaggtctattttcaacgcgcactgcaagcgttccacctgcctcaaactcaagactttcaccgctacctcctgaacctgctggttttagttatgagcgtgaggcaacagttgatatccctcttgatacagcttcaggaggatcacgtaatcaggattt

SEQ ID NO: 5813 - DNA, 787 bp, Gossypium hirsutum
  Clone ID: GOSHI-09MAY01-C8062_2
ttccgttactgcccgggtgggcccacgcgtccgaaaacccgttcgctgaagaaggagatgattaagttaatcctttctcggatccaggtgggagagggaaggcatctggccagtctaaatttggtggaggtctattttcaaagaatgttccaagtgctccacttgcatcaaactcaagactttcaccactacctcctgaacctgctggtttcaattatggtcatgaggcaacaattgacattcctcttgatacagcttcaggaggatcacgttatcaggatttgaagaagaaggagaaggaacttcaggctaaggaggctgaactgagaaggcgggagcaggaagtgagacggaaagaagaggcagcagcaagagctggaattactttggaagagaaaaattggcccccattttttccaatcattcatcatgatattgcaaatgacataccagttcatctacaaagattgcagtatgttgcattttcaacgtttttaagggtggttctgtgcctgcttgggaaacatggaacctggaactacagcatggatcaaaggagaaggtgtgaggatctggttcttgctatcatctactcctatagtttttagagggaaatcacttactggaatcctacctgcagtagatcttatcagtgaccatgcgttggttgggatcttctacttcattgggttggattattttgggttgaatcaatagtaagcatttgggtttccagcaagtatacatgtatttacccggcagtggtaagcctgtgaaatgaacgcga

SEQ ID NO: 5814 - DNA, 1053 bp, Gossypium hirsutum
  Clone ID: GOSHI-09MAY01-C8062_1
gtccccgacttttctcgctcttcctcctccacagcaacagcagagtaaaaacctacgctgatggctggtcgttacgataaaaatcctttcgacgaggaagaagaagaagttaatccttttgctgatacaacagcaagagggaaggcacctggccagtctaaatttggaggaggtctattttcaacgcgcactgcaagcgttccacctgcctcaaactcaagactttcaccactacctcctgaacctgctggttttagttatgagcgtgaggcaacagttgatatccctcttgatacagcttcaggaggatcacgtaatcaggatttaaagaagaaagaaaaggaactccaggccaaggaggctgaactgagaaggcgggaacaggaagtgagaaggaaagaagaggcagtggcaagagctggagttgtgctggaagagaaaaattggccacctttttttcctatcattcatcatgatattgccaatgaaattccaattcatctacaaagattgcagtatgttgcgttttcaacatatttaggattggttctatgccttctatggaatatcatagctgttactacagcatggatcaaaggagaaggtgttaggatctggttcttggctatcatcttcttcctagcaggggtaccaggagcctatgtattgtggtatcgtccactgtatcgtgcttttaggaatgagagtgctttgaggtttggatggttcttcctgttttatttgcttcacattgccttttgcatctttgctgcggtggcaccccctatagtttttagagggaaatcactcaccgggatcctacctgcagttgatcttgttggtggcaatgctttggttgggatcttctacttcattggtttcggactattctgtcttgaatcagttgtaagcatctgggttatccagcaagtatacatgtatttccgcggcagtggtaaagctgctgacctggagcgcgaggctgccagaggagctatgagggctgccttctataggcactgacagactagctgcactgaatatacagtaaac

SEQ ID NO: 5815 - DNA, 402 bp, Gossypium hirsutum
  Clone ID: GOSHI-09MAY01-C8392_1
gaaaaaaaatccctccactattgcttttactttgcttttaatctcacccggacggtgactattgactctgagggtggtgttggcttcttttgagggtggtgaatgtgtacaagtttgttgtcaaattgttgggtttttttttttttaactttttgttgggtgatatataaaagtagatattagctttgatttttatttttattttttggtttttgggagttttggtgttttggggttcgatcttcaaaactgggaaagatgaatataagggcggccgaggaagaatcggcgcaagagattcatatcccggccgatatagattgggaaatgcttgataaatccaagtttttcttcttaggcgcacctctattttctggtgtttcagctaccctttaccccgta

SEQ ID NO: 5816 - DNA, 384 bp, Gossypium hirsutum
  Clone ID: GOSHI-09MAY01-C8382_1
aaaatattagatttcagaacctttttaaatacactttcagtttttgccagatcttgctctattcttcactatcatctttccgctcaggtctttatgctgagggtgtctctttcttttatggagaatgggcaactgaatgactactaaataatgcttaaaggctctcacaatctgaattttgtgtcatttgttgcgcctatatgatctgacctatttaaatagtttggggatctttacacgcagcgttgcttgtacaaagccgtatgagagcatgaggcttattagttacagccttcgctggatgcgtatctcggcttgttgataggactatgttttccaaaattgtcgttgacaaaattcagtctatcaggcagcattcttact

SEQ ID NO: 5817 - DNA, 700 bp, Gossypium hirsutum
  Clone ID: GOSHI-09MAY01-C8362_7
ttcgctgttttcccattccccaccgaatcgcttacctccctcattacattgattgcgcgtaatagggcattacgccccctcagcgccgattacccattcaacgtctttcccttttttctcttccgttttctgccctcgtcctcaacgctccgattctttcagtgtttcccttgcacagttggatgcttttcattcgtgtctagacactcatcgtcttctctgagaatcgatttcatttgtcagatggcattgcgaggagtttggcaacttaaaaagttgattgtaagctattgtgattggggaggtagtagtaggggcatcaggcgcagtctcctaactacaatgctaccctgaaactaattttccccaatattcaacaaatcgattatgaggtatttgcttagaaattttggtaggttctggcctgttgtagttgaaatgttcataaatttgcaatcatgcgtgtagtatgctaaccggtaaccatctccagtcccttgttgtctggaagcttgtgagattgcatatgttgctagggaaaacagggttctggaagtgatccctaattctttgaaggggattaaccatgatatgtttatttattaaatgcagtgttgttaatcattgttttgaacattcttaatctcttgaaatgttgacctgttccaactttttaaataaatatttcaagctatattgt

SEQ ID NO: 5818 - DNA, 646 bp, Gossypium hirsutum
  Clone ID: GOSHI-09MAY01-C8362_6
caaaaaaataaaggtgacgaaaagcgtggcaaaatatttctggtctttttcttttttttcgtggctagacactcatcgtcttctctgagaatcgatttcgtttgtcagatggcactgcgaggagtttggcaacttaaaaagctgattgtaagctattgtgattggggaggtagtagccggggcatcagggcatttatggagtcagagttaccaacttttaaagagaaaaaccctcagctggaggtggttcctgaactcattcgtgggcagcatccacatttgaaaggcttttacaagaacaaaaacgagcgggtggtatgtgtgaagaatatgactcctgaagatatccttctttatgcaaccaggctaagaaacgcattgggaagaaaggtggtgaaattgaagacaaggcatgtaactaaacaccctagtgtgcaaggtacatggacaactgatgtgaaattttgagacacaatagtaccaagttcttcacaattttgtctggatgtttctttattgttctatgtagtcatgatggcaactttgctgaaacattcactctttggaggtgaatgaaactgttgtgtaatgaacaaaggcaaatgatgtcgtaatagatgattggacccaaatatttaataatttt

SEQ ID NO: 5819 - DNA, 409 bp, Gossypium hirsutum
  Clone ID: GOSHI-09MAY01-C8362_5
gtcagtgctattatcaatcacttgaggacatagctgagggtgtttctggttcaagagaaaagctcactactatctaccttgaaaataatccatgtgtacggtttgtaacttgcagtatttagagactatagtttttgttggtttttgcgattgcagcatccttacgatcccaaatgttttgttatggctaattggttgattatcttgatatttttggttctctgtctggttcaaattcgtagttggaacatgattaattcttactttatatgatacgaagctccgttttcttgttgtgttttcttgatttcatatatgtaatctattctcaattatgtttccaatttaatatttgaatgaagactctaattattgataaaatatgtctttggtgcatgctgttttctgg

SEQ ID NO: 5820 - DNA, 563 bp, Gossypium hirsutum
  Clone ID: GOSHI-09MAY01-C8362_4
caccaatgttccaaggaagaagattattgactagagctaccataggcttaattatagaaggtggagcttatgttagtactgttgatgaagcaactttctgtgctattatcaatcacttgaggacatagctgagggtgtttctggttcaagagaaaagctcactactatctaccttgaaaataatccatgtgcgcagtctcctaactacaatgctaccctgaaacaaattttccccaatattcagcaaatcgattctgaggtatttgcttagaaattttggtaggatctggactgttgtagttgaatgttcataaatttgcaatcacgcgtgtagtatgctaacggtaacatctccagtcccttgttgtctggagcttgtgagtttgcatatgttgctaggggaaaacagagttctggaagtgatccctaattctttgaaggggattaaccatgatatgtttatttattaaatgcagtgttgttaatcattgttttgaacattcttaatctcttgaatcgttgacctctttccaactttttaataatatttcaagctctcttgt

SEQ ID NO: 5821 - DNA, 722 bp, Gossypium hirsutum
  Clone ID: GOSHI-09MAY01-C8362_3
ggtgattataactatttgaagctgatattgtatgtaatcaatgtgatgattgtgaaccttaaacagttagcaaatgattatgatctgtgctaatggatgctctatgattgatcaaagaatggtaagttatctgtctattcttaatgtttctttcttttgtgcgtgtatgtgtgcgttcttgttcatatgtgtaatgttccttaccaatcttataggtgagacgtgcagtgcatgtgaggaaataaaggcatttatggagtcagagttaccaacttttaaagagaaaaaccctcagctggaggtggttaatgaactcattcatgggcagcatccacatttgaaaggcttttacaagaacaaaaacgaacgggtggtatgcgtgaagaatatgactcctgaagatatccttctttatgcaaccaggctaagaaacgcattgggaagaaaggtggtgaaattgacgacaaggcatgtaactaaacaccctagtgtgcaaggtacatggacaactgatgtgaaattttgagacacagtagtaccaagttcttcacaatttttctgtatgtttctttattgttctatgtagtcatgatggcaactttgctaaaacattcactctttggaggtgaatgaaactgtttggtaatgaacaaaggcgaatgatgttgtaatagatgattggacccaaatagttaatattttagagcatctgtactcttccc

SEQ ID NO: 5822 - DNA, 618 bp, Gossypium hirsutum
  Clone ID: LIB3825-008-Q1-K6-B3
cccctcttaagctctctctctctctctctctctctctctctctctctctcttgaacttttcaatacaaagaatcaaatttatttcttttcgcttttacccactcaccccatctctgcaatctgcgtttttttcaagtgttgtaaaatcaatctattttgatttcatggcaataaggacagctgggaaattgtttaaagatctcgtgcgccaaagggttatttccacttccataggaccctctagacattgctcttccgctgctgcttctgcccctaaaatccctcattcttcaaaaaaaggaagaaggttattgactggagctaccataggcttaattatagcaggtggagcttatgttagtactgttgatgaagcaactttctgtggttggctgttctcagcgactaaacttgtaaacccattctttgcacttttggatgctgagaaagctcatacactagctgttgcagctgcttctcgtggttgggttcccagggagaagagacctgatccagcaattctgggattagaagtttggggaaggaagttttcaaaccctgttggtctctctgctggctttgacaaaaatgcagaagctgttgaaggtttacttggta

SEQ ID NO: 5823 - DNA, 617 bp, Gossypium hirsutum
  Clone ID: LIB3825-010-Q1-K6-C11
acgaaaccctagtatcaatcaaaaataaagtgacgaaagcgtggcaaaattttctattctttttcttttttttcgtgtctagacactcatcgtcttctctgagaatcgatttcgtttgtcaggtaaaatccccatattttgcctattattatttcccctttatttgcattctttcctgttgatttctctgttcttttttttctttctttataatttttttctaattcgagtctctttttactagatctatcttttttctgctgttatttataatctctttgcatgcaatctattgtttggggggtgattttgggttcaagttattgggtttgaaaatgttgttgttttctcttttcccggtcaattttagaagaccatttatatgtatgctgttcaaattttcgggtttcatttgttttttttttcctgtgatagaatctttgagatattgttttctttttcctcattatatgttacattaaggatagttgattagaagcgggattttagtttgttatagaatataaatttgtaggtcgaagttgtaactagtaggttacattgtgaatttgtgtagttgaaatgctaagttgtaggaagtgttgagtatttattta

SEQ ID NO: 5824 - DNA, 577 bp, Gossypium hirsutum
  Clone ID: LIB3825-010-Q1-N6-C11
attaaatatttgggtccaatcatctattacgacatcatttgcctttgttcattacacaacagtttcattcacctccaaagagtgaatgtttcagcaaagttgccatcatgactacatagaacaataaagaaacatccagacaaaattgtgaagaacttggtactattgtgtctcaaaatttcacatcagttgtccatgtaccttgcacactagggtgtttagttacatgccttgtcttcaatttcaccacctttcttcccaatgcgtttcttagcctggttgcataaagaaggatatcttcaggagtcatattcttcacacataccacccgctcgtttttgttcttgtaaaagcctttcaaatgtggatgctgcccacgaatgagttcaggaaccacctccagctgagggtttttctctttaaaagttggtaactctgactccataaatgccctgatgccccggctactacctccccaatcacaatagcttacaatcagctttttaagttgccaaactcctcgcagtgccatcttcattttcaaaacataaaaaaattattaactaagtatatgttt

SEQ ID NO: 5825 - DNA, 409 bp, Gossypium hirsutum
  unsure (1)..(409): unsure at all n locations
  Clone ID: LIB3048-047-Q1-L1-C7
aatgttccttaccaatcttataggtgagacgtgcagtgcatgtgaggaaataaaggtagcaaaagattatgaaaattgaaattttgatacaatacatattattcatggaaaaaaataaatgtagcagatagttcttttattgttatagctgagtgatggagagagagtggagtagcataaccaatagatatctggttccttggttttaatttaatagcaagctgcttctgccaacatgttgatgcggtttattgcaatgatccaactgcagttaattatttgattggttaggccaatctactcttggttttgtaccattatcatattgatatatgtgatggagaaaacgtcattgcttaccaatgatatattntctcaaatgtttgttttgccttgagtgacagtctgg

SEQ ID NO: 5826 - DNA, 388 bp, Gossypium hirsutum
  Clone ID: uC-gsronu33B062e06b1
ctcctttcgtccgcttcatcttctccttcatctgccgggatactttctacacaatttgtgtcctcaaactctcctcccatatttcagatattcctccttatcttctccccacagatctgtaactctctctccttctgttcccatattctagctagcaaatgattatgatctgtgctaactggatgcttctatgattgatcaaagaatggcatttatggagtcagagtttaccaacttttaaagagaaaaaccctcagctggaggtggctaatgaactcattcatgggcagcatccacatttgaaaggcttttacaagaacaaaaacgaacgggtggtttgcgtgaagaatatgactccctgagatatccttttttatgcaaccaggct

SEQ ID NO: 5827 - DNA, 872 bp, Gossypium hirsutum
  Clone ID: GOSHI-09MAY01-C8312_1
gttcatatttcgtcaaaccaaaaatcaaaccccataaattatttcatggaaattgggtcttcccaattctttgccgctgaagttcttgcttataacaacaccggcatcatcaccggcaccggcggaggagacggcggcaatttttattggtttcaggatatggaagatgacaagaaaaggagtggaaacaacgagtttatggatttacattcttcgatttcgctattcgatgctgaaatgaagcacgagcaacttcagtggtttactgatcctgatcaaggaagaggagctgtttttgaatcgaattacagtgaaacgaatgattatttcgatcaaattcaaagtcattacactgaaatcgatgaatttgatgattcacggaagaaacgcgcgagaaaatcaagttcaccggtatctgttccggcgacggaggagtcaggtccatcgcaatcaggcgctacaccgcccacgcgtccggtgaaagacagatctaaagactggtgggagaagtgcaaccacccggattttcccgacgaggaattcaaacgcgcgtttcgaatgagcaaatcgacgttcgatatgatttgtaaagagcttgaatcaacggtgatgaaaaagaacacgacgctccgcgatgcgatcccggttcgtcaacgcgttgcggtctgcatttggcgtttagccacaggtgaaccgctccgaatggtatcaaaacggttcggtttaggaatttcaacttgccataagctagttttagaggtttgtgccgccattaaaactgttttaatgcctaaatatgtccaatggcccgatgaaaacaaattaaccaaaaccaaatcggagttcgaatccgtcaccggaatcccaaacgt

SEQ ID NO: 5828 - DNA, 804 bp, Gossypium hirsutum
  Clone ID: GOSHI-09MAY01-C8302_2
ccgggtcgacctcgcgttcggagcaatttaatttgtggtaggacaaagcgaggatgaggcggcatccccagaactccttatgtgcgactttggggagcatttcaacaaaataataacagaccctgcctttaagtcaaaactcgttgagaagtttaaaagctctgttggagatgattccgagagtgtggatgggacaactgctgccttagctgatgagcttgcagcatccccagaatccatgagggtatttccggcttcagttatgtccgactttattattgcattgcaagatggcggagtacaaggggaacaattgaacaaaataataacagaccctaactttcagtcgggggtggctaaactggttgaaaaatttaaaagctctgcgggagatgattccaagagtgtggatgggacaacttctaccttagttgatgaggttgcagcttccccagaatcgaaagtagaaattgatactgaaattgtcggtagcttgtataggaaaatgggaaaggatagattagtagacctgaaaaagatggctaaagcagttcaatatgatgaaagcaatggtaacacagaaaagaagaattagtgagggaatgatgcaacaaattaccttatacatgtaaactaatcgcaaccagcaaccttacgccatgtaattgaacaaaaaaaaaaaacattatgcaatgtatggatgtctatatttataaaggctaccaatttttctcaacgtacgccaaaacaaaacaatttgttaaacaagaaattcaataaacaacaacaaattggattatgtgt

SEQ ID NO: 5829 - DNA, 1428 bp, Gossypium hirsutum
  Clone ID: GOSHI-09MAY01-C8302_1
gacccacccctccccccccccgcccgcccgcgcgcccgggggaaaaaaaaatcccgagcttcaacactccagtcgctcactgattaatttcaataaaaagaagaaaaagacagttgctcactgatattggtgtagtggcagagcagtgaagagaatcagttgagatatgtctaagcaaggagaagtggtctgcgtaaccggtgccagcggcagcattgggtcttgggttgtcaaactcctccttgctcgcggctacaccgtccacgggaccgtcagaaatctcaaggacgagaaagaaacgaagcatctagaagctctagaaggagcagactcacgtctccgcctcttccagatcgatctcctcgattatgattcactcgccgccgcaatcaatggctgtgctggtgttttccaccttgcttctccatgcagcgtcgatcgagttcacgatcctcagaaggagcttttggatcctgcgattaaaggaacgcttaatgtactgacagctgccaaagagcttggtgttaaacgtgtggtggttacgtcttcaatctcctccatgtggccctgcccaaactggccagctgataaaatcagaacagaggattgctggactgatattgagtattgcaagcaaaatgaattatggtatccaatttccaaaacactagctgagaaggctgcatgggaattttccaaggagaaaggtctggatgtggtggttgtgaatccgggcaccgtgatgggtcctaatattcctccaaaccttaatgctagcatggtaatgttgttacgccttctgcaaggctgcacagagacatatcaggactttttcattggatccgtccatttcaaagatgttgcgttagcacacattttggtatatgagaacacatcagcaacaggaaggcacatgtgcgttgaagctctatctcactatggtgacttcgtggccaaggttgctgaactttaccctgaatataatattcccagtttgccaagggatactcaacctgggctgttaagggctaagaatggaggtaaaaagctgatggacttggggttggaatttattcccatggagcagataatcagagatgcggttgagagtttaaaaacatctttgtgttgaaaatagcagactaaaagcgaaggcaacgccaaattaagaagtcggcatttgaagataaattgggaagaacatgcaatgggtatttgtcagataaatgaaatgtagtgtatgtagtgcaggtgcctgatatagtgtcggcgaccaaaactacagtttttcaacaggggaggaaaggagaggggaccccccttagatttttttttttgctgccaactgccaagctaagggtcccccttcataactcactcacttgtttgtttctccttattgctaatcaaatttctttgtcatttctc

SEQ ID NO: 5830 - DNA, 528 bp, Gossypium hirsutum
  Clone ID: LIB3582-015-P1-K1-F4
cccacgcgtccgatccaatttccaaaacactagctgagaaggctgcatgggaattttccaaggagaaaggtctggatgtggtggttgtgaatccgggcaccgtgatgggtcctaatattcctccaaaccttaatgctagcatggtaatgttgttacgccttctgcaaggtaattttcttctcaaacattttttgttggaattttttgttgaaatgggtaaatctttagtatgattctgtagctctatcatctatgtgttgcatttcgttgacctaaatttcatctctctggatgtatggaattttgtcctcttagcttgctaatccatttcaacaaaatccatgttagttctgttatgtacatgtaagaaatttgtttataccttaatcctggaacattcatagtcaagtattgaagaaattttttgcttagaaatgggaattaaacatgctaacttgagatgtaaatgaaaaaagagtcactagcacgagctgtaatttaatttttttttttttttgacagaattag

SEQ ID NO: 5831 - DNA, 339 bp, Gossypium hirsutum
  unsure (1)..(339): unsure at all n locations
  Clone ID: uC-gsflmaxxa058b05b1
tattattttcagtttgccaagggatactcaacctgggctgttaagggctaagaatggaggtaaaaagctgatggacttggggttggaatttattcccatggagcagataatcagagatgcggttgagagtttaaaaagtaagggctttatttcatgaatgtgtcttctacactaaaagctgtgctgtatagctgatgaggttgcagcttccccagaatcgaaagtagaaattgctactgaaattgccagtggcttgtcgaggaaaatgggaaaggatggattagtagacctgaaagagatggctaaagcagttcaatatgataaaagcaatggtnacac

SEQ ID NO: 5832 - DNA, 546 bp, Gossypium hirsutum
  Clone ID: uC-gsflnu33B015a03b1
tttccactcagctatgtcagcatcagctatgggagccgatgaaaaagcaattccacaagtttataagggacatagaaattgtgagacggtgaagggtgtgaccttctttgggcccaagtctgagtacgtggttagtggatccgactgtggccgaatatttatttggaagaagaaagatggacagcttgttcgtgttatggaagcagataagcatgtggtcaactgtattgagtctcatcctcataccatggttctggctagcagtggaattgagagggacatcaagatatggactccaaaggctattaataaagctactcttccaactaacattgaacaggtcccaaaacgcggcctctttcgtttgttgtcctttgctgccttcaatgaagatgatgatggttataatttttttcttggtggtggtgttgaggatactgatgatgaggaagatgactctgatgatgaatatcttgatgtttatgatgacattgatgatggtgatggcgattgcgatgataacgatgacagtgacaatgatgatgg

SEQ ID NO: 5833 - DNA, 413 bp, Gossypium hirsutum
  Clone ID: LIB3166-001-Q1-K1-C2
cgactgcggccgaatattcattcggaagaagaaaggtggacagcttgtgcgcatcatggaagcagacaaacatgtggtcaaccgtattgagtctcatactcataccacagacccggctagcagtggaattgagagggacttcaagatatggactccaaaggctattgataaagctactcttcctactaacatagaacaggtatgtcttatcctaatctcttgcggtcaaaaaatattatacattttggggtattaataatgcaggttaagacatgaactgcattctgcttcgtcaacatgcttcttgacatggggataaaacagtggaaacgtcccacatgcttgttccttattgattatatcgtctttactagggacaagcatatatgatttcgttcatgacatagaaagat

SEQ ID NO: 5834 - DNA, 1048 bp, Gossypium hirsutum
  Clone ID: GOSHI-09MAY01-C8322_1
cccggttcgaccagctttttcccagcgtccgccccgcgtcgggggggggtggcggcccctcccccccgcgtccgccctcggagcaaaggaaattaaatttctttaatttttttctctttgtcgacctaagtctcttttatttgcttctttcaccatgaccaagcagcaggctaactggtctccttacgacaacaatggaggatcttgcgttgcgatcgctggagctgattactgtgttatcgccgccgatactcgaatgtcaaccggttacaatatactgacccgagagtactccaaaatctgtaaacttgcagataaatgtgtcatggcatcctcaggatttcaagctgacgtgagggctttacaaaagcaactggcagctaggcacttgatttatcagcatcagcacaacaagcaaatgagctgccctgcaatggctcaattgctttccaacacactttattacaagcgtttctttccttattattcttttaatgttttgggtggccttgataacgaaggaaagggttgtgtcttcacatatgatgctgttggttcctatgagaaggttggatacagttctcaaggttctggttcaacgctcatcatgcctttcttggataaccaactgaaatctcccagtcctcttctattgcctgcccaggatgctgttactccgcttgtggaagctgaagctattgatttggtaaaaactgtttttgcatctgcatccgagagagatatatacactggagacaaactcgaacttgttatcataaatgcagctggtatccgccgggaatacatggaacttaggaaagattgattaatctccattctccaaactgggttaccacctcttatagatgtgtgagttcttgaaattgatggaatgactcttacaatgtgtctgatgcttgtactgcaactatttccttgcatttggatactttaaaatatggattgcagttgaattttatcttccgtctgttagacgaaaatagttctttcatggatggtatgttgcatgactagtctttggtgttct

SEQ ID NO: 5835 - DNA, 630 bp, Gossypium hirsutum
  unsure (1)..(630): unsure at all n locations
  Clone ID: LIB3543-031-Q1-K6-A7
gcgtttttccagcgtccgcccacacatcccggcgggcggggatgtgtcaccatgcctaaggagcaagctaactggtcaccttacgacaacaatggaggatcttgcgttgcagttgccggcgccgattactgtgtaatcgctgctgatactcggatgtcgacgggttacaatattctcacccgtgagtactcaaaaatctgtaaattagcagataaatgtgttatggcatcctcaggatttcaagctgatgtgaaggctttacaaaagcatctggcagctaggcacttgatttatcagcatcagcacaacaagcaaatgagctgcccggcaatggcccaactgctgtccaacaccctttattacaagcgcttctttccttattattcttttaatgttttgggtggtctcgataatgaaggaaagggttgtgtcttcacatatgatgctgttggttcctatgagaaagttggatacagctctcaaggatctggttcaacacttatcatgcctttcttggataaccaactgaaatctncaagcccgcttctgttgcctgccccgaatgctgttacaccacttgcagaaactgaagctattgatttagtaaaaaactgttttttgccttcgcat

SEQ ID NO: 5836 - DNA, 511 bp, Gossypium hirsutum
  Clone ID: uC-gsflmaxxa091g07b1
cttttatttttttctctttgttgacctaaatctcttggatttgcttctttcaccatgaccaagcagcaggctaactggtctccttacgacaacaatggaggatcttgcgttgcgatcgctggagctgattactgtgttatcgccgccgatactcgaatgtcaaccggttacaatatactgacccgagattactccaaaatatgtaaacttgcagataaatgtgtcatggcatcctcaggatttcaagctgacgtgagggctttacaaaagcaactggcagctaggcacttgatttatcagcatcagcacaacaagctgactttgaaagataccttgaagccgattttgataccctgctacgatctctgttccaacgcgccattcttgttttcccgcgctgatgcattggaaatggacggctatgatttcaagatgaaagacgtgtgctacgcaacgtcggctgatccgacggttgtgggagcagtgcgaatgaagtcagtggatgagagga

SEQ ID NO: 5837 - DNA, 408 bp, Gossypium hirsutum
  Clone ID: LIB3048-012-Q1-L1-G5
agcaagctaactggtcaccttacgacaacaatggaggatcttgcgttgcagttgccggcgccgattactgtgtaatcgctgctgatactcggatgtcgacgggttacaatattctcacccgtgactactcaaaaatctgtaaattagcagataaatgcgttatggcatcctcaggatttcaagctgacgtgaaggctttacaaaagcatctggcagctaggcacttgatttatcagcatcagcacaacaagcaaatgagctgcccggcaatggcccaactgctgtccaacaccctttattacaagcgcttctttccttattattcttttaatgttttgggtggtctcgataatgaaggatgctgttactccacttgcagaagctgaagctattgatttagtaaaaact

SEQ ID NO: 5838 - DNA, 350 bp, Gossypium hirsutum
  Clone ID: LIB3149-006-Q1-K1-D7
agcaaacacttcgcggggagccagtacttttattagatactcttgaagcgcgcatttagaggccgcgggctacgatctctagttcgcaacgcgccattcttgttttcccgcgcgtgatgcacttggaaatggacggctatgatttcaagatgaaagacgtgtgttacgcaacgtcggctgatccgacggttgtgggagcagtaggaatgaagtcagcggatgagaggacgaaaatcctggcggtagaaggtggggtggccatgaacaatccagctgcggcggcgataacacacgtgctgaataataagcaggagttcccgttttgtaatggggtggaggatcttttggtc

SEQ ID NO: 5839 - DNA, 729 bp, Gossypium hirsutum
  Clone ID: GOSHI-09MAY01-C8242_1
aaaatagtaaagtattccttcaccataacactcttctctcctctccatactttgaaaggaaaaaacgttatctcaaagcgaaaatcctcccaaaactggattaagaagagcagataaaacaaaatgaaccccaagagcaccttcatcttggctgttctgctacttacagcttcactaactgcagcagctaggccagactcatttgaagctttatcatctgaggaaaagggcaacaaaggcagcggcaaaccaggcaaccaaaacaacaaaggtagtggtggaaacactggtgggatgggcggcttcttcggtccagggcctgggtttggattgccagggtttgaaaaagggtggggacatgggatcgtaggcggtggctatggagctggcttcggaggtcctaccggagggtactcaaaaggtggtgttattagaactacggttgtttgcaaagaaaaaggtccttgttttaacaagaagctaacctgccctgctaagtgcttcacctattttagtcggtcgggaaaaggttacggtgagggtggcggtggcggtggctgcaccatggattgtaagaaaaaatgcagtgcttactgttaagagggtaatatacagtataagtacttgctatatcattaatatctagttgcttaaccatgtatgattatgtatgagatgcatggagtagcttttattaaaagttaaataatatacatcatttatgggggt

SEQ ID NO: 5840 - DNA, 728 bp, Gossypium hirsutum
  Clone ID: GOSHI-09MAY01-C8202_1
cccacgcgtccgaaaaaaaggaaaaaaaagagggaaaattttcgtttgagatggttttgttttgggctaaagatgaagttgatggaagaggagacggtgttcgaagaggaaaatgaaatcaaggctatgaaagaggaagaagaggttggcggtgaagatgaaagtgaagtagaaggtggcgaaccggaagaggaagacgacgatgacgacgacgaggatgaggatgatgaaggcgaagatgacgacgacgacgacgacgacgacgacgaaggagaggaggatgacgatgtgcaggttcttcactcatccggtcctcctgtcctgatagctgatgacgacgagggcgaggatgttaaagacgatgatgacgacgatgaaggcgaaggcgacggcgacggcgatgacgatgacgacgacgacgacgatgatgacagtgatgacgatgaagagggtgaagaagaggaggatatgggaacagaataccttgtccggcctgtagtaccagctgaagatgaagaagacgctagtgattttgaaccagaagaaaatggtgaagaggaagaagaagaagatgatgaagaccatgaagaaggtagtgtaaagatcgaagcttcctcaaagaggaagagcacagacagagatgattccgatgacaacgatgatgaccgcggagaccatgagaggccttcaaagcgatagggctaaaagaacaccaccgaatagctttt

SEQ ID NO: 5841 - DNA, 458 bp, Gossypium hirsutum
  Clone ID: GOSHI-09MAY01-C9952_2
cagcatctagcccatcatgttgacgctaccatgtataaattattgagtggttttgccttgcagctttagattctcttgtaatagccatcaggttttgtgcttagcaaattccccgtctttccatataaaaatcatctcagcttgctctggctcttgtccctctctctctctctctctctctctctctctctctctctctcatattagctccgcctggcctaggcgccattctcatcatggctcattttcagctttgttcattaaaaatcttgcagattttttctcttcttctcatcctcctttaccctgcaacagtctcttgcgattgtacttgtgataaggaggacatccaacaaaataaagccgaagcactcagatataaactcggtgccattgctgccattcttgttgccggggctattggagttagcctcccattgttggggacacgaatccct

SEQ ID NO: 5842 - DNA, 732 bp, Gossypium hirsutum
  Clone ID: GOSHI-09MAY01-C9952_1
tcgccaggttttgtgcttagcaaattccccgtctttccatataaaaacatctcagctttctcttgctcttgtccctctctctctctctctctctctcatataagctccgcctggcctaggcgccattctcatcatggctcattttcagcttttttcattaaaaatcttgcagattttttctcttcttctcatcctcctttaccctgcaacagtctcttgcgattgtacttgtgataaggaggacatccaacaaaataaagccgaagcactcagatataaactaggtgccattgctgccattcttgttgccggggctattggagttagcctcccattgttggggacacgaattcctgcgttaaggcccgaaaatgacatattcttcatgatcaaggcttttgctgccggtgttatccttgcaacggggttcgttcacatcctcccggatgcttttgaaagcctaacttcaccatgccttaaagaaagtagtccatgggggaaattccctttctctggtttcattgccatgatgtcagcgatagggacattaatgatcgatgcatttgcgacagggtattatgagagacaacatcttaagtaagcataagcatgttaatgctgcagatcaagaacatgcaggtcatgtacatcttcatacacatcccacacacggtcatgctcatggctctgcttcccctctcaggagttggttttaccagagcttatccgtca

SEQ ID NO: 5843 - DNA, 424 bp, Gossypium hirsutum
  Clone ID: GOSHI-09MAY01-C9942_1
cggaaaaaccgggccgaccgacgcgcccgggggaaactgaagccaaagctatacaaataggatctaaagatagatcaaagaaaagggtcgaagcaagttgttttgtttcaatggaagttggtcgaaaaatggctaacatgcttggaaccgaccatgatttgaacttcaaagagaccgaactgtgtcttggtttgcccggtggaatcgctgttgttgctgcaggtaatgaaacggaaagttcttcttccccaaagactaatggcaagagaggcttctctgagactgttgatttgaagcttaatcttcaatccaaagaatctaccatggatctaaacaagaaccttgatgacaacggttctaaggaaaaatcaggttctgccaaagatcctgcaaaacctcctgccaaggcacaagtggtgggttg

SEQ ID NO: 5844 - DNA, 915 bp, Gossypium hirsutum
  Clone ID: GOSHI-09MAY01-C9972_1
cccacgcgtccgcccacgcgtccggaaaaagatggagcttatattggtgaattaattaaggccgtccaaatggtcacggatgtaatggaagttcttgttaagaggggcattatggctgaatctcttactgctcttgagaaagaaaaggtgagtttaggtcaggaagaaattaaacggaaagcggtccaaatagagaatatgtctgtgaagttagaagagatggaaaggtttgctctcggtacgaatagtattcttaacgaaatgagacagagggttgaggacttggtcgaagaaacttcgagacagaggcaacgagctgctgaaaacgaacaggagcttactcgtgtgaagcaggatttcgagtccttgaaatcttatgttagtagtctcattagtgtaagagaaactcttctttcatcggagaagcagtttcaaaccatcgagcggctctttgaacgactagttgcaaagacaacgcagctcgagggcgagaaaaagcagaaagagactgaagttcagaagcttatggaagagaatgtgaggttgaccgcacttctcgacaagaaagaagctcaacttttggccatgaatgaacaatgcaaagtaatggccttaagtgcttcaaatatatgatcaactttctcgccctaccgcctatcggaccgtaccaccctgctgactcaacaatcagccagagaactgtaaggtgagacaagttgtgctctacatagccgaatttgtaacggaatactttcatgaaagtgtaacacaatgaagagtgcagggaactcgagttagtgctttgctttcaaaaaaaaatcaaaccattaagtgtgtggatgcatattgttgtgctattagaacacacattgggtgtactaattgcagaaatttaaaaatgtccatcttttctgt

SEQ ID NO: 5845 - DNA, 888 bp, Gossypium hirsutum
  Clone ID: GOSHI-09MAY01-C9842_2
ggcttttggtgctttcgtcccgttttccctaattcttaacgaagaaagaaaagagaaagacagcgagggaaaccctccgcccggggaggtcaaatctttctctgcgaacaaactaagactctagccatgggaaacaccgagaagctcctgaaccagatcatggaactcaaattcacgtccaaatccctgcagcgccaggccaggaagtgcgagaaggacgagaaatctgagaaattgaaggtcaagaaggccatcgagaaaggtaacatggacggagctcgtatctacgccgagaacgccattcggaagcgcactgagcagatgaactacctccgcctcgcgtcgcgcctcgatgctgtggttgccaggctcgatacccaggctaagatgaccaccattaataaatccatggctaatatcgtcaagtctctcgaatcttccttgaacacaggcaatttgcagaagatgtcagagacaatggatcaatttgagaagcagtttgtgaatatggaggtccaggcagaatttatggagagtgctatggccggttccacttcattgtccacaccagaaggtgaggtcaacagcttgatgcagcaagttgctgatgactatggcttggaggtctctgttgggttgccacaacctggtgctcatgctgtgtcgaccaagacagaggagaaggttgacgaggatgatttgtcgaggcggcttgcagagcttaaggctagaggttagagaaatgatggaattgatttggatgatcttgtgatatataatagtactatgatgtttgggattgtaagtgctggttgaaacatctcattccatatgtaaatttgtctgaattgggtttccctttataattttaaatgctgcatttgtctc

SEQ ID NO: 5846 - DNA, 929 bp, Gossypium hirsutum
  Clone ID: GOSHI-09MAY01-C9842_1
cccacgcgtccgatcgaaaaacacagaacggtcaaaacgcgatcaacacacagaaaagccccattctgatccacatttgctttaaaatcctctcaaacatcaaaatttgtttgcaaacagaccaaaaaaatccagctatgggcaatacggagaagctgttgaaccagatcatggacctcaaattcacctccaaatcgctgcaacgccaggccaagaagtgcgagaaggaggagaaatctgagaaattgaaggtgaaaaaggcgatcgagaaaggtaacatggacggtgctcggatctacgccgagaacgccatccgtaagcgcactgagcagatgaactacctgcgtctcgcttcccgactcgatgctgtagttgccaggctcgatacccaggctaagatgaccaccatcaacaagtccatgggaaatatcgtcaagtctctcgaatcttccttggccaccggcaatttgcagaaaatgtcagagacaatggataaattcgagaagcagtttgtgaatatggaggtccaggcagagtttatggagagtgctatggctggctctacttcattgtccacaccagaaggtgaggtcaacagcttgatgcagcaagtggctgatgattatgggttggaggtctctgttgggttgccacagcccgccgctcatgctgtgccaaccaagacacaggagaaggttgatgaggacgatttgtcaaggcgcctcgccgagcttaaggctagaggttaaaagaaccgtggtatccatttgaatgagcttgtgataaatagtaagactttgttacttaggattatataatttcagcttaaagatcaagttttatgtgtaaatttttactgaattgaagtttgctttctaatattacatgtggtgcttgtttcaagtaaatagagatcaacctttagtgtg

SEQ ID NO: 5847 - DNA, 563 bp, Gossypium hirsutum
  Clone ID: LIB3585-050-P1-K1-H6
ggaagttcgagctagacgtacgcgtacgcgttactatatggcatatgaaagtgctctcaaacattaaaatttgtttgcaaacagaccaaaaaaatccagctatgggcggtacggataagctgttgaaccagatcatggacctcaaattcacctccaaatcgctgcaacgccaggccaagaagtgcgagaaggaggagaaatctgagaaattgaaggtgaagaaggcgatcgagaaaggtaacatggacggtgctcggatctacgccgagaacgccatccgtaagcgcactgagcagatgaactacctgcgtctcgcttcccgactcgatgctgtagttgccaggctcgatactcaggctaagatgaccaccatcaacaagtgcatgggaaatatcgtcaagtctctcgaatcttccttggccaccggcaatttgcagaaaatgtcggagacaatggataaattcgagaagcagtttgtgaatatggaggttcaggcagagtttatggagagtgctatggctggctctacttcattgtccacaccagaaagtgaggtcaacagc

SEQ ID NO: 5848 - DNA, 533 bp, Gossypium hirsutum
  Clone ID: LIB3829-004-Q6-N6-G2
ttatatatgttctttatttcttgtaaccacaattaggcatgttaaaagcctctgcaaacatcaaaaacttgaatgccaacagaccaaaaaaatgcactctgggcaatacggataagcatgctgaacccacatcatggacctaagattcacctccaaatcgttgcaacgccaggccaggagtgcgagaaggaggagaaatctgagaaattgaaggtgaaaaaggcgatcgagaaaggttacatggacggtgctcggatctacgccgagaacgccattcgttagcgcactgagcagatgaactacctgcgtctcgctttccgacttgatgctgtagttgccaggctcgatacccaggctaagatgaccaccatcaacaagtgctgggaaatatcggcaagtctgcttgaatcttgcttggccaccggcaatttgcagaaaatgttagaaacaatggataaattcgagaagcacgttgtgaatatggaggtccaggcagagtttatggagagtgctatgggtgggtctacttcatt

SEQ ID NO: 5849 - DNA, 397 bp, Gossypium hirsutum
  Clone ID: LIB3493-053-P1-M1-G6
aaaacccccaaaaattttgaacgctaatggtcttcaatcaaacaaagaatccagccatggggaacaccgagaagctcttgaaccagatcatggagctgaaattcacgtccaaatcgttgcatcgccagtcgaggaagtgcgagaaggacgagaaatccgagaaattgaaggtgaagaaggcgatcgagaaaggtaacatggacggagctcgtatctacgccgagaacgccattcgaaagcgcaacgagcagatgaactacctgcgtcttgcctcgcggctcgatgccggtgttgctaggcttgatactcaagctaagatgactaccattaacaagtccatggctaatattgttaagtcacttgaatcttcattggccacaggaaatttgcagaaaat

SEQ ID NO: 5850 - DNA, 817 bp, Gossypium hirsutum
  Clone ID: GOSHI-09MAY01-C9872_1
cccacgcgtccgccgtgaaacacatatggttcactgagtccaacagccggagaaagacccggggtagtgccccgatgttaaccaaacatgacggtaaggcaaaagaatttgaagccgaggtccggacattgagctcaataagacatgtcaatgtggttaagctttattgcagcattactagtgaagactcaagcttgttggtgtatgaatacttgccaaacggcagcttatgggatcggttacatacgagtaagaaaatggagcttgattgggatacaaggtacgagattgcaatcggagctgctaaaggactcgaataccttcatcatggatgcaaaaagccggtgcttcaccgagatgtaaaatcaagtaacatattgttagatgaatatttgaagccaaagatttcggatttcggacttgccaagattgttcaagccaatagtagcattggtaatgactccacccatgtcattgcaggaacccatggttacatagcgcccgaatacggctacacctgcaaagtcgacgagaagagcgatgtatatagtttcggggtggtattactggagttagtgaccggaaaaaagccaatagagccggaatatggagaaaataaggacattgtgagttgggttggcagcaacttaaagggcaaagagagtgatttaagcatagtggacccaaagataccacatgcattcaaagaggatgcaatgaaggtgttgaagattgccatattgtgcaccactacactgcctgccctaagacccaccatgagaagagtggttcaaatgcttaaagaagctgaacccta

SEQ ID NO: 5851 - DNA, 417 bp, Gossypium hirsutum
  Clone ID: LIB3166-015-P1-K1-G6
cccacgcgtccgagaaactcagcaaaagagaagcccaaatctctatggcgatggcgagtctgcgatcgtctccacctgcaccatcacctccttcaatctccgcttcccattttgagtcctccgtcactcttgccaccgctcttctaccaccgcaggctcagtttgttgctaccggcgaaaatggaacgctcaatgtcgatgaccaaaagcctcaaattgctaatcattttgcgtaagttggttttttctactcttttttaactttcaaattttagatataattccattgagcacccttcttccttggagccacttgaaagtaattgcttaatatctctttaaagcatgtgacgttgatttaacccagttctgcacagtaatttcatgtttaaaggaatgattgtgaaagaaaaagca

SEQ ID NO: 5852 - DNA, 343 bp, Gossypium hirsutum
  Clone ID: LIB3120-014-Q1-K1-B5
gtcagtcgggagtagagactcgatagaaactcagcaaaagagaagcccaaatctctatggcgatggcgagtctaccatcttctccacctgcgccatcaccttcttcaatctccgcttcccattctgagtccttcgtcactcttgccaccgctcttctaccaccgcaggcccaggttgttgctaccgccgaaaatggaacgctcaatgtcgatgaccaaaagcctcaaattgctaaccattttgcggttcttgataatccgggaaacaattggaagtacaagaaatttgaggctgactacgcccgtccggtgatggcaaaatatttctctaaaaataactttta

SEQ ID NO: 5853 - DNA, 398 bp, Gossypium hirsutum
  Clone ID: LIB3083-086-Q1-L1-F8
aatatatttttaacgtccctggcaggaattttaaggtcgggggccaggaaaacctagcagagtaaaaaacacaaaatcttcctcggaaaggaaagactcgcctgaaaagaaaaaaacacccccccacccaaaggggtttgatgtgaggttgattgatgtaaaccgaacttgttaagtaacaaagggagggcaagtggtcaagtacaccgctttgatggcatgtggaaactttcacggtgttgttggatacgcaaaagccaaagccccagcagtccctattgcacttcaaaaggcgcatgagaaatgccttgagaatcttcactatattgaacgacatgaggagcatacgatagcccatgcaattcaaacaacatataagaagactaaggtctatctct

SEQ ID NO: 5854 - DNA, 389 bp, Gossypium hirsutum
  Clone ID: LIB3083-086-Q1-L1-F4
aagaaattggaagaaaagctggcagagttggattatacatttggcaggaagggaaagcttcttgaggaggagatcagagatcttgcagaggaaagaaatgctttgacagagaagaaaagaacacctctttacagaaagggttttgatgtgaggttgattgatgtaaaccgaacttgtaaagtaacaaagggagggcaagtggtcaagtacaccgctttgatggcatgtggaaactttcacggtgttgttggatacgcaaaagccaaagccccagcagtccctattgcacttcaaaaggcgcatgagaaatgctttgagaatcttcactatattgaacgacatgaggagcatacgatagcccatgcaattcaaacaacatataagaagac

SEQ ID NO: 5855 - DNA, 427 bp, Gossypium hirsutum
  Clone ID: GOSHI-09MAY01-C9742_1
ctcactgtcctgcttctgctatgcgaatgctcggatttgcacgaataagggagatgctcagcgctggcatcactgtctccttgggcacagatggggcaccatctaataatagaatgagcattgttgatgagatgtacctagcttctctgattaacgaaggacgggaagtgtatgaaaacggagcaactgatcccacagccttccctgctgaaacacttctcaaaatggtgacaattaatggtgcaaaatcagtactctgggacaatgaaatagggtcgcttgagattggcaaaaaggctgacatgggtgttagcaaccctttctcatggcctatggtgcctattcatgattgcatctccaaccttgtgtattgcgtgcgaactgagaacattgtctctggaacgtgcaatggccggtggattatgag

SEQ ID NO: 5856 - DNA, 550 bp, Gossypium hirsutum
  Clone ID: GOSHI-09MAY01-C9702_2
gaacaaaaaacgcgggcgcagaacggaaggaacagaactgaaaaaaaaggggcaacaaagacaagggcgccgggagcatccctgtgaaagtggcacatcatgttgtgatgtgcccaacacttcattgaggcacataacacttgagagcaatgagaacaagcctgttactaatagtagggacacccaagaggtaaattctgagcaggggggtcaaattctcagaatatttaaggatcattccactgagacatgcattctcgacgatctggaattctacgaggctcgtcaaaagattatacgagaaaagacgacttagcatcagctgtcacaaaaaccgatccaggtgtcaagtggggagcctaaacatgctggaactgataacaaaaaaagtgcagcagtagccaatgagactttggaaaaatccgcaaaggcagctttgatagaagaaccaactgttgcatcgaaaggtgagaatggaaatatgaaacccgtagaagagaatggatcgagtgctgcaactgaagacgacaaccccgcaaaagcagctagt

SEQ ID NO: 5857 - DNA, 1915 bp, Gossypium hirsutum
  Clone ID: GOSHI-09MAY01-C9702_1
caagggattctcttcatatgcaaaaaacctttcatctggcggagatgagaatcttcatccctgccctcatttcatgcatttacacaatgcaggaccatcatcaggtgtagcccaagcatttggatacatgaatcacatttaccctaacaccataacctatggccattatggaaacaccaatggagggggttctggttctaggttttggatcatatggctactctgcctggaagaaagggcaagggtgctataatgctggtaacaacaacaaatctaggggtcttggttatggaaaagagaatatggatggtttaaatgagctgaacaaaggacccagagtgaaggggagtagcaacaaggatggttttggaactgcaacactagctgctaaagatcagaaccttccattgactgagagcaataaggagaacagtgtttctcttgttccagatctgggacagtacaacaaagaggattttcctgagagctattcagacgccaagttctttgtcattaaatcctagagtgaggatgatgtccacaaaagtgtcaaatacaatgtgtgggccagtacatctactggcaacaagaagcttgatgcagcattccgtgaggccaaggagaagcctgatggctgtcctgtatttctattgttctcggttaataccagtggtcaatttgtcggggtagcagagatggtcggccctgttgattttaacaagactgtagagtactggcaacaagacaagtggactggttgcttccctgtgaagtggcacatcattaaggacgtgccaaacactttgctgaggcacataacacttgagaacaatgagaacaagcctgtcactaatagtagggacacccaagaggttaattttgagcaggggatccaaattcttaaaatttttaaagatcattccagtaagacgtgcattcttgatgattttgaattttatgaagctcgtcagaagacaatccaagagaaaaaggctaagcatcagctgttacaagaaaaggttttgagtggagagcctaatgatgctgtaatggagaagaaagaaaatgtggcaatagcaaataacgctttggaaaagtctgtggagtcagcgtcgataaaagaaccaactgttgcatcaacaacagaagtagtaaaggctaatgtcgatgtgaaacctgtacaagagaatggatcagttacagcaactgaagatggccccaactcagtttgtgttgcgagtgcttgctaattgccttcttagatttggaaatagtgttgtccttttggttggttattgacaagttagctgattcagatcagagcctctgattggctgggactggtctatagctttttccatggaggtaggaatgagcaacacctttcagcattgtaggcaaaatagcaattagcagcatggttagactgaatgtgactgctcaatagcgtgaggttttcttttttgtctttcatttctcatctgttttcctggttattttctttttcttaaggataaggaattgagaatgaaaaatattactcctatttgcatcttgcatttgatgaagtgggtttttgttaacatttctagtatagggaagtaaaagagttgtattgcagacttgttatgttcttgttcacaatctataatttatggggtgtaataaatttcttgtgtgagaaatgcataaccccaccacctctgtttcaaggaatagcatattacatgtaattcaatatgtcctaacagtatttatccatttgaaaatagaaaatatgcattagttaaactgctaatgcctcatttacttatattttttatgtactgttctttgggtatgaataagatgggtattaatcatttagataagcactttgtcgccattgatgctgccattgtagtcaacgaacttt

SEQ ID NO: 5858 - DNA, 358 bp, Gossypium hirsutum
  Clone ID: LIB3166-048-P1-K1-E9
cccacgcgtccgggagaacagtgtttttcttgttccagatctggtacagttcgggcatagaggattttccggatgggtattcaaacgccaagattttcgttattaaatcatttagtgaggatgatgtccacaaaagtgtcaaatacaatgtgtgggccagcacatctaatggcaacaagaagcttgatgcttcatttggtgaggcctaggagaagcctgatggctgtccctgttttttatttgtctcggattatacccgtggtcaaatttgttgggtgttcataaatgggttgccaatttcttttttaacaagactcttaatttctggctaactggacaagtggactggtagctttcc

SEQ ID NO: 5859 - DNA, 323 bp, Gossypium hirsutum
  Clone ID: LIB3148-058-Q1-K1-H4
ccgaatgaagggtcgaccgacgcatgcgtaccgtcaatatcgaatctcgctttgcaaaaatctgtggagtcagcgtggataaaagaaccaacgggtgcatcaacaacagaagtagtaaaggctaatgtcgatgtgaaacctgtacaagagaatggatcagtttcagcaactgaagatggccccaactcagtatgtgttgcgagtgcttgctaattgccttcttagattcggaaatagtgttgaccttttggttggttattgacaagttagctgattcagatcagagcctctgattggctgggactggtctatatctttttcat

SEQ ID NO: 5860 - DNA, 586 bp, Gossypium hirsutum
  Clone ID: GOSHI-09MAY01-C9732_5
gtgattagtttgagtgtttttttattgaagaaaaatgtcgagctccaacccgtttgatttattgggtgatgatgatactggggagctctcattgctgatcgccgctcagaaaaaggctgctgccaccgccccctccagcgtccctaagaaagggcaggctcaatctcagacgaagccgcaggctaagcccccccccccgcccccccctccggctcaggctgtgagggaggcgaagagtgaaggtattcgtggtggaggccgtggtgggcgtggatgtgtaggtgggcgtggtggcagtggtggatacagacgtgattttgccaatgatgagaattcattcagcaacagtgctgaactcggtcaaggtgcacctgaagatggtgagagtagaaggccatctgaaaggcgtggtggctacggtggtcctcgaccttattgtggtggtggtcttcgtcgtggtttcagtaatggggaaattggacatggggtgagacctcgcaaggtgtatgaacgcattagtgggactggacgcggaaatgagctcgaacgtgaaggctttggtcaggggaattggggaactcaaact

SEQ ID NO: 5861 - DNA, 650 bp, Gossypium hirsutum
  Clone ID: GOSHI-09MAY01-C9732_3
aaaaaaactatacgtttatatataaaaatgatcaataaagtcagttttaaagtatcataattcataccaaaccactataaaatagaattgattacagttaatttctctcctctcgcggctaatatagggtttttctctcttcattatattttctatctcgcagatctattcatcccaacatttgtttgattttgcatgttattaaaatactaaaccgggcgaatattctatctttaagaggaagggcttggagggattagtttgggtgtttttttattgaagaaaaatggcgagctccaacccgtttgatttattgggtgatgatgatactggggagctctcattgctgatcgccgctcagaaaaaggccgctgccaccgccccctccggcgtccctaagaaagggcaggctcaatctcagacgaagccgcaggctaagcttccctccaagcctctccctcctgctcaggctggtaagcttcccctaaaaaaggaagttaccattccagctttattgcttcaatgttgtagcagaaggatttccataattttatatgcaaaaattgaatcttctgggtctttagtttaatttgttgtgcaatattaaagctaccctttttaatgggtctcaatggatctatcttaatata

SEQ ID NO: 5862 - DNA, 1869 bp, Gossypium hirsutum
  Clone ID: GOSHI-09MAY01-C9732_1
aaaaaaaaaacatagcgaagaaaaagagactttttctgtcagattaggtttctctttctcggacgcgtcgctctaagagtcctatactcttaactcttatcccttttgcggctagggtttttctttctacagtacctcttctaacttttttttttaatttattagaagattggtttggtttcataatataaaaatctaatggaagttttgtaagagtaagggattttgtggttattataaaagaaagattctaaggggtttggaagtggttagtgtggattgttcattcaaaaaaaagaaatggctggtttgaacccttttgatttgttgggggatgacgacactggggaactatcattgctgatcgctgctcagcaaaaggccgtcgcagcggccactgccactgctgctgctccaaagaagggcccagcaaagcctcaagctaagacgctgcctgcaactcaggctaagcttccctccaagcctctccctcctgctcaggctgtgagggaggcaaagaatgaaggtgctcgtggcggaggtcgtggtgggcgaggatatggacgtggtcgtggtggtagcggtggttacagacgtgattttgcaaatgacgagaactcattcagcaatagtgctgtacctgaagatggagagagtggaaaaccctctgaaaggcgtggttatggtggtcctcgaccttaccgtggtggtcgccgtggtggtttcagtaatggggaagatgcagacggcgagcgacctcgcagattgtatgaacgccgtagtgggacagggcgcggaaatgagctcaaacgtgaaggctctggtcgtggtaattggggaactcagactgatgaacttgctcaggtgactgaagaagttgccaatgaaggtgaggggaatttaggtgatgaaaagccagcaggagaagaggatgctagagatgctaacaaggagagtgcttcaaacgagcctgaagaaaaagagcccgaggataaggagatgactcttgaggagtatgagaaggtgctggaagagaagaggaaggctctgcaggctctcaagatcgaggaaagaaaagtagatgccaaggagtttgaatctatgcagcagctttcaaacaagaagagtaatgatgaggtcttcatcaaattgggatctgataaagataagagaaaagaggcttatgagaaagaagagagagcaaaaaagtctgtcagcattaatgaatttctgaagccagctgaaggggagaggtactataatccaagtggacgtgggcgcggtcgtgggcgcggctcaagaggattcggtggaggtaatgccgcaagagatgtggcagcaccatccattgaagaccctgggcacttcccaactcttgggggcaagtgaagaagtgagattcctttagaaccccacatatgatatccatgggttttattggaattttaggtacttttaaatttcgggctgggaataagataaaataatctggtttcctgtcgccaaagcatctccgaattttatgttgtaaaatgtatgtttcagggtttttctttctctttttgtttttttggggttattgcccccactattgttatgctgtgatcttactgttattgctcactgctcagttttctttgtggaatagatggaactagtttgctacttgtcttcgaccattttagttgtgttcccctgaatctaaagatgaataatggtgatgcaggggaagtaaagcgtatgattctctattcctacttttgccatgcttgagttgtctccactctttggcttccatgagatgaattctattgccttttaaaaaaaaataaaaaataaaaaaaagaaaaaaataaaaacataaactga

SEQ ID NO: 5863 - DNA, 555 bp, Gossypium hirsutum
  Clone ID: LIB3583-010-P1-K1-E5
cccacgcgtccgaaaatactaaactatggaaatattctatctttaagaggaagggcttggagggattagtttgggtgtttttttattgaagaaaaatggcgagctccaacccgtttgatttattgggtgatgatgatactggggagctctcattgctgatcgccgctcagaaaaaggccgctgccaccgccccctccggcgtccctaagaaagggcaggctcaatctcagacgaagccgcaggctaagcttccctccaagcctctccctcctgctcaggctgtgagggaggcgaagagtgaaggtacttgtggtggaggccgtggtgggcgtggtggcggtacttgtgattatatacagacgtgattttgccaatgatgagaattcattcagcaacagtgctgaactcagtcaaggtgcacccgaagatggtgagagtagaaggccctctgaaaggcgtggtggctacggtggtcctcgaccttatcgtggtggtggtcgccgtggtggtttcagtaatagggaaactggagatggggagggacctcgcagggtg

SEQ ID NO: 5864 - DNA, 417 bp, Gossypium hirsutum
  Clone ID: LIB3166-017-P1-K1-G6
cttttgatttgttgggggatgacgacactggggaactatcattgctgatcgctgctcagcaaaaggccgtcgcatcggccactgccactgctgctgctccaaagaagggcccagcaaagcctcaagctaagacgctgcctgcaactcaggctaagcttccctccaagcctctccctcctgcacaggctgtgagggaggcaaagaatgaaggtgctcgtggcggaggccgtggtgggcgaggatatggacgtggtcgtgttggtagcagtggatacagacgtgattttgcaaatgatgagaattccttcagcaatagtgctgtacgtggagatgaagaaagaaagaaaacacgaggataaagaggtggtagaagaagatgaagagaaagaagagaagaagaagaaaaaaggaaagaag

SEQ ID NO: 5865 - DNA, 467 bp, Gossypium hirsutum
  Clone ID: GOSHI-09MAY01-C9672_1
tttcgaaccggcaggacttaacgtacagtttcttgccggcgaatgggttgaccgacgaagtgaaagccgtcttcacgagcgccttccagaaatggtcaaccgttacgccgctgactttcacacaagtggattcctactcctcggcggacataacgatcgggttttacactggagaccacggagacggcgagccattcgatggggttttagggacgttggcccacgctttttctccaacgagcggaaggctccatttggacggggatgagaactgggtagtttctggtgatgtgacgaaggcatcggtgtcgacggcggtggacttggagtcggtggccgttcatgagatcgggcatctgttgggtttggggcattcgtcggtagaggatgcgattatgtacccatcgataacttcgcggacgaagaaagtggaactggcggacgatgatatccaagggattcaattg

SEQ ID NO: 5866 - DNA, 328 bp, Gossypium hirsutum
  Clone ID: GOSHI-09MAY01-C9662_4
gaatggagctgtcgaagcccacgcggccgcccgcccgttcgccctccccttcggaagaaagccttaatgtactaaatatcattattagcaatcaataaaaaaatgattttattttatggtactacatagtttccgaaaatgtgttgtgttgtgttgtgttgttgcttcaatcaactggaatggtagtgcaaccaaatgcctttgtaagtgaaaaaaaaatgctctgtttcccatgacatgatgaggcctactatgtttcagtttcttctttggatactggtaatgtagtcatatgtgaggcaagagaaaacataatttgactactaat

SEQ ID NO: 5867 - DNA, 733 bp, Gossypium hirsutum
  Clone ID: GOSHI-09MAY01-C9662_2
gaaaacccgggccgaccgacgcgtccgcccacgcgtccgcccacgcgtccgcaggtttcgtgtggctcaaacaaaagaagagcatcagccggaggttctaaaagatagggaagctggtttcctatgcaactgaagtcacggctgtcgttgagaaaggcaagatcaagaagctgactggggtgaagaccaaagagcttttggtttggatcacactgagtgatatccaagtggatgatcctcccactgggaagatcactttcaagactccttcagggctgtttaggactttccctgtatcagcttttgagattgaaggtgaacaagttaagggttctaaggggttggatgaagagaaacaagtgaatggagctgtcgaagtgaacgaagtctagagtcctttttcaattcccaacagaagaaagccttaatgtactaaatatcattattagcaatcaataaaaaaatgattttattttatggtaaaaaaaaaaaaagagaaaaggataaaatagaagcaaaaaaaaaaaagaaaaaaaaaaaggaacaatatcagacaaaaacttcgatagaacgaaccccaggattctgcttggggggggcctttttagaggacccacattcatcatggcgggcttgcgaatacatgttcttttttttgggcgacaaaaatcaaataggtgggcgggtattcaacaactcataaacagggaaaacccttggttttgccacatta

SEQ ID NO: 5868 - DNA, 773 bp, Gossypium hirsutum
  Clone ID: GOSHI-09MAY01-C9662_1
cccacgcgtccgcccacgcgtccgcaaaggttaaagaaagaaagaaaacatgtctcttgtgacagaagagataaaagcgagtgcatcagagatttaccatggagatgagatatgccaagagaaatccaagtttttgttggaggaagtaggcatgccaagggggcttttgccacttagagacatcgaagaatgtgggtacgtgaaggacacaggtttcgtgtggctcaaacaaaagaagagcatcacccacaagttcgaaaagatagggaagctggtttcctatgcaactgaagtcacggctgtcgttgagaaaggcaagatcaagaagctgactggggtgaagaccaaagagcttttggtttggatcacactgagtgatatccaagtggatgatcctcccactgggaagatcactttcaagaccccttcagggctgtttaggactttccctgtatcagcttttgagattgaaggtgaacaagttaagggttctaagggtaaggatgaagagaaacaagtgaatggagctgtggaagtgaaggaagtctagagtcctttttcaattcccaacagaagaaagccttaatgtactaaatatcattattagcaatcaataaaaaaaatgattttattttatggtactgcatagtttcagaaaatgtgttgtgttgttgcttcaatcagctggaatggtagtgtaaccaaatgcctttgtaagtgaaaaaaaatgctccgtttccgcgaaaataatcaatagtaaaatataaattaat

SEQ ID NO: 5869 - DNA, 360 bp, Gossypium hirsutum
  unsure (1)..(360): unsure at all n locations
  Clone ID: LIB3083-072-Q1-L1-C6
cgagtgcatcagatatntaccatggagatgagatatgccaggagaaatccaagtttttgttggaggaagtaggcatgccaagggggcgtgggccacttagagacatcgaagaatgtgggtacgtgaaggacacaggtttcgtgtggctcaaacaaaagaagagcatcacccacggttcgaaagatgggagctggttctatgcaactgagtacggtgcgtgaaaagagacaaaactgctggtgaaacaaactttggtgatacactgtgttcatgtatctcatggaatattagatctaggttagattctgtacttgatgagacatagttagtagtaaaaatatgcttatagagtatcttatc

SEQ ID NO: 5870 - DNA, 484 bp, Gossypium hirsutum
  Clone ID: GOSHI-09MAY01-C9612_1
aagcaagcaagaaggcaggttgagttagcttatcacgagttggccaaggcaaagagagtggggcaacaagcacaagctgaatcagcaaaggctcaagctttaaagaaccatgcagtcaagcaaatcaactccactatttttcaagtcacttgccatgctcgtagacaccgatttcgagcaacagcacctcccgaagagaactctctagttgtgagttacatttcgtcagctataacggaaggtgaagttgaaaacgatagtcttacaaatctaacgaaacccactaacatataaaccaatatatatgtgtgtgtctgtgtgagagtgtgtataaggtgttaatactcgtctttccttcttatatatgccaaaaaatggttggttctataatctggagttgattagtgaaagtgttgtatcgtggctgatgtaatttgttcattaatttggataaatgagaagatataatgatggggttgatatt

SEQ ID NO: 5871 - DNA, 509 bp, Gossypium hirsutum
  Clone ID: GOSHI-09MAY01-C9172_4
gataaattagatgtactagtgaaaaagtgcaattccttttcatcattgacctatgttgctgtcaacaaaaaggggaatttgttatcaaacattggcctcacagatgtgaatgcagtaacttggggagtcttccctgctaaagaaataatccaaccaactgtggtggatcctgccagttttgtggtgtggaaggacgaagcatttgaaatctggtctcgatcatggtccgccttgtacccggacggcgatccttccaagaatttgctcgaagagattcagagcagctactatttggtgagcttggtagataacaattacatggatggtaatatttttggtgtttttgaagatctttgaagatgagacttatgcttatgattttatgtttatgttgtctttctcctttattatagtctcctcctggttgaattttcaattgtaactttatttgtaataatgactatataaagagaattaatattattatgctgcagtgcagtgttccactt

SEQ ID NO: 5872 - DNA, 1034 bp, Gossypium hirsutum
  Clone ID: GOSHI-09MAY01-C9172_2
cccacgcgtccgctcttaaccaaccacaaacccatttaagttggtgttggtgacaccgagagttcaagatccaattaaagatgaaggtgatagagaagatccaatctttgcaagaagggaaagtggtgttttcctttgagttcttccctccaaagactgaggatggagtagacaacctattcgagagaatggatcgtatggttgctcataacccgtccttctgtgacattacatggggtgcaggtggttccactgctgatctcaccctcgacattgctaacaagatgcagaatatcatctgtgtggagacgatgatgcacctcacttgcaccaatatgcccgtagagaagattgaccatgctcttcagaccatcaagtccaacggtattcagaatgttctcgccctccgaggtgacccccctcacggtcaggacaagtttgttcaagtcgaaggcggcttctcttgtgccctcgatttggtgaaacatattagagctaaatatggtgacttctttggtataacagttgctggttatccagaggctcatcctgatgctattggaagtaatggtgtagcaacaccggaagcttatcagagtgatcttgcttacttgaagaagaaggttgatgcgggagctgatcttattgttactcaactgttttatgatactgatatctttctcaaattcgtcaatgattgtcgccaaattggaattacatgtcccattgtgcctggtattatgcccattaataactacaagggtttcgtgcgaatgactggcttttgcaaaactaagataccggatgaggtcactgctgccttagagcctatcaaggacaatgatgaagctgtcaaatcctatggaatccacctcggacagaaatgtgccgcaagatttagcccatgggataagacgtgcacctttatcattaacatgggaatctgcttactatctatgaccctgactgttgagagtcaaattctagtcttacttggaaccctgcaagcttcggtaagaaattcgccatattgg

SEQ ID NO: 5873 - DNA, 2117 bp, Gossypium hirsutum
  Clone ID: GOSHI-09MAY01-C9172_1
caaccacagtctcatttgatccccccttttctgttgctggtactgagagtcccagatccaattaaaaaaaatgaaggtgatagataagatccagtctttctcacaggaccaagggaaagtggttttttcctttgagttcttccctccaaagactgaggatggagtggacaacctgtttgagagaatggatcgaatggtggctcataatccatctttttgtgacatcacatggggtgctggtggttccactgcggatctcactttggacattgctaacaagatgcaaaacatgatatgtgtggaaacaatgatgcatctcacttgcaccaacatgcctgttgagaaaattgaccatgctcttgagaccattaagtctaatggcattcaaaatgttcttgccctcagaggtgacccccctcatggtcaggacaagtttgttcaagtcgaaggcggcttctcttgtgccctcgatctggtgaaacatatcagagctaaatatggtgacttctttggtataacagttgccggttatccagaggctcatcccgatgccattggaagtgacggtgtagccacaccggaagcttatcagagtgatcttgcctacttgaagaggaaggttgatgcgggagctgatctgattgttactcaactgttttatgatactgatatctttctcaaattcgtcaatgattgtcgccaaattggaattacatgtcccatcgtgcctggtattatgcccattaataactacaagggtttcgtgcgaatgactggcttttgcaaaactaagataccggatgaggtcactgctgccttagagcctatcaaggacaatgatgaagctgtcaaatcctatggaatccacctcggaacagaaatgtgccgcaagattttagctcatgggattaagacgttgcacctttatacattaaacatggagaaatctgcattagctatactaatgaaccttggactgattgaagagtccaaaatttctaggtctttaccttggagacgccctgcaaatgtcttccgtgttaaggaagatgttcgcccaatattttgggctaaccgtccaaagagttacttatctaggactattggttgggatcagtacccacaggggcgatggggtgattctcgaaatccatcgtatggtgcactatccgactatcagttcatgaggccccgtgcacgtgacaagaaacttcaggaagaatgggctactcctttgaaaagcattgatgacattcaagagaaatttaaaaaccattgtctgggtaagttgagaagtagcccttggtccgagttggatggtcttcagccagagacaaagatcatacatgaacagctaggaaagatcaatttgaagggcttccttaccatcaatagccaaccagccgtcaatggggaacgctctgattctccatctgtcggttggggtggcccaggagggtacgtttaccagaaggcttacctcgagtttttctgctcactggataaattagatgcactagtgaaaaattgcaattccttttcatcattgacctatgttgctgtcaacaaaaaggggaatttgttatcaaacattggcctcacagatgtgaatgcagtaacttggggagccttccctgctaaagaaataatccaaccaactgtggtggatcctgccagttttgtggtgtggaaggacgaagcatttgaaatctggtctcgatcatggtccaccttgtacccagatggtgatccttctaagaatttgctcgaagagattcagagcagctactatttggtgagcttggtagataacaattacatggatggtaatatttttggtgtttttgaagatctttgaagatgagatttgagatattattatgctgcagtgcagtgttccacttatgcttatgatttaatgtttatggtgtctttctcctttattattgtctcttcgtggttgaattttcaattgtaactttatttgtaataatgactatataaagagaatttatatcttcagatagagatcgtaaattttgctgtacattaaatgtttatgtttattttcgacattttagatttaaaaaaaaaaaaaaaaaatgtcgacgcgcccg

SEQ ID NO: 5874 - DNA, 568 bp, Gossypium hirsutum
  unsure (1)..(568): unsure at all n locations
  Clone ID: AI729106.1
ggcgaagctcaactgttttatgataccgatatctttctcaaaggggtcaatgactgtcgccaaattggaattaattgtcctatcgtgccgggtattatgcccattaataactacaagggtttcttgcgaatgactggcttttgcaaaactaaaataccanctgagattactgctgccttaaaacggggggggggggaacnaanaacctntcaaancctatnaatttcaccttnaaacaaaaattttccncaaaatgttanctcatggggttaaaacattgcacctttatacattaaacatngaaaaatctgcattanctatcctaataaatcgggggtggagggaggagtccgaaatttctaggtccttaccttggagacgccctgcaaatgtgtttcgtgttaaagaagatgttcgtccaatattttggtctaaccgtcctaagagttacataaccaggactattggttgggatcagtacccatatgggcgatggggtgattctcgaaatccgtcctatggtgcactaacaaaccatcagttcatgaggcctcgagcaggtgagggg

SEQ ID NO: 5875 - DNA, 330 bp, Gossypium hirsutum
  Clone ID: LIB3493-039-P1-M1-E9
aaaatgttcttgcccttagaggtgacgctgctgatggtcaggacaagtttgttcaagtcgaaggcggcttctcttgtgccctcgatttggtgaaacatattagagctaaatatggtgacttctttggtataacagttgctggttatccagaggctcatcctgatgctattggaagtaatggtgtagcaacaccggaagcttatcagagggatcttgcttacttgaagaagaacgtggatgcaggagctgatcttattgctactcaaccgccctatgatggtgaggtgattctgagactcactaattgttgaccacaaactgggattgcct

SEQ ID NO: 5876 - DNA, 636 bp, Gossypium hirsutum
  Clone ID: GOSHI-09MAY01-C9162_3
ttagctgctgcggaaggtttattttctttactaaagaataaaagctttttctgcagtagcgttcaagtttttaccaatccaaaatttccatttaaagaaaaaggagaaaccagaaatggctctctctttcgcaaacgctaagcttttctctactttcgttgtcgatggaatctctaacgttatctccagacgaggatatgcggcggcgtcccaaggaattgtgtcgagtggaataagaaggaggagcaggaaggagccctgctgctgtagtcaagaaaacaggggaagagatgtctggtggagctaaagagaaggtttcatgggttcccgacccggttaccggatgctacagacccgagaactgtgccaacgagatcgacgtggcggagctcagagccaccctcttgaagaagcagtaaaaaaaaaaacaaacaaacaaacaaacaaactagtctctatatttttagctcaacaaagctaacctgcttgcttgctcctccgtcctttgtgtaatacttaatgcttgatttctcatatgcgaatcaaggaatttgtactaggagtttcaattgatcttaatcaaatgcttgtttttacttgcattttcttaataattatttgtggtgttgctatgtt

SEQ ID NO: 5877 - DNA, 811 bp, Gossypium hirsutum
  Clone ID: GOSHI-09MAY01-C9162_2
gttggcttgtggacggcgtcttcttttatgttttctcgcggccatcacaagggtctctctggcactttttctcgtctatataaactcaagcagagtcgctcttagaacccatcttcatagcattttctagagagaaagagagagtttcttcttcgctgctgcggaaggtttattttctttaccaaagaataaaagctttttctgcagtagcgttcaagtttttaccaatccaaaatttcaatttaaagaaaaaggagaaaacagaaatggctcgctctttctcaaacgctaagcttttctctactttcgttgtcgatggaatctctaacgttatctccagacgaggatatgcggcggcgtcacaaggaattgtgtcgagtggaataagaggaggagcaggaaggagcgctgctgcggtagtcaagaaaacaggggaagagatgtctggcggagctaaagagaaggtttcatgggttcccgacccggttaccggatgctacagacccgagaactgtgccaacgagatcgacgtggcggagctcagagccaccctctttaagaaacactttaaaaaaaaaaaaaactcctagatccccctgaaaatgagattaacccagcatgcttttcaccgaatattaagtctaaatggttttatgccggcaaaccccaggggggatttagaatgttttaagtggatcccccaaaaagaagctttccatggtggcgccacttttaaaatgatctgggctacttctaacaccttcattttttcgggaggacttcttggggttccttatataaaagggggggg

SEQ ID NO: 5878 - DNA, 865 bp, Gossypium hirsutum
  Clone ID: GOSHI-09MAY01-C9162_1
ttttcaaccccttgttatattaaaaggcctgctttaaaacctaaaacagcatcggtttaaaatggcattctccatagtgcattgaggtagtggctttgatagcaggcaaaggatgtcaagcatattggacgagttttccatccagtgtaacacgccgtaatgtacgctcaaggaatggtacggccccctgaggtttttttttttttttttttttttttcccacgcgtcccttttgagatagcgagagtttcttcttcttcttcttcttcttcttcgctcctgtagaaagtttatttgctcttcaacaataaaaaaaataaaaaaagctttcctacagcagcgctcaagtttttatcaatccagagtttgaatttgaattgaacaaatcaatattaagataagagaaatggctcgctctctctccaacgctaagcttttctctacttttgttgtcgatggaatctctaacgttatctccagacgaggatatgcggcggcatcacaaggaattgtgtcgagtggaataagaggaggagcgggaaggagcgctgctacggtggccaagaaaacaggggaagagatgtctcgcggagctaaagagaaggtttcgtgggttcccgaccctgttaccggatgctacagacccgagaactgtcccaatgagatcgacgtggccgagctcagatccatgctcttgaagaagcactaaataaacaagggtgacctggttgcttgctcctcttttcttttggtcgacgaaatagattttaagatttgatgatgtaatattaataataaataatagtacttaacatttttaatcaattttgttgacttgctctaaaaaaaaaaaaaaaactcgaga

SEQ ID NO: 5879 - DNA, 645 bp, Gossypium hirsutum
  Clone ID: AI055632.1
gagagtttcttcttcttttcttcttcgctgctgtagaaagtttatttgctcttcaacaataaaaaataaaaaaagctttcctacagcagcgctcaagtttttatcaatccagagtttgaatttgaattgaacagatcaatattaagataagagaaatggcttgctctctctccaacgctaagcttttctctacttttgtcgtcgatgtaatctctaacgttatctccagacgaggatatgcggcggcatcacaaggaattgtgtcgagtggaataagaggaggagcgggaaggagcgctgctacggtggccaagaaaacaggggaagatatgtctggcggagcttaaaaaaaggtttcccgggggttcccaaccccggttacggaatgctacagaacccgaaaactgtcccaatgggaacgacctggccgaacctaaatccatgctcttgaagaagcactaaataaacaagggtgacctgattgcttgctcctctggccttttgtcgaccaaatagattttaagaattgatgaagttataattataataaataataatacttaacatttctaatccaaatgacataaataaaacttcagggggggcccggtaccccattgccttaaatgaagcgattacaattag

SEQ ID NO: 5880 - DNA, 572 bp, Gossypium hirsutum
  unsure (1)..(572): unsure at all n locations
  Clone ID: LIB3825-003-Q1-K6-H11
attttctagagagnaagcgagagtttcttcttcttcttcttcttcttcttcgctcctgtagaaagtttatttgctcttcaacaataaaaaaataaaaaagctttcctacagcagcgctcaagtttttatcaatccagagtttgaatttgaattgaacaaatcaatattaagataagagaaatggctcgctctctctccaacgctaagcttttctctacttttgttgtcgatggaatctctaacgttatctccaggttcttttttatttctttccatggctctgttttttttttacgtgtatatataatgaagtgacaaacgaataaagatttgatgatgtttatttttgtttagacgaggatatgcggcggcatcacaaggaattgtgtcgagtggaataagaggaggagcgggaaggagcgctgctacggtggccaagaaaacaggggaagagatgtctcgcggagctaaagagaaggtttcgtgggttcccgaccctgttaccggatgctacagacccgagaactgtcccaatgagatcgacgtggccgagctcagatccatgctcttga

SEQ ID NO: 5881 - DNA, 450 bp, Gossypium hirsutum
  Clone ID: LIB3135-037-Q1-K1-A7
cgcgagactccaaacaagcagaactttcctttttcggctccagaaacaaaggagagttgcgggtcagcacctcagggaaacagagaaagctatcctacagcagagctgaagattttatccaaaccaagatcgaagtcgacttgaacacgccaacattaaaagaatagaaacggatcgctctctctacaacactaatctaatgtctacctccgatgacgatggaaactctaacggcaactccagacgacgatattcaagcggataacaaggaagagggaccagtggaataataggaggagcggtaaggatcgcatgtactccggccaatataacaggggaagagatgtctcgcggagctaaagagaaggtttcgagggttcccgaccctgtgaccggatgctacagacccgagaactgttccaatgagatcgacggggccgagctcagatc

SEQ ID NO: 5882 - DNA, 432 bp, Gossypium hirsutum
  Clone ID: LIB3135-053-Q1-K1-A12
cccacgcgtccgcccacgcgtccggtttcatgttaccgatgctacccttatccgcggctgtcggaagagtattggctctgcaacactaaaaaacgtcttaagtgccttgctacagcagggcctaccattttatcattacaaaatgggtatttggcttgaacaactcaatattaagataagagaaacggctcgctctttcttcaacgctcaactgagatataacctagtcgacgatggaatcgtctaacgttctatccagacgaggacatgcggcggcatcacaaggaattgtgtcgagtggaatacgaagacgagcgctacagagcgctgctacggtggccaagaaaacacgggaagacatgtctcgctgagctaaagagaatgcttcgtggcttcccgaccctgttaccggatgctacagacccgagaact

SEQ ID NO: 5883 - DNA, 345 bp, Gossypium hirsutum
  Clone ID: LIB3272-042-P1-K1-F7
gaaagagagagtttcttcttcgctgctgcggaaggtttattttctttcccaaagaatgaaagctttttctgcaggagcgttcaagtttttaccaatccaaaatttcaatttaaagaaaaaggagaaaacagaaatggctcgctctttctcaaacgctaagcttttctctactttcgttgtcgatggaatctctaacgttatctccagacgaggatatgcggcggcgtcacaaggaattgtgtcgagtggaataagagatgtctggcggagctaaagagaaggtttcatgggttcccgacccgggtaccggatgctacagacccgagaactgtgccaacgagatcg

SEQ ID NO: 5884 - DNA, 596 bp, Gossypium hirsutum
  Clone ID: GOSHI-09MAY01-C9132_1
acgttaaaatttctttatccggacggaacttcatttggttctcatttctcactcagatctgacaggtgccgtttcttataccttatcagctcagatctagctgagttgaatccgacgcttggtatacgtcgccggcacacatcttaaaaaagaaaaagaaaaatggataatttgatttctctggtgaacaagattcaaagagcttgcactgctcttggtgatcatggagaggcaagcgccttgcctactctttgggattccttaccggcgatcgccgtcgttggtggtcagagttcagggaaatcttcggtgttggaaagcgttgtcggcaaggattttttacctcgtggatccggtattgttactcgtagacctctggtgttacagcttcataaaagtgatgaaggaaccagagaatatgctgagtttcttcaccttcctagaaaaagaattaccgattttgctgctgttaggaaggagattcaagatgagacggatagagaaactgggcgaactaaacaaatatctagtgttccaattcatcttagtatattttctcccaacgttgtcaatttgactctggttgaccttcctgg

SEQ ID NO: 5885 - DNA, 554 bp, Gossypium hirsutum
  Clone ID: GOSHI-09MAY01-C109069_1
cccacgcgtccgcccacgcgtccgcccacgcgtgcgataatatttgcacatactatcagaaaggaatctgttcttatggtagtcaatgcagatatgaacatgtgaaggcatctcaaacggatttatctgcttcgtcttcatcgacaaagcctcgtcaatttggggtctcgggttctgctcctttaggtccttcaacgagtacatattgtggttccgttgtacttccagctacttctggcgagtttcctggttctaatggaggcgtcctccctccctcaacgaatcaagcatggcatttggaatccgggcaacaagatcttttggatgatggtgatgttttgcagcctaggagtgctaatctagtcgaacttcctatttgctcatttgctgcagctggtaattgcccccgtggagataattgtccccatattcatggagacttgtgtcccacctgtggaaaacattgtttacatcctttcagagctgaggaaagggaggagcatgtctaaatgtgcgagtaaaagcatatgcacctcgaggcattgaattatagt

SEQ ID NO: 5886 - DNA, 761 bp, Gossypium hirsutum
  Clone ID: GOSHI-09MAY01-C9052_1
cccacgctgtccgatcgaaattggcgccgtcaaagtcctggaatctggcgcgatggaaacgtctacaaaaacctacagctggtaagggaagatgggagaagcttgcagaaacaagtggcgaggttcattagcgggccgatgcaggcccatctcttagccgacgtgcatcatatgaggttcgaaacgatggaacggttcaaccggttggaacagcggctagattcgatgaagactggatcgggaaggtgggttgaagaagcagttaagagaatggaagtggaaggggattctaatctggggggttttagtggaattggtttggaattagggaaagataaggtgaaaaagatgatgattgaaagggatgatttaaacgttgttggaatttggggtattggaggatcagggaaaacaactttggctaatgaaatttgtagagataatcaagttcaaagttacttcaacaacagaattttgttcttaacggtatcacaatcaccagatctggaacagctgagggcaaaaatatggggatttattacaggaaacgagcctttgaattatactaggaaatcgcagtgtgagtggggaagtggaccgcaagctctagttgttttggatgatgtctggtcgttgccagtacttgaacaattgagttttaaggtcccgacatacaaaaccctggtaatttcaagatttaagttcccaagacgtgttgttaatgaagtttatgaagttgagttgctggaagaagatgaatc

SEQ ID NO: 5887 - DNA, 696 bp, Gossypium hirsutum
  Clone ID: GOSHI-09MAY01-C9042_1
ggaagggtccgcccacgcgtccaaaaaaagagtctaacaatttatggttaaaattgtaatcttgagatctgatcggaaggttgtggacgagagaatgagctctaagaggaaggtgttgcagggtaacacgacgaggacgcgtgtagggaagtacgagcttgggaaaaccttgggcgaggggagctttgcaaaggttaagttcgctaagaatgttgagactggcgagtgcgtcgccattaaaatcctcgaccgtgaccaagttctccgtcaccgaatggtcgaacagataaaaagagaaatatcaacaatgaagcttatcaagcatcccaatgtcattaaaatatttgaggttatggcaagctagacaaggatttatatcgtcatcgaatttgttgatggtggcgagcttttcgacaaaattgccaagaacgggagacttatagaggatgaagccaggagctattttcatcagcttatcatgctgttgattactccacagtagagcgtctacctagagatttgaagccagagatcttttctgactcgttggggtcttaaattcagatttggttggtgcttctccagcagttcggaagatggtgtttaactgttgcggactcaatatgttgttcgagggctaaaataaggttgaggtcttctctgattggtcttcgggtattccttgttcaatgcggt

SEQ ID NO: 5888 - DNA, 720 bp, Gossypium hirsutum
  Clone ID: GOSHI-09MAY01-C9062_1
cttcaaggaatggaggtgaggcaaatagtctcaccagtaatctggaaaatatttcttttgctgctaaatccaggcactccaatgatgcaaaacctggaagagcaatttcacgggcacagtataaacctgaaaagtggatgctccctgaaaaagcagaacattcactgactcaactaaatcttgcaattgttgggcatgtggattctggaaaatcgacgctctctggtagactgcttcaccttttgggacgaatatcccaaaaagaaatgcacaaatatgaaaaggaggccaaagtgcagggaagaggatcctttgcttatgcttgggcattggatgagagtgcggaagaaagggaaaggggagtcaccatgactgtggctgtggcttatttggattcaaaaagatatcatgttgttgtccttgactccccagggcacaaagattttgttccaaatatgataactggggcaacacaagctgatgctgcaattcttgttatagatgcctctattggttcatttgaagctggtatggatggcacaaagggacagacaagggaacatgcacaactcatcagaagttttggtgtcgatcaaattatagttgcagttaacaagatggatgctgtagagtactctaaggatcgatttgatttgataaaatcacagcttgggacatttctccgctcttgttactttaaggattcctcagtcatatgga

SEQ ID NO: 5889 - DNA, 440 bp, Gossypium hirsutum
  Clone ID: GOSHI-09MAY01-C9002_1
aaacccgggcggacccacgcgtccggaaggcttgactgacgatgacattcgaactgctattcagaatgcaactggtcctagatcgtggctatttgtacctgaagtcccgtttgaagtgcttgttcgagggcaaatagcacgtctgctagatccaagccttcaatgtgccaggttcatatatgatgagttaataaagattagccatcgctgtatggtgaatgaactgcagcggtttcccgttctgaggaagcatatggaccaagttgttggaaattttctccgagaaggtcttgaaccatctgagacaatgataggtcatatgattgaaatggagatggattacataaatacttcccacccgaattttattggtgggagcaaggctgtggagcttgccaatcaacagctcaggaattccaaggttgctcttcccatatcta

SEQ ID NO: 5890 - DNA, 593 bp, Gossypium hirsutum
  Clone ID: GOSHI-09MAY01-C9022_3
ccccgcctccccaggggttgataaagaaaggatccttccctttgtcttcaccctttggctttcccatttttttatttttattttcaatttgccccttaatctgttcttcgttaacatctccagcaatccccaattttcaatttcgttttgttcactgcataagttttttttagaaacctaaatccgatcacaagagaaatctcatggccactactggaaacaagaacatcaatgctaaattagttctacttggggatgtcggagctgggaagtcgagtcttgtattacgctttgttaaagggcaattcgttgaatttcaggaatcgaccatcggtgcggcttttttctcccaaacggtggccgtgaatgatgcgacggtaaagtttgagatttgggataccgctggtcaagagagataccatagcttggcaccaatgtattacagaggagctgcagctgcgatcattgtctatgatataacgaatcaagcatcgtttgagagagccaaaaaaggggtccaggaacttcaatcgcaaggcaattcgaatttggtaacggcacttgccgggaacaaagctgtttacttgatgcaa

SEQ ID NO: 5891 - DNA, 1200 bp, Gossypium hirsutum
  Clone ID: GOSHI-09MAY01-C9022_2
cccactcgtccgcccacgcgtccggttgggttaagcactctttaaaaaaaaggcaggtgaaggaaaaataaaaaggaaatctaagagggaaggtaaattaaaattgcaatcaatttcgagtttggtagtcgggatcagggtgtctttagaaattaaagagagtttgatttggtttttagggtggaggcttaaggaggatccttccttttacttttatcgtttggcttttgtcagccactcttttcttgttcttgttcgtcaacgcctccaacacatattacttaatcaatattttcttcatctgattttgatcggagcatcagtctggttagaagggatctcatggccaccactggaaacaagaacatcaatgctaaattagttctacttggggatgttggagctggaaagtctagtcttgttttgcgcttcgttaaagggcaatttgttgaatttcaggaatcaaccataggtgcagcttttttctcccaaacattggctgtgaatgatgcaactgtgaagtttgagatttgggatacagctggtcaagagaggtaccatagcttggcaccaatgtattacagaggagctgcggctgctatcattgtgtatgatattacaaatcaagcatcatttgagagagccaaaaaatgggtccaagaacttcaagcacaaggcaatcctggtatgggtaatggcactggccgggaacaaagctgacttactggatgcaaggaaggtggcagcagaggaagcacaaacttatgctcaggagaatggtcttttcttcatggaaacttctgcaaagaccgcatccaatgtcaatgaacttttctatgaaatagctaaaagattacctcgagtgcagccagcacaaaatcctgctggaatggttctcatgaatagaccttcagaacggactgcaactgcatcttgttgctcttaggcgatggtcgttgttttcccacctgtatcatctaaatagctcttgtaatgctccctggctctgcaaccaaagttttatctttcctttgccctgtttgtactattcattgaaagctgtacatgcgtgttgtttaaaggcattgatatacaccaaattattcgattggagattggtttttcttgtaaaaaaaaaaaaaaaaaaaaaaaaaaaaaaacaaaaaaaaaaaaacaaaaggaaaattaaaaaaacttgag

SEQ ID NO: 5892 - DNA, 1053 bp, Gossypium hirsutum
  Clone ID: GOSHI-09MAY01-C9022_1
gtcgtttcttaagagagtttgctggggggttgaggaggatctttccctttgcttctaccctttggcttttacatccctcttctcactacttcccctttctttgtcaacgcaccaataaacctcaattctccatcttgtctttctttctttttttactccttagtttttattttcatttgtttactttttgaacataaatctgatcgtagaggatctcattctcatggccaccactggaaacaagaacatcaatgctaaattagttctacttggggatgttggagctggaaagtctagtcttgttttgcgcttcgttaaagggcaatttgttgaatttcaggaatcaaccataggtgcagctttcttctcccaaacattggctgtgaatgatgcaactgtgaagtttgagatttgggatacagctggtcaagagaggtaccatagcttggcaccaatgtattacagaggagctgcagctgctatcattgtgtatgatattacaaatcaagcatcatttgagagagccaaaaaatgggtccaagaacttcaagcacaaggcaatcctggtatggtaatggcacttgccgggaacaaagctgatttactggatgcaaggaaggtggcagcagaggaagcacaaacttatgctcaggagaatggtcttttcttcaaggaaacatctgcaaagaccgcatccaatgtcaatgagattttctacgaaatagccaaaagattacctcgagtgcagccagcacaaaatcctgctggaatggttctcatggatagacctgcagaacggagtgctagtgccacttgttgctcttaggcattggacggtttccttcctgtatcttctaagtagcttacgcaatacttctgcggtcgaagttttatcttccatactttgccatgtttatgtgctattcattatgggttgtacatggatgcttgttatctagacctgatgatatctaccagtcaattgtgttaatgattgattattcttgtatattaaagttcgataatggtattatgtttcacttccatggttac

SEQ ID NO: 5893 - DNA, 427 bp, Gossypium hirsutum
  Clone ID: LIB3584-033-P1-K1-D4
cccacgcgtccggaccgcatccaatgtcaatgaacttttctatgaaatagctaaaagattacctcgagtgcagccagcacaaaatcctgctggaatggttctcatgaatagaccttcagaacggactgcaactgcatcttgttgctcttaggcgatggtcgttgttttcccacctgtatcatctaaatagctcttgtaatgctccctggctctgcaaccaaagttttatctttcctttgccctgtttgtactattcattgagagctgtacatgcgtgttgtctagaggcattgatataaacccgtttattgcattggagattggtttttcttgtaattaaagtgtggtaatgctatgtttcacggccatagtacgacctgcatgttcaaataaaaatgcttgcctgtgttgacttggctgctccttt

SEQ ID NO: 5894 - DNA, 430 bp, Gossypium hirsutum
  Clone ID: LIB3166-013-P1-K1-F7
ctcaattctccatcttttctttctttctttttttactccttagtttttattttcattggtgtactttttgaacataaatctgatcgtagaggatctcattctcatggccaccactggaaacaagaacatcaatgctaaattagttctacttggggatgttggagctgggaagtctagccttgtgttgcgctttgttaaaggacaatttgttgaatttcaggaatcaaccataggtgcagctttcttttcccagacattggccgtgaatgatgcaactgtaaagtttgagatatgggatacagctgggcaagaaaggtatcacagcttggcaccaatgtactaccgaggagctgcagctgcgattattgggcttcatttgaaagagccaaaaattgggttcaagaacttcaagcacaaggcaatcctaata

SEQ ID NO: 5895 - DNA, 420 bp, Gossypium hirsutum
  Clone ID: LIB3197-051-Q1-M1-E5
gcttaaggaggatccttccttttacttttatcgtttggcttttgtcagccactcttttcttgttcttgttcgtcaacgcctccaacacatattacttaatcaatattttcttcatctgattttgatcggagcatcagtctggttagaagggatctcatggccactactggaaacaagaacatcaatgctaaattagtcggtatctctctctctctctctctctctttaaaccctctttttgctttcaggagtatttttttttctctttaaagttaatactagtattttttgctctggttctttcttagatgctgaattctaacctgggtctggatgaattgtggatcatacttgatttttatgtgaaatgtgaatatagtgttgtcttaattttgaaaaaactgttttgattttggtagt

SEQ ID NO: 5896 - DNA, 871 bp, Gossypium hirsutum
  Clone ID: GOSHI-09MAY01-C9392_1
cttctcttttgttccactcgaaccccaaaactgtgtttataatggggggaggggaagggtctgcagcaagggaagcactcaggcataaatttattgatgaagttgtaatgtgtgatattgatgaggaagtggtcaatttctgccgcagatacctgactgtgaaccgtgatgcattttgcaacaaaaagcttaaccttgttatcaatgatgccaaggctgaactggagaagaggactgagaaatttgatatcatggttggagatttagcagatcctgttgaaggggggccttgctatcaactttatacaaaatcattttatgagaaaattcttaagcccaaactcaatgaaaatggcatttttgtcactcaggctggcccagctggaatattcactcacaaggaggtcttttcctctatataccacacaatcaggcaggttttcaagtatgtgttggcatacacagctcatgtgccatcctttgctgatacatggggatgggttatggcctcggatcaaccattctccattggtgctgaagaaattgacaagaggattgctgaaagagtagatggtgaattactctacttgaatggctcttcattcctttcctctgcaaccatgaacaagactggttatctatcgctgttgaacgaaacccaatgtctacactgagggaaaatccgagatttataccaggacatggattgggtaaccacctttgaggtttgcaggccttaatcttggggagaagtttgttgtaaataaaagaaaaaaagggaaaggttgcaattaaaagatagcatcaaaaagacttttgcttcaaacgaaatgagtcatcaattgttgaaagaagttggtttttaattttt

SEQ ID NO: 5897 - DNA, 559 bp, Gossypium hirsutum
  Clone ID: GOSHI-09MAY01-C9382_1
ctcattcttaaccacaaagaaacagaaatgaaacgactaacctaaacaaattcagacctgaaagctcatcttccctttcgttaaactccaaatctcctttgtatcagttactcacaaagaccgattattgcataggatcaaagctattgaagtcttcttctcggtcggaagcacgagttcatcggaaaaacaaagtgtagcaaagtccggactttaactctccatctcttcacattctccgttacctctcctttctccatccaccagtccttccaccgcacgcaggaccttctctatccagtattgggggatttcatgccgccgtcctttcatcgccaccctggattatagttagcgcatcaccttcaatacaaatatcttggaagcttatttccttagccatagtaatggcttgcaaacacgcccttgcctcggccatgatcggatctgagatattctcccatggaaagttgaatgaagcgtcgaagttcacttttatagtgccgttctctggaggtttccattcagaactgtccactacttgtacttgcctcaacaa

SEQ ID NO: 5898 - DNA, 374 bp, Gossypium hirsutum
  Clone ID: GOSHI-09MAY01-C109369_1
tttacatttaatattgctgagaataatttgaatgagctggagcatgttgcccttcaacatccattgattcccactgaaaatggtgatgaaaaacttatagatgtttctaactgctttgggtgccgggatccattagctaattatacacgcttttctcctttccgtggattcaacttacatgagatatgctctgagattccttccgaattgaatcatgtgtggcatcgctttgcatcctcttgtcctacaatttaatagcgtaacggctctcttgcaagatatgctgcccgggtaccatgcgaagaggatttgtttatggttgttctccttgtaagtttgttgttcacattgaatgtgcatcacaatcaccatta

SEQ ID NO: 5899 - DNA, 818 bp, Gossypium hirsutum
  Clone ID: GOSHI-09MAY01-C109299_1
gttgtctgttgctgcccctacgatcgcagcttcattggatggtgggtatttgagtgggttaaaggaggagagggaaaatgctgctgaggttttgaaagaagctggattgaaagaagaagttgggagcctagcaaaaggaattgataagaaaagattgattgatgatgttaggcaagctttatatgcgtccaagatatgcagttatgctcaagggatgaatttgttgagagcgaaaagtgttgaaaaaggatggaatttgaactttggagagttggctaggatttggaaaggtgggtgtattattagggctgtgtttttggataggatcaagaaggcttaccagaggaaccctaatttggctagcttggttgtagaccctgagtttgctagggagatggttcagaggcaagctgcttggaggagagttgtggggttggccatctctgctgggatcagcacaccaggaatgtgtgctagtcttgcctatttcgatacctataggcgtgcaaggctcccggccaatctcgtgcaggcacagagggacttgttcggggcacacacctatgagaggatcgatcgtccagggtcatttcatacagagtggaaaaagtccgctcaaaagattaatgccggtgttggtgcactcaattgaggtttctgagtttagtttgttgtactgtggctttacttgtttgtttcaaatgagcattggttatgttatgtttttatgttggaataggattctaccttggcataccaaggatgttcaagcttgaagtttttctttttctttaaataaaatgcatgcctaatgagtc

SEQ ID NO: 5900 - DNA, 175 bp, Gossypium hirsutum
  Clone ID: uC-gsronu33B072d10b1
ctcacgcgtccggcctagcaaaaggaattgataagaaaagattgattgatgatgttaggcaagctttatatgcgtccaagatatgcagttatgctcaagggatgaatttgttgcgagccattagtgcttcatcctggcttgttcttccctcttatttcttctcctcttttttttt

SEQ ID NO: 5901 - DNA, 521 bp, Gossypium hirsutum
  Clone ID: GOSHI-09MAY01-C9242_1
cggacgcgtgggctttttattctttcttttagaacaaaaagcatcgcaattttcagttttacctgaaatttcagcttacgaacttgttttacctgaaaatttgaatttttagcatcggaaaagctttcaattttcgttatggaaatgtacccaagtacgattgattccgatttaatgatgctggactcaattcggagacacttactcggcgaatcatccgacttgcggttcacttcttcaaatgactgtaccaacgtgggcgcggctccccctatgttttgcaggagctccagctttagccgcttgtacccttgtttgactgacacctggggtgacctcccactcaaagagaacgattctgaagacatgctagttttcgggtaccttagagatgctttaaccgtcggttgggccccctccgatcactcttccccgacttttccgccaattaaaccgaacctcaagagattccgaccgagacagcggtgaaagaggttcctacggtggctaatgcggcggtt

SEQ ID NO: 5902 - DNA, 420 bp, Gossypium hirsutum
  Clone ID: GOSHI-09MAY01-C9262_1
tccgaccagcatccaataaaccgagtcatgaccttctcgtgtcctggacaatgatcttatgaggtactcagcctttcagactttggatggcgacattgacctgaagctcctcaccaaagtgctggccccagagcatgaagtgcgagaggatgatgtggcctgggactgggaccatctatacactgaggtgtcctcagagctcctcacacagtgggacctgctgccggcagagaaggaggaccccgttggaccatcgaggcacatctgacccaggaacgccactgtgcatttggacaaatgcatgaagtctaaaaccatgggagcttgtgagcagcttacaatttttatacagaatattttgtaatagaatatttattttcagtaggacacattggagcattccaattcaataaatgactt

SEQ ID NO: 5903 - DNA, 616 bp, Gossypium hirsutum
  Clone ID: GOSHI-09MAY01-C4982_1
gctttttcactttgtgaagctttcatttctactccactctttttctcatcttcagatctcatctccttccctaaggttaaccaatggcaacagttcgaaatctgaaaatcaagacatccacttgcaaacgaattcttaaagagcttcactcatatgagaaggaagttgaaagagaagctgctaaaacagctgacatgaaagagaaaggagctgacccttatgacctaaagcaacaggaaaatgtgctggctgaatcaaggatgatggtccctgattgtcacaagcggctagaggcttcattagctgaccttaaagcaactttggctgaattggaggaagcgaatgagaaggaaggccctgaattcgaagatgctcgcagcaccatcatcgaagttgaaaagttgtttcaaacaacagaggcttagtgacagcttcttttaagtggctgtagttaccataaaaaaaattgacatagatggttataagttcgtatgtttctatttctagctacaacctggtaagatgtcttttggaacttggaatcttgcctgttatctgaaactgattctgcaaataccaatgttgttttcttgagtacttaatatctggttttttc

SEQ ID NO: 5904 - DNA, 742 bp, Gossypium hirsutum
  Clone ID: GOSHI-09MAY01-C104949_1
ccctaaacaaattaaaatggggattttaatttaaaaccaaaaacagaagagtattttccatttaaagccactcatcaatcaaatgcttgaatttttagtttatagttcatggcaaaaaggcccccgccgtctgctgccaccagcatgttcccctataactagattttttttaataatatttaaaaggaaaaaagaaactaaaatctagcattttcgaagccgtgtaaatcgctgactctattcaacgacttcttcatcatggccactttagccaacttctcagccgctctccaagccgaaaacggcgtaagtggctccccgttttcatccatcaccactgtcatcgactcccttcccctttccctttccctttcgttcaccctccgtcgttggatttccatcatctgctgtttcctccaatgcaattccgccaactcaacttctaaccctctggcatactcttcggccgactgcgaattcgactgcatcaacaaggctcgagccgagcccaacaaatggtaagcgcttgtcaagtcgttactgcactctatcagccttctcgcctcggctatggctcgagtcgagatgaaaaagaatctcaactgttcgattttaggagccgatgatcgaacgtcgttgggccgaggtacgagaagcgcttgatctctgccgtacacgacatcttgtgtggcgggatccttgtaaagacagcgaacgcacatcacgtggccggacgagaaga

SEQ ID NO: 5905 - DNA, 843 bp, Gossypium hirsutum
  Clone ID: GOSHI-09MAY01-C4962_2
attgggtcattgcagatgtttgtggaaaacaatggaagttgtgaggatatgggtcctggggctggccagttgagcaagtacataaaatcactgtgttggatataagattggctaatgttgataggcatgctggaaatattttattgagcaaagatgaagatgggcaaacagtgctggttccaattgaccatggctgttgcctgcctccatgctttgaagtattgcacatttgactggctgtattggcctcaagctcgtcaatcctactcgcctgagacacttgaatatataaaatcattggatgctgaagaagatatttcccttttgaaatcccttggatgggatatgccaccagagtgcgcacgcaccctccgcatctccaccatgctcctcaaaaagggtgcggagagagggttcactccccatgcgattggaagtataatgtgcagggagaatttgaaggaggaatctccaattgagcaaatggtccaagaggcacaggattccgtgcttcctggcacaagtgaagctgcatttctggagacactctctcagatcatggatcgacatcttgatgagattactgggctatgaaaagctcaaattctgtattttctgggggggggggggggtttaccaccttttatagacaaacaaatggcttaagaaatgtggcatgccatcttaacaattgcaccatgtaccttgtgtatggttgaaaccaagtggcaacatccctgtattgttcgaggaaatgggtggcgatccgacacagcttgcttttgcaaccagaacgacggcaagtttgcgctcgcaatgatttgactctcacccattacccat

SEQ ID NO: 5906 - DNA, 1826 bp, Gossypium hirsutum
  Clone ID: GOSHI-09MAY01-C4962_1
agacaaccaaagtggggtcacctaagagatgtccataaggctataaagctttgtgaagaagcattgatagccactgatcctaaaatttcctctttgggtccaaacttggaggctgctgtatataaaacaggatcgggaggatgttctgcttttcttgccaatatagacaccaaatctgatgcgactgttaatttcaatggcaattcataccatttgcctgcatggtctgtcagcatcttaccagactgcaagaatgtagttatgaataccgccaaggttaactctatgagtgtgattccaagcttcatgcatgaatcattgaatacaaatgctgattcaactgactcaatcgggtcaggctggagttggataaacgaacccattggcatctctaaggctagcgcatttaacaaacttggattgttagagcaaatcaacactgctgctgataaaagtgactacttgtggtattcgttaagcatgaatatcaagggagatgagcctttccttcaagatggatctcaaactgttcttcatgtggaatcacttgggcatggccttcatgcttttataaatgggaaacttgcagggagcagaactggtaatagcgacaatgctaaggttaaagtggatatccccatcacagttgtccctgggaagaacacgattgatctccttagtttgaccgtagggctgcagaactatggggccttctttgacctatcaggggcggggataactggtccagtgaaactaaatggtttaagtaatggtagcagtattgatctctcctcacagcaatggacgtatcaggttggacttaaaggggaagattcgggtctaccaagtggaagttcatcggaatgggtttcacaacccgcattgccaaagaatcaacccctaatatggtacaagacaaattttgatgcccctactgggaatgaccctgttgctttagacttcatggggatggggaagggtgaagcatggatcaacggacagagcattggacgatattggcctgcctatatcgcttcaaacagtggctgtactgactcttgtgattatagaggaccttatagtgcaaacaaatgccgcaagaattgtgggaagccatctcagcaattgtaccatgtacctcgttcatggttgaaaccaagtggcaacattcttgtattgttcgaggaaatgggtggggatccgacacagcttgcttttgcaaccagaaagatgggaagtttgtgctcgcatgtatctgactctcacccattacccatggatatgtggggtttggattcgaaaacaagaagggcttcaaaccctacgctatccctcagttgcccatctccgaatcaggttatttcttcaatcaaatttgccagctttggaactcctcttggcacttgcggcagttttagccatgggaggtgtagcggtgctaaagcacattccattgtccagaaggtttgtgttggatcgacaagttgtagtatcgatgtatccccccgcgcccggggtgacccttgcaaaggtgtaaagaagagcttagctgtagaagtttcttgtgcatgaagaaatgtgattaagaacggattattgggtgccagagaagtgcaagcgttggatcaaataagcttttcaacaatgagttctgctgataatgggaaaaagacgtctcataccagaaacgtgttcttgctagtactagagaaataaacattagtgtagtgtatcacttcaatggtatttctgcatcagtatatcttttaacaccgtaccaagaaacgatatcaaagtaaattttatcaatatatatctataatgat

SEQ ID NO: 5907 - DNA, 366 bp, Gossypium hirsutum
  Clone ID: LIB3828-001-Q1-K6-G2
ggattccgtgcttcctggcacaagtgaagctgcatttctggagacactctctcagatcatggatcgacatcttgatgagattactgggctatgaaaatgctaacccaaaacacttttaatagtgatgaacatctttagagaatgctggtttttatagttgctagttaagtagttgcacataccttctattcagcagaatgcacaatggtctattctttcttctcctccctttgatgcgattctctattctttatggcactttacagaatgccacttagttagaggttcacaatcatttcaattgtttatcaagatgtttttttgttggttttttgaaatttgaagtaaagacacgagtttcttctc

SEQ ID NO: 5908 - DNA, 358 bp, Gossypium hirsutum
  unsure (1)..(358): unsure at all n locations
  Clone ID: LIB3148-020-Q1-K1-H1
cccacgcgttcgnggactctttggcggacgttttgtctagaattgtgggaagccatctcaggcgagtgtatcatgtacctcggtcatggttgaaaccaagtggcaacattcttgtattgttcgaggaaatgggtggcgatccgacacagcttgcttttgcaaccagaaagatgggaagtttgtgctcgcatgtatctgactctcacccattacccatggatatgtggggtttggattcaaaaacaagaagggcttcaaaccctacgctatccctcagttgcccatttccgaatcaagttatttctgcaatcaaatttgccagctttggaactcctcttggcacttgcggcagttttag

SEQ ID NO: 5909 - DNA, 559 bp, Gossypium hirsutum
  Clone ID: GOSHI-09MAY01-C4912_1
ctctaacaaacatcacttaaatattcgacattggcgcattattattgctttgcctttcaatatcgatgttcatggctgttgaatcaactctcccgactccagtccgaactccggcttccgagaaagatgcgaaagctcttcaattcattgaagagatgacaaaaaatgtcgattcggttcaagaaaggcttttacgtgagatcctaggccgaaatgccgagactgagtatctcaaacggttcagcctcaatggagctacggaccgggaaacattcaagtctcgaatccctgttgtcacttatgaagatatacagcctgagattcaacgcatcgccaatggtgataagtcccctatcttttcagctcatcccatttcagagtttctcactagctctgggacttcagctggagaaaggaagctgatgccaacaattcatgaagagttggatcgtcgtcaactcttgtatagccttcttatgcctgtaatgaacctctacgttccaggattggacaaagggaagggtctttacttcttgtttgtgaaagctgaaacaaagac

SEQ ID NO: 5910 - DNA, 566 bp, Gossypium hirsutum
  Clone ID: LIB3583-058-P1-K1-G11
acggtaatcttctaactttgtttataactttatgatatctccatcatcatcgatcatggctgttggtgaggtctctcctccgtagttggtgcctcctttagtgagaaagacgccaaagctcttcagttcattgaagagatgacaaagaatgttgattctgttcaagagaggattttaggtgagatcttaagtcgaaatgccgacactgagtacctcaaacgcttccagctcaatggagctacggaccgggacacattcaagtccaaagtccctgttgtcacttacgaggatcttcagcctgaaatccaacgtatcgccaatggtgacaagtctcccatcttatcttctcaccccatttcagagtttctgaccagttctggaacttcagctggagaaaggaagctcatgccaacaattcatgaagagttgaatcgtcgtcaactcttgtatagtcttctcatgcctgtaatgaatctttacgtcccgggattggacaaagggaagggtctttatttcttgtttataaaagctgaaacaaagacccctggagggcttctggcacgccc

SEQ ID NO: 5911 - DNA, 682 bp, Gossypium hirsutum
  Clone ID: GOSHI-09MAY01-C4852_2
cccacgcgtccgatttttttttattcttatcatctttttccctattcattcaaacaaagccttgcttgtgtcatcttcttgttctaacatactcccaaatatctttgtttcactttctccctctagcaaaaccacaaaaatatctttgcccttttcagacagagagaaaaagagggtttgggttgtaataagatccacaaatggcagaggaggaaatgagtttgagtggcgtcagtggtgcatttcgtcaggttcttttcatctctgctggtgctagccattctgttgctcttctctctggaaatattatttgctcttggggacgaggagaggatggacaattaggccatggggatgcggaggatcgactttctcctactcgattgagtgctttagatggacatgacataatatctattacctgtggtgctgatcatacaattgcatattcattgtcaaatgcagaagtctatagttggggatggggtgactttggtagacttggtcatggaaactctagtgacttgttcactcctcaaccaataaaagcgttacatggtctgaggatcaaacaaattgcttgtggtgacagccattgtttggctgtgacaatggaaggcgaggtgcaaagttggggaagaaatcaaaatggtcaacttgtcttggaactactgaagactct

SEQ ID NO: 5912 - DNA, 888 bp, Gossypium hirsutum
  Clone ID: GOSHI-09MAY01-C4852_1
cccacgcgtccgcccagcgtccgggtagacttggtcatggggactctagtgacttgttcactcctcaacccataaaagcattacatggtctgaggatcaaacaaattgcttgtggtgacagccattgtttggctgtgacaatggaaggcgaggtccaaagttggggaagaaaccaaaatggtcaacttggtcttggaaccactgaagactctcctgtgcctcaaaagattcaagcctttcagggtatttctatcaaaatggttgctgctggtgctgagcataccgctgctgtttcagaagacggtgccctctatggttggggttggggacaatatggaaacttgggcttaggtgacagaaatgatcgcttagttcctgagaaggtttctactctcaatgaagagaagatgaatatggttgcttgtggatggcggcataccatatcagtctctgatactggtagattatacacttatgggtggagcaagtatggtcaactaggacatggggactttgaggatcaccttgttccgcacaaggtggaagctttagccgacagttttattaagcagatagcaggtggatggagacatacaatggcactcacatctgatggaaaactctatggctggggatggaacaagtttggacaggttggggttggtgacaacgctgacctttgctctccagtgctagttaaatttcctcatgagcagaaagtagttcaggtttcgtgtggatggaggcatacacttgctattaccgaagagcaaaacatcttctcctggggtaggggtacaaatggacagcttggacatggagaatccacggaccggaattttccaaagatcatagaagccttgagtgttgaaggttccagtgggcaac

SEQ ID NO: 5913 - DNA, 441 bp, Gossypium hirsutum
  Clone ID: LIB3197-023-Q1-M1-F1
atcatccccatgacatagcaaagatttgaaccatcaactaaaaaacatgcatgaatctcatggcacaacctcaaacataccttgatctagatacaagtatggccaaacctcctcctaatccacttccaaatgatcagaaagtagttcaggtttcgtgtggatggaggcatacacttgctattaccgaagagcaaaacatcttctcctggggtaggggtacaaatggacagcttggacatggagaatctatggaccggaattttccaaagatcatagaagccttgagtgttgaaggttccagtgggcaacagatagaatcttcaaagcttgacccattgtcaggtaaatcttgggtttctccagcggagcgatatgcagttgtccctggtgaaagtggacaaacagttaactcagaaaagggcaatggtggtgacgtggacg

SEQ ID NO: 5914 - DNA, 391 bp, Gossypium hirsutum
  Clone ID: LIB3146-040-Q1-K1-D10
cccacgcgtccgcccacgcgtccgtgatcgtttagttcctgagaaggtttctactctcaagtaatataagatgaatattgttgcttgtggatagcggcataccatatcaagctctgttactggttgaatatactactatggctttatctagttttttctactataattattgttactgtattttcccttctcttctcattttatcttattttttaatgtattattttttttcttttttttttatttctatttatattatttaaaattttttttttttattttctttcaaatttgaattttttcattatcttccttattttataatattttgtctcttatattatcatcttttaatttatttataacacatctgttttattattttcctctt

SEQ ID NO: 5915 - DNA, 533 bp, Gossypium hirsutum
  Clone ID: GOSHI-09MAY01-C4872_1
gtagatcaagatcacctgtgaagcgagaaagaagttttgagcgtgacgatagaagatcaaggagtcctaagcgccacaggccgtctacgcctccggttcgagggaggaagcatagtccagcacgtgatgaaagaagcccacaagagagacgtagcccatccccaagggatcgcagacatgccaatggttcggattacagtgggagtcccagggggaggagcagaactccagatcgtgaagctgatgctggagacggggattataagagctccgcaaaggaaaatgggaacagccgcagtcctagcccgctccccaaggatgatcggagccctatttatgaagaagaagatgatgacaatcatgcatctccgagacgcagcgaatcaaattaagctgcagtggtttgaatggggtaggtgttggtttgttagaaacttttgagttaatatatatttgatggataattttgtgttctggaatattaaagcacttggttttattgaagtctatttatataaaattgcctttttttt

SEQ ID NO: 5916 - DNA, 687 bp, Gossypium hirsutum
  Clone ID: GOSHI-09MAY01-C4592_1
cccacgcgtccgcggacgcgtgggggcgaaactaatagaaagccaagacggttccccaatatttcttcttcttgaaaacccagcaactgtttatcaaaaagattttatatattgccttgtttctttctttgtttttggggttttgcaaaaatggcaacaagtaggatcttttttggttcaaaaccacgatatatctacccaactatggaatttgatgatgggaatctcatcaacaacccttcatttgatcatcatcatcatcatcatctgctggagttcgatgaggtggatgtatggaacaattcaaatgatcaagcaacaaccaacttagaagccaaaaaaccattgccaagttaccgagcttcctctaagaaagctttcaaaaagaaggagtttcagattagcgataataataaccataggagtgcccaaatgactgctgcttctgcttcattgccggtcaacatccctgactggtccacgattctcaaagcggagtacagggaacatgggaagaccgatgaagatgctgtcgacggcgatgacgacggcgttcgcgacggaaggttcaccgatgatacttgctagagacgagagctttcttttgtcttgagaatgaggacttgaggaaaatttctcggtaggatgctgtgaaaaaacaggttagataccacacatctcacacca

SEQ ID NO: 5917 - DNA, 513 bp, Gossypium hirsutum
  Clone ID: uC-gsronu33B089g10b1
atcatcaacccttcatttgatcatcatcatgggcatcatttgatggagttcggtgaggtggatgtatggaacaattcaaatgatcaagcaacaaccaacttagaagccaaaaaaccattgccaagataccgagcttcctctaagaaagctttcaaaaagaaggagtttcagattagcgataataataaccataggagtgcccaaatgactgctgcttctgcttcattgccggtcaacatccctgactggtccacgattctcaaagcggagtacagggaacatgggaagaccgatgaagatgctgtcgacggctatgactacggtgatcgcgacggaagggttccaccgcatgagtactaggctaggagacgaggagcttccttttctgtccatgaaggaattggaaggactttgaaaggaagagatttgcgtcgtgttaggaatgctgtctggaaaaaacaggttttgaagaataacccacaacatcataaaacaacaacccaggtttatttc

SEQ ID NO: 5918 - DNA, 419 bp, Gossypium hirsutum
  Clone ID: GOSHI-09MAY01-C4582_5
cgcgtccgtccttacacagcccccacgcgtccgaagcctctcagcagccctttctttctcttcttctccttctccccttctccggtccctgagcaggccagcctgtaattcaaataagatgtatacatcaatgaagaagatccacaaggataaggatgttgaaccaactgaatttgaggagtcggttgcccaggcattcttcgatttggagaataccaaccaggacctgaaaagtgacctcaaagatctctacattaattcagcagtccaaattgatgtttccgggagccggaaagctgttgttatccatgttccctacagattaaggaaagcttttcgcaaggttcatgttaagcttgtgagggaacttgaaaagaagttcagtggcaaggatgtgattctcattgccactcggagga

SEQ ID NO: 5919 - DNA, 585 bp, Gossypium hirsutum
  Clone ID: GOSHI-09MAY01-C4582_4
ccggttttgtacccattttttttttttgttttttcgtaggctcatgggggagcgggggagggaactcgaaaagaagttcaggggcaaggatgtgattcttattgcaactcgaaggatattgaggcctccaaagaagggctcagctgttcagaggccacgcagccgtacactgactgccgtacacgaggcaatgctcgaagatgttgttttacctgctgagattgtcgggaagcgtactagatatagaatcgatggatcgaagataatgaaggtctttttggaccccaaagaacgaaacaacacagaatacaagctcgaaaccttttcagcagtttaccggaagctcgcagggaaggatgttgtgtttgagttcccagttacagaggcataaagaaggcctttttaaaagatatgacaccttctgtctggtccttttacccttgaaactctctcttttgtgagggtatttaaaattttgacatcgacatttattttctttgtgtcatggtgaatttattttctttgttatgaacgtatatttcactattgggtaatggcatttaattatgtaggtttgtgagtttg

SEQ ID NO: 5920 - DNA, 918 bp, Gossypium hirsutum
  Clone ID: GOSHI-09MAY01-C4582_3
gtgcctcattataaagtgtcatcttaggttgaaactctagggtttttcctgatctgcggaaagagagcatctcatcacattttattgtgcttctctctcagatcttcaagatgtatacgtcaatgaaaaagatccacaaagataaggatgttgaaccaacagaatttgaggaatcagttgcccaggcattcttcgatttggagaataccaacaaggatctgaaaagtgacctcaaggatctctacattaattcagcagtccaaattgatgtgtctgggagccggaaagctgttgttatccatgtcccgtaccgattgaggaaagcttttcgcaaggttcatgttaagcttgtgagggagcttgaaaagaagttcagtggaaaggatgtgattcttattgctacccggaggatattgaggcccccaaagaaaggttctgctgttcagaggcctcgcagccgcacattgactgctgtacacgaggcaatgctggaagatattgtcttgcccgccgagattgttgggaagcgcactagatatgcaattgatggatctaagttaatgaaggtgtttttggaccccaaagaacgaaacaacactgagtataagcttgagaccttttctgcagtttaccggaagcttgctgggaaggatgttgtgttcgagttccctgttacagaggcatagataagtccttttacaagtgttgtgacatctttctggtcttatttcatttcttgttttcccttagaaaatctgcatttttgctatttaaaattcgacattattgagttgcccgaacaagcagagatatataagtatcatgatggattttattttattttctttgataatgcggtatgacatttaatgtagggatattatgattttattaaaatgttttttgttggctcccccc

SEQ ID NO: 5921 - DNA, 891 bp, Gossypium hirsutum
  Clone ID: GOSHI-09MAY01-C4582_2
cggccgcgtgggcggacgcgtgggcggacgcgtggatctgcggaaagagagcttctcatcacattttattgtgcttctctctcagatcttgaaaatgtatacatcaatgaagaagatccacaaagataaggatgttgaaccaacagaatttgaggaatcagttgcccaggcattctttgatttggagaataccaaccaggatctgaaaagtgacctcaaggatctctacattaattcagcagtccaaattgatgtgtctgggagccggaaagctgttgttatccatgtcccctaccgattgaggaaagcttttcgcaaggttcatgttaagcttgtgagggagcttgaaaagaagttcagtggaaaggatgtgattcttattgccacccggaggatattgaggcccccaaagaaaggttctgccgttcagaggcctcgcagccgcacattgaccgctgtacacgaggcaatgctagaagatatcgtcttgcccgccgagattgttgggaagcgcactagatatgcaatcgatggatctaagttaatgaaggtctttttggaccccaaggaacggaacaacactgagtataagctcgagacgttttctgcggtttaccggaagcttgctggaaaggatgttgtgtttgagttcccagttacagaggcatagataagtattttgtgtgtgtgtgtgtgtgtgttttaagtgttttgacacctttctgtcctggaaactgctttttatggaggtatttaaaattttgagatttaggagttgttaaggaagcagagaaatgatggatggatttgtttagattatgtggtattgcttctaatggtgtaagattgagttttagaaatgtttggttaatttggttcgcaaaaaaaaaa

SEQ ID NO: 5922 - DNA, 968 bp, Gossypium hirsutum
  Clone ID: GOSHI-09MAY01-C4582_1
gggtgaaacagagcctccccctcgcattttattgtcccttatctcttccatctttggcttctctttcagatctcaaagatgtatacatcaaggaagaagatccacaaagataaggatgctgaaccaacagaatttgaggagtctgttgcgcaggcattctttgatttggagaataccaatcaagatctgaaaagtgaccttaaagatctctatattaattcagcagtccaaattgatgtttctgggagccggaaagctgttgttatccatgtcccgtatagattgaggaaagctttccgcaaggttcatgttaagcttgtgagggaacttgaaaagaagttcagtggcaaggatgtgattcttattgccacccggaggatattaaggcctccaaagaaaggttctgcagttcagaggccacgcagccgcacattgactgctgtacatgaggcaatgctagaagatgttgtcttacctgctgagattgttgggaagcgcactagatatagaattgatggatcaaagataatgaaggtgtatttggaccccaaggaacgaaataacacagagtacaagcttgagacgttttctgcagtttaccggaagcttgctggaaaggatgtcgtgtttgagttcccagtgacggaggcatagatagtcctttttgaagtgttgtgaaactttatttctggttaaaattttgacatttttaagagttggtaagcaaagtcatatggatttaatttccttcttatgatttagtttctggtatgcattgcgatggtgtgggattgagtttaaaatggttattgttgtttgacaaattttattctcaattcttatgctcttgtttaaagcaatgaaaaattccgatgaaagctttttcatccaaaaaaaaaaaaaaaaaaaaaaaaaaaaaaaaaaaaaaaaaaaaaaaaaaaaaaaaattctgcgggtcgacgcggccg

SEQ ID NO: 5923 - DNA, 341 bp, Gossypium hirsutum
  Clone ID: uC-gsflmaxxa097d03b1
atattccatttttggcttctctttgggaggggatatttaaatacatggagggaagaaaatccacacagataaggatgctgtaccaacagaatttgaggagtctgttgcgcaggcatactttgatttggagaataccaatcaagatctgaaaagcgaccttaaagatctctatattaattcagcaggccaaattgatgtttctgggagccagaaagctgttggtgaccatgttccatatagattgaggaaagctttccacaaggatcatgttaagcttgagagggaacttgaaaagaagttcagtggcacggatgtgattcttattgccaccccggggatat

SEQ ID NO: 5924 - DNA, 253 bp, Gossypium hirsutum
  Clone ID: LIB3146-039-Q1-K1-D8
caaccgaattcgaggagtctgttgcacaggcattctttgatttggagaataccaaccaggacctgaaaagtgacctcaaaaatctttacattaattcagcactgtgagagtgtgttgttgggatacagtaactgtaaagttacttctgtatttatcaaccatatgactatattacttattcacttgcagccaaatcgatgtttcttggagccgcaaagctgctgttattcatgttccctacaaattgaggaaa

SEQ ID NO: 5925 - DNA, 386 bp, Gossypium hirsutum
  Clone ID: GOSHI-09MAY01-C4542_5
catgaggtaaacgctgtcaatttggaaaaacgcaagcgcaaacagggatcgcattaggttatcttcttcttctttttttcttttttctttttgcaattccttcaactgaaaggggaaaataaccctaattttgtctctggattggtctcccaagtgaggaaagggagaaaaagaaagaaactttgaagaataaaaatggtgtttttacttcaaagcccgaccagaggttggcgatttcacaattttcatgggtctcgacaagtacgagaacgaggaactcattaaatacggctttcccgaagacatttggttccatgttgataaaatgtcttctgctcatgtttatgtaagacttcataaaggtcaaaccattgatgatataagcg

SEQ ID NO: 5926 - DNA, 1067 bp, Gossypium hirsutum
  Clone ID: GOSHI-09MAY01-C4542_2
cccacgcgtccgcccacgcgttcgtttaacagaagggaggagaaccctaattttgtctctcccaagagacgaaaggaagggaaaaatggtgttttacttcaaagcccggccagaagctggcgattacaccattttcatgggtcttgacaagtacgagaacgaggagctcatcaaatatggcttcatcgaagatatctggttccatgtggataagatgtcttctgcccatgtttatttaagacttaaaaagggtcaaaccattgatgatataagcgaaggcgttctcgaagattgtgctcagcttgttaaagctaattccatccaaggcaacaaggtgaataatattgatgttgtttacactccatggtccaatttgaagaaaactccttcaatggatgttggccaagttggctttcacaattccaagatggttcggactgtgagagtggagaagcggataaatgagatagttaacaggttgaacaagactaaagtggaaaggaaacctgatttgaaagctgagagagaagcagtctatgcagcggaaagagccgagagaaagcaacagttgagggaaaaaaaacgccgtgaggagctgcaaaggcttgagaaggaaagacaagcggagataagaagctacaagggtctcatggtatctgaaaagatgacatccaacaaacaaattgctgagacgagcagatctttgcaggaacttgaagaggattttatgtagaagatactggtattcatgtgggaattaacgatgatgatgggtgccaaaaacctgctgcccttcaagaaggtggtttgttgttggtttacgattgatgttatgtgccttgtgaataagtcacctcggttttgaatatcttactttcgaggatttgggtaagaaaagagacaacatggaatggaaactgacatattatgagaaatctatgtaattgtttgtcatttgcaggcttcaaggagtagaatgaatcaaagattgaggatgagtgagatgaacttctgttatggtcttagtacatgataataaagcataattcatatctctattgctgatt

SEQ ID NO: 5927 - DNA, 828 bp, Gossypium hirsutum
  Clone ID: GOSHI-09MAY01-C4542_1
acctccgtttctggagaggcaaaaccctctctggcctccctccgaggggaaaggaaccaaaattacgaatttcgaaggaaaaaagatggtgttttacttcaaagctcgaccagaggctggcgattacaccattttcatgggtctcgacaagtacgagaacgaggaactcatcaaatatggcttccccgaagacatttggttccatgtggataaaatgtcttctgcccatgtttatttaagacttcaaaaaggtcaaaccatcgatgatataagcgaaggcttgctcgaagattgtgctcagcttgttaaagctaactccatccaaggcaacaaggtgaacaatattgacgttgtttacactccatggtccaatttgaagaaaaccccttctatggatgttggtcaagttggctttcacaattccaagatggtccggaccgtgagagtggagaagcggataaatgagatagttaacaggttgaacaagactaaagtggaaaggaaacctgatttgaaagctgagaaagaagcagtttatgcagcggaaaaagccgagagaaagcaacagttgagggaaaaaaaacgccgagaggagatgcaaaggcttgaaaaggaaagacaagcagaaataagaagctacaagggtctgatggtctctgaaaagatgacatcaaacaaacaaattgcagcaacaagcaagtctttccaggaagtagaagaggattttatgtgaaatgtactggtaatttcatcgctaattacgattcttctagctgccagaaacttgctttctgtcaaagaaaggtggtttctttttacttctttttc

SEQ ID NO: 5928 - DNA, 581 bp, Gossypium hirsutum
  unsure (1)..(581): unsure at all n locations
  Clone ID: LIB3825-018-Q1-K6-G4
catgagtaaacgctgcatttggaaaacgcagcgcaaacagtgatcgcattaggttatcggttttttttttgtttgcaatnttccttgcaactcgaaagggggaaaagtaccctaattttgtctctggattggtctcccaagtgaggaaagggagaaaaagaaagaaactttgaagaaaaaaaatggtgttttacttcaaagcccgaccagaggttggtgattacacaattttcatgggtctcgacaagtacgagaacgaggaactcattaaatacggctttcccgaagacatttggttccatgttgataaaatgtcttctgctcatgtttatgtaagacttcataaaggtcaaaccattgacgatataagcgaaggtttgcttgaagattgtgctcagcttgttaaagctaattccatccaagggaacaaagtgaacaatgttgatgttgtttacactccatggtccaatttgaagaaaactccttccatggacgttggcctagttggctttcacaattccaagatggttcggacagtgagagtggagaagcgtataaacgagatagttaacaggttgaac

SEQ ID NO: 5929 - DNA, 588 bp, Gossypium hirsutum
  unsure (1)..(588): unsure at all n locations
  Clone ID: LIB3583-045-P1-K1-C10
cagggggaaaaatagntaatgtggttggtctcccatatttccttaccgaaagggaaaccctaattttgtctctcccatagacaaggagggaaaagggtgttttacttcaaagcccgggcagaatctggcaattacaccattttcatgggtcttgacaagtacgagaacgaggagctcatcaaatatggcttcgtcgaagatatcttgtaatttcttatttgaattatttttccagatacattgaaaaattttgaaatttcgccattgttgctgtagaggaaattaaattagggcttttttttctccttcaccctaataaaataatttgaaatcaaatgaaaaagaaaaccctaattctataaaagatcgattgagtgaagaatcggaatcagaaatcagtgagagggcaaaacccagaaaaagaataatatgtcgaggccgtaagaggaagataagaagcttggcgatcaatccgctgcacatatcaacctcaaagtcaaaggccagatcatgaagaacaatatttcccatggggacatagaagaagtttaatcaatttgcaatatgcacaaacaagaatcgaatatc

SEQ ID NO: 5930 - DNA, 344 bp, Gossypium hirsutum
  Clone ID: LIB3146-006-Q1-K1-H2
cccacgcgtccggcagaaataagaagctacaagggtctgatggtctctgaaaagatgacatcaaacaaacaaattgcagcgacgagcaagtctttccaggaagtagaagaggattttatgtgaaacttgctgtccgtcaaagaagggtggtttctttttacttctttttcattgcaagcttaagttatttgcctcgattaagtcggctcacttaggatttttacctccattttgcgtgagatgaacttctgctataggtgccatagattctatgaaacacgattcagatttccattgctgattaaggtgttatttctctttcaaattatatttattctgattcc

SEQ ID NO: 5931 - DNA, 753 bp, Gossypium hirsutum
  Clone ID: GOSHI-09MAY01-C4532_1
gttgtggttcaaaaggacttgacagggttgtggaagatagatctggctggaaaggtaaatggggctgttgagacctgctttgggtcgtttcatcgtttttctcagtatttgaactttacacatcctctaattaaggagagatttaatcccaaggcttgtgcctgggcatatgggatgaatatttttgatcttgatgcttggaggcgtgagaaatgcacggaaacttatgaggagtggcaaaacttgaatgaggatcgaactctatggaaattggatgctcttccgcctggcctgatcacattctactcattgactaaatcattggacaaatcttggcacgtgctcggtcttggatacaatccaagcattagcatggatgagatcaacaatgctgcagtcattcattataatggaaacatgaaaccgtggctcgacattgctatgaaccaatacaagaatctttggactaaatatgtggataatgatatggagtttgtgcagatgtgcaatttcggagtctaggttaagttaaagtgcttgtgcttctctccagcaatcaaggtaacaagaatacaaagttgtagtgattgttcatagtggcttgagggttataccatcagttttatttattttcattatcccatttattgtagaatttctattatcgattcataaattttgctatttcgtcctctcgaatataagcatgaattgtactgaaccaaatagctttatgtacacaaagaaaatgat

SEQ ID NO: 5932 - DNA, 545 bp, Gossypium hirsutum
  Clone ID: GOSHI-09MAY01-C4472_1
cccacgcgtccggcgctagtggagcggtggcgcccggagacccacacttttcattttctgcgcggggagtgcacggtgaccttggaggatgtagcgttgcagcttgggctcccaattgacgggagtcccgtaacgggattatctgcatttaccgatccggatgcactttgctattagcttctaggagactcaccaggggacggtgagtcatatttttcgggcgtacaatttacatggctgaaagccaagtatagacaattatcagcgacagccactgaaggcgagttgatgtgcgctgctcgagcgtacatcatgcatatcatagggggagaaatcatgcctgatgcaagcaacgacaaggtgcatttgatgtacttgcctctgttagctgacttgtccagtgttagctcctatagctggggctcaactgtgctagcaatcttgtatcgagagctttgtcgggcgacagatccgaaagttcgcgacattggcggatgcctctcactgctgcagtcctgggcgctggatcggatgccatttttggc

SEQ ID NO: 5933 - DNA, 579 bp, Gossypium hirsutum
  Clone ID: GOSHI-09MAY01-C4402_1
agtaaagaacatgtgtcgaatatttattaagatacatgataccgtttgatttggttattaaattaaaagtaggaacctttttaaaatttattgattttcactaaaaaccggatgtatgggaaagctagctaattataccccactctacagtctcactttttgaaccaaaacagatcttcaaaatcacaccatagtcggctagtcctatagcctactgtgtagcagtattatgcctttctcccttcttctttcccttttcttctcctatgctaatatacttgttttctcttttctgcctccagtaaatggaggaaactactcaatacgaattagaactgtagaggacgtctttagcgacttcaaaagccgtcgtgccgccttgatcaaagccttaaccaccgagaaggacaacctttgcttgtttggatatccaaatcggcggtgggaagttaatcaacctgttgcctatttacctccagagataccggagcctacattaggtattagcttttgtagaaatgggatgcaaagaaaggactggttcttacttgttgctgttcaaagtgatgcatggttact

SEQ ID NO: 5934 - DNA, 636 bp, Gossypium hirsutum
  Clone ID: GOSHI-09MAY01-C4752_1
cggacgcgtgggcggacgcgtgggtctttctccactttcttgtgccttcgctgacccttgtggttatcgttgcatagtttctgcaattgcaatggcctcaggttcgagctggacaccaaagcaaaacaagttgttcgagaatgctttagttatctacgacaaagataccccagaccgctggcacaatctagccagggcagttggagggaaaaccgtggaggaagtgaagctacattaccagaaccttgtcgaagacatccaacagattgagtctggccaagtgcccttacctccttacaagaaagctggagggaacaaaggatacaatttcacggatggagaacaaagaatgaggaatctgaggcttcagtgaaatatgagcagaaaccggtagaaacaaaggccttagcctttaataaagcaaatgcagccagttgtctggtgcaacaagcagcaaatatgtcgcctattatttcttctcaaagtgtatcttaaattgaaagttgtatcttcattctatatacttggtttacactagttgtgcttccttatatgtaccaattaattatctcatagcactggtacataaaaaagttcctgtttttaatgaatatatatatcgtccattaatcatta

SEQ ID NO: 5935 - DNA, 584 bp, Gossypium hirsutum
  Clone ID: GOSHI-09MAY01-C4742_1
atcttttgaagttctcgaacaagttacagtcctcaaaacgattggcagccatgaaagttcatggataccctttgtcaacagttactcaaagggtccttgcttgcctttacgaaaaagatgttgagtttcagtttgttaacgtagacatggtcgctggcgagcataaatccccaaatttccttcccctcaacccatttggtcaagttccagcttttgaagaaggggacttgaagctctttgaatcaagggcaaccacccactatatcgcccatgaatacgccgacaaagggacccaactcttgttgccgggttctaacaagacgatggcagtctttcaattgtggaaggaagttgaagctcaccagttcgaccctccatcgacgaagctagtctttgagctgcgttacaagccccattttgggatgaccaccgacacggcggttgtggaagaatacgaagctaagtttgccaaagttttagatgtgtacgaggctcgtttggctgagtccaagtactttgcttgtgaccactttcaccttgccgatctgcatcacctccctactggtcagtacttgtggggagct

SEQ ID NO: 5936 - DNA, 381 bp, Gossypium hirsutum
  Clone ID: uC-gsronu33B156d05b1
cccactcttccggttttcatagttttatttgagattgaatttaaagcaatgcgttgctcggtagcttttgttggtaacattttgttcaattgtctggctatcgtattgaaactaagacagatgttgtgtttgattttgttttactaaacatggtctttggctagcattaatccccaaatttccttccccttaacccatttggtcaagttacagcttatgaagaatgttacttgaagctctttgaatcaagggcaaccacccactatatcgtccatgaatactcctacaatatgaccctactctttttgccggcttttaacaagaccatggcagttttttaattgtggaaggtagtttaagctcactcatttctacccttca

SEQ ID NO: 5937 - DNA, 708 bp, Gossypium hirsutum
  Clone ID: GOSHI-09MAY01-C4772_4
gtgacttggcattttgtctgacggagacacccattttaattttgagtgagacaaaagctttcatgtcgcctgcaacatccaagtgtgagtaaacatcacgagcttggcgttttatgggttaaagcagcagctgcaattttaccatacatttatttctcacatttctaggtgtatgtcacagcaaattactggcatgcattgatatggtagccttggtagttggtttttgcccactgcaggtgtaagttaattaacctatattcaaactttgggattgttttttggcaggtgccaccgtaaggctgacatgcaaagacgctaaaaacgaattaacggtccagttcaagactgacaagaatggttatttcttcctgcaagcaccaattaccatctacaattttgatctccacaattgcagcgtctccctcgtatcttcaccattgaaagcatgcagcaagccatctaatctaaacggtggattgaagggcgcccccttgaagcctgagaaaccatctacttcaaagaagctcccatatgttctctacagcgttgggcccttcgctttcgaacccacatgtcacaagaactagagtagaaatctataatcccactgttgagctcgtacccttttacctttttcttttatgtgcttaaactactacgtacaagtctcttagcttattgtgatggcatcttgttcggtgtggt

SEQ ID NO: 5938 - DNA, 1168 bp, Gossypium hirsutum
  Clone ID: GOSHI-09MAY01-C4772_2
cccacgcgtccgcccacgcgtccgctttgtctctaaacattaccaaaatatggggtttgctgttgtagtactagtagttaaagctgctttgcttgtgcagctttcactgttgttactgagcaccttcactgtctctgctcccatttggcctcaggcttctcctcctcattaccatgctgtttcacctgtagtcccgcctactcacccaccaacccaccaccatcaccaccaccctcaccctcaccctcacccccatcctcatccacccactaagcccccaacccccactcctcctccagttcatccaccacccaaggcgccagtgcaaccaccaaccaagccaccagttcacccaccacccaagccaccagttcaacctccaactaagccaccaaccaaacctccaactcaacccccgactaagccaccaactcagcccccgactaagccaccaaccaagcctccaactcagcccccgacgaagccaccaacacacccaccatctcatcctccggccaagccacctaaatcgagccaggtggcagtgcagggcgttgtttattgcaagtcatgcaagtacgccggagtcgacacccttttgggagctaaaccaattcttagtgccaccgtaaggctgacatgcaaagacgctaaaaacgaattaacggtccagttcaagactgacaagaatggttatttcttctgcagcaccaattaccatctacaattttgatctccacaattgcagcgtctccctcgtatcttccccattgaaagcatgcagcaagccatctaatctaaacggtggattgaagggcgcccccttgaagcctgagaaaccatctacttcaaagaagctcccatatgttctctacagcgttgggcccttcgctttcgaacccacatgtcacaagaactagagtagaaatctataatcccactgttgagctcgtactctttttaccatttttcttttatgtgcttaaactactacgtacaagtctcttagcttattgtgatggcatcttgttcggtgtggtaagctttgggttgcaataagttattgtaatgtatggaaatagattagtgatgaataatcaataaattatcgggtgtcttatttccagaaaaacccttttttttattttttttttttatatttaatatt

SEQ ID NO: 5939 - DNA, 796 bp, Gossypium hirsutum
  Clone ID: GOSHI-09MAY01-C4772_1
tccctcgcgtccgcccacgcgtccggccaaccccaaaaaagaaaaaaagagaaaaaaaaaactcttaagtccatcaattatcactacaatctctttccccttattttctctccaaagaagccctaaattttctcagcctttcttgctctttccctcgctttctcgggaaaaaaaatggcaaacgcggcttcaggaatggctgtgcatgatgattgcaagctgaagtttttagaactgaaggctaaaaggacttaccgcttcatagttttcaagattgaagaaaaacaaaagcaagttgttgtggaaaaggttggtgaacctactgatagctatgaggctttcactgctagccttccagccgatgagtgtcgatacgctgtgtatgactttgattttgtgaccgatgagaactgccagaagagcagaatttttttcattgcctggtctcctgatacatcaaaagtaagaagcaagatgatctatgcgagctcaaaggacaggttcaaaagggaattggatggcatccaggtagagttgcaagctaccgatccttccgagatggatctcgatgtcataaggagccgtgccaattgaaatgtatgtaccatttcttcattgaaatggaactttatactatgtggttcacataaatgtaatgtctatatcaactttggatcttggaacttgctttgatattgggttatatctgtggattcttatggggtatgtggtgtgttccccctttggggtaccaaatttcataacgatttgactattacatgcctttccttttatg

SEQ ID NO: 5940 - DNA, 466 bp, Gossypium hirsutum
  unsure (1)..(466): unsure at all n locations
  Clone ID: LIB3189-046-P1-K1-A2
acgcggaagaggagttctaaacaagattagtcaacaatttagagaaccttaaaaaaaaatggcaaacgcggcttcaggaatggctgtgcatgatgattgcaagctgaagtttttagaactgaaggctaaaaggacttaccgcttcatagttttcaagattgaagaaaaacaaaagcaagttgttgtggaaaaggttggtgaacctactgatagctatgaggctttcactgctagccttccagccgatgagtgtcgatacgctgtgtatgactttgattttgtgaccgatgagaactgccagaagagcagaatttttttcattgcctggtctcctgatacatcaaaagtaagaagcaagatgatctatgcgagctcaaaggacaggttcaaaagggaatgggatggcatccaggtagagttgcaagctaccgatccttccgagatggatnctgatgtcataaggagc

SEQ ID NO: 5941 - DNA, 486 bp, Gossypium hirsutum
  Clone ID: uC-gsflnu33B076e06b1
atagaagccctaaattttctcagcctttcttgctctttccctcgctttctcgggaaaaaaaatggcaaacgcggcttcaggaatggctgtgcatgatgattgcatgctgaagtttttagaactgaaggctaaaaggacttaccgattcatagttttcaagatcgaagaaaaacacaagcaagctcgctgcggaaacggtcgctgaacccactgctaggcctccagcttagactgctactaatccaccaaccaagcctccaactcagtctccgacgaagccaccaacacacccaccatctcatcctccggccaagccacctaaatcgagccaggtggcagtgcagggcgttgtttattgcaagtcatgcaagttcgccggagtcgacacccttttgggagctaaaccaattcttagtgcccccgtaaggctgacatgcaaagacgcttaaaacgaattaacggtccagttcaagactgacaagaatg

SEQ ID NO: 5942 - DNA, 574 bp, Gossypium hirsutum
  unsure (1)..(574): unsure at all n locations
  Clone ID: LIB3583-057-P1-K1-B6
agcgttcggacacttaacaaaaatatggggttggctgtggtagtactagtagttaaagctgttttgcttgtgcagcttggacggttgttactgagcaccttgactgcttttgttccaattgggcctaaggcttttcttcctaataacaatgctgtttaacctgtagtcccgcttagtaaccaacaaaccaacaacaattacaacaacctttaccctgacccttacccttatccaaccactaagccccaaaccccaactcttcttcagttcatncaccacccaaagcgcctaaaccaccaactcagcccccaactaagccaccaaccaagccttcaactcagtccccgaccaagccaccaacacacccaccatctcatcctccggccaagccacctacatcgagtcatgtggcagtgcagggcgttgtttattgcaagtcatgcaagtacgccggagtcgacacccttttgggagctaaaccaattcctcgtgccaccgtaaggctaacatgcaaagacgcttaaaacgaattaacggtccagttcaagactgacaagaatggttatttctttct

SEQ ID NO: 5943 - DNA, 387 bp, Gossypium hirsutum
  Clone ID: LIB3166-024-P1-K1-D9
taaacattaccaaaatatggggttttctgttgtagtactagtagttaaagctggtttgcttgtgcagctttcagtgttgttactgagcaccttcactgtctctgctcccatttggcctcaggcttctcctcctcattaccatgctgtttcaccctcaccctcatccacccactaagcccccaacccccactcctcctccagttcatccaccacccaaggcgccagtgcaaccaccaaccaagcccccaacttctgctccacccaagccaccagttcaacctccaactaagccaccaaccaaacctccaactcaacccccgcctaaaccaccaactcagcccccaactaagccaccaaccaagcctccaactcagtccccgaccaagc

SEQ ID NO: 5944 - DNA, 458 bp, Gossypium hirsutum
  Clone ID: LIB3583-009-P1-K1-B11
ctaaacattaccaaaatatggggtttgctgttgtagtagttaaagctgttttgcttgtgcagctatcactgttgttactgagcaccttcactgtctatgctcccatttggcctcaggcttcttctactcattaccatgctgtgtcacctgtagtcccgtctagtcacccaccaacccaacaccatgaccaccaccctaacgctaacacttaacgtgatccacccactaagccatgaaccacaacttctaatccagtgcattcaccacccaatgcgccagcgcagccaccaaccaagctctcatcttctgctgcaccaaggccaccaggtcaacctacaactaaaccaccaaccaaacctccaagctaacagcagtctaaaccaccaactcagcccccaactaaaccaccaaccaaacctacaactcagttcccgaccaagccaccaacacacctacca

SEQ ID NO: 5945 - DNA, 344 bp, Gossypium hirsutum
  Clone ID: LIB3147-035-Q1-K1-C2
gacccaggcgtacgcgtacgccaacgtcttccacatacagcatttattgttccagtgcaaccaccaaccaagccgccagggtacccacctcccaaacctccagctcaaccttctactaagccaccaaccaaaccttcaactcaacccccgactaagccaccaactcagcccccgactaagccaccaaccatgcctgcatctcagcccccgacgatgccaccaacacacccaccatctaatacttcggccaagccacctaaatcgagccaggtggcagtgcatggcgttgtttattgcatgtcatgcatactcgccggagtcgacacccttttgggagctaaacc

SEQ ID NO: 5946 - DNA, 167 bp, Gossypium hirsutum
  Clone ID: LIB3148-053-Q1-K1-G12
cccacgcgtccgcccacgcgtccgcccacgcgtccgcccacgcgtccgcccacgcgtccgatgggatcttgttcggtgtggtaagctttgggttgcaataagttattgtaatgtatggaaatagattagtgatgaataatcaataaattatcgggtgtcttatttcc

SEQ ID NO: 5947 - DNA, 1156 bp, Gossypium hirsutum
  Clone ID: GOSHI-09MAY01-C4732_1
gaaaaaaatcattggatcttttttttttatctttcaaaggcatagagagagctctctgttgtcaccaacaatggctccactattgtacttcaatttccgtaaggtatttttgctttaccttgctttctttatgttgatttcgttgctggtttgtacctccattgttgatagccacgagcttcgaaccactcggtttggtggcggtggaagaagattgttggagctcgaagaagaagatgaacagttggtgttgaagaagaaaagctccaatttttccaacaagaagaatcaaaccaagcttgttaaaccatcaaatgtatccaccaagaaccaaaccaagctggttaaatcagtgaatgtatcgaccaagaaccaaaccaagctcgttaaatcattggatgtatcaaccaaaacgtcgaatttgtcggccaagaaccaaaccaaggttttgaaaccgaccaactcgaccaaaactgcaaagccaacggtgtcgagttccattcccaagaagcttaattcaacttccaggtgaagaaactgaattccacaacaccaaaagcttcggatctgctcaaattaagctctcccaagaacaaaacaaccacgaaaacaccggttccatcttcaaaacctgaaaagaaaccgacaacagcccagattcagaaacaacaaaagaagcaacccagttgggtcgacgacgatgatgaatcggatttagtgtcggagttccgggatctaccggctaagttccagcaaacacttataccggacctggagagaatctcgacaacctcgaaagtttacatcaacaaatacaacaaagagttcaccaaacagttcaaaccatatgtcggcaacaaacatgctcccaccattgctactgtaatctcttgtgctttccttttaatccctttactattagtttccctcatttttaaccgcatcaaagcttatttttcactccaaaagattctcatcttcatccaaatttacctctcgatttacttttcaatcctttgccttacctccctcgtcaccggacttgagccgcttaagttcttttacgccacttcgccgtcgacctacgtgtgtttacaagtgcttcaaacgcctggggacgtgctttacttgtggctgctgtgatgtatttgatact

SEQ ID NO: 5948 - DNA, 471 bp, Gossypium hirsutum
  Clone ID: uC-gsronu33B107b03b1
gattaatcggatttggtgtcggagctccgggatctacctgctcactgcttgttcacagtcataccgggcttggagaaagtctcgacaccctggcacgctaacatgcgcatatacaacagagagtgcaccaaacagttcacaccatatgtccgcaacaaacatgctcccaccattgctactgtaatctcttgtgctttccttttaatcccgttactattagtttccctcatttttaaccgcatcaaagcttatttttgactccaaaagattctcatcttcatacaagtttacctctcgatttacttttcaatcctatgtcttacctccctcgtcactggacttgagccgcttaagttcttttacgccacttcgccgtggacctacgtgggtttacaagtgcttcaaacgcttgtggacgtgctttacttgctgctgctgttgatgtatatgatactggttttctcgacggag

SEQ ID NO: 5949 - DNA, 631 bp, Gossypium hirsutum
  Clone ID: GOSHI-09MAY01-C104719_1
cactaaaatctcacggggggcggggggggtattcttaagggatctatgagtgagtgtgcgaggttgctgtgtcatggacgtcgaagcaagttctagtttctcttcaatttctccaccggtgtttgatggagacaactaccaggtttgggcagttcatatggagggggggggggaagctttggatatttgggaagtagtggaagacgattatgaaattcctactctcccacaaatcctaccatggcacagatcaaattgcaaaagaagaagacaaagaaatccaaggcaaaggcctacttgttcactgcaatctcatctactatcttcactcggattatgactctgaagtcagcatatgagatatagaattatctcaagtcagagtatgagggagataaaagaatcaaaggaatgcgtgtgctaaacttaattcgagaattcgagttgcagaagatgaaagaaacagaatcaatcaaagagtattctgataggttattggacattgcaaatcgaatcagattacttggttcttagttcaaggactcaagaattgttgaaaaaattcttgtaacagtgcctgaaaaatttgaggcttctatttcaaccttggaaaatacaaaggatctaactc

SEQ ID NO: 5950 - DNA, 1612 bp, Gossypium hirsutum
  Clone ID: GOSHI-09MAY01-C4722_1
ctttgaggggcttcactccacacagccctttgctctatccccttccaacgatggaccgcttctctcttctcttcctcctcctttcctccgtcgttgcttcggccgtcgtctccgacgttaatagcgacggcgatcctctcatccgtcaagttgtttccgatggtggtgtcgaggaggactccgatgaccatctccttaacgcggagcaccacttcacgctgttcaaatccaagtatgggaaaacctacgcatcccaggaggagcacgattaccgactgggagtcttcaaggctaacctgcgtcgggccaagcgtcatcagctcctggaccccagtgccgtccatggcgtcacaaagttttccgatttaactccatcggagttccgccgccagtatctaggcttgaaaccgctcaagctcccagccgatgctcaaaaggctcctatccttccgactgacaacttaccggatgactttgactggcgtgaccacggcgccgtcactggcgttaaagaccagggttcctgtggatcgtgttggtcgttcagtgcgacgggggctttggagggagcccattatttggcgacaggagagcttgtaagcttgagtgagcagcaacttgttgattgtgatcacgagtgtgatccacaacaatatggtgcgtgtgactcagggtgtaatggtggtctaatgacctctgctttcgagtacaccctgaaggttggtggacttgagagagagaaggattacccttacactgggaatgaccgtggtccctgcaaatttgacaagaccaaaatcgctgcctctgtttctaacttcagtgtcatttctgttgatgaggatcaaatcgctgctaatttggtgaagcatggtccccttgctgtgggtatcaatgcagttttcatgcagacatatatgggaggggtttcatgtccttatatttgctttagaactttggatcatggagttcttctggtagggtatggagctgctggttactccccaatccgctttaaggacaagcctttctggatcataaagaattcatggggagcaaactggggagaggacggatattacaaaatatgcagaggtcgcaatgtttgtggagtagactccatggtctcaagtgtggcggctttgcatacaaagtctcagtagcattgccctgtaaatgactgatataagtaacggtaatattagtatccgtcagtatgtcttatctctggatttatgccatctgctagaacgggtttattccaatcctggtttatgcagccacctttaaaaggctgcatttagtagctttagaatttgaatctcagcatatgaacctcttttttcttgggcaatgattttcattgtaccaaagaaaaggggtgtatgctagagatgattattacttatttgtgttgtaaccaagtgttgtgatgtatatcagtctacctatatatgaatttggaacttggtatttaaaaaaaaaaaataagaaaaaaaactcaaaaaaaattttaaaagaaatttaggggttttaaaaaaaaaaaatggttttacaaaacaaaggaacttaaatttttttttgccacaccccctttttttttttataaaaa

SEQ ID NO: 5951 - DNA, 604 bp, Gossypium hirsutum
  Clone ID: LIB3829-031-Q6-K6-F11
cagccagccgttcacggtcggttgagtcatgcggccaagtcattcacgcaacggacggctcctctgaatacgccaagtggtatccgacggagttgccgaagaaaatttgttgaccaactactcactcctagcaccactttacgctgttcaagtctaagttcaggaaaacatacgctaccaacgaggaacacgattaccgattgcgagtcttcaaggttaacatgcgccgggccaagcgttatcagctcctggaccccactgccgttcacggcgttaccaagttctacgatttaactccatcggagttccgtcgtcagttcctcgtcttgaagccgatcaaactcccggttgatgctcagaatgctcctattcttccgactgatgatttacccgatgactttgactggcgcgaccaaggcgccgttaccggcgttaaagatcagggctcgcgtgggtcgtgctggtcctttagtacgactggagctttggagggagcccattatttggcgacaggtgagcttgtcagcttgagcgaacagtgagcttggtgattgtgatcacgagtgtgatccacatgagtatggcgcgtgtgactcatggtgta

SEQ ID NO: 5952 - DNA, 487 bp, Gossypium hirsutum
  unsure (1)..(487): unsure at all n locations
  Clone ID: uC-gsflnu33B113g01b1
attttagtaaaaatgagaagttaattaaattgggttgatattgttaaagcttgtagcaacttatatgcatgtagtttaacaattgatttgtgataaattagtaaaatttaactattttaattcatgtatttactaacaactgaactaacttgtcagtttttgtgaagtatgacaaccattgtagagattgatgcattagatgggtgaaaactgtctgttaaggatgttaattaactgggaaaactttgatgctgatctgtaattttaaaattttcttttatatggtttttggctgcaaattcagtgctaacatttggctactggctaaaaacacgcattaattatcaatctaacaaacaacaatccttcaactaaagattggttattttacagtgtgatccacaacagtatggtgcgtgtgactcaagggtaatggnggtctaatgacctctgctttcgagtacaccctgaaggttggaggacttga

SEQ ID NO: 5953 - DNA, 390 bp, Gossypium hirsutum
  unsure (1)..(390): unsure at all n locations
  Clone ID: LIB3493-024-P1-M1-B9
cggacgcgtgggcggacgcgtgggcggacgcgtgggcggacgcgtgggcggacgcgtggggcacgattaccgactgggagtcttcaaggctaacctgcgtcgggccaagcgtcatcagctcctggaccccagtgccgtccatggcgtcacaaagttttccgatttaactccatcggagttccgccgccagtatctaggcttgaaaccgctcaagctcccagccgatgctcaaaaggctcctatccttccgactgacaacttaccggatgactntgactggcgtgaccacggggccgtcactggcgttaaagaccagggttcctgtggatcgtgttggtcgtcaatgcgacgggggctttggagggagcccattatttggcgacaggagag

SEQ ID NO: 5954 - DNA, 396 bp, Gossypium hirsutum
  unsure (1)..(396): unsure at all n locations
  Clone ID: LIB3120-009-Q1-K1-D8
cccacgcgtccgctctctggtctatactcttgcaacggtggatcgtttctcttttcattcgatcgtccttgactgggactttgcttaggccgtcgattgggactttaatagcgacggtgatcctctcattctacaggttgttttcgatggtgtagacaaggaggacttcgatgaccatctccataactcggagcaccagttgacgctgatcaaatccaagtctgggaaaacctacgcatactaggaggagcacgattaccgactgggagtcttcaaggctaacctgcgtgaagcctagcgttatcagctcctggaccccatggtcgagcattgcgttacatagtttttcgagtaacttcatcggagatacgncggcagtatatatgcttgaaaccg

SEQ ID NO: 5955 - DNA, 841 bp, Gossypium hirsutum
  Clone ID: GOSHI-09MAY01-C104689_1
aaataaagatgtctgattctattattttggcaaactcagagagcaataaatgtccagtacaaaactgcagggttcaacttctaaaatttaaaaacaaacacaaacgtttcttatttgtgaacattacagtcagaaattgcacaacactctccccctgagagagcaagttgaacccattaaggcaaaaatgaaagtgcatcaatgcttgaagtgcctcacatttgttaaaagcaatgaaactccatacttgttacaacagtccacagcatccccatctctaatgctccctccaggctctgcaatcactccaataccactttcacaagcttcttccactgcatctttccaagcaaatgggaaaaatgcatcaatagctaaagcagctcccttgacctcatctcctgctttcctcaaagctattctcaagctctccagacggtttggctgcccgcttcccattcccaacatacggttgtcctttgctattacaatagcattgctcttgacatgcttaacacacagccatgcaaattctgcatcacaaagctcattatcttgtggcttcttctcggataccacattgaactggatatcctcgggggtcaaatcatctgaatcctgggctaaccaaccaccaccaacctgtcgtagtgagagcttccctttctcattcttctttgcttcaaggatcctcaatgttttcgattttccacggaggatctcaagtcccttctctgtatacttaggagccacaacaatctcataaaacattcgagtttcaccatccgttgggcttcggaactctcgaatttccttagcaagagcctcatctacttctatg

SEQ ID NO: 5956 - DNA, 553 bp, Gossypium hirsutum
  Clone ID: GOSHI-09MAY01-C104649_1
ggcggaatcataaaaaggcctgcagattaagtggttccatttcatcaaattttagggttcttaaaaggaccttaatacatgaaaactttaacccccccttctagcaggcaagccaaccaacaatgcccctttcacaattactaaaaacagaagccatgcttgctaatccaaaaactaaaaccggcctcatataatttacaaaccagggctaaatctctaagagttcctttagttcatgggggagaaatgcaaaggcaattcagggtatcgatttcgggagctgatagcatcatttcttcttaatccgctattcttcaaatcatattttaccgacgtttgccaccgctctttctccccaaaaaattggaatactatttgaggggaatatggagttgcaacctatagctctatccactagtcttttgcggatatgatctcgataggtggaccttatgggaggattgtcccccggaatgctaatgacttcgaatccaagtttaaggaaccacgaaagtgatatgaaccaaaaattaagatgtcagctcagcttaac

SEQ ID NO: 5957 - DNA, 768 bp, Gossypium hirsutum
  Clone ID: GOSHI-09MAY01-C4662_1
catttatacgcctggggaggcctccaggcagaaggaattttcagaattaatgcagagaacagccaggaggagtatgtcagggaacaactaaataggggagttataccagatgggatagatgtacattgcttggctggtcttataaaggcttggtttagggaacttcctagtggtgttctggattcgcttcctccagagcaagtaatgcaagccgagtcagaagaagagtgtgctcggcttgtacggctccttcctccaaccgaagctgctctactggattgggcaataaacttaatggctgatgttgtacaagtggaacatttgaacaagatgaatgcacgcaatgttgccatggtgtttgctccaaacatgacacaaatgtccgatcctttaactgcattgatgtatgcagtccaggtgatgaattttctgaagacccttattattagaacacttaaaggaagagaagattctatggtagactctgctcctgtctctcgcttagagccgtctgataagaatggacagcaaagctcttcacaactactcaaagatgccagtgaggaggttaaaaacgaaagcaaaggagagaaagcttttgtggctcaagaacctgccttagagagccctacccactctgctgaagagaatttgacaactgaaactggccctcaaagtttcctaacttcaatcgagaacatttgtgctggaaaccgatctcttgccaataactgtccttggactttagtttttaaatgaacttgttta

SEQ ID NO: 5958 - DNA, 550 bp, Gossypium hirsutum
  unsure (1)..(550): unsure at all n locations
  Clone ID: uC-gsronu33B080c06b1
cgatnacttgtgagctgagagggatatcctcactaaagggggtcattttttaattgttcagcttagatactctttccagacaaagtctaagctttatttaatcctggactttataaatggaggccatctcttctttcacctatatcgccaagggatattcagtgaggatcaagcaaggttttatactgctgagattgtatctgctgtttcacatcttcactactgcggcatcgtgcatcgtgatcttaaacctgaaaatattcttgtggatgctgatggacatgttatgcttacggatttcggactggccaaggaaattgatgaatcgagccgatcgaattcaatgtgcgggacaacagagtacatggctccagaaattttacagtccaaaggtcacaataaagatgcagattggtggagtgttgggatactgttatatgaaatgttaactggtcagcctccatatacacatgcaaataggcagaagcttcagcanagaattatcccagagaaactcanacttccaccatttcttactacagaagctcac

SEQ ID NO: 5959 - DNA, 467 bp, Gossypium hirsutum
  Clone ID: LIB3584-054-P1-K2-B4
tgctgtttcacatcttcacaactgcagcatcgtgcatcgtgatcttaaacctgaaaatattcttgtggatgctgatggacatttaatagccatgctcataacatacttgaatgccaaatatacatacctctgttcgtgttcttatgagtgttcctagttcctgaatccgtatgttgccccaggttatgcttacggatttcggactggccaaggaaattgatgaatcgagcagatcaaattcaatgtgtgggacaacagagtacatggctccagaaattttacagtccaaaggtcacaataaagatgcagattggtggagtgttgggatactgttatatgaaatgttaactggtcaggtaataatatacagagatttccagtatgtataactttttcaaattttacaagttttaagttcgaactttctaacatgaaaagctggctcaggtttgattcgttttttttat

SEQ ID NO: 5960 - DNA, 429 bp, Gossypium hirsutum
  Clone ID: LIB3197-046-Q1-M1-F12
cagcaatcagtatgtgtcttgctctgacttttattattcttgaagtacctatgtttgacattcgtatttgcacattttcagacatgtatataggaatatgactcctaatcagtactcacacctaaagtccgagtagcataggatttgttttctgtccatcattacattcaataattatatgatggagtgccatgatttggcagcctccatatacacatgcaaataggcagaagcttcagcaaagaattatccaagagaaactcaaacttccaccatttcttactacagaagctcactctttactgaaagggttgctgcagaaggagccaccaagaaggttaggtagtggtcctggtggaggggatgagataaagaaacataaatggtttcggtcaatcaattggaagaaattagaagctagagaaattc

SEQ ID NO: 5961 - DNA, 1403 bp, Gossypium hirsutum
  Clone ID: GOSHI-09MAY01-C4632_1
cccacgcgtccgatggagaaagatatcacccggttatgaagaaaggggactgggtacaaatggatttgttacctacagacagatcagcacaatcaggaactaagcttggtgatttcatatctgcttctgcaaatgagtcagctgtaatcacgtgtggaaaggaagaagattggtttgctggaaaccaccatgtaaagcctgaaaaccagcattcagccaatgatcatatgctttttaatggcgatcgtgttttatctgttgagagtgatcatctatattctcagaagagtgtgaaagatgttattgatgatgattctttcatggtagcagctcggccagcaagtgacgatctggatgattcgcaatggaaaacagatataagcatggttgcagatctaacttcacatagcaaaccagatggcacaatagatgtttcacaagataagcataagatggttgatgctgagccaattgatctttgcatggtgcttgaacgaaaccctggatacgagtcttccagagactcctggacaatggattaccaaatcgaattatgtttcacagaaacaaataaaagtgcagctagcaaatgtgatgatgatgttgagaaagttccttccaatcataagaacaccattgccaagcaaaatgaagcgaaaaagccagccaaagaagcaaggtctaaagctctaaatggacccattgggaagatcaaagctgaaaatgtgtctaggagcaagaaaccatctattgttagtaggtctgctattcagaaaagcaagttggagaaggaagaagagatgcgaaggaagatggaagagctacagatcgaacggcagaagagaattgccgccggaactgcagcttcgggatatgcttcacctgtatcctagaaatcacctgtatccaccaagagtgatcagaagaaaaatgtttccagtgctcaagcaagcaacaggatgaattctatcaaactcagagcaacttaagaaagaagccacagagaccctgcatcttatgaatggttaaagatatgaagatatgacacttattgtggacatattgatgcaagcctgaaatgcgtggagccaaggatagtcttacctgtgaaatgtggttggaacatgcactgcagatcatataatcaagaagctgatccagatgccagatttactactgtatacattgtcaatatttttgagttacacctgcaattcattcctctattgtttgttttaattagtaaaataaaacccaatcaacacatactggttagttcttcatatgtttatctattacgaatgtcagtcattgtcttggaaaatgtttgtttcgtgtataataatttgtatacttgagactttctattgagatatacgatgaataatatatatatataattc

SEQ ID NO: 5962 - DNA, 1863 bp, Gossypium hirsutum
  Clone ID: GOSHI-09MAY01-C4622_1
gccaaattggagtcaaccctccatctccggtgcttcgtcttcgtcttacagggaggattcaggcgcggcagtggcgtcttcttcacaggttcgagaggaagaggaggaccgagaccaggactacccgccacagcatcatttccaatttcatagtcctgagcttgagaatcaccacattggtggctttctttcttacagagataactcacctgcttttaatgataattcatcatcggtgattagagatgacacgtggtcttgcataattgttgttttcactttttggtttttcgtttcgatgactttgattctgggagtttacgggccaatgaatctacaacttggtccaaattgttctcttcttattcaaccaaatcctctttttgttcagagtgtgacggtggaggagaaagatggtactaagccaggactcaacctctatggattatataaatctccatctcttgatgaagttactacctggtctgaaacttacacccccactattcaagctgattctcacatggagtggattcgttatccgaacaggggatctcaagttaatatttcatataatgtgaactcagttagctcctctgtttttcttataattgctgaagggagtgaaggccttgctcgatggcttgaggatccaacataccctaacaccactttatcttggaacattgttcatgggagtggtatgattcagcaggatatatatagatcttcaagttattatattgcacttggtaatatgaacacagaggacataaaggtgcaattaaacttcacattcaaggcttatatttacaatacaactgaagcttactacaggtgtaccttcgctaatggagtgtgtagcttgaatatcttgtttcctgagggaaattctgtagtcttgacatctcctggtccagaacagcgtagatctgcacacgactggtcttttagattgtcgtatggaccaagatggattacatatattgttggcattggtggaatgactggaatcatgttggttgcctttaacttcttaaacaagtgccaatatactcctgaagatgaagtacgttttcataatggggagcttgcttctgcaagagcccctctgctttcacgcaaagccgatgatttatcaagtcgaggatcatcttatgattccgtttcaagtgatgaggcagatcttgaagattttctagcgggttctcttgaaggcacatcaataggagatggtgaaaacagtaacaatacccggagactttgtgcaatttgcttcgatgctccaagggactgcttcttccttccatgcgcgcccgcgggggcttgctttgcatgtggaacaagaatagcagaggctgatggaacttgccccatttgccgtcggagtatgaaaaaagtgaggaagattttcacggtataatcagggggaacagcagtttatgctgatgtcccttaatcgagtgaatgatacactgtctgactgggttatctttatcaacacagttttcaaggtgagactcttatctatcatcgttctaaacgatgttacaccaacccgtcattgttcttgaagcattgtatccatcgaaccaatgagccatgcattttgttttcccatagtggcttttgtatccttcataaaagtagattttctttggattcaacaattcagtcatcactttacaaacaaaccaactaaaaagtaattattttcttcatgatttttagtttatcttttgaaaatctgggttgtaatgtattaagctcctaattgagttgatgttatcagtcaaccggtaccaactcagttgaataaggattaaaataactttatttacaaagtaaataatattatttatc

SEQ ID NO: 5963 - DNA, 525 bp, Gossypium hirsutum
  Clone ID: uC-gsflmaxxa091b08b1
cttatttgtccgcagccgcccggcgtgagttcggctggtggttttattccgccgccgttgatgcagtaccaggtgcctgcaggtcaggttccgaatcctgctcttagaccgtttgctccgattccaaatggatatgcagcgctaccgggagctgttcctccgggcaccatgcctcctccggtaggctgtatactttctggtagttataaggataatttcccattcatgggtttatgaattgccagcagcagaccatgttaacaactgactgcttcttccttccatgtgggcactgtgtggcttgctttgcatgtggaacaagaatagcagaggctgatggaacttgccccatttgccgtcggagtatgaaaaaagggaggaagattttcacggtataatcagggggaacagcagtttatgctgatgtcccttaatcgagtgaatgatacactgtctgactgggttatctttatcaacacaagttttcaaggtgagactcttatctatcatcggtctaaacgatgt

SEQ ID NO: 5964 - DNA, 664 bp, Gossypium hirsutum
  Clone ID: GOSHI-09MAY01-C4192_1
cccacgcgtccgtcaaactcaaaacatccgcatattctctctaccctaatctacaattcttcttcgatttcatgtaaatctgcatcatttaattttttttttcaaaagacaaaaccctcttatgttctatcgtagcagttttatttatttacttgtaatttattttcaagtagaaaattaaacatgacgaagaagagaaaatccgacgccacgcgccttgacgaggttgatcggaccatgtacaccagtttttgcagcgctgcgaactccctctcccagctttacacccaggctatgaaccaccaacgcctttcttttcaggccggtgaacgtcacgcgctggagaaactctatcaatggattctgaggcagcaagaagaagggtcaagggctacaactgttgatatagttgcttatttgcagaatgagcttgaatatggaggagatgagccaccggtgtcccctaggctgccgctgcaacacccacattcccaggctccaacgcagtcgaacaatttaggtgcccctgttctgtccaatccattgtcatcggtaaatgttgggcagggagttcggcctggtgataaccaaggtaagaactctgttttctcgaacgccctctcaagcccccgtcgccggagccttcagccctaccacttggcgc

SEQ ID NO: 5965 - DNA, 619 bp, Gossypium hirsutum
  unsure (1)..(619): unsure at all n locations
  Clone ID: LIB3543-029-Q1-K6-H12
tcgccccgcgtccgcccacgcgtgggccggattggggtggtctaccctaatctacaattcttcttcgatttcatgtaaatctgcatcatttaaaattttttttcagaaaataaaaccctctttcgctctatcgtagcagttttatttatttacttgtaatttattttcaattanaaaagggggcggggggaagaagagaaaatccgacgcctcgcgccttgacgaggttgatcggaccatgtacaccagtttttgcagcgctgcaaactccctctcccagctttacacccaggctatgaaccaccaacgcctttcttttcaggccggtgaacgtcacgcgctggagaaactctatcaatggattctgaggcagcaagaagaagggtcaagggctacaactgttgatatagttgcttatttgcagaatgagcttgaatatggaggagatgagccaccgatgtcccctaggctgccgctgcaacacccacattcccaggctccaatgcagtcgaacaatttaggtgcccctgttctgtccaatccattgtcatcggtaaatgttgggcagggagttcggcctggtgataaccaagttaagaactctgttttctcgaacgcc

SEQ ID NO: 5966 - DNA, 580 bp, Gossypium hirsutum
  Clone ID: GOSHI-09MAY01-C4162_1
cagttcaaagcagcttactggcaacccagatgtgggttgttattgctgattctggtaaagcatctgacgaaggtgcacctcaaaaatatgtgagtgtccccaaagcagagggtttagctgaagagaagattgatagggccaaggttaaaagtagtgctaccaaagttgcaacctcatccaaaagtaattctgcggagaccactctacttccacggaagaaggtttttaagagggtaaagaaccctcgcggccgagctgtcactggtgtctccagcaatgatggggagtagtcaataactgaatgggagttttatcgtgcttataatatgctgacaagaatctccgtctccaatgaccattgtacgaaaggtgacagaatagcttcctcacatggaagaaacagacgtacatttcatcataactggaggcctacgcttgtgaaatgtgattcacaagctagtcttcctcgcatatttttatgtaagatggttaaggcaggtaaggctgccacaagctggatctcaagttctgtttcagagaaaagaaataacattttgatggttgcaaagttactgatttt

SEQ ID NO: 5967 - DNA, 508 bp, Gossypium hirsutum
  Clone ID: LIB3583-005-P1-K1-F8
cggacgcgtgggcttgaattgcttatcatgaggtaacttaccaggtaagcatgcgacattaatggtgactggtaagattagggggaaaatgcctgggttgtctcaaacaaatgaaatagcactagaacctcagcagcaatatactcattggatgaaatgggtactggatgctcataccgatcgtatgaaatctattgttactagtgaatttgctaaatattagattcttgtacaggtacatttcatcataactggaggcctacgcttgtgaaatgtgattcagaagctagtcttgctcgcatattcttatgtaagatggttaaggcaggtaaggctgccacaagctggatctcaagttctgttgcagataaaagaaacaacattttgatggttggaaagttactgattttttgctctgctagcccccttggtttctattttctcgttggaccattgatttgtattggatcttgggtttggcaaatacatatctatgcatttgaagaaa

SEQ ID NO: 5968 - DNA, 548 bp, Gossypium hirsutum
  Clone ID: GOSHI-09MAY01-C4112_1
cccacgcgtccgcccacgcgtccgcccacgcgtccggtgggggtggtgagaaagaactgttatcatctctggtactaaacataaccaacacaaaaaataagaatctttagaggagggaaggatcgatgtaagcaagtaagatggattgcgcctacggttggttattggattgttagttgtgatggtgccttcaatttattgtcgaaggaagttggaattggggtgatcattagagattctatggctgctttagttgctaagaagggaagaagtttcttggctagctctacccttgaagttgaggctcttgctatgcatgaaggttttttacttgctgacaacaagagacgccaacagagctgtagattaggttgcatctcaattcaggaggaggatgtgcctttccaactgggtggattcatcccatcttctctggttcctattctgagttgagatgaattaccaacaccccattgagtgtgttttcttaaacgaaatcttagagataatctattacacttctctaaaagattcttattttttggttt

SEQ ID NO: 5969 - DNA, 624 bp, Gossypium hirsutum
  Clone ID: GOSHI-09MAY01-C4132_4
cttatcgcgtccggccacgcgtgcgatttagggaaattttaaattaattttaatttttttttgcttgcagtccaaggtatttcactatggatcaatatgtttgatcgtggagccatgcagatcagctcatttaaaggcaatggaagtagccaaaggagctggtgcattgctctcatatgatccaaaccttcgcttggcactttggccttcagctcgcgtccctaggaaacagattttgtccatttgggctcaggcagatattgtcaaggttagtgatgtcgagctcgagttcctcaccggtagcaacaaaggcgacgaccaaactgccatggaactttggcgacccaactttacactgctcttggtcacccttggtgaaaagggtagccgatactacaccaagaatttccgtggggcagtcgatgctttccatgtcaataccgtggacacaactggcgccggtgactcctttgttggtgcattgctatgcaagattgttgaaaacccaaccattcttgaggatgaagcaaaattaagggaagtgttgaaatttgcaaatgcatgtggagcattattactcccttataacataaacttttctactaaacttcattctttgggcgg

SEQ ID NO: 5970 - DNA, 476 bp, Gossypium hirsutum
  Clone ID: GOSHI-09MAY01-C4132_3
cccacccggtcgcccccgcgtccgcccacgcgtccgcccacgcgtccgttcaggatcaaaatctctctttctcggcaatatggcagcacatggcgttgtttctgacacgagcttgatcgtcagcttcggtgagatgctgatcgattttgtccccactgtctccggtgtttctctagccgaagctcccggcttcctcaaagcccctggcggtgctccggctaacgtggccattgctgttgctagactcggaggcaaagcgtcatttgtcggaaaacttggagacgacgagcttggtcacatgctggccgatattctcaagcaaaacggtgtctccggtgacgggatcttgtttgaccaaggcgctagaactgctcttgccttcgttacgttacgcgccgaccgagagcgtgagttcatgttctataggaatcctagcgccgatatgctgttgaagccggaggagttgaaccttgatc

SEQ ID NO: 5971 - DNA, 598 bp, Gossypium hirsutum
  Clone ID: GOSHI-09MAY01-C4132_2
ttaaaagaaaaaaagcgcgctttttttttgctttcttatcgacgccatgggcaccgtagcggggtcgttatccgacaaggagttcaatcgtgagtttcggtgagatgctcatcgacttcgtccccacccgtctccggtcgtttcttttagcggaagctccaggcttcctcaaagcccccggtggagccccagccaacgtggcgattgccgtctcaagactaggcggtaaagcatccttcgtcggaaaactcggcgacgatgagttcggtcacatgcttgccgatattctcaagcaaaacggagtctctggtgacgggatcttatttgaccaaggtgctaggaccgctcttgccttcgtaactctacgcgccgacggagagcgtgagttcatgttttataggaatcccagtgctgacatgctgttgacgccggaggaattgaatcttgatcttataagatccgccaaagtattccactacggatcaataagtttgatcgaagggccgtgcacatacggctcacttacaggctatggaagtggccaaagaatcaggtgctttgttgtcatatgatccaaaccttcggctgccactttggc

SEQ ID NO: 5972 - DNA, 1348 bp, Gossypium hirsutum
  Clone ID: GOSHI-09MAY01-C4132_1
tcttttcgcgtcgcccacgcgtccgatcggccccttctccgctcctctgtttcagaatcaaaatctctctttctcgtcaatatggcagcaaatggcgttgtttctgacaagagcttgatcgtcagcttcggtgagatgctgatcgattttgtccccactgtctccggtgtttctctagccgaagctcccggcttcctcaaagcccctggcggtgctccggctaacgtggccattgctgttgctagactcggaggcaaagcgtcatttgtcggaaaacttggggacgacgagttcggtcatatgctggccgatattctcaagcaaaacagtgtctccggtgacgggatcttgtttgaccaaggcgctagaactgctcttgccttcgttacgttacgcgccgacggagagcgtgagttcatgttctataggaatcctagcgccgacatgctgttgaagccggaggagttgaaccttgatcttatcagatcttccaaggtatttcactatggatcaataagtttgatcgtggagccatgcagatcagctcatttaaaggcaatggaagtagccaaaggagctggtgcattgctctcatatgatccaaaccttcgcttgccactttggccttcagctgatgaggctaggaaacagattttgtccatttgggataaggcagatattgtcaaggttagtgatgtcgagctcgagttcctcaccggtagcaacaaagtcgacgacgaaactgccatgaaactttggcgacccaactttacactgctcttggtcacccttggtgaaaagggtagccgatactacaccaagaatttccgtggggcagtcgatgctttccatgtcaataccgtggacacaactggcgccggtgactcctttgttggtgcattgctatgcaagattgttgaaaacccaaccattcttgaggatgaagcaaaattaagggaagtgttgaaatttgcaaatgcatgtggagccatcacgacgaccaaaaagggagcaatccctgcactaccaaccgtggccgatgcccttgccttaatcaatggagcttagattttaagcaacttgaataatttgcacattgttttgcctcccgtgattatcctttcatttcaaagagttctcaatttattcccctttgatatgcgacctttgttccccccacacccgattgcttgtgttgtaatgatggaaaaggctttgtggttttaagcgtgtaggaaattcttttccctcttttataattttgcaatgtgattatcgaacttgttctgtcatcatttaaagtttaaactgggcgccgaagtaaatttgcacattgtgcgtttttgat

SEQ ID NO: 5973 - DNA, 483 bp, Gossypium hirsutum
  Clone ID: uC-gsflnu33B078d11b1
tgatcgtttattttttgctttcttatcgacgccatggcacctaacggggtcgtttccgacaagagttcaatcgtgagtttcggtgagatgctcatcgacttcgtccccaccgtctccggcgtttctttagctgaagctccaggcttcctcaaagcccccggtggagccccagccaacgtggcgattgccgtctcaagactaggcagtaaagcatccttcatcggaaaactcggcgacgatgagttcggtcacatgcttgccgatattctcaagcaaaacggagtctctggtgacgggatcttatttgaccaaggtgctaggaccgctcttgccttcgtaactctacgcgccgacggagagcgtgagttcatgttttataggaatcccagtgctgacatgctgttgacgccggaggaattgaatcttgatcttataagatccgccaaagtattccactacggatcaataagtttgatcgtagag

SEQ ID NO: 5974 - DNA, 320 bp, Gossypium hirsutum
  Clone ID: LIB3149-023-Q1-K1-B7
atcgacgccatggcacctaacggggtcgtttccgacaagagtttaatcgtgagtttcggtgagatgctcatcgacttcgtccccaccgtctccggtgtttctttagcggaagctccaggcttcctcaaagcccccggtggagccccagccaacgtggcgattgccgtctcaagactaggcggtaaagcatccttcggcggaaaactccgcgacgatgagttccgtcacatgcttgccgatattctcaagcgaaactgtttcttctgcgcccgaaacttattttgaccctttccttatacactctttaggtttatttacct

SEQ ID NO: 5975 - DNA, 258 bp, Gossypium hirsutum
  Clone ID: uC-gsronu33B099a06b1
atgcgcgatgttactttcaagaatttccgtggggcagtcgatgctttccatgtgactgccgaggacacaactggcgccggtgactcctttgttggtgcattgctatgcaagattgttgaaaacccaaccattcttgaggatgaagcaaaattaagggaagctggaacaaaattttagggaagtacaaatgacattttaatttttgtaatctctatctttatactttgtaaatgattaaatcgaattttttttaatttt

SEQ ID NO: 5976 - DNA, 753 bp, Gossypium hirsutum
  unsure (1)..(753): unsure at all n locations
  Clone ID: LIB3583-003-P1-K1-H4
cccacgcgtccgcttggaaaagaaaattttcagggcctaaatgtcatctgattcgcttccacctcttccccaaaaccgtatcgtactaggctgtgggcaagtcgcagttgatttcttggccactgtggcttcttttcctaaccctgatgacaaaatcagaagcactagcttgaaggttcaaggaggtgggaatgctggaaatgcctcaacctgtgctgctcgtttgggattaaacccacgtttaatttccaaggtttccaatgattctcatggcaagggtatattggaggagcttgaagctgatggagtcgacacttcattctttattgtttctgagaagggtaattcatcatttacttatgttatcgttgacagccaaacgaaaacccgcacgtgtatccacacccctggttatccacccctgataccggaggaactttctcagtcaagtttattatctgcattggatggagtaaatatggtctactttgatggaagacatcatgaaactgctttagttgttgcaaaagaggctgctcgcaagaatatacctatattagttgaggctgaaagggaaagggaaggtttagacgatcttctggattttgctacttatgctatatgctcagcaaagtttccacaagcatggacagaagctccgtcgttttcaagtgcacttatttccatgcttttgaggttgccaaaactaannattgtgattgtgacattgggggaagagggatgcataatgct

SEQ ID NO: 5977 - DNA, 601 bp, Gossypium hirsutum
  Clone ID: LIB3829-009-Q6-K6-E10
gttttggcctgcttcttttaggggttgcttgcttgagtggaaagtagaagatggaaagaggattggaaaagtgaaaataaaataaattttcagtgtgcttggtagaaaagagaagtgagaggaaagaagattagggaggtggccattttccatcctaattcataaaaccaattaatcttaattggaatgatacgaggagagaaaatgagagagagatgcaagttagtccaaagttatgcatttttcaaaagctccattctatttcttttcattttcaacactaccaagcaatgaatggaaagaaaatcacttttcttttaattttttcatctttcctaccaagcacagcaatggaaacagaatatattttctttctatttttctactccaagttttcaactttccgattttctttcccctaccaagtaaaaccttaatgctttgttgaacattgtggatggaaatttattaagttttttaaattttttggcatgtgttatgaacttccaatgatacaggcatggacagaagctccgtcgttttcaagtgcacttatttccatgcttttgaggttgccaaaactaaaatttgtgattgtgac

SEQ ID NO: 5978 - DNA, 740 bp, Gossypium hirsutum
  Clone ID: GOSHI-09MAY01-C4042_1
cccacgcgtccgctcttttacacctctctctctttctctagtatacatgcattgtgaggtttacagttaagtcaaagagcaaaagagaaaaggaaaatgagagcttcaagtgagtttttggctaccttggttcttgtgctggtttcggtttcttcagtggctcatggagatccccttgttcctgcactcatcatctttggggactcggttgttgatgtggggaataacaacaatctcaacacacttatcaaatcaaactttccaccatatggaagagattttgttaatcacaggccaactggaagattctgcaatggaaaacttgctacagatttcactgctgagtaccttgggtttacttcatacccaccggcttaccttagtcgagatgccataggaaatgctctcctgactggagccaattttgcttcagctgcctctggtttatatgacagtactgcaaacctatatcgtgccataacattgacccagcagttaaactactacagggagtaccaaacgaaactggtgaacatggcaggaaacaatggagccaacaacataatctctggtgccatacatcttttgagtgcaggaagcagtgattatattcagaactactacatcaatcctctagttagcagaatctatacacccgatcagttctctgatattctcataagatcctacactactttcattcagaatctgtatggactgggagcaagggaggattggag

SEQ ID NO: 5979 - DNA, 735 bp, Gossypium hirsutum
  Clone ID: GOSHI-09MAY01-C4032_1
ctttcatttgattttagttctttcttttttgtttcatccgttttgtttattatcgatcgagaaaaaaaaatggggaatacgtcttgcatattctgtgcctgcgtcgatcaggccagtatcggcgtggtggagcggtggggtcggttcgagaagttggcggagcctggcctccacttatttaacccctgcgccggtcagtggctcgccggcgtcctttctacccgaatctcctccctcgatgttcgcatcgagaccaaaaccaaggacaatgtgtttgtgcaattgctttgctccattcagtaccgagtggtgaagccacatgctgatgatgcattctacgagctgcaaaatcccgatgaacagatccgggcctttgtgtttgatgtggttcgagctctagttcctaggatggatttggatgatctctttgaacaaaagggtgaggttgctaaagctgtgcttgaggaacttgggaaggtgatgggagaatatggatacagcattgagcacattctgatggttgacatcattcctgatcctgctgtgcgcacggcaatgaatgagataaatgcagctcaaagacttcagcttgccagtgtgtacaaaggggaagctgagaaaattctccaagttaaaagagcagaagcggaagccgaagccaagtacttgggcggggtgggtgtggtaccaggcaacggcaggcaatcacggatgggttgagggagaacattttac

SEQ ID NO: 5980 - DNA, 507 bp, Gossypium hirsutum
  unsure (1)..(507): unsure at all n locations
  Clone ID: LIB3543-063-Q6-K6-A10
tcgcggaacgcgtggngcggaacgcgtgggggtggaggggggggagtaatggggaatacgtcttgcgtgttttgtacctgcgtcaaacagggaatatcggcgtggtggagcggtttggtcggttcgagaaattggcggagcctggcctncacatatttaatnctttcgccggtcagtatggggggggggtggttttaaccagaatctncttccttgatgttngnatngaaaccaaaaccaaggacaatgtgtttgtgcaattgctttgctcgattcagtacagagtggtgaagggacatgctgatgatgcattttacgaggtggaaaattccgatgaacagattcgggcctatgtgtttgatgttgttagagctttagttgctagaatgaatttggatgatctctttgaacaaaagggtgaggttgttaaagatgttgttgaggaagttgggaaggggataggagaatatggatacaggattgagaatatagtgatggttgaaatta

SEQ ID NO: 5981 - DNA, 1005 bp, Gossypium hirsutum
  Clone ID: GOSHI-09MAY01-C4392_1
ggaaaggcgaagctggtgaacgatgacggcgtgggagctgagaagggaatcctggaggtgaaacccagcccccaaaaggtctaaaatcgacactgattgactggttggagcagttgatagttaaggttatgtatgattcttctcagcctcaacattatctatcgggtaacttcggtcctgttcctaccgaaactcctcccacccataatcttcctgtcaaaggccatctccctgaatgtttgaatggtgaatttgtaagggttgggcctaaccccaagtttccccctgttgctgcatatcactggtttgatggagatggaatgattcatggtctgcgcatcaaagatggaaaggcaacatatgtgtctcgttttgtcaagacatcgcgtcttaaacaagaagagtttttcggggggtcaaaatttatgaaggttggagaccttaaaggattatttggattgctcatggtcaatatatataagctgagagaaaaggctaaagtgttagatttatcatacgggaatggaacagctaatacaaatctcatctatcaccatgggaaacttctggcacttcaagaggccgataaaccttatgtgctcaaagttttggaggatggagatctccaaactcttggcatgattgattatgacaagcggttggcacattccttcactgctcatccaaaggttgatccagtcactggtgagatgtttacttttggttatggacacgaagggccaccttatattacatacagagttatttcaaaagatggtttcatgcacgacccagtaccaataacaatatcagaaccaatcatgatgcatgactttgcaattactgagaattatgcaattttcttggatcttcccttgtattttcgaccaaaggatatggttaaagacaagaagctgatatactcatttgatgcttcaaagaaggctcgctttggtgtccttccacgatatgcaaaggatgacctgctaatcagatggtttgagc

SEQ ID NO: 5982 - DNA, 683 bp, Gossypium hirsutum
  Clone ID: GOSHI-09MAY01-C104299_1
cgttaagcagttcaagacagccgtcacaagcggagtataaagactcttcccggagatcgttctgaaagggattctcgcgaagcatcttcaacaccaattctttcatttcacgccttgctttttcgtctttgccttgaagaaccacatgcaaaagcttgagaagcacttcttcattatcgccaccatcaattccgttgctagcttcaatagacaccctctttaaaacttccccagctcccacgttttcaaggcggagctccgccagtaaagaagccactttttcttcttcgtcctccgtccacggcgcggcttccaagtactccaagcaagaaagaaccccagcatcaaagccaattgccgctgaaaccttcaaaattccaagaaccttagagacgtcctctctcagtaacatcttcctcaaatccgtcccgtgcatcaacctcaaaacctcaatgtaaacctctacgtcatcacaatctgctatttccacactgtacggcccagtaggtccattcgtctcttgtgatcggtccgataacttcactgcaaaaaacctactgtgagccaccagtatttgcctgtgaacgttcattaacacactaatcccatccttggaactaagcgtcagcttcatatcactcgaattcgggtcgttgaactggttcccagggctacgagtcgat

SEQ ID NO: 5983 - DNA, 813 bp, Gossypium hirsutum
  Clone ID: GOSHI-09MAY01-C4272_3
cccacgcgtccgcgatgacatttttatcaaactgggttctgaaaaggacaagcgcaaggatgctgataaagaagaaagagtcaaaaagtctgttagcatcaatgagtttctgaagccagctgaaggggagaggtactacggacccgggcgtggtcgaggccgtggccgtggtcctaaaggtggatatggaggcaatacagctagcagtgtgttagctccctcaatcgaagatcctgggcacttcccttcattgggtggcaagtgagaccccaccgctgcaatctgcacaatggttttcattttcatgggaatgcgttgtgatctattcaatagtcaggagtctacaagcttttctgtttttgagtgtaaattttagatactttgcccatttcctgacatgcatgcatgcatactttgtctttcttattaatttcttttgttttactgtttttggttaaaattagaacacaagtttcattattacaaccaaaaagtagcggcatcagttttgtttcggtttaggttaagatggtttagagggtcgtgtcggagtttgagacatggcattcatgttatctttttaaacctctatttactgacgattccgagttttctcctggcttcaaagtaggattgttttatgttctgcaagtataagggaagcttaaattgcagtcaagctctccctgttgctattatttcatacttttgcactgcttgctttggcggtgaaatgaccggtgacggcatgtctgagcttttgaaatttagtttctggtttcaagaatttaattagatttgatcgcctgaatt

SEQ ID NO: 5984 - DNA, 1072 bp, Gossypium hirsutum
  Clone ID: GOSHI-09MAY01-C4272_2
gccccctcgcctccggttttgtgatctctatcgattgtctctccattttcttacctctcaaacaccaagcctagatcttttcctttgtcatttatattcacttccatggctttaatcatacactagggttctcctggttgctatttcgttttctttttttcacttaaaaaagaaagaaaagctaagagattttcaataatccaattttttttaaccaatggcaaccacgaaccctttcgatctcttggacgatgatactgaagacccaaatttggttattgccgctgctgagcagcagaagcttgaaaagcccaagaaagctcctgcttccgccccagctcaagctcagccggctaagcctgctaagttcccttccaagccatctcctcctgctcaagctgtgagagaggcaaggaatgatcctggacgaggaggtcgtggtgctggacgtggaggaggccggggatatggtggaagagggttcaatcgtgattccaatgtcaatgataactccaatgcatttttaggagggtacagaccttctgaagagggagaagaaaggaagcaaactgaaaggcgtggaggatatggtgggcctcgaggttctttccgtggaggacgacgcggtggttttaatgatggagaatctggagagggggagcgccctcgcaggatgtatgatcgccgtagtgggactggacgtgggaatgagttcaaacgtgatggttctggacgtggtaattggggtagtcctactgatggaattgctccggaggccgaagaaaatgtccctgagaatgaaaagaatgttggcattgagaagcagtctggagaggaagatgccatggatgctggcaaggagaatgctgcaaatgaagctgaggagaaagagcctgaaaacaaggagatgactctggaagaatatgagaagattggtgaggagaagaggaaaagctttgcttgcccttaagactggagaaagaaaaggtggtacccaaagaggttgaggccatgccacaacctttaaggtagaagaaccaccatgacctttttattaaaccggggtcttgaa

SEQ ID NO: 5985 - DNA, 1609 bp, Gossypium hirsutum
  Clone ID: GOSHI-09MAY01-C4272_1
gctagggtttactgagccactctcacattactttttgtgtgttctcttgtctccccaatttcttaccttcctaacatcaaccttagatcttttcctttttcctcattaattcgcttacatggcttcaaccttatcttaggggttctcttgattgctgtttcttttttaagttagaaaaaaaaagaaaaaaagctgaagttttcagtgtcatctcttaaacgttaacaatggcaaccaagaaccctttcgatctcttggatgatgatactgaagacccaagtttgcttattgctgctgttgagcagcaaaagcttgaaaagcctaagaaagctcctgcttcgactccagctgcggctcagcctgctaagtctgccaagcttcccaccaagccactacctccttctcaagctgtgagagaggctaagaatgagcttggacgcggaggtggccgtggtactggaagaggccgtggccgtggaggcagtgggttcaaccgtgattccagagtcagcgataactccaatgggtattcaggagggtacagaccctctgaagagggagatgggaagcagtatgaaaggcgcggcggctatgatgggcctcgaggttctttccgagggggtcgccgtggtggttttaacaatggagattctggagaaggggaacgccctcgcaggcagtatgatcgccacagtgggactggacgtgggaatgaattcaagcgtgatggttctggacgtggaaattggggtagttctactgatgagattgcaccggagactgaagaaaatgtccctgagaatgagaagaaggttggcactgagaagcagtctggagaggaagatgccatggatgctggcaaggagaatgctgcaaatgaagctgaggagaaagagcctgaaaacaaggagatgactctggaagaatatgagaagattgttgaggagaagaggaaagctttgcttgcccttaagactgaagaaaggaaagttgataccaaagagtttgagtccatgcaacaactttcaagtaagaagagcaacgatgacatttttatcaaactgggatctgaaaaggacaagcgcaaggatgctgataaagaagaaaaagtcaaaaagtctgtgagcatcaatgagttcctgaagccagctgaaggggagaggtactatggacctgggcgtggacgaggccgtggccgtggtcccagaggtggatatggaggcaacacagccagcaatgtgcaagctccctcaattgcagatcctggacacttcccctcattgggtggcaagtgatgtccgccaccacaatctccgcaatggttttcacttggaatccattgtggtttattctatagtcaggagtccccccacctctcccccaaaaaaactctcaagacaaatcaccatttcccttgttagaaaccatgaacgtgtttttgagtgtaattttgcatgaatatcttttttgttttccattctgtttttgttttgggttaaaaaattagagaatattacaactgagaagtagtagcatcagttttggtcctgtccgagacattgcgttaatgttatttccatcctcttaaattttaatctctattattgac

SEQ ID NO: 5986 - DNA, 482 bp, Gossypium hirsutum
  Clone ID: LIB3585-052-P1-K1-A10
cccacgcgtccgcccacgcgtccgcccacgcgtccgggaaagctttgcttgccctggggagtgaagaaaggaaagttgataccaaagagtttgagtccatgcaacaactttcaagtaagaagagcaacgatgacatttttatcaaactgggttctgaaaaggacaagcgcaaggatgctgataaagaagaaagagtaaaaaagtctgttagcatcaatgagtttctgaagccagctgaaggggagaggtactacggacctgggcgtggtcgaggccgtggccgtggtcctagaggtggatatggaggcaatacagctagcagtgtgttagctccctcaatcgaagatcctgggcacttcccttcattgggtggcaagtgagaccccaccgctgcaatctgcacaatggttttcattttcatgggaatgcgttgtgatctattcaatagtcaggagtctacaagcttttctgtttttgagtgt

SEQ ID NO: 5987 - DNA, 417 bp, Gossypium hirsutum
  Clone ID: LIB3120-054-P1-K1-A3
gccacgcgtcacgacgcaaactgaaaggcgtggaggatatggtgggcctcgaggttctttccgtggaggacaccgtggtggttttaatgatggagaatctggagagggggagcgccctcgcaggatgtatgatcgccgtagtgggacaggacgtgggaatgagtttaaacctgatggttctggatgtggtaattggggtagtcctacttatggaattgcttccgaggcccaaaaaaatgtcccttaaaatgaaaagaatgttggcttttagaaacaatttttagaggaaaataccctttttttctttcaaggggaaaatttttaatttatctttggagaaaaagccccaaaacaccgggatgacttttttaaaatattataaaatttttttggagaaaaaaaaaaattttttttttc

SEQ ID NO: 5988 - DNA, 340 bp, Gossypium hirsutum
  Clone ID: uC-gsronu33b112f12b1
tcaaaaagtagcggcatcagttttgtttcggtttaggttaagatggtttagagggtcgggtcggagtttgagacatggcattcatgttatctttttaaacctctatttactgacgattccgagtgtaaaagaagtagtggaagcagaaaaaccagataagaatttgggcactttcagagtgaaccaaagagaacttatggaagaaatataaaaactttgtaattaccatataaatttttatcccaaaaaaaaagtttggggcggcgctcttaaataaaccaggggacccccccaaggcttcccgcgggaatgggccttccgggggccccctaaaattttt

SEQ ID NO: 5989 - DNA, 647 bp, Gossypium hirsutum
  Clone ID: GOSHI-09MAY01-C4232_1
ggtctattatagatgttttagatctttatgttatgatttgatttatggatgttttagatctttatgttatgattttagttcctcaacatctccgagaactctttcaacgtcgcattgccgagcaacatttggggtgcaccgagcttgcagattttctcgatcagttcagccaagctaacaggcaaaatcccagacttcatcggctgtaaaaacgtgtacaaaattgagctccaaggtaattctctaaacagaagcatcccctgggacattgatcattgtgaaaagctcttgtctttgaatttaagccgcaatttgtttactggaataattccatgggaaatatcgacgcttccttcaataattgcagttgatctttccgataatatgctcactggaactatcccttcaaacttcgaaaactgtagcactttagagaatttcaatgtctcctataagttgctaaccggcccgatcccatcgtccggtccaatatttcccaacttacagctttcttcatttttcggcaatgacgggctttgcggcagaattttaccgaaccctttcccctttactctgattgggctccagttatggactagtataagtaataggacaggtttcaaagagagagagagagagagagagag

SEQ ID NO: 5990 - DNA, 476 bp, Gossypium hirsutum
  Clone ID: GOSHI-09MAY01-C4222_4
gctttactgagctccatctctctgtctctctcccatttacctccatggctgtctcttttaaaatgtgtgtgagtggcgggctatttgtggggcttatgatgctggggctggtaagctcagcttagttcgatgagcttttccaacccggttgggctatggatcacttcatctatgaaggagagctccttaagctcaaactcgacaactattcgggtaatttccaccctttcttgctctccaaggacccacctacttatgttcattgactccctgtttttcattacaatatggtacttccaacttttttcttcgttgttaacatgcccgcttattgattaatgaaaatggtgggttttggtgatatcaggtgctggctttgcatcaaaaagcaagtatctatttggcaaagtgaccatgcagattaagcttgtagaaggcgactctgctgggactgtaactgcttactatatgtcatc

SEQ ID NO: 5991 - DNA, 597 bp, Gossypium hirsutum
  Clone ID: GOSHI-09MAY01-C4222_2
tttcacgcgtccgcccacgcgtccggcttcactgagctctctctctctctctctctctctctctctctctctcccatttccctccatggccgtctcttttaaaatgtgcgcgagtttcggtctatttgtgggtcttatgatgctgggtctggtaagctcagctaagttcgatgagcttttccaacctggttgggctatggatcatttcatctatgaaggagagctccttaagctcaaactcgacaactattcgggtgctggctttgcatcaaaaagcaagtatctatttggaaaagtgaccatgcagattaagcttgtagaaggcgactctgctgggactgtaactgcttattatatgtcatcggacggtccaaatcacaacgagttcgatttcgagtttctaggcaataccacaggtgaaccttacctcgttcagaccaatgtgtacgtcaatggtgtaggcaacagagagcaaaggatgaacctttggtttgaccctaccaaagactttcactcttattccatcctctggaaccagcgccaagttgtatttttagtggatgagacccccataagagtgcacaccaacatggaaca

SEQ ID NO: 5992 - DNA, 1186 bp, Gossypium hirsutum
  Clone ID: GOSHI-09MAY01-C4222_1
cccacgcgtccgcccacgcgtccgcccacgcgtccggtgggtgtgtatttttcagagtagaagcttcactaagcttactccctccctccttcccgctctctgtttctgtcgcttccatggctgtcttgtttaaaatgcctgtcgttttgggtttctttgtgggtcttatgatgctgggtttggttagctctgctgagtttcatgagctttttcaacctggttgggcaaacgatcatttcatctatgaaggagagcttcttaagctcaaacttgataacttttctggtgctgggtttgcatcaaaaagcaggtatttgtttggaaaagtatccatgcagattaaacttgtagagggtgactctgctgggactgtcactgcttactatatgtcatcggagggtccataccacaatgagttcgacttcgagttcctgggcaataccacaggtgaaccttaccttctccagaccaatgtgtacgtgaatggtgtagggaacagagagcaaagaatgaacctttggtttgaccccaccaaggacttccactcttacactctcctttggaaccagcgccaagttgtatttctagtggatgagacaccaataagagtgcacaccaacatggaacacaaaggaattccttttcccaaagaccaagccatgggtgtatatagctcaatctggaatgctgatgattgggccacacagggtggcctagtcaagactgattggagccatgcaccatttgttgcctcctacaaaggcttcgaaatcgacgcatgcgagtgcccggtttccgtgacagcagatgagatcgccaagaaatgcagcagcagtgctgagaagaggttctggtgggacgagccgacaatgtcggagttaagtttgcaccagagccaccaactggtgtgggttagggcaaaccacttggtctatgactattgtactgatactgctaggttccctatcaagcctgtagagtgtgagcaccatcgtcactagtagaccagctaaggcaaaaggggttcttttgggtacattgtaaaaatatgttgtatggggcactgggcagtggaagaaccttagtcataaaaaaaaaacatgtactcatgtttcatattttggtttcttttagtttccattttgtatgagaatcacattagattaatagtattaacctttttttt

SEQ ID NO: 5993 - DNA, 554 bp, Gossypium hirsutum
  unsure (1)..(554): unsure at all n locations
  Clone ID: LIB3829-004-Q6-N6-H4
cgcaacacaaaacaanagctttatataccaattatatcatacaaagtggaaacaaagccagaaccaaaacatgcgagtacatgttatatatgactacaattcatcatcatcatcaaccccccaacatattttacaatgtaccccaacaaaccctcgtaggccgccaccactagtggtggtgatgctcacactccacaggcatgacagggaacctagcaatgtcggtacaatagtcatacaccaagtggttggccctcacccacaccagctggtggctctggtgcacgcttagctccgacattgtcggttcatcccaccagaacctcttctcgccgctgctcctacatttatcggcaatttcattggcggctaccgaaaccgggcactcgcacgcgtcgatttcaaaccctttgtaggaggcaatgaatggtgcatggctccaatcggtcttcactaggccaccctgtgtggcccagtcatcggcattccatattgaactatatacgcccatggcttggtctttgggaaaaggaatccctttgtgttccatgttg

SEQ ID NO: 5994 - DNA, 456 bp, Gossypium hirsutum
  Clone ID: LIB3583-040-P1-K1-F4
cggacgcgtgggttttcagagtagaagcttcactaagctttctccctccctccttccctctctctggggctgtcgcttccatgactgtcttgtttaaaatgcctgtcgttttgggtttctttgtgggtcttatgatgctgggtttggttagctctgctgagtttcatgagctttttcaacctggttgggcaaacgatcatttcatctatgaaggagagcttcttaagctcaaacttgataatttttctggtgctgggtttgcatcaaaaagcaggtatttgtttggaaaagtatccatgcagattaaacttgtagagggtgactctgctgggactgtcactgcttactatgtgagtgtataaaatttgcacaaaaagttcactattcaaaggaaaaaagaagaagcgattttctctttatatgattctgcccatgcttggggttttcaagttttca

SEQ ID NO: 5995 - DNA, 758 bp, Gossypium hirsutum
  Clone ID: GOSHI-09MAY01-C5952_1
cttcgacagccattagcatctctccctgaagaagttttaacgcgatagatcaagaagcgttacgtcagaaaacccaagaagaaaccatgagtggtaactcggaggcgaagtctttgtttgatgaattgcgcttcgataagggagatttcttcgacctgggacaccctcttctcaactggtctgctcagagctttgtcaaaactgctggtattggagcacttcaagctatcgccagggaggcttgtcatatagcttttgaaggaactggacccattaaatcgactgatatcactggtgtcaagaataagaagcaaggcttccctggcctcagaggggaaaccagtcgaaattctcttgaagcaatggtgaatgaagcacactggaaaagaatctctacagtgggggctggctgctggattatattcagggcttacatttgggctaaaagaggctcgtggatctcatgattggacaaatagtgcagtggcaggggcgataacagggatggcagtagcactgacgtgtgataatactacccacgagcaggttctgcattgtgccattagtggagctgctctttctactgctgcaaaccttctagacttttaagaaagatgatgaagtggagtaatgttttaatttatggctggcagtggcaggggcagggtctttagactaattttgtagagcatgctttgttggagctttcaactataaagaacgttatttctaaataacaagtacatagctgttttgtt

SEQ ID NO: 5996 - DNA, 591 bp, Gossypium hirsutum
  unsure (1)..(591): unsure at all n locations
  Clone ID: LIB3583-059-P1-K1-F3
ggcggcgatagatcaagaagcgttacgtcagaaaacccaagaagaaaccatgagtagtaactcgnangccaaggctttggtgtgatgaattgcgcttcgataagggagatatcttcgacctgngacaccctcttctcaactggactgctcagagctttgtcaaaactgctggtattggagcacttcaagctatcgccagggaggcttgtcatatagcttttgaaggaactggacccattaaatcgactgatatcactggtgtcaagaataagaagcaaggcttccctgtcctcagaggtatgcatcaatgcatgccattcatgaatcctttttctttttaacacaagcttagcattagaaaggtgaggtaaacaggaacagtctttggtgtctcgtgcaacattatacatatcgtgcaatattatacatacttgtgggtgatggctgatacttgaagatcgattccaccaagctcacctttagctaatttcattttgtcggttactctgaaagagttaattgctttgtctttttgggttttcttcctacagattttttgaaatgattaaattgacccataaaaaactaaaa

SEQ ID NO: 5997 - DNA, 506 bp, Gossypium hirsutum
  Clone ID: LIB3583-037-P1-K1-C4
atcgggtacaccatcttcgacagccattagcatctctccctgaagaagttttaacgcgatagatcaagaagcgttacgtcagaaaacccaagaagaaaccatgagtggtaactcggaggcgaagtctttgtttgatgaattgcgcttcgataagggagatttcttcgacctgggacaccctcttctcaactggtctgctcagagctttgtcaaaactgctggtattggagcacttcaagctatcgccagggaggcttgtcatatagcttttgaaggaactggacccattaaatcgactgatatcactggtgtcaagaataagaagcaaggcttccctggcctcagaggggaaaccagtcgaaattctcttgaagcaatggtgagtcctttcacaagtacataaaatttcaagtgaaaagacagtcaatgatgtatagtgattgaaactagctagtatgatgactcttctacataagtaacctcaatagatcttgtaataagttggt

SEQ ID NO: 5998 - DNA, 676 bp, Gossypium hirsutum
  unsure (1)..(676): unsure at all n locations
  Clone ID: AI729804.1
cggccgcgtcgacaaaaacaaatgagtttctgaaaattcaattttctttcacaataattttggagcaaaaaccgctgaaacaaggatgggattcaggttccaaaatctaaatcccatgttcagatcatacctctctagactctcttcttcacccagaaatctacaccccaaccctattataattcagtccctcaatccccattttcaaatttaccctcgggtcttctctgataatcccatttacaacatccccagacggtggcatttgggtcattctcatggtcaccatgatcaccaccacaatttgaccaaggaaggcgagaaaatatttcgcttgggtctgggagcggatatcggtttanctactattaaagctttaactggctacttatctggaagtaccgccatcattgccgacgccgcccattcgatatcggacgtggttcttagtggaattgctttatggtcgttcaaagccgcaaatgcgcccaaggacaaagaacacccatatggacatggtaagtttgaaactcttggagctctgggaatttcttgtatgcttttggctactgctattggaattgcttggcatgctttaaagctcctaattgggttactgtccactgctcctgaanctgttaatggtcattcattggttcacnggcatanccatcat

SEQ ID NO: 5999 - DNA, 563 bp, Gossypium hirsutum
  Clone ID: LIB3583-059-P1-K1-H8
gcaaaaaccgctgaaacaaggatgggattcaggttccaaaatctaaatcccatgttcagatcatacctgtgtagactctcttcttcacccagaaatctacaccccaaccctattataattcagtccctcaatccccattttcaaatttaccctcgggtcttctctgataatcccatttacaacatccccagacggtggcatttgggtcattctcatggtcaccatgatcaccaccacaatttgaccaaggaaggcgagaaaatatttcgcttgggtctgggagcggatatcggtttagctactagtaaagctttaactggctacttatctggaagtaccgccatcattgccgacgccgcccattcgatatcggacgtggttcttagtggaattgctttatggtcgttcaaagccgcaaatgcgcccaaagacaaagaacacccatatggttacttatgattgtacctacaagctactccattttccttacttttggtcataattatgaaatatgaatgttatgcttataagatttaaaaaaaaaaattattaggtttcttaat

SEQ ID NO: 6000 - DNA, 371 bp, Gossypium hirsutum
  Clone ID: GOSHI-09MAY01-C5962_3
cggacgcgtgggcagcagcccaaaaatacttaggtcttgtttttgggggaagggttgagaaatgcttgtgttgttcgagactcccgcgggctttgcccttttcaaagtattggatgaagggaagctaaacaaagttgaggacttgtcaaaagaattcttggctgcagattcagcaagaaaggttgtctcgttgcaagccttttccaagttcgaaaacacagcagaagcattggaagcagcaacgaaactacttgaaagcacgcccagcaaaggtttgcgcaagttcttgcgtgctcattgtgatggtgaaacactaggagtggctgattcaaaacttggaaatgcaattaaggaaaaactgtaaaattgat

SEQ ID NO: 6001 - DNA, 1327 bp, Gossypium hirsutum
  Clone ID: GOSHI-09MAY01-C5962_1
gaacaatacggcaatataagcggtgactacaaaaaccctaaacccctccatttctctctctgcaaatagcgcggcaccccatcacggagcttaggttaaacaaaataagggttttttcgtcaaaaggtttgttggttggaagatttaaagatgcttgtactgttcgagattccggcgggctttgcccttttcaaagtattggatgaagggaagctaaacaacgtcgtggtcttgtcaaaggaattcttggctgcagacgcagcaggaaaggttgtctcgttgcaagccttttccaagttcgaaaacacagcagaggcattggaagccgcaacgaaactacttgaaagcacgcccagcaaaggtttgcgcaagttcttgcgtgctcattgtgatggtgaaacactaggagtggctgattcaaaacttggaaatgcaattaaggaaaaactgaaaattgattgtgttcacaataatgctgttatggagctgctcagaggggtgagaactcaattgacacaactcatctctggtctaggtgcacaagatttggctcctatgagtcttggtttgtctcatagtctctctagatacaagctaaagttcagtgctgataaggttgatacaatgattgttcaagccattggtttgcttgatgaccttgataaagagctcaacacatatgcaatgagggttcgtgaatggtatggttggcattttccagagcttactaagatcatacaagacaatatcatgtatgccaaggcagtaaaactaatgggtgaccgtgctaatgctgctaagctcgacttctcagaggtattaccagaagagtttgagacagaattaaaggaggcagcagtcatatccatggggactgaaattagtgaccttgatctgacaaatatcaaagatttatgtgatcaggttctcaatctttctgaataccgagctcagctatatgattatttaaagagcaggatgaacactgttgcaccaaacttgactgctcttgtcggtgaacttgttggtgctcgtctcattgctcatggtggcagcttaataaatcttgccaaacagcctggtagtactgttcagattctaggtgcggagaaggctctcttcagagctctgaagacaaagcattcgactcccaaatacggactcatctaccatgcatccttggttggtcaggcagcaccaaaacacaaggggaagatttccaggtcacttgccgcaaaggctgcattggcaattcgttgtgatgctcttggagatgaccaagataactctatgggacttgagaaccgagccaagcttgaagcaagat

SEQ ID NO: 6002 - DNA, 599 bp, Gossypium hirsutum
  unsure (1)..(599): unsure at all n locations
  Clone ID: LIB3543-058-Q6-K6-E4
gcggcaccccatcacggagcttaggttaaacaaaataagggttttttcgtcaaaggtttgttggttggaagatttaaagatgcttgtactgttcgagattccggcgggctttgcccttttcaaagtattggatgaagggaagctaaataacgttgtggacttgtcaaaggaattcttggctgctgactcagcaagaaaggtaatcaaattttagaatttttttagcacatttgttgttcctcgagtaaagaatctgatctattctttactatgttgtttaaggttgtgtcgttgaaagccttttccaagttcgaaaacactgcagaggctctggaagccgcgacgaaattacttgaaagcacaccaagcaagggtctgcgcaaattcttgcgtgctcattgtgatggtgaaacattaggagtggctgattcaaagcttggaaatgcaattaaggaaaaactgaaaattgattgcgttcacaatacctatgtcatggaattgctgagaggcgtaagaacccagttgacagaactaatatccnngccttggtgcgcaagatctggctcccatggagttgggtttgtcccatagcttgtctc

SEQ ID NO: 6003 - DNA, 1078 bp, Gossypium hirsutum
  Clone ID: GOSHI-09MAY01-C5932_1
cccacgcgtccgcccacgcgtccgcccacgcgtccgatcaaaacacatcactgcccttgcactcggatcataccaatcaatcaaaatccccaaaaaaatattaaaaaaaatgagctctcagattttcagatctgcttctagagccgccaggtctctcctttcagcatccaaggcttctcgcttttactctgaagggcgagctgtagctgccgctgcagcagtttcacttggcggtaaagtgcctcttttggcttcagcttatggaagtactgcttctgccaatgcatctagagcatggctttcaggagtttttgctcttccagtggcagcttacatgcttcaggagcaggaggttcatgctgcagagatggagcgcaccttcattgctatcaagccagatggagtgcaaagagggctgatttcggagatcatctctcgttttgagcgcaaagggttcaagcttgtggctatcaagttggtagttccttcaaaggagtttgcccagaaacattatgatgacttgaaggaaagaccctttttcaatggcctgtgtgaattcctcagctcgggccctgttcttgccatggtctgggaaggagagggagtgatcaaatacggccggaaactcattggagcaacagatcctcaaaaatcagagcctggaaccatcagaggtgatctagccgtggttgtcggaaggaatataattcatgggagtgatggtcctgagactgccaagcatgaaatcaacttgtggttcaagccacaagagttggttaactatacaagcaacgctgagaaatgggtctatggaaacaactgatgagggcatgttttttcaagttaatcagtagtagttcaggaaaatttagtcccacatcaggtgtgggttagaggcataattttttagaataaatgcgttttatggaggtgaggagcattgagccaaaagctttgatttttgttatagttaaactagtgctcaaaaaaataatatctttttcttttcttcagactcaaaataataatccctttcacctgtttaatatagggtggaaatactgcacttttcccattt

SEQ ID NO: 6004 - DNA, 968 bp, Gossypium hirsutum
  Clone ID: GOSHI-09MAY01-C5882_1
ccccgcgtccgccccgcgtccgaccatgggaaaccatttttggctatgattttaatgcagtctagttatgccgtgatgtcgattatcgcgaaatatgctttaaatcaagggatgagtccacatgtattggtagcttatcggttggctgttgccgctgttatcattacgccgttcgccattgttttagaaaggaaaacgaggccgaagatgacattcaatatctttatcaagataatgctgatcagcttactcgagccggtgcttgatcataacttcttttacaccgggatgaagtatacgacggcaacgtttacaactgccatgtgcaacattctacctgccttaacttttgcgttggcttgcatcgtcaagctcgagagagtggagatcgggaaagttcgtagccaagcaaaggtagccgggactggggtggcggtgggaggagcgatgataatgactctcatcaagggccctatcctagaattgccatggacaaaagggaggaaccactacttgggtcaacatggtgcaagtggagctcacaaacaagatatggtgatgggtgctcttttgctccttgcaggttgttgctgttgggcttgtttcgtcatttcacaagcaaggatcctaagatcatacccagctaagctttcccttactgctcttatatgcatcatgggcacctttgaaggcaccattctcgcatttgcggtcgaatggcgcaacccttcagtctggcacattggcttcgactccaaattgatagcttctctctatggcgggttggtgactgccttcgcattatatgcaatggggtcagtaatgaagagaagaggaccggtttttgtgagtgcttttaatccattaagtatggttattgttgcaattttgggctcctttttcttggctgaagacatgtttctaggaagaggtctagtaattaactcttttttcaacttctggtatta

SEQ ID NO: 6005 - DNA, 989 bp, Gossypium hirsutum
  Clone ID: GOSHI-09MAY01-C5842_1
aaaatgccttcgaatgccttgcgagtttctatcttcttcctcttcttctctggtcaggtaagccttttttttctcttctctcccaagcttccccatctccttctctcctccctctctccctttccctcaaaccagacgatccatttcccttcacacacgccccatgaacatcctcaaaaatctaggcttcggagccaacaacaagccagccccgtccatggagggttcctccatcgctcaaggtccagacgacgacgtccctgctcctggtcaacagtttgctcagttcggtgcgggttgcttttggggtgttgaattggccttccagagagttccaggggtgaccaaaacggaggtggggtatagccaagggtttatgcataatcctagctacgaagacgtctgttcggggtccaccaaccataatgaagttgtgagggttcagtatgaccctaaagagtgcagctttgacactttgcttgatgtcttctgggctcgccatgatcctaccaccctcaaccgccaggggaatgatgttgggacacaatacagatccggtatatactattacacaccagagcaggagaatgcagcgcgggagtccatggaaaaacaacagaaactgttgaaccgaaagattgttacagagcttctacccgccaagaagttttatagagcagagaaatatcaccagcagtaccttgcgaaaggaggtcgatttggtttcaaacaatctgcagagaaaggttgcaacgatccaatccgatgctacggctaagttgccactgttgcatatgcatttccaggtttgtgattgtttatagctatatgctcttgcctgtcagtggcatataataatacatttgaaaaacccttctgttgatggaatgaatgcttgcttatttatgtagttactgaaaatatggatttgtaattctttaccagaatctatgtttgttgtatgtgttaagtgataggaattcatgttt

SEQ ID NO: 6006 - DNA, 500 bp, Gossypium hirsutum
  unsure (1)..(500): unsure at all n locations
  Clone ID: LIB3583-030-Q6-K1-C10
atgaccctaaagagtgtagctttgacactttgcttgatgtattctgggctcgccatgatcctactaccctcaaccgccaggtgggttcttaattcttatgatagcaaaaaagaattgggattttttaatggttaattattaatggttaatcagttggcaggggaatgatgtgggaacacagtatagatctggtatatacttctacacaccggagcaggagatggcagcacgggagtccatggaaaaacaacagaaactcttgaaccgaaagattgtttcggagattctgcctgccaagaagttctatcgagcagaggaatatcaccagcagtaccttgccaaaggaggtcgattcggttttaaacaatctgctgaaaaagggtgcaatgatcctatccgatgctacngctaagttcccattactctatatgtagttcttagcttatgtttggttacagtttcttgttttgcctgtcactatcatattacatcctattttt

SEQ ID NO: 6007 - DNA, 397 bp, Gossypium hirsutum
  Clone ID: LIB3165-037-P1-K1-F1
accacgcgtgcgctttccctcaaacttattgatccatttccctatacacacgcggcggatggagggttcctccatcgctcagggtccagacgacgacgtccctgctcctggtcaacagtttgcacagttcggcgcgggttgcttttggggtgttgaattggccttccagagagttccaggggtgaccaaaacggaggtggggtatagccaagggtttatgcataatcctagctatgaagacgtgtgtacggggtccaccaaccataatgaagttgtgagggttcagtatgaccctaaagagtgtagctttgacactttgcttgatgtattctgggctcgccatgatcctactaccctcaaccggcaggggaatgatgtgggaacacagtatagatct

SEQ ID NO: 6008 - DNA, 741 bp, Gossypium hirsutum
  Clone ID: GOSHI-09MAY01-C5862_1
cgccaccttcctgcaaaatttggttcatttgtggggggcaactcgtccatcgaaggccacttgttgaaaatggacaatcaaacctgagcagctctgcggccgcgtcggcggacgcgtcgggctctaacaaagtggctagcagttctgacccatctgtgtctgggacactaggggagagtccagactggcttgagttcaatgaaggaagcggtgatgataaagtctttgaaaatctagaacaggccctattcaccgctgaaaaatcaaatcaagaagcatttgagaagttggaccggcttctgaaagctgaaaaagatgctctcaatgcagtagtaagccaggcaaatgaaatgaaaagttcatacattggagagttaagacgcaggaaggaaattgaagcaatgcttagaaaacagaacgaggagcttgaacaagtcacgcagcaaagagatcaagcacgcaaaatcgccagaactcataagttattattggagagtcgaggtgccaaatccgatcatgttaaagtattggaagctaagttatcatctgcaatggagcagttacaaatttgccagagagaacgagatgatttgcggacaaagctcgaacgtacttgcaattcaattgaagatcattcaacaaaacaggaagaagggagttctaatgtgcatatgcagcaattcttctcagagttctctgttgccgaaatccatgatgcaactgaggactttgacccttctt

SEQ ID NO: 6009 - DNA, 466 bp, Gossypium hirsutum
  unsure (1)..(466): unsure at all n locations
  Clone ID: LIB3583-030-Q6-K1-D9
gatttatatggatcatggacgattaccttctaatttgtggtcaaaaaagtgtagaagcggcaaaactaaatatagagatggatgatgctggaaaggggattgttgagctaattcgtgatcaaggtatcaagaaacttgtcatgggagcagcagctaacaagcatttttcagagggcatgactgatctcaaatctgaaaaagctcaatatgtggagctgcatgcgccaccttcctgcaaaatttggttcatttgtgggggacaactcgtccatcgaaagtcacttgttgaaaatggacaatcaaacctgagcagctctgcttcaagttctagttattggacagtctctaacaaattggctagcagttctgactcatctgtgtctgagacactaggggagagtccagactggcttgagttcaatgaangaagcggtgatgaataagtctttgaaaatctacaacaagc

SEQ ID NO: 6010 - DNA, 416 bp, Gossypium hirsutum
  Clone ID: LIB3493-030-P1-M1-B11
gggagcagcagctaacaagcatttttcagagggcatgactgatctcaaatctgaaaaagctcaatatgtggagctgcatgcgctaccttcctgcaaaatttggttcatttgtgggggacaactcgtccatcgaaagtgtgctagctaacagtcttattaatctgttctgaagtttcagcatacttgtttaaccgatgatttactgtaggtcacttgttgaaaatggacaatcaaacctgagcagctctgcttcaagttctagttattggacagtctctaacaaagtggctagcagttctgactcatctgtgtctgagacactaggggagagtccagactggcttgagttcaatgtactattcgacttccgcgaggatctttattatttatcaatgcctgaaatttaaaagcttaca

SEQ ID NO: 6011 - DNA, 544 bp, Gossypium hirsutum
  Clone ID: GOSHI-09MAY01-C5812_1
cggacgcgtgggcttgaaagtgcgttaagtaattgcaagaatatgcatacgctatctggtttgtggggatgccaaggggatatatctccctgccctgtatcctgtgtgcacgcatctaacattcttgaacttgagctatgctgctttgagaagcgatgaattggctaaacttctggctcattgtccacgacttaaacgcctatgggtcttggacacggtagaagacaaggggctggaggctgttggaatgaactgccctttgcttgaggaactacgagttttccctgctgatctgtttgacgaggaaattatccatggagtcactgaagctgggtttgtggctgtgtctttgggttgcccgagactccactatgttctctatttttgttgtcaaatgactaatgctgctgtagcaaccattgtacagaactgccctgattttactcatttccgattatgcataatgaacccgggtcaaccggatcatatcacaaatgaacctatggatgaagcttttggtgctgtggttaagacatgcactaaa

SEQ ID NO: 6012 - DNA, 515 bp, Gossypium hirsutum
  Clone ID: GOSHI-09MAY01-C5592_1
atgttatcgatgagaaatggattgagtttgtacccaatgtgcttaccaggagtaccacagccaatgcagatgcctcccacaggcttgggctatgatgagggacatggattcttcagtcccaacatcggagcaggcacattttcttcaaacgaagaaagatcgatgaatacaccttttaatccttcgaatccatgcaccatctcaaatctgccagtcgctgcaccttctgtagctaacgtgtctaatttggaagcttcaatcggttttgaatcacctgctggggcacactatggatccttcacccactcaacctcttccaaggaaatttgtaaggaaggcagatcacagattgaattagagatgaatcatggtgggaatagctcttcatcaggtgtgtcttagccaaagcagaattcccccaagaaacagcatgtacaataataaaaccgagaccgaactcttctctgcttcaagcgccatagaatctacagattatattcaaactggatacattt

SEQ ID NO: 6013 - DNA, 374 bp, Gossypium hirsutum
  Clone ID: GOSHI-09MAY01-C5542_6
tccctcgcgtccgaaataacccacggaagatggctactttggcggcggttgcagctcgtaaagcacctactctagctcgaacaccccttccatctcaacccgcttctctcattccggggacggacttctattcgcctcactctttgctcaacggcacgatagatccgacatctctgcatggaagctgtccagtgatcaaaggggagaaatgggttgctacaaagtggattagagaccaagaccggggtgactgtctattctgtgtttccgtaaaaaaaatcgctcattatcggtgtttatttttgttgttgcccccccatcatataaactctgttttggagagtataattctttatgaattcacgcccattttc

SEQ ID NO: 6014 - DNA, 467 bp, Gossypium hirsutum
  Clone ID: GOSHI-09MAY01-C5542_4
ttttatcttctgaatacgggccacaatcaagccggggggtttaattaaacttggtgggtttatctcatgcccacgctgccggagaaacaatgttcccttttgagaatgacatgagagtcaaaggttacgactacagacagtgcgtcggtttaaaaataaaaccacgaaaaggggacggacttcttttctattcactctttttgaatggcacaatagatccgacatctctgcatggaagctgtccagggatcataggcgagaaatgggttgctacaccgtgggcctgagaccaagaccacagtgactgactattcagtgtttctgtagaaactatggctcattatcggtgtttattatttgtcgctaatcatcatataaactctgccttggataggattattctttatgaattcactcccactttcaaaaaaaatttcctgtttgaattaatgaaccgggtggacttt

SEQ ID NO: 6015 - DNA, 1034 bp, Gossypium hirsutum
  Clone ID: GOSHI-09MAY01-C5542_3
tccgaaaaaaaccttattgtaactgtgaagaagaacagaatatcaaaaaaattgaaaaaaagagagagaaaggatccataaatgaaagggaaatcgaagagctcgaagagaaatctagggttagcaactacccttttcttatgttcacttgctttcttagctggtttgttcacttcaacttttttctctcaggatgttccgattattaaacccaagctgagaaagcttgaagtggtgcatgttgaaggtgataagtctcgtggtttgatgccaattggagagactggggaaagttcgattgattctatcccttttcaggttttaagttggaaaccgcgagcttactattttcctgactttgcaactgcggaacaatgcgaacatataattggaatggcgaaattgaaccttaaaccatctactttggctttgcgcaagggagaaaccgaagaaagcactaaaggaactagaacaagttcgggaacatttattagtgcatccgaggatgaatccagaaccttggacttgatcgagaaaaaaattgcaaaggttacaagcattccacagagtcatggagaggcatttaatgttttgcggtatgagatcggacagaagtatgattctcattacgatgcattcaatccgtccgaatatggtccacaatcgagccaaagggttgcgtcattcttgctatatttatccgatgtagaagaaggcggagaaacaatgttcccattcgagaatggcatgagcgtcgaaggctatgactacagacaatgcgtcggtttaaaagtaaagcctcgaagaggggacggacttttgttctattcgctgtttttgaaccgcaccatcgatccgacatcacttcatggaagctgtccagtgatcaaaggtgagaaatgggttgccacaaagtggattagagaccaacaacaatttgattaataaaatgtaactttaattttttttaaaaaaaaaatcattataaacctctccttttggaaatgattaatattttttgtgagttcatgccc

SEQ ID NO: 6016 - DNA, 613 bp, Gossypium hirsutum
  Clone ID: GOSHI-09MAY01-C5542_2
cccatttcccttgtaaaaacaaaacatcatcgattccttctaaagaaataacccacggaagatggctactttggcggcggttgcagctcgtagagcagctactctagctcgaacaccccttccatctcaacccgcttctctcattcctcgccgtggtcttgccggcgccgcagatcaccatggacctccaaaggttaatttttggcaagacccaatgagcccatctaaatggaaggaagaacattttgttatcgtctctttaactggttggggtctgcttttctttagtggatacaagttcttcactaaaggcaaaggcaaaaaggaagagaacgcggtggaagcaacacactaacgaggttggagtttttattttatttttataagatttcaagtaataatgtatgggtggaactttcatgtccttgggatgcttttattggcaaattattcagttttcttgttcatcatttcttttatgaccctttagtaaaacttggaggtcccctgtacctggttctgtgggcataggatgtaacagtttcttgaaactcaaaatccgtctgttgatggatttgaaaagctaataatgaagtctgcttttgtgcatgct

SEQ ID NO: 6017 - DNA, 633 bp, Gossypium hirsutum
  Clone ID: GOSHI-09MAY01-C5542_1
attaaaacagcatcgtccattgattcccttcccttactgctccctccctcttccattaaaaaagaagatagaaagcagctaccaaaatggctactttgctagcggctacaggtcgtagagcaactactctatctcgatccccggctctgtctcaagccgcttctctcattcctcgccgtggtcttgccggcgctgcggatcaccatggacccccgaaggttaattgttggcaagacccaatgaacccatctaaatggaaagaagagcactttgttattgtctctttatccggttggggcctgcttttctttagcggatacaagttcttcactaaaggcaaaggcaagaaggaagagaacatggtggaaacgacacattaatgaggttggagtttccaaattttacaaatagtccatgaataatgtgttgctggaacttccatgtccttgggcatcatcttcacttttctggtttcctttcttttctttttccctcaagtaaatttggaggtcagcttcttatcagtgaacatacagcctgtttcattggcttgtctcgttggtaatgggatgtaacatttttaagacccaaatgtgttgatgaattggaaaatttaatgaactatgtttctac

SEQ ID NO: 6018 - DNA, 290 bp, Gossypium hirsutum
  Clone ID: LIB3147-059-Q1-K1-C1
cccacgcgtccgcccacgcgtccgagaagacagaaagcagctatcaaaatggctactttgctagcggctgcaggtcgtagagcaactactctatctcgatccccggctctgtctcaagccgcttctctcattcctcgccgtggtcttgccggcgctgcgggtattctccgttttccctttttttattgttacaatttacaagtttttgttgactcaaatatatgtaaagtttgtctgaacatttttgaatctcgtttaccttagattatagttgaagctaaaggatctta

SEQ ID NO: 6019 - DNA, 476 bp, Gossypium hirsutum
  Clone ID: GOSHI-09MAY01-C5532_1
gcgcccacacgtgcgggcaggttttcaagctttaacgatcaaccccaaggaatgatttctgtcagatagctgcgaaaaatgggatattactgaggcttattaatactctgtataggtgaagtgaggcaactcgacttgctgctaaatctgttgggggtcgattctcatcagatggttctgctcgacagcaacgttctggtcctttagattccagtcatcctctgttttctcagaacgaaattccactctctccaactgatcatttgttagacagacatggaatgactgagcattcgtttccaactgttactcaagaatcttcacgggcttcaacttcacattctcagaggtcagatatcaatctgccggatcctcgttgtctttctattgacggtgacagaccccggtctagcaatggggcatcagatatttcagttggttctaaattggcatactctactttcatagaaaaaggt

SEQ ID NO: 6020 - DNA, 494 bp, Gossypium hirsutum
  Clone ID: GOSHI-09MAY01-C5452_5
accacgcgtccggaaaaaaatcagagaaattctcacttgtcttgctaccaaagaaaaggtcccaaaggctccgatcgacgatgtccggtatggaaccattgcacaggatgttcgccggcgctggtggtgcgttgggtcacccgccgccggattcgccgactctcgattcgtcggagcaggtctacatctcctctttggccctcctcaaaatgctcaagcacggaagagctggagttcccatggaagttatgggtttgatgttgggagagtttgtcgatgagtacaccgtacctgttgtggatgtctttgcgatgccacagagtgctactggtgtcagtgttgaagctgtggatcatgttttccaaacaaatatgcttgatatgctcaaacatactggaagaccagagatggtggtgggttgctaccattcacatcctggatttggctgctggctttctggtgttgacataaacacacagcagagttttgaagct

SEQ ID NO: 6021 - DNA, 659 bp, Gossypium hirsutum
  Clone ID: GOSHI-09MAY01-C5452_3
cccacgcgtccgccctcgcgtccgaagaaaagttcccaaaaactccgatcgacgatgtccggtatggaacgattgcacaggatgttcgccggcgctggtggcgcgttgggtcacccgccgccggattcgccgactctcgattcgtcggagcaggtctacatctcctctttggccctcctcaaaatgctcaagcacggaagagctggagttcccatggaagttatgggtttgatgttgggagagtttgtcgatgagtacaccgtacgtgttgtggatgtctttgcgatgccacagagtggtactggtgtcagtgttgaagctgtggatcatgttttccaaacaaatatgcttgatatgctcaaacaaactggaggaccccatatggtcgggcggtggtaccattctcattctatctttgccgatggcattactggtgtgtcttagatctcctgcttagttttagataatgatcatctgacttttctattattcttgttactatcgttttcatattgttattctcacgatactcaacatcatcgtttttctcatttcttcgtctcatgtacattacatatgcttctagattatgtatgtccctattattcttcgtttgaatctttctcttcatcctgcgtactactccctactgattaatg

SEQ ID NO: 6022 - DNA, 726 bp, Gossypium hirsutum
  Clone ID: GOSHI-09MAY01-C5452_2
ggtgattgatgcattccgcttgacaacccacaaaccagatgcttggcctccggcccccgcgggcaacatctaatctcgggcatcttaataagccatctattcaagcattaatacatgggctaaacagacattactactccattagccattaactaccggaagaatgaactcgaggaaaagatgctgttgaatcttcacaagaagaagtggacagatggactgacacttagacgtttcgatactcattccaaaactaatgagcagactattcaggaaatgctgaatttagctataaaatacaataaggcagtgcaggaggaaggtgaattacctcctgagaagctggcgatcgcaaatgtcggccggcaagatgccaagaagcacttagaggaacatgtctcgaacttgatgtcgtcaaacatagttcagacattgggaactatgctcgacacggtggtgttctaaaactcttttagcacctgtatactcttttttcatattcaggaactatcatagcttgttggtcaaaaaactgccattgtattgtcaaatttgaaagggactgtcatgttgtctcattaatctctctgttatcccctctttgatgggtaagtgggattgtgaagatggttaacttttggtacttgccctctgggagttttctgagattcttcatattgcgattattgcccaagttttttaaaaccagatcagtggttcagcccc

SEQ ID NO: 6023 - DNA, 893 bp, Gossypium hirsutum
  Clone ID: GOSHI-09MAY01-C5452_1
tttcggcaaatcgtaagggacagaaaaaatcagagaaattctcacttgtcttgctaccaaagaaaattcccatgtggacgcgtgggctgaaaactccgatcgacaatgtcaggattggaccgtttgcaaaggatgttcgccggtgctggcggcgctttgggtcatccgccgccggattccccgacccttgattcttcggagcaggtctatatctcctctctcgccctcctcaaaatgctcaagcatggaagagctggagttcccatggaagttatgggtttgatgttgggagagtttgttgatgagtacactgtgcgtgtcgtggatgtctttgcaatgccacagagtggtaccggtgttagtgtcgaagctgtggatcatgttttccaaacgaatatgcttgacatgctcaaacaaactggaaggccagagatggttgtgggttggtaccattcacatccaggattcggctgctggctttctggtgtcgacataaacacacagcagagttttgaagctttgaatcaaagggctgtagcagtggtggtggacccaattcagagtgttaaggggaaggtggtaattgatgcattccgtttgatcaatccacaaaccatgatgcttggccaagaaccacgtcagacaacttcaaatctagggcatcttaataagccatctattcaagccttgatccatgggctaaacagacactactactccatatgccattaactaccggaagaatgaacttgaggaaaagatgcttttgaatcttcttaaaaagtagtggacagatggactgacacctcggcgtttggatctcatttgataacctatgacagactgatatgtatagctgatttactattaattcctcaggagctcgaggaaat

SEQ ID NO: 6024 - DNA, 641 bp, Gossypium hirsutum
  unsure (1)..(641): unsure at all n locations
  Clone ID: AI055012.1
ctgaaaactccgatcgacaatgtcaggattggaccgtttgcaaaagatgttcgccggtgctggcggcgctttgggtcatccgccgccggattccccgacccttgattcttcggagcaggtctatatctcctctctcgccctcctcaaaatgctcaagcatggaagagctggagttccatngaagtatgggttngatgtggagaagttgttgatgagacactgtgcgtgcngngatgtctttgcaatgcacaaatggacccgggtaaatgcgaactggtgatcatgttttcaaacaatatgcttgcatgctcaacaactggaagccaaaggttgtgggttggtaccattacatcaagattcgctgtggttctggtgtcgacataaccacacngaagttaagctttgatcaagggcgnacatggtgggggacccatagaatgtaagggaagtggtattgatgctttcgttgatcaatcacaaccagatgcttgccaagacacgtagacactcaatctaggctctaatagcattatcagcctgacctgactatgacctctcttatgcatactcgaagagactgagaagacatgactatnnaagatgcnagctgnccttggtgacatcaacagacactgagaggt

SEQ ID NO: 6025 - DNA, 323 bp, Gossypium hirsutum
  Clone ID: LIB3135-036-Q1-K1-D1
acgcgacacggtggtgttctaaaactcttttagcacctgtatactcttttttcatattcaggaactatcatagcttgttggtcaaaaactgccattgtattgtgaaatttgaaagggactatcatgttgtctcattaatctctctgatatcctctctgatgtgtaagtgggattgtgaagatgtttaacttttgttacttgccttctgatagttttctgagattcttcaaactaaaaaggccttaatggaatgctgcatttacagaagaagaactacgtggtttaatatctgaacaagagaaaagaaatggggtgacaaaggg

SEQ ID NO: 6026 - DNA, 231 bp, Gossypium hirsutum
  Clone ID: uC-gsronu33B100g09b1
tcgccctctcgtccggaaaaaaatcagagaaattctcacttgtcttgctaccaaagaaaagttcccaaaaactccgatcgacgatgtccggtatggaacgattgcacaggatgttcgccggcgctggtggtgcgttgtttcacccgccgccgtatccgccgtcttttgatttttttggagctggttttcttcttttctttgtccttccttattatgtttatgctcttgttg

SEQ ID NO: 6027 - DNA, 1978 bp, Gossypium hirsutum
  Clone ID: GOSHI-09MAY01-C5442_1
ggaaaagggaggtaattatcttaaacattcttttttttattttaaagtccgtaagttttttaaaaaaaactcaatatgaatattattttttaaaaaagtttctttagcagaagatttattgaagcaagggagtaaaagagtttaaagcttccattaaaatatcaaaaaataattttttagtaaaaaatgggagcttaaatgagatgtggatgaatccgtgtagaggtaaaaagattaaataaatatattaattaaaaaaaagcggttttgggtgtcggaatgctattagtaaaacaaaattgctactagaggtaccggcgggcgcgcccgcgctagcaagtttactggaaaaccctagaaaccagcggctctttcttcaattttcgcttctttaggcggcggtaactcagaggtcgttttcttcttcttcacaagacacaatggcagatggtcatgaaactgacaagaacatcgagatttggaaaataaaaaagctaatcaaggcactagaatctgccaggggaaatgggaccagcatgatatctctcattatgcctcctcgtgatcaaatatcccgtgtcacaaagatgttaggtgatgaatttggaactgcatcgaacatcaaaagtagggtcaaccgtcagtctgtgttggctgccattacttctgctcaacagaggttgaagctctataataaggttccccctaacgggctggtgctctacactgggacaattgttactgaagatggcaaggaaaagaaggtgacaattgactttgaacctttcaaacctattaatgcatctttgtacctctgtgataacaagttccatactgaagctttgaatgagcttttagagtctgatgacaagtttggatttatagtcatggatggtaatggcacgttatttggtacgttaagtggaaacacaagagaggtacttcataagttcactgtggatctaccaaagaagcatggaagaggaggacagtcagcccttcgatttgctcgtttgagaatggagaaacggcacaactatgtgagaaaaactgcagaactggccacccagttctttattaatcctgcaaccagtcagcccaatgttgctgggctgatactggctggttcagctgacttcaagactgaattgagtcagtcagacatgtttgatcctcgtttacaagccaagattttgaatgttgttgatgtgtcttatggaggtgaaaacggttttaatcaagctattgagttgtctgctgaaatcttgtcgaatgtgaagtttatacaagaaaagcgattaattggaaaatactttgaggagataagccaggatactggaaagtatgtgtttggcatagatgatacgttgaaggctctggaaatgggtgctgtagaaacccttattgtgtgggaaaatctagagatcaataggtacgtgctaaagcacagtgcaaccggagaaattatcataaaacacctgaataaggagcaggaggctgatcagagcaacttccgtgatcctgaaacctctgcagagttggaagttcaagaaaaaatgcccttactcgaatggtttgccaacgagtacaagcgctttggttgttctcttgaattcgtcacaaacaaatcccaagaaggatcacagttttgcagaggcttcggtggcattggaggtatcctccgctatcagcttgacataagatcattcgatgagctatccgatggagaagtttacgaggattctgactgataaagcactgcttaaagatggcatgatggcttgagagcctatagagccctgatgtaatgcttcgtgtttttacttatttcaccttttaatttcaaaaactatagacactgttggtttggtttttgctgaattgtgctgtctctgtcaattggattgtgattgcttgtaatcaggaaccgttcattgttttttactaatcggtgttccatgcaactgttcatcttgat

SEQ ID NO: 6028 - DNA, 746 bp, Gossypium hirsutum
  Clone ID: GOSHI-09MAY01-C5472_1
tttcaggcgacatgatggggtagaggtgcatacgcggttcttcttatatttgccatactgtctgcctttcaatatctatgttgtcttgggtataaatcaatgtagagacaggcttgttagctatatctctgagttgcaaaaaacactagatggtcggctttggatgcacacactggtggtgagtctcatgcagggcaaatcttctgttgtgtgggagctcttgctcttacgggatctctgcattatgttgataaggaccttttcatgtggtgcgtatctaaccggcaagtcaaatcttgaggtcttaatggcacgcccgagaaactccctgatgtttgctactcatggggggttctatctagcttgatcatgattgacagagttcactggatagacaaggaaaagcttgttaagttcatcttggactgtcaggatgtggaaaatggtggaatttcagatagacctgatgatgctgttgatgtctaccatacatatttcggagttgctggactctcacttctcaattatccaggactgaaagccattgatccagcttatgcattacctgtcgatgtcgtaaatagaattttctttagtggataattggtatttcctttcgtccctctcagcaattccttgccttttcgtcatttctcctgttaaatgccaaaatgtattgaactttgtactgtgagaatccatgcccatggtcattacgttttcttctgtgactgattgcataattt

SEQ ID NO: 6029 - DNA, 504 bp, Gossypium hirsutum
  Clone ID: GOSHI-09MAY01-C5412_1
cccacgcgtccgcccacgcgtccgcccacgcgtccggccttctccatctctcttgaagaacaaagtgttcaaggttccttcaaaggttaagttaatttatattaaagatcatgagtggaagaagagatggtcccaagcttgagttgaagttgaacctatcaccaccaaggcgtaatccaagaatggaaccatcaccgagccggtcggctactgtgtcgccgacatccccgccgagctcgtgcgtgtcatcggagatgaatcatgacgttgacatgatgatgatgagcagccctgaaaccacatcaactgcaaccctcaatggttctggtacggatgcccaaggtggttgatgtacgtgatgctttcagaagatgaacctaaatgtcccaaatgcaagagcactgttttgcttgattttcttcatgataccgctactaccaccaaggcaaggaagagctaaaaccatataattagcatataaatctaatcataaatttaatgttg

SEQ ID NO: 6030 - DNA, 699 bp, Gossypium hirsutum
  Clone ID: GOSHI-09MAY01-C5402_1
gaagaaacataagagagtaaactgtgaaagttttaattgaaggagatagagtggaatctcgtcgatgtttatttttgtttaaaaatatatcaaatcgatgttcattaccggttagagaaaaaaaagagtgataaaggaacaccgatgaattttctttgtggaatatatagatgatcgatcgagaagctttgcatttttgaaatggagattgttttaaatcgatgaagtgtttcgggtttgttgtgaatctgagtgccagatcggctcgttgatgcattgagtttgctttttattttatttcgtgaggtggaatcgttttttttttgagacaacgatgaacaacggcggcgctgaagcagccgtggctccggtgggagggccacaaccactggagtggaaattctcgcaggtgttcggagagcgaactgccggagaggaaatacaggatgttgatatcatctccgctattgaatttaatagaactggagatcaccttgctaccggagatcgaggaggtcgggtggttttgtttgaaaggacagacactctagatcatgttgggcaacggagagatctagagaagatggattatccaattaataggcaccctttatttcgctataaaacagagtttcagagcccttaacctgagtttgactaccttaagagcttggaaattggggagaaaaattaacaaat

SEQ ID NO: 6031 - DNA, 874 bp, Gossypium hirsutum
  Clone ID: GOSHI-09MAY01-C5742_1
aaaccgagagttcaattaattcgattttttttaagaggtgaaggaaaaaaaaatggaagattcatcatcaaagtcgttcttgagaaagcaatgggatgaatacaaagaattctgggccgatcgatttccgttcactaatgtctattcaagatacatcggccgtgaacagtcccttccttcatggtctgaatccgatgttaacgagttcatcgcttctgatccggtgcatggacccatcttgaagactgccagggaagcagccaacatcgccttatacggaagtgcaatcggagctatcacaactgcaggttttgcctggaaatactcgaagagtttacatggtgctggactgtctttcgtaggaggagccgtttttggttggacatttggacaagaaatcgcaaatcacgcatatcaactctacaggttggacacaatggctgcacaagccaaatttatggattggtgggaaaacaagtgccggaggtgatctttaaaaagaactttttgtgatgtcgaaagcagcacctggactcgctttccatttggttaaataatggcggcatgtcgaaaacataacgtttggtccaatgctttggcttttgttataaactttcgcatctgagtttgaaaggatttggagttgacttatttttcccttttggaagcaacttgacggaaccagttgtttacattacagtgctttgaataaatttgatgcagttctatcattgtttgcattgttttcaaggtttcatttctgtccattttgataaggctattattgaatatagtttcagtactcttggcaggtcaccatttgtttatttctttgccatacggcaagcactaatcaattaaatttcattcaaaa

SEQ ID NO: 6032 - DNA, 359 bp, Gossypium hirsutum
  Clone ID: LIB3583-029-Q6-K1-B11
aagaggtgaaggaaaaaaaaatggaagattcatcatcaaagtcgttcttgagaaagcaatgggatgaatacaaagaattctgggccgatcgatttccgttcactaatgtctattcatgatacatgggccgtgaacagtccattccttcatggtctgaagacccatgttacacgactacctcgattattatgcagacagttgtcacaggttgtttacggaggagcagctcagtgacgtagactatctctcagaggagataccaggattgtcgacaacactgtctacaggaagaaagaaggttgcattcacagtgcgaacagagctgtcatgaacattacgagagacttctgcatctgcat

SEQ ID NO: 6033 - DNA, 306 bp, Gossypium hirsutum
  Clone ID: LIB3135-008-Q1-K1-A6
cggacgcgtgggttaaaaagaactttttgtgatgtcgaaagcagcacctggactcgctttgcatttggttaaataatggcggcatgtcgaaaacataacgtttggtccaatgctttggcttttgttataaactttcgcatctgagtttgaaggatttggagtttacttttttttcccttttggaagcaacttgatggaaccagttgtttacattacagtgctttgaataaatttgatgcagttctatccttgacaaaaactacgaccgacaccgagcctggaacttcaagtcctactactggaacc

SEQ ID NO: 6034 - DNA, 543 bp, Gossypium hirsutum
  Clone ID: LIB3829-026-Q6-N6-G11
aaataatctagttattgaaacgattattacatatttagttacaaagaaagattcgggtacagtggctaagcaactaacgctatgttggagaatgaactaatatttatgaaattgaattccatactgctagaaagaacacaagcaaagagtaatgaacaagtataaccggttttgtaattaatcattgcatgttgcaagcactgaaagggccaaattcacgtgcatcgccattggaaagttaaagtggctttgcaccaccattttcatggatgctattcaccggagttgagcttccacttctcttgctggaatgccccgtaaaggtcctgcccatgaattttccagctttgctcagtccactcccaacagctccaaggccgctcccaacaatcccaactccagcaccaacaccacttcccacgagtccaactccagcaccgataccggtaccaaccattccaactccagatccaaccaacgaggctgctccatcaagtgcatccattgtgcttcctataactccagcttctttcaatttctttc

SEQ ID NO: 6035 - DNA, 523 bp, Gossypium hirsutum
  Clone ID: AI726134.1
cggccgcgtcgacttgtgataaacaatctagttattcaaacgattattacatatttagttacaaacaaagattcgggtacagtggctaagcaactaacgctatgttggagaatgaacaaatatttatgaaattgaattccacactaccagaaagaacacaagcaaagagtaattataaccggttttgtaattaatcattgcatgttgcaagcactgaaaggcccaaattcacatgcatcgccattggaaagttaaagtggctttgcaccaccattttcgtggatgctattcaccggagttgagcttccacttctcttgctggaatgccccgtaaaggtcctgcccatgaattttccggctttgctcagtccactgccaacagctccaaggccactcccaacaatcccaactccagcaccaactccagcaccgataccggtaccaaccattccaacaccagatccaaccaacgacgctgctccatcaagtgcatccattgtgcttcctataactccaggtcgac

SEQ ID NO: 6036 - DNA, 595 bp, Gossypium hirsutum
  Clone ID: GOSHI-09MAY01-C5672_1
actaaaacggtaattagcacactttcaattttcacagtaccttacttccatgcaaaatactatacttccattaaaaactctttatccttctccaatttctccatagcttgagcttccatggtgatttcaacgtcaatgctccggccaccgctcttcccttgatacaaatacaccattccatcgaacctgttgttggatccactcctcacccctaccggctttccccacccgaaatccacttcgtaaactttaaacctcggggagcttccgaccgctacgcagttgacaccggcgtctttgaactggaaaatcttcggcgctgcttcccatgccttgttacgttcatcgatggctttagcgtcgtgggattctatagctttttgtatcactgaagctccgaatgacggtgggttttccaataacaacccggccgctgtggcggtgaagatggcttgaatcaagtttccgaagtaactgtcgggcatcggtggatcaacccttttacgacaatcggcgacagccagtaaaaaccgtgtagatcttcgggtttaaggttacgtgcttgggatacgtgtcgccaaatgtggacagctag

SEQ ID NO: 6037 - DNA, 545 bp, Gossypium hirsutum
  Clone ID: GOSHI-09MAY01-C5662_1
tcgcagactggatttgagattctcgctggacgaagagcaaagaaccctagctagtttgctgagttagattggcctaagaaggctcagccaacctctgcttttactccggtaattgacactcgtcgggttcccctccacctttcctacctttcaattctttgctttgcggtagcttctttggtagcaaatggtgcaatggtagcttgtggtagcaccgctctctgttggaggtaattgctcacttgtgtgtcagcttgatgctttttagtttgcaatcatacataggggtataggaagggtagttgggaaatcatgggggagtttctggttttgtttcattttatgattggcgattgctgcttccttatgaagcactggcaaaatgttcatgggaggatgaggagaccaatttaagttactaatattttattccttggggagcatctttggagcaaatgaccttggaactggggagcacactctctgttgaagattgctttttgagtgctgtttttggttttgcataactttgttctatcttaagt

SEQ ID NO: 6038 - DNA, 421 bp, Gossypium hirsutum
  unsure (1)..(421): unsure at all n locations
  Clone ID: LIB3583-028-Q6-K1-B6
cgcagactggaattgagattctcgctggacgaagagcaacgaaccctagctagtttgctgagttagattggcctaagaaggctcaaccaacctctgcttttactccgatgacaagcgcttggacaaattaagagcttttgcaatgatgcatagggggaaataggaagggtgagagaatcagagtggaaatcttgggttctgggttgtctaatagttggagatagtttcttcctttttgaagctcttgcaaaatgttcatgggtggatgaggagggctaattaagtttcgaatcttgttatagctttgcggagcttctttggagcaaatgggcaatggagcttgtggagcactgctctctgttggaggaattgntcacttggtgtcagcttgatgctttttagtttgcaatcatatataggg

SEQ ID NO: 6039 - DNA, 418 bp, Gossypium hirsutum
  Clone ID: LIB3166-010-P1-K1-B4
ggcctaagaaggctcaaccaacctctgcttttactcctatgacaagcgcttggacaaattaatagcttttgcaatgatgcatagggggaaataggaagggtgagagaatcagagtggaaatcttgggttctgggttgtctaatagttggagatagtttctccctttttgaagcttttgtaaattgttcatgggtggatgaggaggtctattttatttctttattttgttattgttttttttttctttctttgttctaatttgctatgtactttgttttttttttattttcttctttatgattcgtgctctggggtgtatctttatttctttttttctttctattttctatcactgttttttttttttctgtatttattttcttcttatctcatctttctcttttactgttatttcatt

SEQ ID NO: 6040 - DNA, 822 bp, Gossypium hirsutum
  Clone ID: GOSHI-09MAY01-C5192_3
tttcacgcgtccgcccacgcgtccgtgttaatggaatcaaaccaacagtgctgattggaacatcaggagtaggaaggacatttactaaagaagtggttgaggcaatggctgcgttgaatgaaaaacctattatattctccctttctaatccaacttcacaatctgaatgtactgctgaagacgcatatacatggagtcagggccgagccatttttgccagtggaagcccatttgatcctgtagaatacaaggcaaataatgcatacatcttccctggcctcggtctcggtttgattatgtctggtgccatccgtgttcatgatgacatgcttctggcagcctcggaggctttggctgcacaggtgacgcaggagaacttcgacaagggactcatttacccaccattcagaaacatcagacagatttcagcccatattgccgccagtgttgcagctaaagcatatgaactgggtttggctactcgccagcctcggcctaaggatcttgtgaagtatgcagagagctgcatgtacaaccctgcctatcgaagctaccggtaaagttgtattgaagcttgtcttttggaaacaaacccctcgccctaacccattccttctcatttcttgtcttgcaagttacttggtggccccccccccccgtagcttgaaaaaaaggaaacatgttatgaacttgaaaaggttttaacctgaaatataaggttcgttgaagtgtcaaaaatggtgtgctactaactacattaaaaatcaccaatggtcttgcttggttttataaaaaaaacaacccccccccggccgtttagag

SEQ ID NO: 6041 - DNA, 1960 bp, Gossypium hirsutum
  Clone ID: GOSHI-09MAY01-C5192_2
gtcgcgccacgcggcccttcccttcaccgagaaagagagagatgctcactacttgcgtggtcttcttccccccaccgttattgcccaagaccttcaggtgaagaaaatgatgtgtagtatccgccagtatcaagttcctctgcagaagtacatggccatgatggatttgcaggagtcaaatgaaaggctgttctacaaacttctgatcgacaatgtcgaggagttgctgcctgttgtctataccccaactgttggtgaagcttgccagaaatacgggagcatcttcaggcgccctcagggtctttttatcagtttgaaagaaaaggggaagattcatgaagttctgagaaattggcctcagagggatattcaagtcatcgtcgtcactgatggggaaaggattttgggtctaggggaccttggctgtcagggaatgggaattcctatagggaagctctctttatatacggcactaggaggggtccgtccgtctgcttgcttgcctgtaaccattgatgtgggcacaaacaatgagcagttgttgaatgacgagttctatataggacttaggcgaaggagagctaccggactggaatatgccgaacttatgcacgaattcatgactgcagtcaagcagaactatggggagaaagttctcattcagtttgaagattttgcaaatcacaatgcatttgatttgcttgctaaatatggcacaactcatctggttttcaatgacgatattcagggaacagcatctgtggtccttgcagggcttgttgctgcactaaaagtagtcggtggaaccttggctgatcatagatttttattccttggtgctggagaggctggtactggcatagcagaacttatagctcttgagatttcaaaacagacaaacatgccacttgaagaggctcgcaagaagatttcgcttgtggactccaagggactgattgttaaatcccgcattgactctcttcagcatttcaaaaagccctgggctcacgatcatgaacccatcaagaaacttgtcgatgctgttaatggaatcaaaccaacagtgctgattggaacatcaggagtaggaaggacatttactaaagaagtggttgaggctatggctgcgttgaatgaaaaacctattatattctccctttctaatccaacttcacaatctgaatgtactgctgaagacgcatatacatggagtcagggccgagccatttttgccagtggaagcccatttgatcctgtagaatacaagggaagggttttcgttcctgggcaggcaaataatgcatacatcttccctggcctcggtctgggtttaattatgtctggtgcaattcgtgttcatgatgatatgcttctggcagcctcggaggctttggctgcacaggtgacacaggagaactttgacaagggactcatttacccaccatttagaaatatcagaaagatttcagcccatattgcagccagtgttgcagctaaagcatatgaactgggtttggctactcggcagcctcagcccaaggatcttgtgaagtatgctgagcactgcatgtacaatcctgcctaccaaagctaccggtgaaggtagttagaacgcctctacttttatcatattatttattaaaaaaaggaagcccagtttaaccattccttgaagtcttgtatttggtcttttttgtttgatatctttgtcattcttgaagttttgttcctcgtgttcatctttgctgtcttgtaaggtacttggtgggtaagaaggtgaatggtgggtggtgtagttagatcaaatgaagtcaaaagtagcatttttttttttttgaaaaaaaatgtggttatggactggaaaatgtttcacattacatgaaatagaaacttgaaaggtgtcagaatcagtgtgactttgcttgccctttatttctcatctactcaaagtcttttcttt

SEQ ID NO: 6042 - DNA, 1449 bp, Gossypium hirsutum
  Clone ID: GOSHI-09MAY01-C5192_1
tccacgcgtacgcccacacgtacggcagggtgtgcatctataaagaagaaatagattgggaaagcctcacgtttcgcccccttcctattttcactcttttcagtcctaaccaaaggcggcccctcaactctcttctcctttagcaatatctttccccttcactgtttcaactcaaagaaatggcggaggagaagaaggctcaatctgctggggtttggcctacggttaaaccttttgtcaatggtggtgcctctggtatgcttgctacctgtgtcatccaacccatcgatatggtcaaggtaagaatccaactgggtcaaggatcggcagcaactgttaccaagaacatgcttagggaggagggtgttggtgccttttacaagggtctatcagcaggactgctcaggcaagctacatacactactgctcgattgggatcattcaaaatgttgacaaacaaagcaattgaagccaatgatgggaagcccttacctctatatcagaaggctttgtgtggtctgactgctggtgctattggagcctgttttggcagcccggctgatttggcacttattcgtatgcaggctgatgctactttgcctgttgctcagcgcagaaattacaccaatgcattccatgcactctatcgtattgttgcggatgaaggggttttggcactttggaaaggtgcaggccccaccgtattcagagccatggcattgaacatgggaatgcttgcctcttatgatcaaagtgttgagttttgcaaggattcgcttggcttaggagaagctgctacggtgctaggtgcaagtactgtttcaggtttctttgctgctgcttgcagtttgccttttgattatgtcaaaacacaaattcagaaaatgcaacctgatgcttcgggaaagtatccatatagcggctctttggactgtgccatgaaaaccctcaaggctggaggaccattcaaattttacaccgggttccctgtatattgtgttaggattgctccgcacgtcatgatgacttggatattcctcaaccagattcagaaggcagagaaaaaaatagggttgtagagcgtggtcacttctcagagacgtggagtaatgctggactaattgattgcgtcaaataaaatcctggatttttgctggttctggctaatcatgcaaattttgaaatacatttcaagtcaatgttgtcttatttttctgattaaatattttagggtgagataggaaaaccatttgcatcccagagttatgatttgattgctcatacttctgattaaaaataaatgtgtaccaaaccaagttcaaagcattaaatctttatatttttcatcttcttgaacaggaaaaaaaaaaaaaaaaaaaaaaaaaaaaaaaaaaaaaaaaaaaaaaaaaaaaaaaaaaaaaaaaaaaaaaaaaaaaaaaaaagaaaagg

SEQ ID NO: 6043 - DNA, 470 bp, Gossypium hirsutum
  unsure (1)..(470): unsure at all n locations
  Clone ID: LIB3828-023-Q6-K6-A2
gggggggggtgtgctcaaaatgttggtgaagcttgccagaaatcgggagcgtggggggcgtcctcagggtctttttatcagtttgaaagaaagggtaagattgatgaatttttgttttttttttttcagaaggatatccaattttgggggggggggatggggaaagaattttgggtctaggatacctggggggggggggaatggcaatccctatggggaagctttctttatatacggcactaggaggggtctgtccgtctgcttgcttgcctgtaaccattgatgtgggcacaaacaatgagcagttgttgaatgacgagttctatataggacttaggcgaaggagagctaccggnctggaatttgccgnccttatggntgaattcatgactgcgggcaagcagaactttggggagaaagttctcattcagtttgaagattttgctnatcacaatgcatttgatttgctt

SEQ ID NO: 6044 - DNA, 398 bp, Gossypium hirsutum
  Clone ID: LIB3149-016-Q1-K1-E9
cgccagcctcggcctaaggatcttgtgaagtatgcggagagctgcatgtacaaccctgcctatcgaagctaccggtaaagttgtattgaagcttgtcttttggaaacaaaccccccgccctaaaccattccttctcatttcttgtctagcaattgactttggtcgtatttaatcttggaacatcagcccaagcaaggccattggtcatttttaatgtagttagtagcacaccatttttgacacttcaaaagaaccttatatttcaggttaaaacctttttaagtccataactacatgtttcctttttttcaagctacatttatctttcccaccaagggtgttggtgccttttacaagggtctatcagcaggactgctcatgcaagctacatacactac

SEQ ID NO: 6045 - DNA, 390 bp, Gossypium hirsutum
  Clone ID: LIB3828-030-Q6-N6-B7
ccgccggggctcaaaaaagggtgagcttgtttgaactttgttaacggctttttaataaaaaaaaacttttttccctcaaaaaaaaaaaaaaaaaaaaagggggggccgcccttttttttttttttttggcttggaaccggggtggggccccatttttttttaatcggaagtttgagcaatcaaatcttacctctgggatgcaaagggttttcctatctccccctaaaatatttaatcaaaaaaataaaacaccattgccttgaaaggtatttaaaaatttgcatgattagcccgaaccagcaaaaatccaggattttatttgacgcaatcaattagcccagcattactccacgtttttgaaaagggacaacgcttttaaaccccattttt

SEQ ID NO: 6046 - DNA, 389 bp, Gossypium hirsutum
  unsure (1)..(389): unsure at all n locations
  Clone ID: LIB3166-024-P1-K1-G2
gccacccctncgttcctattttcacttttttcaatccctaccaaaagccgccccgganactttttattttttttcccctcaactgtttcaactcaaagaaatggcggaggaaaagaaggctcaatctgctggggtttggcctacggttaaaccttttgtcaatggtggtgcctctggtatgcttgctacctgtgtcatccaacccatcgatatgatcaaggtaagaatccaactgggtcaaggatcggcagcaactgttaccaagaacatgcttagggaggagggtgttggtgccttttacaagggtctatcagcaggactgctcaggcaagctacatacactactgctcgattgggatcattcaaaatgttgacaaacaaagcaattg

SEQ ID NO: 6047 - DNA, 395 bp, Gossypium hirsutum
  Clone ID: LIB3149-031-Q1-K1-C2
gctgcactaaaagtagtcggtggaaccttggctgatcatagatttttattccttggtgctggagagttgaaggacagggacatctctcaaaccctttctgtttaataccattacaaccttaattgttgaaggctggcactggcatcgcagaacttatagctcttgaaatttcaaaacagacaaacatgccacttgaagaagctcgcaagaagatttcgcttgtggactccaagggattgattgttaaatctcgtattgactcacttcagcatttcaaaaagccctgggctcacgatcatgaaccaatcaagaaacttgtcgatgctgttaatggaatcaaaccaacagtgctgattggaacatcaggagtaggaaggacatttactaaagaagtg

SEQ ID NO: 6048 - DNA, 356 bp, Gossypium hirsutum
  unsure (1)..(356): unsure at all n locations
  Clone ID: LIB3149-044-Q1-K1-A2
caggaatattccnaacttattttttcaccttttaatgcagtcaaacataactgtggttggggagtttttattcgggttggagagtcttcaaaccacaatgccttcgatttgcttgctaaatatggcacaactcatctgggtttcaatgatgatattcaaggaacagcatctgtagtccttgcacggcttgccgctgcactaaaaataatctgtggaacctttgctgatcataaaattttaatcccttgtgcttgaaaagcttgcacttgcatttcaaaacttatagctcttgaaatttcaaaacagacaaacatgccactttaagaagctcgcaagaagatctctcttgtggactc

SEQ ID NO: 6049 - DNA, 579 bp, Gossypium hirsutum
  Clone ID: LIB3584-034-P1-K1-E12
cccacgcgtccgtttttttttttttacagaaacagggcaatggattttcaggaaatgtaggaagatttgggagttacaaattcttcaagtctttcatagaggtaatttcatttctcaatgggtgtaagagccaattgctgtaagatgttcagtcaaaagtagtgcgcaggattttgatgttgacctaagcatttctagaaaattgcttttgaggaaatgctctccatccaatatcttgccggtagaaccctccaggccagttgatttcttcaactgctaggtaagctttatcccttgcttcttcaagatctcttcctttagctgtaatcccaagaacacggccaccagtagcaatgaagttgccatctgaatcaaatgcagttccagcatggaacaccttgacagcaggagcaacacactctgcttcttcaaggttccgaatcacagtctctttctcataggagccagggtaacccttgcttgccattactaccaccatggccgacccaggagaccacttcagtgagactccttttagttcttctctacacgctgctagcagaacttttgcaagatctg

SEQ ID NO: 6050 - DNA, 386 bp, Gossypium hirsutum
  Clone ID: LIB3148-008-Q1-K1-G10
gctcctgctgttaaggtgttccatgcgctaaccggcattgggggcaaatgggaacttcgtggtctttggtggcccgttttttggatttcaccttaaagaaaagatctttaaaaaacaaaggataaaacttacctatcagttgaagaaatcaactggcctggagggttctaccgccaagatattgtatggagagcattttctcaaaagcaattttctagaaatgcttatgtcaacatcaaaatcctgcgcactacttttgactgaacatcttacagcaattggctcttacacccattgagaaatgaaattacctctatgaaagacttgaagaatatgtgactcttaaatatactacatttcctgaaaatacattgccctgtttctgt

SEQ ID NO: 6051 - DNA, 1525 bp, Gossypium hirsutum
  Clone ID: GOSHI-09MAY01-C5152_1
ggcggcagctccatgtctctcaaaacgcaataccaggtgctccgttgtcttcttaatcgaccccctttagctccatacaatgatgccgtcaactgggttgttttcatctgatggaatcatttaaaaatcaacacacttggattctctttcatttcacatatttgctaaaccaccaaccaccctccaatcctccggatcttaacacacagttccataattgttgtgtgtgggaaaacgaaataggggattcatggaagagaggcatattctgtttgggaaatatgagatggggagattgcttgggaaaggcactttcgccaaagtctactacgcgaaggaattaaaatcgggtgaaagcgtcgcgataaaggtcatcaacaaagctgaggtaaagaaagaaggcatgatggagcagatcaagagggaaatctctgtgacgcgtcttgttcggcatccaaacgtagtggaactcaaagaagtcatggcgaccaaaaccaagatcttctttgttatggagtacgtccgtggcggtgaactattcgccaaagttttcaaaggcaaactcagagaagaggctgctcgtaagtacttccaacaactgataagcgcactcgatttctgccatagcagaggtgtttcgcaccgggatttgaagcccgagaaccttctattggacgagaatgaagatctgaagatctctgatttcgggttgtcggccttgcccgagcagcttcgcaatgatgggctcctccgtgactcagtgtgggactcccgcatatgttgcccctgaggttttgaggaacaaaggctacgatggatccaaagctgatatctggtcttgtggggttatcttgtatgtgcttctcgcaggtttcttaccgtttcaagatgagaatattatgaagatgtacaggaaagttttcaaagctgaatttgagttcccactctggttttcaacccacgcgtcccgtttgatctctaaactactcgtggctgaccctgaaaggaggatcgcaattccagcaataatgcgtgttccttggtttcggaaaggacttagacgtccccttgcgttttcaattgaggaacccatatcagataatacagaagatgatgattctgtctccaagactaccaaaccatcgtctccgaaattcttcaacgcttttgagttcatttcctctatgtcgtcagggtttgatttgtcgagtttgttcgaaaacaagaggaaaccgaggacgatgttcacgtcgagatgttcacctacaacaatcatggcgaaaattgaagttgtggtgaaggggttgaacttcagagtaggaaaagtcaaggacttcaagatgaaactacaagggtcatcagaaggacggaaagggaagctcttggtgactgcggaggtgtctgaagtggcaccggaggtagcaattgtggaattctccaagtcttccggtgacaccttggaatatgctcagttctgcgaggaaagtgtgaggcctgcattaaaagacattgtttggacatggca

SEQ ID NO: 6052 - DNA, 901 bp, Gossypium hirsutum
  Clone ID: GOSHI-09MAY01-C5142_2
cttttatgctacaacttttgattcaattcttgaagacagtgggttgatttaaaatttttggtttaaacgtttgggttccagaaggagatggaatctccaactacccacaggacttgttttggttcctcggggaacagatgatagtgttgttgttggtcctcatatacgaggtagacgtcttcgagcttcatctgcaggtgatgaggaagtagatctccttctccctggtacagccagactccagatccagcttggtgtgaacatgccagcaagggctgagctgattccagggaaagaagaaaacatgttccatgaagcatatgatgttgttctgtatctaggcatgatcgacattttgcaagaatataacatgtctaagaagattgaacatgcctataaatctcttcagtttgattctgtgtccatatctgctgtcgatcctactttttcctcgcagcggttcctggaattcattcaagaaggtatttcctcaaaactccattaaaggttgacagtttcggctctgttttgtcctcctgtgaagtttccttaagaatggtcatccccaggtaatgtaaagtcttcgtaacgatatgctcttctaagtctgctttttttttttttttttaaatcatgatgtttatagtgagttattgttctctgccattgcttttgttctgttttatgacaatattttagcacttgttcaatgcttgcttttttctcttctttttggcaccttatccctgatccatgaacgaaacaacaaacaatcattttccataaataaacgaaatatgtacctggaggagaagagacctctgttactgctttgtcgctggatcattttctcccccaaaactcattttatgccattaattgatttgtttttttcccgaat

SEQ ID NO: 6053 - DNA, 848 bp, Gossypium hirsutum
  Clone ID: GOSHI-09MAY01-C5142_1
cccacgcgtccgctttcttctcctggtaaaagtggtagtatcttctttctgtctcaagatgatcgttgggtgattaagacactccggaaatctgaagtaaaggttcttctaagaatgcttccgaactatcatcatcacgtgaggtcatatgagaacacgcttataacaaaattctttggtcttcacagaatcaaaccatcaagtggtcaaaagtttcgctttgtagtgatgggaaatatgttctgcactgagttaaggatccatagaagatttgacttgaaaggatcgtctctagggcgttctgcagacaatattgaaattgatgagaacacaacacttaaagatttggatctcaactactgcttttacttcccacccgcccggcgagaggctttattaaggcaaatcgagactgacagtaagtttttggagtcgcaacacgtaatggattatagccttctgcttggtgtgcattatcgagcaccccagcatttgaggtctcacatgtcctacaatagagtggatggattacggagtgttgcagaggaagaggaggatggaatctccaactacccacaaggacttgttttggttcctcggggaacagatgatagtgttgttgttggtcctcatatacgaggtagacgtcttcgagcttcatctgcaggtgatgaggaagtagatctccttctccctggtacagccagactccagatccagcttggtgtgaacatgccaacaagggctgagctgattccagggaaagaagaaaacatgttccatgaagcatatgatgttgtctgtatctaggcatgatcgacattttgcaagaatataacatgtctaag

SEQ ID NO: 6054 - DNA, 451 bp, Gossypium hirsutum
  unsure (1)..(451): unsure at all n locations
  Clone ID: LIB3584-034-P1-K1-A10
tcggaanacccgccgcgacgcacgcgtacacccacgcctncactttcttcttcttcttataactttagaatcccacaactctctcaacatgatggggtggattttaaaacactcctttttatctcaagcaaacgctcttctaagaatgcttccgaactatcatcatcacctgaggtcatataacaacacgcttataacaaaattctttggtcttcacagaatcaaaccatcaatcggtcaaaagtttctctttctagtgatcataaatatcttctgcactgagttaacgatccataaaatatttgactttaaaagatcgtctatagggccttctgcacacactatttaaattgatgagaacacaacacttaaaaatatttatctcaactactgcatttacttaaaaccttctaagccatagcctttattaaggcaaatcaagacttacatt

SEQ ID NO: 6055 - DNA, 727 bp, Gossypium hirsutum
  Clone ID: GOSHI-09MAY01-C105159_1
ggtcaatcacaagatagagctaagcacttggattactaacaacttataacagctacagcaacaaattcaactccatggagaggcaatgtaaaacttacaacaaatgttgttttatggaatggatgtagtaacacttacttgggtcaggggtagttatcattgccacacccttgaaatcacaagatccagacgctttcccttccatctgataatagctatcaaaggcgcaagaagcatggttcttcacattgttaggctggtagcagctctcccctggttgaatctcactgcaatttgccctcccaggaccacgagcccagtccaatgctgtctgcaatgtctttgaatctatcccatccattgcaacacgaaaggtctgattagttgtatcatttgccaaaaaggtcccacttcctgatacatgaagcaaatactccggggttgaattcgaataaagcgatccccaatttgccctagactctgtaggtgacctcgaatcctcattgaacaactcataaatatacacactggaagtgatttccggatgcagaggggttccactacggtctaatacatgtttaataagattcgaattataggtatcagcattgtctttagtagcataaggctcctttgagtcccccttggaaggccacccactctcagtaacaagcacctcaacatcggtatcattctaaattcttcatagtcaccggacgcgataaaa

SEQ ID NO: 6056 - DNA, 845 bp, Gossypium hirsutum
  Clone ID: GOSHI-09MAY01-C5162_1
ctctcgcgtccgtgtgattgattcggtccaaggtgctgagggtgccattcaaatggggtcgttctactcaagctttccggaacttagctcaccaaacctttctggtaatgaccgttcttcgtctttgaagatcagtgggcattcaaagccatctgaacctcaacttgagaactgcatgttcagccaaggagctgctgctccgaagtctccatcttcttccccccgcctccgctctggttcaagtacctgttgttccattggagtgaaacagcatagtacgagtatcagtgcattatgtagtgcagatgggttgatggtggaagaccctggtggagcactaaagagagctcgtagtgatgctgaattgcactcgttgaaacaagaggagcctaagctgctagcaagatcccaaagccataaaacattgggtgagcttccacctttggagacacaactgcccgggccgaaaactggtggccagaatctacgaaccgggggtgccttcagagtaaaagcaacgttcggtgaagttaaaataaggttcagcttgcaaccgagttggggttttagagatgtgcaacaagagattgcgaagcgattcaatatcgaagatgtcagcagaatgtgtctcaagtacttggacgatgataacgagtgggtgcttttgacgtgtgatgctgaccttgaggagtgtagagatatatacaaatcatctcaaagccacacaatcaaaatctccctccatcaagcttctcatccgaatctaagaagttcatttggtagcagtgccccattataacatcagttcccttatgggtatatttgatggtcgtagtaatttggtt

SEQ ID NO: 6057 - DNA, 364 bp, Gossypium hirsutum
  unsure (1)..(364): unsure at all n locations
  Clone ID: LIB3166-021-P1-K1-E11
gaaagggatgtccgggctctatgggatcatctcttggccttctgggaaaattaagagggtaggccactctttaaggaacctccaacttgtgatggattcagtccaaggtgctaagggtgccattaaaatagggtggttttactaaggcttcccggacctaagttaaccaaccctttctggtaatggcctttcttcgtctttgaagatcagggggcattcaaagccatctgaacctcaacttgagaactgcatgttcagccaaggagctgctgctctgaagtctccatcttcttcatgcagccggagctctggttcaagtacctntggagacacaaccagggccgaaaactggtgccagaatcta

SEQ ID NO: 6058 - DNA, 578 bp, Gossypium hirsutum
  Clone ID: GOSHI-09MAY01-C5112_1
caaatttttaaatcctaggcgacgacgaagagaaagaggtgaaatgttgaaaggggaaaagatgttgtcttacgtaagcgtgttgttgtacggagtgggatggatagtggtggccgggatggcgttgctggtagcgtctcaagagaagcgcgtgggcgttccggttttgccgggtctaactaagtcttaccccataacgccggcccgactccggctcgtctacgaggacgtttggctcagatcctcggacggaatccgactccattcttggttcatcaagctcttccctgagtgtcgaggcccaaccatcctgttttttcaagagaatgctggaaaacattgctcaccgtctggaaatggtacgcaataatgctgcagaggttacagtgcaatgacttcatgctatcatatcgaggttatggagcaagtgatggttatccctttcagcatggaattattaacgatgctcacgccgctctggatccatctactccagcggactgattttgacacagattgaatattgttctttgtaagatcacttggggatgctctcggattgtactgaccaaaaacaa

SEQ ID NO: 6059 - DNA, 728 bp, Gossypium hirsutum
  Clone ID: GOSHI-09MAY01-C5102_4
gtaatgcctcccaaagcagctaaatcaaaggaagcaccagcggagaggcccatcctcggccgattctcttctcatatcaagatcggaatcgtgggactgcctaatgctgggaagtctactcttttcaacacgctccgtaagctttcaatcccagctgagaacttccctttttgtacaatcgagcctaatgaagcccgagttaatgtccctgatgagcgattcgaactgttagttgccttcagagctctgggatttgttcgtctccagattggatctaagataatgcatctaaacctggaaaatcacaatattttatcaaagaagttcttgttgatatctaaaatgatgtatttccgtgcactgcagagcagttttataatttgttattaagtgatgactctagttttactaatgagtattgtgcagtacggaaggatacaaatatttcgaagggtaaaaagcgtaaggctacaccaagcaaaaactttggttttgtaggcggttgctatatcatgatgcaacagcagataatgatgtactgtcaccatcattatatggcttacaataatcatcattaccattatcaacaatactaacagcagctgcagcaaaaacaaaaatagcaaccagggtgtaatttaaatgaggttaaaacgatctgggttggtgaccttgttcattggatggatgaaacttatatccacggttgcttctctcatattggcgag

SEQ ID NO: 6060 - DNA, 650 bp, Gossypium hirsutum
  Clone ID: GOSHI-09MAY01-C5102_3
aaaataaaaataatcacctcagcacactgttactccctcagctctgcgcgaaaccctaaagcaatgcctcccaaagcagctaaatccaaggaagcaccagcggagaggcccatcctcggccgattctcttctcatctcaagatcggaatcgtgggactgcctaatgttgggaagtctactcttttcaacacgctcactaagctttcaatcccagctgagaacttccctttttgtacaatcgagcctaatgaagcccgagttaatgtccctgatgagcgattcgaatggctttgccagttgttcaagcccaaaagtgaggtttcagctttcttagaaattcatgatatagctggactggttagaggtgctcatgaagggcaaggattgggcaacaacttcttgtctcacattcgtgcagttgatggcatttttcatgttttacgtgcatttgaagattcagacatcatccatgtcgatgactctgtggatcctgtaagggatttagtgactattagtgcagaattaaggttaaaggatattgaatttatggaaagggaagatagagatattgaaaagagcatgaagaggagtaatgacatgcaattaaaaatagagcatgaaatgggtgaaagggttaaggcatggcttgc

SEQ ID NO: 6061 - DNA, 1484 bp, Gossypium hirsutum
  Clone ID: GOSHI-09MAY01-C5102_2
cccacgcgtccgcggacgcgtgggttacaatcgcaggtctttcgctttcgttggcattcttctattaagccagcggagaggcccatcctcggccgattctcttctcgtctcaagatcggaatcgtgggactgcctaatgttgggaagtctactcttttcaacacgctcactaagctttcaatcccagctgagaacttccctttttgtacaatcgagcctaatgaagcccgagttaatgtccctgatgagcgattcgaatggctttgccagttgttcaagcccaaaagtgaggtttcagctttcctagaaattcatgatatagctggactggttagaggtgctcatgaagggcaaggattgggcaacaacttcttgtctcacattcgtgcagttgatggcatttttcatgttttacgtgcatttgaagattcagacatcatccatgtcgatgactctgtggatcctgtaagggatttagagactattagtgcagaattaaggttaaaggatattgaatttatggaaaggaagatagaggatattgaaaagagcatgaagaggagtaatgacaagcaattaaaaatagagcatgaattgtgtgaaagggttaaggcatggcttgcagatgaaaaagatgttcgccttggggactggaaagcagctgatattgagatattgaatacttttcaattgcttagtgccaagccggttgtttatttggttaacatgactgagaaagattaccaaaggaaaaagaacaagttcttaccaaagattcatgcttgggtgcaagaacacggtggtgaacctatcattcctttcagtggtgtgtttgagagaaaccttgctgatatggaacctgcagatgctgcaaagtattgtgaggaaaacaaggtgcaaagtgctcttccaaagatcatcaagactggtttctctactattaatctcatatatttcttcacagcaggaccagatgacgttaaatgctggcaaattagacggcaatccaaggctcctcaagctgcaggagccattcatactgattttgagagaggatttatatgtgctgaggtcatgaaatttgaagatctgaaggagcttggcagtgagtcagctgtcaaggctgctggaaaatataggcaggaagggaaaacttatgtggtccaagacggagacataatattctttaagttcaatgtttccggaggcgggaagaagtgaaatgagactctctggtgctgggttcggacttacatccctggattatcaaacccggacgcattttgatcccatctgtttctttgcttagataccatcacttacaaaccctcaaaagccaagacagaatatgatattgggcatgcacccatctatttttattttgatctatgagtttttatttgtagcatcatattattatatatatacgcaaatattggaggatggattatgttgagtgatagatgtttggttcttcagcccct

SEQ ID NO: 6062 - DNA, 708 bp, Gossypium hirsutum
  Clone ID: GOSHI-09MAY01-C5102_1
cggacgcgtgggcggacgcgtgggcggacgcgtgggcggacgccccagccttcccttcccttccaccgccccccctctctctctgcttttctttctctcgtttggccattaaggggggagaaagagagagaggaaggaaagaagaacacccagagtctcagatcagcttgtttatctatattatcaaagatgcagtcaagttcaaccaacgctcctgatctcaactcaaaacagcaacaacaaccgccagcgcaacaaaccagacagcaacaacaacaacatccacaatgggtgcctaaccagtggatgggagccatgcaatacccggcggctgctatggtcatgatgcagcagcagatgatgatgtaccctcaccatcattatatggcttacaataatcatcattaccattatcaacaataccaacagcagcagcagcaacaacaaaaacagcaacaagggtgtaattcggatgaggttaaaacgatctgggttggtgaccttgttcattggatggatgaaacttatctccacggttgcttctctcatactggcgaggtttcttcagtaaagattatacgcaataagcaaactggtcagtctgaaggatatgggtttgtggaattttactcaagggcaacagctgaaaaggttttgcaaagttataatggttctctaatgccaaatacagagcagccttttcgtctg

SEQ ID NO: 6063 - DNA, 517 bp, Gossypium hirsutum
  unsure (1)..(517): unsure at all n locations
  Clone ID: LIB3829-021-Q6-K6-F12
taatgctggcaaatagacggggggcgagggtgggggaaactaaaagagccattcatactgattttgagagaggatttatatgtgctgaggtcatgaaatttgaagatctgaaggagcttggcagtgagtcagctgtcaaggcttctggaaaatataggcaggaagggaaaactgggggggggcaagacggagacataatattctttaagttcaatgtttccggaggcgggaagaagtgaaatgagactctctggtgctgggttcggacttacatccctggattatcaaatccgtacgcattttgatcccatctgtttctttgcttagataccatcacttacaaaccctcaaaagccaagacagaatatgatattgggcatgcatccatctatttttattttgatctatgagtttttatttgtagcatcatattattatatatatacgcaaatattggaggatggattatgttgagtgatagatgtttggttcttcagcacctnncnnaaaaaannaa

SEQ ID NO: 6064 - DNA, 394 bp, Gossypium hirsutum
  Clone ID: LIB3196-005-P1-M1-D6
gcgtccacgcgttcgaatgtatgaagttatagaaaacacaagacccaaaagttaggaaaaaagcatttaggcaacaccaagcattaaaaataaatacctcatctgggcctgctgtgaagaaatatatgagattaatagtagagaaaccagatttggtgatctatggaagagcactgtaacaaaaagaaatactcagcatcatacatacacaacacaaatatatatatcagataaaacatcagggcacagaagaatatctgaccatgagacttagaaatctcaaatgaaaaacattttaaacctcataataaagtagatacccattttcaactaacctttgcaccttgttttcctcacaatactttgcagcatctgcaggttccatatcagcaag

SEQ ID NO: 6065 - DNA, 385 bp, Gossypium hirsutum
  unsure (1)..(385): unsure at all n locations
  Clone ID: LIB3493-019-P1-M1-B3
acgcaatgatgtatttccgtgcactgcagagcagttttataatttgttattaagtgacgactctagttttactaatgagtatcgtgcagtacggaaggatacaaatcttttgatgggacagtggcaccctgctgatgaatatgacggcctagtgagagagataacattcagaaccatttgtaacagtcccatgtgtcctccagacactgccatgacagagtaccagcattccattttatcacccgataagaaaaagcttgtttttgaaactgtacaacaggcacacgatgttccattcggcagctactttcaggtacaangcaaaatgggtgtgagaccaatggcgaaaattcgccattcctaatgtcagagtggtgcacattta

SEQ ID NO: 6066 - DNA, 379 bp, Gossypium hirsutum
  Clone ID: LIB3120-020-Q1-K1-C12
accactcgtgcgcttcacagcaggaccagatgaggttaaatgctggcaaattagactgctatgcaaggctgctcaagctgcaggagccattcatactgattttgatagaggatttatatgtgctgacgtcatgaaattggaagatctgaaggagcttggcagtgagtcagctgtcaaggctgctggaaaatataagcatgaagggaaaacttatgtggtccaagacggacacataatattctttaagttcaatgattctggaagccggaagaactgaaatgagactcttgagtggggatatggtgctgggttcggacttacatacctggattatcaaatccgtacgcatattgctgccatctgagactttgcttagata

SEQ ID NO: 6067 - DNA, 317 bp, Gossypium hirsutum
  Clone ID: uC-gsflnu33B055g08b1
tttaattgctcttccaaagatcatcaagactggtttctctgcaattaatctcatatatttcttcacagcaggaccagatgaggttaaatgctggcaaattagacggcaatccaaggctcctcaagctgcaggagccattcatactgattttgagagaggatttatatgtgctgagaattcatttgagtgcagttattctaccatttgagtttaaacataactgaaaggacactatttgtttttacgtcatgaaatttgaagatctgaaggagcttggcagtgagtcagctttcatggttgatggaaaatttttgctc

SEQ ID NO: 6068 - DNA, 455 bp, Gossypium hirsutum
  Clone ID: GOSHI-09MAY01-C5132_2
tgcattcctctcacttggtcggccagagtaccttcaagagggggatattgtatctagtcgttttcagagaagagatgtttacggtgcttgggagcagtccctcgcgtccgagcactctgacaataggcctaaaagagcttatgcaattaatcagagcgcgacacacttttgagaggccagtgaaaatctacaattagggagcattttagattaccttccttgataagacatagcacaaaaatcaggctctgggcctgggttatatagagtgggaagaacacttctagcaaatgacaatgtgaggcaactagttagcgtgcgatttgttggatatgtaattcttttggtagtggtgattggaaggtatcttttgtcctaatcaaagtgtgccatctagaaatgtcagattatgatctgctgatgcttttgttacttgcgtgtctttaatggaggtc

SEQ ID NO: 6069 - DNA, 1711 bp, Gossypium hirsutum
  Clone ID: GOSHI-09MAY01-C5132_1
gaggaaataaagtttgagcccagtgttatgtgtgaaccaattgacaagaaaatcacgttccgtgctagccagcttgaggatggtgacattgtttgctttcaaaagcctctccctgttgaaagcactgatcaattccgctatccagatgttccttcatttctggaatacgtgcataatcgccaggttgtacactttcggtctctggagaaacccaaggaagatgatttctgtctggagatgtcaaggctttatacctatgatgatgttgttgaaagagtagctcagcaacttggtttggataatccgtcaaaaatcaggcttacatcaaacaactgttactcccagcagcccaaacctcagcctattaagtatcgtggagtggatcatttgtctgacatgctgttccactacaatcagacatctgatattttatactttgaagtattagacatccctctgccagaactacaaggtttgaaaacgctgaaggtagcatttcatcatgctgcaaaagatgaagttgttatccatactattaggcttccaaaacagagcactgttggcgatgtgattaatgatcttaagacaaaggtggagttgtctcatcctgatgcagaactgcggttgcttgaagttttctatcacaagatctacaagattttcccacctagtgagaagattgagaatataaatgaccagtactggacactacgggcagaagagattccagaggaagagaaaaatcttggtccaaatgatcgcctaattcatgtttaccacttcactaaagaaactgctcagaaccagatgcaaattctgaattttggagagccctttttcttggtgattcatgaaggtgagactttggctgaaataaaagtccgaatacaaaagaagctgcaagttcctgatgaggactttgctaagtggaagtttgcattcctctcacttggccggccggagtaccttcaagattctgatattgtatctagtcgttttcagagacgagatgtttatggtgcttgggagcagtatcttgggctggagcactctgacaatgctccgaaaagagcttatgctgctaatcagaaccggcacacctttgagaagcctgttaaaatatacaattagggactattttagattttacctccctttggtgacattgcacaaaagagtggcactctacatgaactaaaagcaaatgacaatgtgaggcaacaagttagcactgaaatggcatctgtgacctttgcttgttgatttgttggataaatgtaattctttcggtagtgtcaatttgaaggactacttccttttacgtaatcaaagtgtgcatctgcaaatgacaattacgatccgctgagatttttgctactactttccgtctttaaatcgaggttggttggttggttcaatcttcaatcaaaacgtaaatgggggcaagttgcctgtgtaatttgtcagtacataaacaagattttgattattagtgaatttatgtatacacagtatagtcgggagaaggttgtgatttttgccattccctttggttggttgccctgattttgtccatgtagatcatctgatgcatttagcattagctgctgccctttgtaatggttgattgccattctttttcaagcctattattatggcttattattattatatctaaagattctcttcaaaaaaaaaacccacgcgtccg

SEQ ID NO: 6070 - DNA, 613 bp, Gossypium hirsutum
  unsure (1)..(613): unsure at all n locations
  Clone ID: LIB3829-016-Q1-K6-E3
cggggnagnggagaggnaatggtagtgagctgaaaagacaaacctttttctcagaaggtcactgatgtgcgagcacgttaacatatagcagcaaagatttcttcttagcactttcaaaatctctcacggctccttttataagtcaggatgcattgaagtttgaatgttggctgctcatcttgggtcaattcaactgaatctcatgtccagcaatcatcatgtctgaaagtttaaacttgaagatgggaattgtacctcaacactttcataatgccaagcagctaagttttcaatttcaagaccaggactcatcatcaactcaatcaaccggccaatcttaccctgaagcggctagtgttggagatagcaatctttatgggcaaagttcaatttcagcatcatcaggaggtaatgaaactcctgggaagcttgttgaacatcatgctaaattagcctcgtcaatgggaactcaggaatatgtcttctctccttcacaagttgactatagcaaatcaattcagactcatattccgctccattgtgctgaaccgtattttggtggtgctgtgactgctgtttgcccacctccagctatgagtcatcatccttgtat

SEQ ID NO: 6071 - DNA, 446 bp, Gossypium hirsutum
  Clone ID: uC-gsflnu33B073b02b1
gtgcttttgaggaacaaagagaaacagagtttttcctttccctttttctttggtaaatattttgtttgaaagggaaggaagagacatgcacaaatccaagcttagaagaaaattcttcatgagtgttatttctctttcagtttaacaaatcccaaaggtcactgatgtgcgagcacgttaacatatagcagcaaagatttcttcttagcactttcaaaatctctcacggttccttttataagtcaggatgcatttgaagtttgaatggtaggttaccgaaatgcaaaccttgcaataaaaaggattgtgtgttaagttttcatttgacatgcaccgaatgtagttggctgctcatcttgggtcaattcaactgaatctcatgtccagcaatcattatgtctgaaaggttaaacttgaagatgggaattggaccttaacactttcat

SEQ ID NO: 6072 - DNA, 1051 bp, Gossypium hirsutum
  Clone ID: GOSHI-09MAY01-C5392_1
gtaaattgtccactggactgggacaccagaatgaagattgcccttgatgctgcaagaggactagcatacctgcatgaggactcccagccgtgtgtcatccacagagatttcaaagcatccaacatattacttgagaacaactttcatgctaaagcggccgattttggccttgcgaaaacaagcacctgaaggcagaacaaattacctgtccactcgtgtaatgggcacatttgggtacgtagctcctgagtatgctatgaccggacatctactggtaaaaagtgatgtttacagctatggagttgtactgcttgagttactcactggaaggacgcctgtagatatgtcacaaccatcaggacaggagaaccttgtcacttgggcaaggccaatcctgagagacaaggatcggttggaggagcttgccgatccaaggcttggagggaaatacccgaaggaagatttcatacgagtttgcacaattgcagctgcttgtgtagctccggaagcgagccaaaggcccacaatgggtgaagtagtacagtctttaaaaatggtgcagcgtgttacggaatatcaagattccatgttaaccaattcaaacaaccggcccaaccagaggcagtcttctactacttttgagtcagacgaaacatcatcaatgttctcttctggtcctttctctggcttaagcgttttcgacaatgacaatatctcaaggactgctgttccctcagaagatcttcatgaaggacgatgaatactttgaatgaagaaaaagtggaacagcagcggccttcactcagaagctcatgaaaactcgataccacagtgagaatttttctctgtaggaaacgatggtatttccgaaaagaacctttaggaagtgttgtagattctgtaacttggtggatagaaggggaatgggtgcttcttgttgtcccaattgttgtaccactgttaaatttccccccatgcagtggtggatgaaattttgtacatatgcacattatagccttttctattggatttgcattcaagggtttatgtt

SEQ ID NO: 6073 - DNA, 844 bp, Gossypium hirsutum
  Clone ID: GOSHI-09MAY01-C5352_1
ggacaactcactcagtcttgctcacacgcttgttcagattgtttgtcaagatcataaaggtgggtgatacgacataacgcgaactctaaaggattacaacattcagatttcatatggacgcttctatataaaacaaggaagaaagtgtgagattgacttgtttataatgcaatccgatgggaagaagatagttgatcctagcaagcaaactgcattgtcgtcgcgtctgaaaatggaactgctccaaccactaagagtaactgtagtgagccggggtcctgacactgagcttctagttgcaaatcccgtagagttatcaagcaagggccggccttttgttttttatgacattacccttgctctaaagatgcttaatacttgcatcttctcggcagagattgggagacacatgatcggagatcgagagtgggaagtttacaggattctactagatgaaggggctagttcatccattctgagacgaaaggttgaggaagaagtttggaagcgcttgatgggttgggaataactatgattggtcacaacattgccccctccacaatggccgttgctagcgcagctgtacagtatactttaccctgccaccaccatgtggagtcggtgtaaatatggatcacttttctagaacttcgcaccttacacgtccagcttctgaggctaaccttgcaatataggaaccagttggtaggaagtagataaaaggaacagtaagttgttatggccatgtatacatgaatgtatcatagaggtagatatcatgcatatattgtttgtgtaaagtatctttgattgtggacccttttctgtgggtcagtttggtttt

SEQ ID NO: 6074 - DNA, 1276 bp, Gossypium hirsutum
  Clone ID: GOSHI-09MAY01-C5372_1
ttttcgcgtccggtgagtttaagaaggtcccttttactgggaagaagcccttggggatttccgagacgggcttgaaggttaataaaggcagtgagagtaagaaaaatgaaaatgcgaggaatatgttaagcgaaagagaaagtagtagcagtgaagatttgagttcaaatacaaatagaaatgagagtagaattaggaagaatgaggtcaagaatgaagatttggaggctcacccgcccgtccctgagttttcaggccatatatatgcggatggaaagagatggggttactatcctggattggactcaaggttgtcttttacagattttgtggatgcattttctaagaaagggaagtgtgatatgagagtttttatgatatggaattcccctccatggatgtatagtgttaggcaccaaagggggcttgagagtctgcttgctcagcatcgcgtggcttgtgtcttagtgttctccgaaacgattgagcttgatggcttcaaggacagctttttgaaagatggttacaaacttgctgtagcaatgccaaaccttgatgaattgttgaaagatacacccacccatgtatttgcatctgtgtggcttaaatggagaaagacaaagttctatactatccattatagtgagctcgttcgacttgctgctctttacaaatatggtggcatttatcttgattctgacattatagttctgaaaccgttattgacactcaataatttctgtgggcccttgaaaatcaaaggaagctctttgtattggaagctttaatggcctttagaaaggagagtccttttgtgggggggggttgaatgagttctatttgacgtatgatgatacccgattgagatggaatggggctgatcttctatcaagagttgcaaaaaggttttcgaatgaaaagaacatatccatcaaacggccagagttgaatgtgcaaccttccgctgttttcttccctattagttctcagcatattataagatactttgtttcaccgacgacggaatctgagaaattgcagcaagatgctttattcaacaggattctgaccgagtctgtgacgtttcatttctggaacagcttgacgtctgcgctcattccagagccaaagagcctcgtagccaggcttattaaccatccatgtattcattgctccgaattgttgtgaatttcacatctctctttggtgttgccaaagattaatcaaagcaattattttttaaccgacggtcacaaaatgggttatgatattttta

SEQ ID NO: 6075 - DNA, 383 bp, Gossypium hirsutum
  Clone ID: GOSHI-09MAY01-C5292_3
cccacgctttcgctccctccgctatcgtgcgcccatccgctgctaccccctctgggtttttccaatggcgactactctgcaactatgtcgtttctgcatccgcaccgggtctgataactttggtggaagatccggcgctattccttcccggcggaagccgatctccgtccgatgctccggcgattcagattcgtcctcttccggtgccggggatcccgataacttcgatgcaaaggctttccggcgtaacttgacgaggagcaagaattataatcggaaaggtttcggacacaaagaggaaacgctcgagctcatgaatagagagtacactagtgatattataaagaaattgaaggaaaatggaaacgagtatacatggggaa

SEQ ID NO: 6076 - DNA, 1296 bp, Gossypium hirsutum
  Clone ID: GOSHI-09MAY01-C5292_1
ggaaattttcctactatattcgctaacgtgcgctgctgttccctccttattctctcccaaaatggcgatttctctcactgtgtcgtttctccatccgcatcggttccgataactttggcggaagatccgtagctctcccttgtcggaaacctatctccgtcagatgctccaccgattccacttctgttgtggtggatcccgataacttcgacgccaagtctttccgacgtaacttgacgaggagcaagaattataatcggaaaggatttggacgcaaagaggaaactctcgagctcatgaatcgagagtatactagtgatatcttaaagaaattgaaggaaaatggaaacgagtatacatggggaaatgttactgtaaaattggcagaagcgtacgcgcccacccgtccgcccacgcgtccggttcaaattgcttatgaagcaagaaaacagtttccagatgaaagaatttggattaccaatgaaattatccataacccaactgttaataagcgattagaggagatggaagttaaaaatattcctatcgaggaagggaagaaacggtttgatgtagtggataagaaggatgtcgtggttttgcccgcttttggagctgcagttgatgagatgttggttttgaatgacaaaaatgtgcaaattgttgatacaacttgtccttgggtaactaaggtatggaacgtagtagagaagcacaagaaaggagactttacttcaatcatacatggtaaatatgctcatgaggagacaattgcaactgcatcttttgctggaacttatatcattgtgaaggatatgactgaggcaatgtatgtttgtgattacattcttggaggtgaacttaatggatctagctccaccaaagaggcttttatggagaaatttaagaatgctacttcagagggatttgatccagatcgtgacctagtaaaagttggcattgcaaatcaaactacaatgctgaagggagagacagaggaaattggaagattagttgagaggaccatgatgcaaaaatatggagtgcaaaatgtcacagatcacttcttaagctttaacacaatttgtgatgcgacacaagagcgacaagatgcaatgtataagttggttgatgaagacctggatcttatgttagttgtcggtgggtggaattcaagcaacacctcacaccttcaagaaatttcagaggaccgtgggattccctcatattggatagacagtgagaagagaatagtccaggaaacagaatagctcacaaattgaaacatggggagct

SEQ ID NO: 6077 - DNA, 426 bp, Gossypium hirsutum
  unsure (1)..(426): unsure at all n locations
  Clone ID: LIB3048-013-Q1-L1-G7
attcgctaacgtgcgctgcttttccctacttattctctcggaaaatggcgatttctctgcaactgtgtcgtttctccatccgcatcggttccgataactttggcgggagatcggaagctctccctttccggaaacctatctccgtcagatgctccaccgattccacttctgttgtggtggatcccgataacttcgacgccaagtctttccgacataacttgacgaggagcaagaattataatcggaaaggattcggacgcaaagaggaaactctcgagctcatgaatcgagagtatactagtgatatcttaaagaaattgaaggaaaatggaaacgagtatacatggtgaaatgttactgtaaaattggcagaagcgtacggattttgctgnggagttgagagagctgttcaaattgcttatgaac

SEQ ID NO: 6078 - DNA, 689 bp, Gossypium hirsutum
  Clone ID: GOSHI-09MAY01-C5262_1
atcatcatcactctccccacccaccaacctttcccaacacaaaaacaaagcagctgtttttactagttttgattgtgagagagagagaggatgagagtgagtgtaaattatgcgaatcctttgtgacgcttgtgaaagtgctcctgctattgtcttctgtgctgctgatgaagctgctctctgccattcttgtgatgaaaaggtccatatgtgcaataagcttgctagccgtcatgtccgtgttggactagcaaatccaagcgctgttcctcgttgtgacatatgtgaaaatgcacccgcttctttcttttattgcgagatagatgggagttccctttgtttacaatgtgatatgattgtacatattggtggtaaaaaaacacatggaagataccttcttttaaggcaaagagtcgagtttcccgggtgaatacgtcggttgaacccgagtgaaaaccgggagaggccaaaatcaactaacaataggagagaaccaacaaaatcataaggtctctccttttaaaacagatagtactaaaatgatagatttgaatatgaagcctcctcatcgtattcacggacaagcctcgaataatcaggaacaataatctgattttctcggaagagggtggtgatgattgtctcgttagcttcgatctccttagactagctttagctttttatactag

SEQ ID NO: 6079 - DNA, 525 bp, Gossypium hirsutum
  Clone ID: GOSHI-09MAY01-C5222_3
cccacgcgttcgcccacgcgtacgggtttcctttcttgtcgttgtaatcccaacaaaccccgtccaaatccctcgtaacatggtcgtgaaccgtctaatcacttcgctgcctccactaatggcgacccaagccctctctcgcgctctcctctcgaaacccaaagccccatcttccttcctcttcccctcctcccgctctttctcttacttttcctcctcctcctgcggcgcttgctccaccaaaactcttatcaccccatcgccacccccttccctctccttcctccgtcgccttcgtgccccgccttgctactcactccttcgtgactcactttccccagctgttaaatcgttctccactcgagcagccaggtcctccctcaatgaccccaatcctaactactcgaaccggcccccgaaagagaccatcttgctcgacggatgtgattttgagcattggcttgttgtgatggagccgcctaaagaggatgctactatggatgatatttatgatagttatattaa

SEQ ID NO: 6080 - DNA, 726 bp, Gossypium hirsutum
  Clone ID: GOSHI-09MAY01-C5222_2
cccacgcgtccgcccacgcgtccgcccacgcgtccgcttatgacccaaaataccatgaggaatgggtgagttattatgctagagcaaatgagagaaataggcgcaatgacaggccacgcaattatgatagatcaaggaactatgagaggagaagggagaacatgaatactcgagatagtcagatgcctcctcaaaatcagggcatgcagaatgtcgctccaaagactgctgggatgcctcccaacaacatgggagggatgccaccccgcaacatgggagggatgcctccccagaacatgggagggatgccacccaacaacatgggaaggatgccacccaacaatatgggaggaatgacaccgaatcaaggatggtccggtaacatgcctggaaatgctccaaacttccaaactggccccaactatggaaacgctcctggaaatgcgcagaacttccaacctggtcctggtcctaactatggaaacacaccttaccaaggtgctacacccaatgctcaatatcaccagaataactatcctccaaatgttggtgggggaaacatgcctggtgggaactaccaatcttaaatcttgttctaatatgaattcgagaacattgtagcttttagcattgtgtagataagataaatgctagactatggtattggctactaaagaatgctattgatatgttgggcaactatagttatacagattattgttgcat

SEQ ID NO: 6081 - DNA, 1287 bp, Gossypium hirsutum
  Clone ID: GOSHI-09MAY01-C5222_1
catcatcgtagcggctttccacaaatggcgacccaatccctctctcgctatctcctctccaaaccaaaatccctaacctccttcctcttcccttcatgccgccctttctcttccttttcccccgccgccgccgcttcccccgtgaaaaccctaataacctcatcgccatccccttccctctttttcctccgtcgtctccgtgccccactttgctactcgctcctccttcgcgactcactttcccccactgtcaaatcgttctccactcgagcagccaggtcctccctcaatgacccgagtcctaattactcgaatcgtcccccgaaggagacaatattgctcgacggctgtgattttgagcattggctcgttgtggtggagccccctaaagaggatgctactagggatgaaattattgatagttatatcaaaaccctagctcaagtagtgggcagtgaagacgaagctagaatgaaaatttattcagtttctactcggcattattatgcctttggagccctggtttctgaagagctctcgtacaagatcaaggaacttcctggagttcgttgggttcttccagattcttacttggacgtgaaaaacaaggattatggaggggaacctttcattaatgggcaagctgtgccttatgaccccaaataccatgaggaatgggtgagaaataatgctagagcaaatgagagaaataggcgcaatgacaggccacgcaattatgatagatcaaggaactatgagaggagaagggagaacatgaatactcgagatagtcagatgcctcctcaaaatcagggcatgcagaatgtcgctccaaagactgctgggatgcctcccaacaacatgggagggatgccaccccccacgcgtccgcccacgcgtccgcccgcgcgggcggccacccaacaatatgggaggaatgacaccgaatcaaggatggtccggtaacatgcctggaaatgctccaaacttccaaactggccccaactatggaaacgctcctggaaatgcgcagaacttccaacctggtcctggtcctaactatggaaacacaccttaccaaggtgctacacccaatgctcaatatcaccagaataactatcctccaaatgttggtggaggaaacatgcctggtgggcactaccaatcttaaatctttgttctaatatgaattcagagaccattgtagcttttaggcattgttgtagataaagataatatgcctagacttatggttattggctactaaagaattgctattgaatatgt

SEQ ID NO: 6082 - DNA, 746 bp, Gossypium hirsutum
  Clone ID: GOSHI-09MAY01-C6952_1
aattattttctggcattttcattggggattttctcagttagatattctttttctttaaattgtcatcgatggcacagcagcaggctcaggtgaagttcacggcggtgaagccacagttgatggtgaagacgccaaaggcagttgatgcagttaatttctacaagtccgcttttggcgccgtcgaagcaggccgatctgcttgctgccccccgccaacggccgaacagaacctccctaacatcctctgcgctcagcttgagctcgccggctgttccttcgtcgtatataacgacgactccgctccacagaaaatcgaagggatcggaaatcaactctgcctggaaactgatgacgtggaagccgccatttccaaggccgttagcgccggagcggttgtagagggtgaggtaaccgaaggaggcggcgcgtgctgcggcggtcgcgtaggtaaggttaaggatccatacggatatgtttggctcatctgctccccctccaacaaatgcgccccagtggaagcttaaaactgccatcggctcttttgatgtaatactgctgtttgtgtgtgttgtatggaaatggtttttgtcgttttcttttgacagcagtggttaatcgttggtggctgatgttaaatgataagtctacttgtaatttcttttcttttcttttcttaaagaactacttgggtttacctatttagcattacatcaaggatttaatcaaacttgactgcacttatcctg

SEQ ID NO: 6083 - DNA, 469 bp, Gossypium hirsutum
  Clone ID: GOSHI-09MAY01-C6582_3
tcaagtaccaaattgggccaaacaaattttaggtatcaaaaaaaaaatgttaggtttaggtacccaatgttatattaagtcaaataataataatggttgatatttattatgtatgatttagcaggtaactaagttcaaatgcggtggtgtttgtttgggacttgggtttcaacatactttaggagatggcacatcggctattcatttcatcaatagttgggctgacaccgcccgaggcgtcccgcctgccattgcaccattcatcgatcgaactcttcttcgtgctcgagtcccaccaatgcctaaattccaccatcttgaatatgagccttctgctccgttgaaggctgttgaatctgatcttaagccatgcactgtctccacatttaagcttacagttgatcaattgaatgccctgaaagccaaagctgctgcaaacagtagtggtacatagtacagtagttacaac

SEQ ID NO: 6084 - DNA, 506 bp, Gossypium hirsutum
  Clone ID: GOSHI-09MAY01-C6582_2
gcgcccacgcgtccgctgagtttaagcatatcaataagcggaggaaaagaaacttaccaggctacttcggcaatgtaatctttacgactgcactaattgctgaagctggtgatctcgaaaccgaatcgtttactgacaccataaagaggattcatgaacgattaaatcagataaatgatgaatatttaagatcagctattgattacattgaaaaagtgcctgatttaaacaccttggttagaggaccgcatacttttcgatgcccaaaccttgttgttgttccatggaactggttgcctatatatgaggcagatttcggatggggtcgtcccatatatatggggccagggaatgtcgtccaagaaggtaaaatttacatgctaccaagtccagctaacgatgggagtttgacactggcagctcgtttagagatccctcacatgaaagtttttgaaaaacttatttatgagatttaatagttattttaaacaaaaaaaaaataaaat

SEQ ID NO: 6085 - DNA, 1178 bp, Gossypium hirsutum
  Clone ID: GOSHI-09MAY01-C6582_1
tctggatctataaattaagcgcaaaggcttcaccagggactgctcaagtctccctttgcgccctttacacccttgttcttctaacacgatttcaagatggagattactataaaggagtctgctattgttcgtccagctgaagacactcccaaacgaagtctatggaactccaatttagatatagtgatgataagataccacatccctactgtatactattacaagccaaatggttcttctgatttctttgatactggaaggcttaaagaagctttgagcaagattcttgtcccattttaccctgttgctggaaggttggggtatgatgaaaatggaagacttgagataatatgcaacggtgaaggagttttattcgttgaagctgaaactactgcagtcatggaacatttgattggtgcttttgccgagaaccatcaagtgttacgtttagtccctaaagtcgactattctgaaggaatatcttcctatccacttattttattgcaggtaactaagttcaaatgcggtggagtttgtcttggagtagggattcaacatactttaggagacggcgcagcggctcttcatttcatcaatagttgggctgacacttcacggggcttgacgcctgccattgcaccattcattgatcgaactcttcttcgtgctcgggacccaccaacgcctaagctccaccatgttgaatatgacccttcaccggcattgaagtctgcattaaaatctcaatcagatgatcataagccatccattgtctccacctttaagctcacagctgatcaattgaacaccctgaaagccaaagctaatgttgcaaatgcaaacggtggtataaaatatagcagcttcaacatccttggctgcacatatatggcgttgggtaagtaaagcaaggggtctcccagctgatcaagataccaagctgtattttccagtcgacggtcgatatagattggatcctccgctcccaccaggctacttcggcaatgtaatctttacgactgcattaattgctcaagctggtaatctcgaaaccgaatcgtttactgacaccataaagaggatccatgaaggattaaatcagataaatgatgaatatttaagatcagctattgattacattgaaaaagtgcctgatttaaacaccttggttagaggac

SEQ ID NO: 6086 - DNA, 646 bp, Gossypium hirsutum
  Clone ID: GOSHI-09MAY01-C6552_1
cccaacgcgtccgccacgactaattgatttcattctttttctttcttctttcccctaaattgcattttctcaaaaatgtcgctcctccaatcttccgtctatcctccgtcaacacttcgttcttcgccgtcactgtcatgcacagcggcacaccccatcgcctcctcccatagagttccttccacttcgaattccttcgtcgcgttagaatcgtcatcgttaaagaccgttaactctatttcgagcgctaagaacaatagaaggaaaggcgttgtcggaaaggtgaggtcgagcctggagacggcgggagcaacggtggggcaggtgacggaggttacaaaggacaccttctggcccatcgttaacgccgcgggggataaaaccgtcgtcctcgatatgtatactcaatggtgtggtccatgcaaagttatagctcccaagtttcaacaattatctgagaaataccttgacgttgtctttctaaagctcgattgcaatcaagaaaataagccattggccaaggagcttggcataagggtggttccaacgttcaagattctgaagcacaacaagatagtaaaggaggtgacaggagcaaaatatgatgacttagttgcggccatcgatactgttagagccacctaac

SEQ ID NO: 6087 - DNA, 438 bp, Gossypium hirsutum
  Clone ID: GOSHI-09MAY01-C6542_1
cccacgcgtccgcccacgcgtccgaagaaaaccaatttttccctttccaagaatttgtgaagtgtcttttttttttgccatgggttcaaactcattgaagaaccctcttctgttcagtgatgaagttgagcctggttatgtcaaaaactcatcttttctgaaatcatcagtgaaatggggtttaaagattgtaatgtgggtgattttcattgcatgggttggtgttatttttctatatcctggagaaattggtagtcagttggttgagaaaattattaatgccaccaacggatctgttttcggcacttcaggaagtttgttcttggtattcagtgctccaattcttctcattgcaatacttgcagtagctcatctgatcatctctggtgaacatgttttcgagaagagtaagtcctcaaagaaaccagggttttcgtt

SEQ ID NO: 6088 - DNA, 883 bp, Gossypium hirsutum
  Clone ID: GOSHI-09MAY01-C6492_1
cccacgcgtccgggaaagtaagtatccgaagcgaaaggatttgagagaaagaagggaaagactctgatagaaaaatggagaaagcaatcaacagacaacaagttttgcttaatcatttacaaccctcttctcagtctcatcaatcacctgctgctattctatttccttccaactgcgcggcgggggatagcgctgcttatcaccggacggctgcttttggggatgatgttgtgattgttgcggcatgtcgcactgcaatttgcaaagcaaagcgtggaggcttcaaagatacacttgcagatgatttgcttgcccctgttttaaaggctgtgattgatagaacaaagctgaacccaagtgaagtgggggatatagttgttggtacagtgttggcacctggttcacaaagagcatcggagtgtaggatggcagcattctatgctggtttccctgatacggtgcctattagaactgtcaacaggcaatgttcatcgggcctgcaagcagttgccgatgttgctgcttgcataaaagcaggattttatgatattggcattggtgctggactggagagcatgacaactgacggtggtgctcctggggttcccaaagttaacccaaaggtagagagctttgcccaagcccgggattgccttcttcctatgggcattacttctgaaaatgttgcagaacactatggtgtgacacggcaagagcaagaccaggctgctgttgaatctcatcgacgtgctgctgctgcaacagcctctggtaaattcaaagatgaaattgtccctgtacttaccaaagattgggatcccaaaactggggaagagaaggcagccacaattattgtagatgatggaatccgcccaaacacaaa

SEQ ID NO: 6089 - DNA, 550 bp, Gossypium hirsutum
  Clone ID: LIB3585-034-P1-K1-F12
atcagtagatatggagaaagcactcaacaggcagagagttttgcttcatcatttacgaccctcttcgtcttcttcgtctcatgaatctgctgctgctctctttccttcaaattgtgcggctggggatagcgctgcttatcaccggacggctgccttcggtgacgatgttgtgattgtggcggcatgccgcactgcaatttgtaaggccaaacgtggaggcttcaaggatacacttgcagatgatttacttgcccctgttttgaaggctttgatagatagaacaaagttggacccaagtgaagtttctgatatagttgtgggtacggttttggcgcccggctcacaaagaggaattgagtgtaggatggctgcattctatgctggtttccctgatacggtacctattagaactgtcaacaggcaatgttcatctggcctacaagcagtcgctgatgttgctgcttccataaaagcaggattttatgatattggcattggtgctggattggagagcatgacaactgacaaagttgttcctggggttcccaaa

SEQ ID NO: 6090 - DNA, 425 bp, Gossypium hirsutum
  Clone ID: GOSHI-09MAY01-C6482_1
ggaaaacccggcccgacccacgcgtccgcccacgcgttcgcccacgcgtccggtaaaaaaattaggtaaagagagaaccaaagagcaagtgcaggaacagtgcaaaagttttctcaagaaaaagtggagatatataaaggttgataccttaactcaagaaaaaaaaatggcgttttacgtcgacgaagaagaggtctggaaatgtccgagtcatccttctaagcgtcgccgtactggtatctgcccggtttgtctccgagacaaacttgcttctctttgccccgactgcgcccacgcgcgtccttgctcatgtatcacaacctcttcttcttcttcctcctcttcctccttctcccgcttctcaactgcggcggccggtggcaacacaggtgtcggttctgttggtcgagtttctaatcttatcg

SEQ ID NO: 6091 - DNA, 400 bp, Gossypium hirsutum
  unsure (1)..(400): unsure at all n locations
  Clone ID: LIB3189-043-P1-K1-F8
ggctccttcttcttctccttcatcttcttgttctgcttcttcctctaaatctcctcctccacctcatcagtccccttttttcactccagtaagttccttttttcattttcttatcattatttgggtattttcttaaaggttcctcgttttggctgatgaagtagtttgattttctttttggtttgtggaacagattcaagaatgtgaaagggagggacaagaagatggtggtactaccccaaacgtatgcagggacaaagcggtgaccccaaagcacttcgcaacgcccctccatgctaaaaccactgcaaaatccaacgccaggaaacgtcacgagtctgctggaaatggtggggatgggtgagatggctctggttnttgcaacaagtgcaagcctcac

SEQ ID NO: 6092 - DNA, 401 bp, Gossypium hirsutum
  Clone ID: LIB3165-004-P1-K1-D2
aaattccgggggggcccaagcctgccgaaaacccaaaaaagaaaccatggcttcctttttcttctccttcatctttttgttgtgcttctggctctaaatctgctcctccacctcatcagtcccctttttttcactccaattcaagaatgtgaaagggagggacaagaagatggtggtactaccccaaacgtatgcagggacaaagcggtgaccccaaagcactttgcaacgcccctccatgcttaaaccactgcaaaatccaacgccaggaaacgtcacgagtctgctggaaatggtggtgatggtgaagattgctctgtttcttgcaacaagtgcaggcctcactccagggagaagatcttcgtggttcctttagacaacaacaatggagtttacaagca

SEQ ID NO: 6093 - DNA, 448 bp, Gossypium hirsutum
  Clone ID: GOSHI-09MAY01-C6402_1
cccacgcgtccgtcactgtatccatcgctgtagccacggcggcgatgaagacgacgaccctaagttcccttccatttaaccaatcagttttcgggctgaagtcccaaagaaaaggccgctttaccatggcttcacacaaagtaacactgataactccgtcgggaaccaagcaattcgactgctcggacggcgactatatcctggaccgtgccgaggaagtaggaatggatctcccgtactcgtgcagggctggggcttgctcttcgtgtgcgggactgatcaaacaaggcaccgtcgaccaatcggacaatagcttccttgatgatgaattgattgatgcaggcttcgtcctaacttgtgttgccatccctaagagtgatgttatcattgagacacacaaagaggaggacctagtatcttaaaaggtgtcataaggatttgtattttc

SEQ ID NO: 6094 - DNA, 496 bp, Gossypium hirsutum
  Clone ID: GOSHI-09MAY01-C6432_1
agttaccccgtttcacttcaggcgtttcttcctctctccggtccctcacttcactttacgatggattggcaagggcaaaagttagcggagcagataatgcagataatgctgttggtgtttgcagtgactgcattcgttgccggttatgtattgggatcgtttcagatgatggttctcgtatatgccggtagtgtgacactcactggattgattacaattccaaattggcctttcttcaaccgccatccactcaattggttggatcccagcgaagctgagaagcatcccaagccacaagtgactgtgatttcgaaaaagaaaggctccaagaagtaaggtcattcgatttgatcttagcatcgttagagttttctaggggactgaattgatgttttcatcttttatgtgcttcgatggatactatagtcgacctgattttcctgaaatttttttgaaccatgaaacaattaattgaagagtaaccttcttatgcgaa

SEQ ID NO: 6095 - DNA, 1508 bp, Gossypium hirsutum
  Clone ID: GOSHI-09MAY01-C6662_1
taaaattttcacttcactccccacgcgttcgcccacgcgttcgctcccttacagccaatctcctcaataccccatttttctggttcctttttcaagccattttacaggcacttcccagttgggagaaggggaaaatggcacagcttttagcaccctcaactcaatggcaaatgacactaccaaagacctcaacctatggaagtcccattgcaacaaaaatgtggagttctctggtactgaaacagaacaagaaaggagctgctaaaagctctggcaagtttaaagtggttgccttgtctgaaaacagcactgtcaacaggctagagaacttactaaacatggacgtcactccatacaccgacaagatcatcgctgaatacatttggataggaggcagtggactcgatatgcgtagcaagtccaggacaatatcaaagccagttaaacatccctctgagcttcccaagtggaactatgatggatcaagtactggacaagcacccggtgaagatagtgaagttatcttataccctcaagcaatctttaaggaccctttccgaggaggtaacaatatcttggtaatttgtgattcatacacaccagctggtgagcctattcccacaaacaagcgccaccgtgccgctgagattttcagtaacaagaaggtggtcgatgaagtaccatggtttggtattgagcaagagtacactttacttcaacaaaatgtgaaatggcctttgggatggcctgttggaggctaccctggtcctcagggtccttattactgtgcagctggtgctgacaagtcattcgggcgtgacatctcagatgctcattacaaggcttgcttgtatgccggcattaacattagtggtaccaacggggaggttatgccaggccagtgggagtatcaagttggtccgagtgttggtatcgaagctggagatcatatctggtgttctagatacattctcgagagaatcactgaacaagccggtgttgtactctccctcgatcctaaaccaataaagggtgccgcccgtccgcccgcgtccccccccaattacagtactattagcatgagggaagatggaggcttcgaagttataaagaaggcaatcctgaatttgtcgcttcgccacaaggagcatatcagtgcctatggtgagggaaacgaaagaagactgaccggaaagcatgaaacggccagcatcaacacgttttcatggggagtggctaatcgcggttgctcaatccgagttgggcgtgacactgagaagaatggaaaaggttacttggaagatcggcgtccggcatcgaacatggacccatatgttgtgacagcattgctggcagaaactacactattgtatgagccaacacttgaagctgaagcacttgctgctcaaaagattgctttgaatgtctaaattaaagcagtttagctttattcatagagatggttttctattttatttgctattaggccgggtggtggggcacaaaat

SEQ ID NO: 6096 - DNA, 314 bp, Gossypium hirsutum
  Clone ID: LIB3120-048-P1-K1-D7
taccgtccgaattccgggtcggcccacagcgtgcgcccacgcggtgcttatgcctggccacgagcgagtactcacagtcggagcgagtgtcgggattgagaggtggcgatcatatatggtgtgatagatacattctagagagaatcactgaacatgccggtgtcgtactctgacctcgatcctaaaccaatagagggcgactggaatggcgctggatgccacacaaattacagcactaagagcatgagggaagatggaggcttcgaaggtataaagaaagcaatcctgaatttgtcgtttcgccacaaggagca

SEQ ID NO: 6097 - DNA, 237 bp, Gossypium hirsutum
  Clone ID: LIB3146-048-Q1-K1-B11
ccggggccgaccaacgcgtccgcccaaattacagtacaaatatcttgaggttttatttaggcttaaaaactataaaaaaagcgagggtgaatttgtcgcttcaccacaaggaacatatcaacgcctatggtgagggataccaaagaagactgagcggatagcatgaaacggccagcatcaacacgtaatcatgggagtggctaatcgcgggtgctcaatccgagttgggcgtgacac

SEQ ID NO: 6098 - DNA, 627 bp, Gossypium hirsutum
  Clone ID: GOSHI-09MAY01-C6632_1
cccacgcgtccgatgggttcaagcggcggctgctttatccaacatgggaatgttcctcgccgagatgagtagtgactcgttccagctcgagggaatggcatctagggggatgcttcctgaactatttgctaaaaggtcccgttacggaacccctttggtcgggattttattctcggcatccggtgtcatactcttgtcttggttgagcttccaagagattatagcagcggagaacttcttgtattgtttcgggatgatcatggagttcatagcgttcgtgaagctaagagtagatcgtcctgcagaatcgagaccgtacaagatcccggtcgggacagctggggcgattttaatgtgtatcccaccaacattgttgatcctcgtggttttagccattgcatcttttaaagtcatggtggttagcacggtggcagtgatgataggacttgctcttgagccatgtttaaggtattcggagagaaaaagatggctcaaattcaccatgaaccctgatctttatgatcttcgttctccttaccaggaatgtaataaaaaacacatgttattatgttttttttatgtttcatcaagctgttttagttaaatataatagagattattacatat

SEQ ID NO: 6099 - DNA, 640 bp, Gossypium hirsutum
  Clone ID: GOSHI-09MAY01-C106619_1
gaaaaaaaaaaacagcagcagcagcagtagtggtgaaagtgaaacctgaattctaaaactggccccttcttttcttcatttttttcttctgtttctgtgttctatatctggaataatctcatttggtagagtttgattttgaagttgaagatttggatttaattaagaaaaaattggagaagtttttgaatttgcaaaacggaagcaaactccacttctacttactttctcctccatttctttaaaaactgtaaatttagaggaaatccaagcaagaagattcaacaatgagacaatctctccaattattgtcttcccttcgttggaaatggctaaaataatgaaatgaagatgagatctaaggattttctttttagaaaaaaaattgaatgtttgctgtagccattgctagggtattgtcttcagtttcgtttccgccatgactaccaaacgcgcgtacaagctacaggaatttgtggcacactcttcaagtgtgaattgcctgaagattggaagaaaatcgtctagggttcttgtgactggaggtgaagatcacaaggttaatctctgggctattggaaaacccaacgccatactgagtttgtcaggacacacgagtggaatagattcagtgagcttt

SEQ ID NO: 6100 - DNA, 1416 bp, Gossypium hirsutum
  Clone ID: GOSHI-09MAY01-C6622_1
ccggtaattcctggccggaccgacgcgtccgaataaattagtgtgttatctttctccccctaatctctatctccatggcggataaaacgagagcctcaccttaccactctcatttcttccaactcccttcttcttcttcaatttgatctatctgtttctttcttctttgcttcttttcaagctctattattataacagctacctctgcttcttcttcttcttcttttcaattgccattagtttgattgtagctatggcttctgctgctaactgtgtagtgtattttagcagcaacactaactaccttactgtctcagaactaaaaaaccattctttgcctgctacctttgtcagcagaccacccaacaattacactcttgggaaaagaagtcattacagtgtcagattgttatcttcaacgacgggaatcaatccacgggcagcagcaccatcagccactgctgtagagaatgatggaagtttccccgacactgatatggttccaacccccaaagttataattgatcaagactcggatccagatgccactgttgttgaaattacctttggcgatcgactcggagcgcttcttgatactatgaatgcacttaaaagtctcgggttgaatgttaccaaggcaaatgtctatttggattcatctgggaagcacaacaagttttgcatcaccaaggctagcactggaaggaaagttgaagaaccagaactgctcgaggcaatacgtttgacgattataaacaacttacttgagtttcatccggaatcaagctcccagttagcaatgggtgcaacttttggtgctgagccaccaaaagaaacggttgatgtagacattgctactcgcattagagttcatgatgatggtcctgaccgtagcttgctatatgtagagacagccgttcatccagggttgttggtggagcttgtgaaaactattaccgacatcaacgttgcagttgagtccggagagttcgacccggaggggttgcttgcaaaggcaaagtttcacgtcagttacaagggtaaagccctcatcaagcctctgcagcaggttcttgcaaatagtttacgatattacttgaggcgtccgactacagaggaggcgagtttttgagcccccataagagcaagttagcaatggggtgaagtttagaatgctgttggcaaataatctcctcttgtaggaattctatatccagtcccctgttagagcatggtaattgttgtataacgattttaattaatttgatccctagttgggcaaccctacgggattcttagaaacgtgggctcattttgtgggtcatttgagtcaggccttaccccccctcccctatttaaactctgtttacttatattttcagatatacaaaacaaaaaggagagatgttgtttctc

SEQ ID NO: 6101 - DNA, 408 bp, Gossypium hirsutum
  Clone ID: LIB3165-046-Q1-K1-D4
gaaaactttgcatatcagtcagtatggctgtagcagctattgcagtctacgactggccagaaagttggccagacttgttgccgttcctcctaaagttgattggtgatcaaactagaatgaatggagttaagaaatatggcatttgtgctctaattaatactattgctttttgtttcctgatcttgaacattttctcttcataagagcaagttagcaatggggtgaagtttagaatgctgttggcaaataatctcctcttgtaggaattctatatacagtcccctgttagagcatggtaattgttgtataacgattttaattaatttgatcactagttgtgcaacactacgggattcttagaaacgtgggctcactttgtgtgtcatttgagttaagccttacccacac

SEQ ID NO: 6102 - DNA, 921 bp, Gossypium hirsutum
  Clone ID: GOSHI-09MAY01-C6192_1
gaggaatcgatcaagcttttgttcaagaaccagaacaaaggccaaaatcaagtacaatcgaagtcgatggaatcccagtgatcgacatgtcggtttccggcaccggaggaatcgaaaagcgggctcccgtccgccctcgcgcgcgcccgcgcggccgtttctttcaagtgatcaaccatggggtgcctttggaattacgccaaagagtcgtgaaggtggctaaagcgttcttcgatcttcccatagaggaaaaaaggaaagctaagcgagatgacttgaattttacgggttaccatgatgaagaacatactaagaatgttagagactggaaagaggtttttgatatgttaattgaagacccaacatttctcccagcttcgccggatcccgatgatgaggaaataaggacgtacagtaacaaatggcctgagaatccccctgagtttagggagacatgccaggagtactgtagagaggtggagaaactggctttcaaattgctggaactcatatctttaagcttaggtttgcctgctaaccggttgagtgatttctttaaacaccaaactggtatgttgaggctgaattactatcctccttgcccttcacccgagctagcacttggcgtcggtaggcatagggatggtggtgccttaactgttcttgctcaggacgatgtcggtggattacaaattaggaggcattcagatggggagtggattcctatcaaaccaatcccaaatgcctacatcattaatattgctgatgctcttcaggactggagcaatgatctttatgtgagtgcggagcacagagttgtggtgaaattcgaacaggaaagattttcgattccgttattttccttcccttcccactatggcaaagtggcgccctctagatgagctagtgaatgagcaaaac

SEQ ID NO: 6103 - DNA, 501 bp, Gossypium hirsutum
  Clone ID: LIB3585-048-Q6-K1-D5
caaaaaggaagctcgaaagagccctagtaagaaaaaagctgcctctccctctcttcctttagttttcttttgctttcggcttctctcactattcaaatccctaatcaccaactttaaattctgttagtatttaaaagagagaagaaaaaaaattgaatccagtttaaaggatcttagcctccaaatcaaatcgggagtctgttcgttttttttttttctattgacgcctcgaagctgaagttgctgtcagtttctgccttctcaaaggtccagtaacttagcattagttttggcacgttagagagttcaacatgccgaaggtgagaagagatcgttccctatcttctgataggtgtaggagatctcccttttcgtgccaccaatcttcaccaaaatttccttctgaaaccgaggaaaatctaaaggaatgggaggatgccaggtgccctgtctgcatggagcatcctcacaatgcaattctgctcgtatgttcttcccatg

SEQ ID NO: 6104 - DNA, 350 bp, Gossypium hirsutum
  unsure (1)..(350): unsure at all n locations
  Clone ID: LIB3145-047-Q1-K1-H6
ctatatgctatttctagcgcttatctgatattgtgaaatttcatttttaaatgtacaatatcttctcttttttattttttcccttgaaatctatgacatgtttgtgaagctttggttttccattttcatacattgtatctttacttgggattttctttatttatttttacttgttagccttctctcagttcttttttcttctgaatcttatactctttaatgcattaactagtgatggtgttatgttttgtattttaatcagtcagtttctgccttctcaaaggtccagtaacttagcattagttntggcacgttagagagttcaacatgccgaaggtgagaagagatcg

SEQ ID NO: 6105 - DNA, 470 bp, Gossypium hirsutum
  Clone ID: GOSHI-09MAY01-C6152_1
gattcacctacgatcatatctatggaactaaagttgttaggcaccattttcgaccgatttggcgcgtcgtcatacggcggctgagcttcttgcttctgctaacccgaaaatgcttactgttttagtgtatgcccctgtccaaaaagtcttattcgataaatcagcagggaagaggccaaaggcaatgggagtgatgttcaaagatgaaaacgggaaccaacatcaggcatttttgactaataatcgaaggagtgaagtgattttatcatgtggtgcaattgggactcctcaattgctaatgcttagtggcattggacccaaagctgaactccagaggttgaacatttccatggggttgcataatgagtttgttggaaagggcatggctgataacccgatgaactcggttttcgtcccaatgacacggtctgtcgaacaatctatgatacaaactggcggcattaccaata

SEQ ID NO: 6106 - DNA, 642 bp, Gossypium hirsutum
  Clone ID: GOSHI-09MAY01-C6102_1
gtaagaaccacatacaatgaggtggcagatgaacttgtagctgaatttgctgatcctggcaatagagtagcatcaccagatcagcaacagttcgacgagagaaacatccgccgaagggtttatgatgctctgaatgttctaatggcaatggatattatatctaaggataaaaaagaaatacaggggaagggacggcctcgtactgggctgagtgatattgaagatttaaagactgaacggcttgggctgagaaataggattgataaaaaggctgcctatttgcatgaattggaggaacagtttgtaggtcttcagaatttgatacaacgaaatgagcaactatacagctcaggcaatgcttccggtgggggagtggctttacctttcatcctggtgcagacacgccctcatgcaactgttgaggtagaaatatcggaagatatgcagctggtgcattttgactttaatagcactccctttgagctccacgatgacaattatgttttgaaggccatgaaattctgcgagagaccacagaccgatgaaatggcacacaatttttctgcagatggtgaaggttctagcatgtctgcaatgtaccagcaacagatccttgctcccccaaggacaatcacaccaggt

SEQ ID NO: 6107 - DNA, 936 bp, Gossypium hirsutum
  Clone ID: GOSHI-09MAY01-C6082_1
ctctctactctttcgttcatcagcgccattgcacaactctttcttctcctctctctctctctttggcccatctcttggctttggagagactgagaggagagaatctcaattaccctttcttcatgcatctattctttcttgtattcctctgaattttcttcgttttgtcttattaaccaattttatccaacatccatttccagttgcagaaaacccatttcatattcaagtgttttagaaggattaaatggctgaaaaaagtttcccacttcttcaacatggctacaaagatgtggtttttagtgattcaggtgtcaagattgttgaatgttctttttctcttaagagagttagtttgaaagcaaatgggttttttgctagtgttaatcaagctggaatgggttttgccatctcaccaaaccctcaaattccactccagagtactgcaaagttccattttgccagtcttgtttcaatctctgagcccgggtatctggttttggatgatgaacttgagattgctgagaggttagtggagaagaagaagaagaagaagagtgggtttaagtttagaattaagattgggaatgcgtcattaaggaagttgatgagtggggcagtcgcaggtgcggtatcaaggactgcagtggctccattggagaccattaaaacgcatttgatggtgggaagttgtgggaattccatggctgaagtgtttgataacatcaccatgagtgagggatggaaaggcttgtttagaggcaatttagtaaatgtcattcgagtggcttcaagcaaggctatcgggttatttgcatacaagacagtcaagaaacagttgactgctttgacatggtttacattctaaaattattttgccagccttattcattgtcggtgctgttgccgggagttatgttcgacattgttttacgt

SEQ ID NO: 6108 - DNA, 609 bp, Gossypium hirsutum
  Clone ID: LIB3543-028-Q1-K6-H3
gcgttcgccccgcgtccgcccagcgtccgctcttgacactaatttttttctcgtacaggagacagtgatcataccctccaactcaattctcatttaaattctttcctttgaatcaatttatttggcatataataatactttgagagtaagatatttcctttcttaataaaattgacgtagcacagctgttctgaaattctgaccgttcaattaacccaaaaaagagaaagaaattgtgaaggatgtttccacttgcagcaaaggaaccccaccttttcacagcaaatgttgcagaaaacccatttcatattcaagtgttttagaaggattaaatggctgaaaaaagtttcccacttcttcaacatggctacaaagatgtggtttttagtgattcaggtgtcaagattgttgaatgttctttttctcttaagagagttagtttgaaagcaaatgggttttttgctagtgttaatcaagctggaatgggttttgccatctcaccaaaccctcaaattccactccagagtactgcaaagttccattttgccagtcttgtttcaatctctgagcccgggtatctggttttggatgatgaacttgagattgctg

SEQ ID NO: 6109 - DNA, 604 bp, Gossypium hirsutum
  unsure (1)..(604): unsure at all n locations
  Clone ID: LIB3543-038-Q1-K1-H8
ggtccgnattcccggtcgcccagcgtccgaaaccctttatttcaatgttttagaagataatggctgaaaaagtttcccacttcttcaacatggctacaaagatgtggtttttagtgattcaggtgtcaagattgttgaatgttctttttctcttaagagagttagtttgaaagcaaatgggttttttgctagtgttaatcaagctggaatgggttttgccatctcaccaaaccctcaaattccactccagagtactgcaaagttccattttgccagtcttgtttcaatctctgagcccgggtatctggttttggatgatgaacttgagattgctgagaggttagtggagaagaagaagaagaagaagagtgggtttaagtttagaattaagattgggaatgcgtcattaaggaagttgatgagtggggcagtcgcaggtgcggtatcaaggactgcagtggctccattggagaccattaaaacgcatttgatggtgggaagttgtgggaattccatggctgaagtgtttgataacatcaccatgagtgagggatggaaaggcttgtttagaggcaatttagtaaatgtcattcgagtggctcca

SEQ ID NO: 6110 - DNA, 424 bp, Gossypium hirsutum
  Clone ID: LIB3585-047-Q6-K1-B7
cggactgcatgaacagcgccattgcactatagactgtcttatcctctctctctctctttggcccatgtctgggctttggacagactgagaacagagaatctcaattaccctttcttcatgcatctattctttcttgtattcctatgaattatcttcgttatgaattattaaccaatcttatacttcctttatgtattggaacaaaggcccaatgaaagcaaagggacacatttgcctaatggagacatttctgtttctaacagcaagtttcataataaaaatgagccatcttctgctaaaaagtactttcattataatggacaattggtccatcaacacaatatgttacaaaattatgtgagaacacgaacctcatatgctgctgtaattgagaacccagtggattttacaacgttgtgttgtg

SEQ ID NO: 6111 - DNA, 597 bp, Gossypium hirsutum
  Clone ID: GOSHI-09MAY01-C6052_2
agaaaacataaatgaaaaagaaaactattcaattctctggcatccttcatcaacttctctacaaccattgtcaaaaccatcaaacatcctactccgcgtccgcccacgcgtcggatggattgtgtgtagagactgaaaccatcggatgcctttgattcttatttctccgactcatttcacctttctgacagggaccttctatcttcttcaactgccaatttcgttcttggaggtgcctcttcagcctagaacctcggtgaatctcatcgtttcccttcctccgtcattatatgcgccgcgtggttcattgatctgcccgtaaattgacaagagtccctttcaacctccagatttctgaatcccaaatcttcaaccactactaccttttgtaaacaagctctcgcctccgccgtggttgcatcaaccacaaatgtattagggtaagtgcatgttgccagtatatgtccttcgcaatctctaaaaattattcctgttactgaagtcatcatataactgttatacgctgcatcaaaaataccttttaccacactttatcttaatggagtccatgcaccagcattttgttgaaaacctact

SEQ ID NO: 6112 - DNA, 631 bp, Gossypium hirsutum
  Clone ID: LIB3543-066-Q6-K6-H6
cctaacttaaaaaaacccaacgtcaaatctggaaatgaagaaagaaaacataaatgaaaaagaaaactattcaattctctggcatccttcatcaacttctctacaaccattgtcaaaaccatcaaacatcctactcctttttcgttcacgatggattgtgtgtagagactgaaaccatcggattccttttattcttatttctccgactcatttcacctttctgacagggaccttctatcttcttcaactgccaatttcgttcttggaggtgcctcttcagcctagaacctcggtgaatctcatcgtttcccttcctccgtcattatatgcgccgcgtggttcattgatctgcccgtaaattgacaagagtccctttcaacctccagatttctgaatcccaaatcttcaaccactactaccttttgtaaacaagctctcgcctccgccgtggttgcatcaaccacaaatgtattagggacacatttaatgtatgtgcattctcagaagacgtgactcactgattgctccattgtacggcagagaggacaaagattcacaacctgtaaatttctattttttaaattgttaaaagtagggaggaagttattggcgattctccaaaaataatttt

SEQ ID NO: 6113 - DNA, 381 bp, Gossypium hirsutum
  Clone ID: LIB3582-016-P1-K1-F5
cccacgcgtccgcttaataaaagatatcaatctcgttttgcattgcctttctccttaatgataaactttggttatgtgataccatactgcccagaacttcatgactaaccatttacactgcccttctttcatattcaaaaataaatttgctaaccacatattctaatttttttccgggctactggatgagccatcaatccccactcattgcaggacacatttaatgtatgtgcattctcagaagacgtgactcactgattgctccattgtacggcagagaggacaaagattcacaacctgtaaatttctattttttaaattgttaaaagtagggaggaagttattggcgattctccaaaatataattttgatttttcttgc

SEQ ID NO: 6114 - DNA, 650 bp, Gossypium hirsutum
  Clone ID: GOSHI-09MAY01-C106019_1
cccatttgaaattctgcttgtaaacaatacaaacgagcagctcaatatatctgctttgaaaatgggaagagcctgcttgaggtgttgcgggcatgcaggagaggacctctgcatacattagaagcaacaattcaaaatatcattagagctgtacctgagcaaaaatgtttcacttgtagaagatgcaaaggttcatttcctgtaatacatgttggccaagtaggaccgctttgcaattcatgcgtggagttgaagaaatctcagtgcatcacaatgagttcacccagtgttggaaccagatcacaagaacccgtttcgatgttgcagtcctttggaagtgcaccattgagtgtctctccacaaaatagaagtcaaaggaagaaagcaagcaagtcatcggagctcgatttgacatcaaattcacctcagtgttcttcgtcatctatttcttcacaaaacagacgtccatggaagacaactggaaagttaacgtagccagggttattcacgaagtccttgaagagcgctccagtgcatatttcctctcaagataagggccattggagaacaaaaaggaagccagtgaaaccagtgttgatgtcaaagacgttcaaaggtgcctcatcaccaatttttctcctatggaagtg

SEQ ID NO: 6115 - DNA, 439 bp, Gossypium hirsutum
  Clone ID: GOSHI-09MAY01-C6392_1
ctcacgcgcccggtggcccacgcgtccgggagaggctttggaacaaaaagaaaaatgaaagccacacttcccacaccccatctccggtctttcccttctccaaccccactttctttcaaactctccttcgcattccctgaaaccagaaggaaatcactaagcatcagctctactccgaagggaacaccatctccttctttggcttacgtgccactgagggtgagtgccagttctcaagccgctgctgcacctactgtcaatttgacggcaattcccaccgaaatgaaggcttgggtgtacggggaatatggaggtgttgatgtgttgaagttggatgataaagtgagcgttccagaagtgaaggaagatgaggttttgataaaagtggctgctggtgcccttaaccccgttgatgccaagcgaaggcagggcaagttta

SEQ ID NO: 6116 - DNA, 926 bp, Gossypium hirsutum
  Clone ID: GOSHI-09MAY01-C6382_2
cccacgcgtccgattttattttttcccacccgccacgcgagcactagcattagcactagcactagtagcaaccatggcctccgccgcatgtttcttgcaccaccacgcactcacaaccaatggcagatcatcatcattatcgccgtcgctgcgccaggtttcaaacatgaagcctacccagcaggtggtgtgcaaggctcaaaagcaggaagatgatggaagccttgtgtcccgtaggttggctctcactgtactcattggtgctgccgctgttggctctaaggtttctcctgctgatgctgcctatggtgaagctgcaaatgtatttggaaagccaaaaacagacacagacttcatgccatacagtggggatggattcaagctctcgataccatcgaaatggaacccaagcaaagaggtggagttcccaggtcaagtgctgaggtacgaggacaacttcgacaccaccagcaatttgagcgtcatgatcactcccaccgacaagaagtccagcgccgtctactgttcccctgaggagttcctctcttcggtggatatatcttcttggaaaacatgcggtctttggtaaaaccgattctgagggtggttttgactccggtgcggtggcgaccgcaaacatattggagagttcaagttcaacagtcggcgggaagccgtactacttcttgtcagtgttgacaagaaccgccgactgagacgaaggtgggaagcaccagctaataacagccaccgtctacaacggcaagctttacatttgcaaggcacaatctgtggacaagaggtggttcaagggagctagaaagtttgtggagagtgctgctagttccttcagtggtgcttaaacaaagcttatacatggaagagggattttattgaaacttgtggatgttgaatattaacttctg

SEQ ID NO: 6117 - DNA, 905 bp, Gossypium hirsutum
  Clone ID: GOSHI-09MAY01-C6382_1
ccaccgcatgcttcttgcaccaccatgcactcacctccgcacccagatcatcatcgactccacccttcacatcccagcgccaagttgcaatcgtcaagtcaaatcaactactggcttgcacatctcagaaacaggcagtccaagaaaatgatgattcgggaagcctcgctgtgatctcccgtacgttggctctcactgtactcattggtgctgccgctgttggctctaaggtttctcctgctgatgctgcctatcgggaagctgcaaatgtatttggaaagccaaaaacaaacacagagttcatcccatacaatggggaagggttcaagctgtcaataccatcaaaatggaacccaagcaaagaggttgagtacccaggtcaagtcctgagatacgaggacaacttcgactccaccaccaatgttgctgtcctggtcactcctactgataagaagtccattactgacttcggttcccctgaaaatttcctctctaaggtggactatctgcttggaaaacaagcatactctggcttaactgatgctgagggtgggtttgactcaaatgcagtggcaactgcaaacatattggagacttcaactcctgtgatcggagggaaacagtactacttcttgtcggtgttgacgagaactgctgatggagatgaaggtggcaagcaccaactaattacagccaccgtaaacaatggtaaactttacatttgcaaagcacaagctggggacaagcggtggtttaaaggagctagaaagtttgtggagagtgctgcaaattccttcaagtgtgcttagttaaaagtcttacttgttaactagagaataatttcatgtaaatcttgttagaaaatatctgatgttggacctaaaaaaaaaaaaaaaaagggcggc

SEQ ID NO: 6118 - DNA, 220 bp, Gossypium hirsutum
  Clone ID: LIB3120-039-P1-K1-F6
gtcggattccgggtcgcggacgcgtccgcccgcacctctcttcggtggattatcttattttaaaacacgcttactttggtaaaactgatggtgagggtggttttgacgtgcggtgcggtggcgaccgcaaacatattggagagttcaagttcaacagtcggcgggaagccgtactacttcttgtcagtgttgacaagaaccgccgacggagacgaaggcg

SEQ ID NO: 6119 - DNA, 534 bp, Gossypium hirsutum
  Clone ID: GOSHI-09MAY01-C6352_1
cggacgcgtccgcccacgcgtccgcggacgcgtggggggtaaatccattcattctttccaggtagtacgtaatattttaacccccaacccccactatctgtccatctttcagtaagagaaaggaaatggagtttagttcagaggctaaccagcgcattgccaggctcgcagcccatctccaacctcagatggaggaaagttctattttgaggcgagctgactgtagagcgaaaggagggtcaccagggttcaaagttgctatcttaggagcagctggaggcattggccagcctcttgcaatgttaatgaagatgaatcctctcgtctcggttcttcatctttacgatgttgtgaactctcctggtgtcacagctgacctcagtcacatggatactggtgctgtggttcgtggtttcctagggcagccgcagcttgagagtgcgttgaccggcatggaccttgtgatcatacctgctggtgttccaaggaagcctggaatgacgagggatgaccttttcaacatcaatgctggaa

SEQ ID NO: 6120 - DNA, 764 bp, Gossypium hirsutum
  Clone ID: GOSHI-09MAY01-C6342_1
ctcaacggcaacacccgacccgacccgtaaaaatggtccagacaaaccagtccggttccggcaatgatttcaagctcgtcggattctcgaatttcgtccggtccaatccgaaatccgatcggttcaccgtcaaacgtttccaccacatcgagttttggtgtaccgacgccactaacgtcgctcgccgtttttcatggggtctcggtatgcaatttgtagctaaatcggatttatccaccggaaatttgacccatgcttcttatctcctccgttccggtgacctgaacttccttttcactgccccttattccccttctatcgccgttgctcaaaacctctcccctcaatctaccgcttccatcccttcttttgatcattcactctgccgctccttcgctgccacccacggcttaggcgttcgcgccatcgccatcgaagtcgacgacgccgaaaccgctttcaccaccagtgtcacacacggcgcgttacccttttcccctcctaccccactcggcgacgtcgccaccatcgccgaagtcaaactctatggcgacgtcggtttgcgttacgtcagttacaccaccaccataaactccgaccatgatttctcgccgggattcgagaaaatcgaagacgccctttcttaccctttagattacggactccgacgactcgaccaccgcggtgggaaacgtcccagaactcggtcccgctgtttcgtacgtcaaatccttcaccggcttccacgaattcgctgaattcac

SEQ ID NO: 6121 - DNA, 299 bp, Gossypium hirsutum
  Clone ID: LIB3189-011-P1-K1-H4
cccgaaaaaatggtccagacaaaccagtctggttccggcaatgatttcaagctcgtcggattctggaatgtgcgtccggtcaaatccaaaatccgatcggttcaccgtcaaacgtttccaccacatcgagttttggtgtaccgacgccactaacgtcgctcgccgattctcatggcgtctccgtttgcacaaccgaggtctttaaaacacattcactcatgagacagctccatgcttattatctatctgcgttcccgtgtccctgaactttttttttcactggcccccttattttccct

SEQ ID NO: 6122 - DNA, 394 bp, Gossypium hirsutum
  Clone ID: GOSHI-09MAY01-C6312_5
ctggggtttccattttgccttcttgcagagcctccattgacgagcagctaaatcaacaatgggtcactctaacggatggaactctcacccgaaaacctacggccctggatctcgcgcctgccgtgtgtgcggcaacccccatgccattattaggaagtatgggctcatgtgttgcagacagtgcttccgtagcaatgccaaggaaatcggattcatcaagtaccgctgaagaatttatatggtctgaattaggaaggactttgtttaagcacgaatcattggtgtggagttttctaatttatcggtactagaagacaacgttttggtttttggttaatttagtatgaacttgaactaaaaatactttctcctttctcaatcaagtaatcatatt

SEQ ID NO: 6123 - DNA, 414 bp, Gossypium hirsutum
  Clone ID: GOSHI-09MAY01-C6312_3
cccagcgtccccccccccgcctactcttaccctttttcagagctttgatagaggaagagcagctcacctaatccatcatgggtcactctaatgtctggaactctcaccccaaaacctacggccctggctctcgcgcctgccgtgtgtgcgggaacccccacgccatcatcaggaaatatggactcatgtgttgcaggcagtgcttccgtagcaatgccaaggaaattggattcattaagtaccgctgaagaatttatgttgggaagaactttgttagagtatgagcctttggtaatgtgattattgaattagaaggataatgtttattgttttcagtctggacatctaaagtggttgttgaactaaggatactttgttgtttctcaatcaagtaatcatactgttttttttaat

SEQ ID NO: 6124 - DNA, 504 bp, Gossypium hirsutum
  Clone ID: GOSHI-09MAY01-C6312_1
cccacgcgttttcttccacgcgtccgcccacgcgtgccgcgcccccgcggccgcccacgccgcgccgcttccgtttagcagagctttcttcgacgagcagccatctgtaatcaatcatgggtcattctaacgtctggaactctcaccccaaaacctacggccctggctctcgcgcatgccgagtgtgtggaaaccctcatgccatcatcaggaagtacgggctcatgtgttgcagacagtgcttccgtagcaatgccaaggaaattggattcattaagtaccgctgaggaatgtttatatggctagaagttggaaacactttttggctagtatgaacctttgtttcgaaattgtagcaacttttaagataacattgctgttttttgttgaatttagtttaaaagcttgaagttttgtttctgcaaaggataatttgttgttttctcaatgaagtaatcatactgtttttatcttactgattgttttttgtggtgtggtgaaaaa

SEQ ID NO: 6125 - DNA, 507 bp, Gossypium hirsutum
  unsure (1)..(507): unsure at all n locations
  Clone ID: LIB3189-007-P1-K1-A5
cgcctgcagcaccgctccagtattcgggtggcgacccacgcgtgcgcacacgcgggcggtctactgttactctgaaattatagctggacatagaggaagagcagctcagctagtctataaagggtcactagtaatgtcaggaactcagaccccaaaacctagcacactggctgtaacggccagtcgggagtgcgggaacccacacctcatcataaggaaatattgactgatctgttgcaggcagtgctttcgtagcaatgccaaggaaattggattcattaagtaccgctgaagaatttatgttgggaagaactttgttagagtatgagcctttggtaatgtgattattgaattagaaggataatgtttattgttttcagtctggacatctaaagtggttgttgaactaaggatactttggtgtttctcaatcaagtaatcatactggtttttttattnnannatataaatattatttttatttttatttttttttttattattata

SEQ ID NO: 6126 - DNA, 342 bp, Gossypium hirsutum
  unsure (1)..(342): unsure at all n locations
  Clone ID: LIB3148-033-Q1-K1-H3
tttccttctgccaagcctccacttggcgtcttttttgcatccattgccccacggttgcagcctagatactattctatctcatcctcaccaaggatggcaccatctaggattcatgtaacttgtgcattggtttatgagaaaacaccaacaggtcgtattcacaaaggagttttctaatttatcggtactagaagacaacgttttggtttttggttaatttagtatgaacttgaactaaaaatactttctcctttctcaatcaagtaatcatattgttcaaaaaaaaaagaggatatncaaaaggcagctggagatgacacgggactacctaaagctctacaa

SEQ ID NO: 6127 - DNA, 378 bp, Gossypium hirsutum
  Clone ID: uC-gsronu33B171c05b1
cccactcgtccgcccacgcgtccgcccacgcgtccgcgcgcctgccgtgtttgtggaaatccccatgccatcatcaggaagtacggcctcatgtgttgcaggcagtgcttccgtagcaatgccaaggaaatcggattcatcaagtaccgttgaagaattttgtatggtgtaaagtaggaaggactttgtccctctttgagccttttgtactatgttcttatttttattttttttgaatttgaaagaacaagatgctgttttgttttggtgaattactaaagtgattgttgaactaagaatactttggggtttcttaatgaagtaatcatactggtttaatttggtatttttctttaataatataaaatattctatttt

SEQ ID NO: 6128 - DNA, 369 bp, Gossypium hirsutum
  Clone ID: LIB3148-006-Q1-K1-G6
aataaaaaaaaaaaaataaaaaacatattttactataacaaaaaaaacaaaaaaacctgggtgtaaaacaaacacaaatgtatgaaaaaccctcataccataatcaagaaatacaagactcatgtgttgcaaacagtgcttcctagcaatgccaaggaaattggattcattaagtaccgctgacgaatgtttatatggctagaagttggaaacactttttagctagtatgaacctttatttcgaaattgtagcaacttttaagataacattgctgtttttttttaatttaatttaaaagcttgaagttttgtttctgcaaaagataatttgtttgtttctcaatgaagtaatcatactgtttttatctt

SEQ ID NO: 6129 - DNA, 355 bp, Gossypium hirsutum
  unsure (1)..(355): unsure at all n locations
  Clone ID: LIB3543-013-Q1-K6-C6
cccacgccgtccgctggnaattctcaccctaagnacatacgggcctggcttctcgcgcctgtcgcgtgtgtgngaaacccccatgccatcataaggaagtatgggctcatgtgttgcagacagtgcttccgtagcaatgccaaggaaattggattcattaagtaccgttgacgaatttatatggtgtgaagtaggaaagggctttgtccaagtatgagctattgtagtaaggttttggaattcaaagaaaaacttctaagataatgtttttgttgaatctattatgggacattaaagtgtcttaccaggagtgcattattgtttttcaatgaaaggttaatgctagcttgctatt

SEQ ID NO: 6130 - DNA, 353 bp, Gossypium hirsutum
  unsure (1)..(353): unsure at all n locations
  Clone ID: LIB3145-039-Q1-K1-G5
cggaaaaagatgttgcagatattcagcccatcatacccccatgccatcatcaggaagtacggggtcatgtgttgcaggcagtgcttccgtagcaatgccaaggaaatcggattcatcaagtaccgttgaagaattttgtatggtgtaaagtaggaaggactttgtccctctatgagccttctgtagtatgttattatttttatttttttgaatttgaaagaacaagatgctgttttgttttggtgaattaccaaagtgattgttgaactaagaatactttgtggttcctcaatgaagtaatcatactggtttaatttggtattttcttttttnaaaaaataaatttgatgaat

SEQ ID NO: 6131 - DNA, 353 bp, Gossypium hirsutum
  Clone ID: LIB3543-041-Q1-K6-G10
gcgttcgcccagcgtccgcccacgcgtgggggggaggggggcgctagttctagatgccgagtgtgtggaaaccctcatgccatcatcaggaagtacgggctcatgtgttgcagacagtgcttccgtagcaatgccaagggaaattggattcattaagtaccgctgaggaatgtttatatggcgggaggtgggaaacactttttggctagtatgaacctttgtttcgaaattgtagcaacttttaagataacattgctgttttttgttgaatttagtttaagagcttgaagttttgtttctgcaaaggataatttgttgttttctcaatgaagtaatcatactgtttttatctt

SEQ ID NO: 6132 - DNA, 471 bp, Gossypium hirsutum
  Clone ID: GOSHI-09MAY01-C6302_1
cctgtttcaaatttcagttactaactcaaagcaaagcaaaaggcaaaaaagccatgtcaaagctggtggtgttgcagccaacaaagcagcctcccatctccctcctctcttcctctctttcccacttcaatggcaccaagctctgccaaatccagtacaaaagaaaggtatatcagccaaaaggtgcattgcatgttgcagcatccagcaccaagaagattctcataatgggtggcactaggttcattggtgtgtttttatcaagactccttgtaaaagagggtcatcaggttactttgtttactagaggtaaagcaccagttactcaacaattgcctggtgaatcagacagtgactacgctgagtttaaatccaagattttgcatttgaaaggagatagaatggacttcgattttgtgaaatccagtctttctgcagaaggctacgatgttgtgtacgacataaatggac

SEQ ID NO: 6133 - DNA, 444 bp, Gossypium hirsutum
  Clone ID: GOSHI-09MAY01-C6332_1
cggatccttgcatcttccgaagaaatgaatgcgtctctgagaggaagacacgcaaactgcaagagcactgccgccgattatgcagccgtcaacgccggcgatgtcaaactacgcgcctccatgactgacgccaggattgtcaacggtcccagcttgaacggtttaacttttgccattaaaaaacccggtttctaccgttacgtcccccaaaagttaatgaacacatttaggtttgcgaagaatccattgaagctaagttacggtcgcaagagagaggacaaacggacggtggtcgacggggctctggtgttcgattccggtagccaggtgtcggcttcttacatgattggtacgaggaactgtaagctcaagtatagttacttgcatggtggtgttacgacattggagccttgctatgatttggggaagaatgtatggggtttc

SEQ ID NO: 6134 - DNA, 491 bp, Gossypium hirsutum
  Clone ID: GOSHI-09MAY01-C6252_1
gtgaagatggggaaacctattattaaggggaaggcatgtgtttgagaaatggggatgatggcaagtgtttcttcaatggaattttggtgcatccttaacctcagagccactcttattactcttcttcttattctcttttttcatctttccaagaaactttactctaaattctttcctcctccttccgttcttcatcttccttctccttcttcatccacttcccttcctgaatctcaatcaagaatcccagagattgtatctgattcagacttgaagtttttgattgataatctggatgagaagctcgatgaggacgagaaatgggagactgtaattgataagaaaaccaactctttatcctacaaggcaaaatgctgcagacctaagaataaaccactaaaatacctgagcacgactgtatttgaggggtgctctccggagcttctgagggacttctatatggacaataattatagaaagcagtgggataa

SEQ ID NO: 6135 - DNA, 803 bp, Gossypium hirsutum
  Clone ID: GOSHI-09MAY01-C6272_1
gtggtgtagcatccacccggcgccgcttcagtggcatccctacctcgtctctccacgtagttccgtccctggtcatcaaccgccaactaagctatgaactcccggtctcagtaccagtatcagcacttttattttatttaattcttaaccaataatttacctacccgccgcagcctaccttccgtcgacaaccatttaagctgtaggttttaatcaccttcctcactatggattcaaccttcttctcatttctctaacaaccaaaaaagtaggaaaaaaatggctactcataatcttgctgttatcctcaaaaacccgtcaaacgacgctgaattcctcctccttaagcaaactccaccgcctaaattcagcgaagaccagtacgattcttatgtggattctgatctctgggaccttccttccacgcttctcaaccttcaacacgatcactcccactctgggattgttatccagggcgcccagtcctctcacaacattgatttgactaaatttgatgtccaacttgctcttactggggtgctggaaaaattgggtttaacggtgaatgatgtaggggagtggagtttgttcaagtatgtggaggaagctgagttcgggcctgagtttccagttaatactgtgtttattatgggcaatttgttggacggaaatcaaaattgtccagggctgtgtaagtggatgtctactgaaagctgtcttacctggcttctggaggtgaaaccttgtattgatcgtgtagggcctttggtagtttttgctcttataaatgactcattgcagta

SEQ ID NO: 6136 - DNA, 908 bp, Gossypium hirsutum
  Clone ID: GOSHI-09MAY01-C6212_1
ctgtaatgcacattgcagctgctatggaaataaactcaatattaataccaaaattgaaaattttgcattgtactttacattcaaagtctattgaatccaaagatattgttaaaattggtcgcactcacactcaagatgcaacacctttgactcttggtcaagagttcactggctatactacacaatgtcaagtatggaattgatcgacttttctgcacccttccacgcatgtatcagctagcacaaagtggtactgccgttgggacaggattgaacacaaagaaagggtttgatgcaaaaattgctgcggctgtagcagatgagacaaacttgccatttgtcacagcagaaaataagtttgaagccgggcccgcgcgtgatgcctttgttgaaactagcggagccctaaacactgttgctacatccctgatgaaggttgcaaatgacatacgcttactgggaagtggtccccgatgtggccttggtgagctcattcttcctgaaaacgagccaggcagcagtataatgcctgggaaggtaaaccctacccagtgtgaggctatcactatggtctgtgcccaggtaatgggtaaccatgttgctatcacagtgggcggatccaatggccactttgaattgaatgtgttcaagccaatgattgctaatgcactcctgcattcattaagattgctgggtgacgcatctgcttcatttgagaagaactgcgtgaggggaattcaagccaatagggaaagaatttctaaattactgcatgagtctctaatgcttgtcacatctttgaaccctaaaattggttacgacaatgctgcacagttgccaagaaagcacacaaggaggggtccactttgaaggaagcagcattgagcccttgtgtgctcacaagcgaa

SEQ ID NO: 6137 - DNA, 368 bp, Gossypium hirsutum
  Clone ID: LIB3196-054-P1-M1-A12
cccacgcgtccgcggacgcgtggggctgggtgacgcatctgcttcatttgagaagaactgcgtgaggggaattcaagccaatagggaaagaatttctaaattactgcatgaggtcaatgccacatcctgaatattttaagtttattttgataccatatgatagattgtcaagctaatgatcatatgttgtcttgtgacattttgactggtcttgcagtctctaatgcttgtcacatctttgaaccctgtaagttctcttccctgcttctatctaggatcagttgttcctcaatgagtcttttgcattttgaacacgtctctaatgatctctttgcttccagaaaattggttacgacaatgctgcagca

SEQ ID NO: 6138 - DNA, 490 bp, Gossypium hirsutum
  Clone ID: GOSHI-09MAY01-C7992_7
ctaacccctaagctatgagcccaattagacatataggaaattaaggaaaataaaacaactttcatttcacacggcccccgcggccctctgtttcgacgatcaaatgtccgaaatttctctgtttgtctgcggatccctctttctacatctcaacatctccaataaccagtttgggaaaagagaaaaaaaaaaagagagatctttaatctatctcatgagatttcattgaagaaattaaagtacccagaaaaagaaaaaaaaaacgatatgtatagcaatttcaaagaacaagcgatagagtatgtgaagcaagcggtacaagaagataatgcagggaactacagcaaagcctttcctttatacatgaacgcacttgagtatttcaagacccatttgaaatacgagaagaaccccaaaattagggaagctattacccagaaattcaccgagtatttacgccgtgccgaggagatccgtgccgttctcgatg

SEQ ID NO: 6139 - DNA, 696 bp, Gossypium hirsutum
  Clone ID: GOSHI-09MAY01-C7992_4
cttcatctgaccttgtgtcgaagtggatgggggaaagtgaaaagctggtctcgaaccttttccagatggcgcgtgatagtgctccatccatcatattcattgatgaaatagattccttgtgtggtcagcgtggtgagggcaatgagagtgaagcatcaagacgtatcaaaactgaacttcttgtgcagatgcagggtgtcggacatactgatcagaaagtcttagtgcttgcggcaacgaatactccctatgctcttgatcaggccatccgccggcgttttgataagcgtatttacattcctctcccagatttgaaggctcgacaacatatgttcaaagtgcatttaggtgatactcctcacaacttgactgaaagtgattttgaaaacttagctcgccggacagaggggttttcagggtcaaacatatctgtttgtgttaaggatgttcttttcgaacccgttcgtaaaacccaggatgccatgtttttctacaagacgcctgaggacatgtggatgccttgtggacccaggcaaccggctgctgtccaaatcaccatgcaggaattgggcgccaaaagactcgcagcacagattcctccgcctcctatttcgagatccgatttcgactaggtgcttgccagaacaaaggcccaccgtgagccaagctgatcttgaagtccctgagagaattacc

SEQ ID NO: 6140 - DNA, 642 bp, Gossypium hirsutum
  Clone ID: GOSHI-09MAY01-C7992_3
aaaacccgtttgcagaaaaataaaaaagaaggttcattctgtaattggtctccatgcaattccgttgagaaataaattccagtgaaaaggataaaagtatgtatagcaatttcaaagaacaagcgatagagtacgtgatgcaagcggtacaagaagataatgcagggaactacagcaaagcgttccctttatacatgaacgcgctcgagtatttcaagacccatttgaaatacgagaagaaccccaaaatcagggaagcaattacccagaaattcaccgagtatttacgacgtgccgaggagatccgtgcagttctcgatgaaggtgggccagggccggcttctaacggggatgctgctgttgccacgcgccccaaaagtaagcccaagaatggtggcggcggaggagaaggcggtgacggggaggatccggaacaggccaagttgagagctgggctcgattcggctattattagggaaaaacctaatgttaagtggaatgatgtggccgggttagaaagcgctaagcaggctttacaagaagctgttattttgcctgtcaagtttcctcagttttttactggaaagagaagccatggagagcttttcttttgtatggaccacctggaccgggaagtcatac

SEQ ID NO: 6141 - DNA, 1175 bp, Gossypium hirsutum
  Clone ID: GOSHI-09MAY01-C7992_2
aacaactctcatttcacacggttacttttgagctctgtttctacgatcaaatatccaaattttctctgtttgtcttcggatccctctttctacatctcaacatctccaatttcccctgcgggaaaagagaacaaaaaaaaaaaaaccggagagatctttaatctatctcatgagatttcattgaagaaataaaagtatccagaaaaaggaaaaaaacgatatgtatagcaatttcaaagaacaagcgatagagtatgtgaagcaagcggtacaagaagataatgcagggaactacagcaaagcctttcctttatacatgaacgcactcgagtatttcaagacccatttgaaatacgagaagaaccccaaaattagggaggctattacccagaaattcaccgagtatttacgccgtgccgaggagatccgtgccgttctcgatgaaggagggcctgggccggcttctaatggggatgctgctgttgccacccgccccaaaagtaagcccaagagtggtggtggagaaggcggtgatggggaggatccagagcaggctaagttgagagctgggcttaattcggctattatcagagaaaagcctaacgttaagtggaatgatgtggctggtttagaaagtgctaagcaggctttgcaagaagctgttattttgcctgtcaagtttcctcagttttttactggaaagagaaggccatggagagcttttctgttgtatgggccacctgggactgggaagtcatacttggccaaggctgttgcaactgaagctgactctacattttttagtgtttcttcctcagaccttgtatcaaagtggatgggggaaagtgaaaagctggtctcgaaccttttcgagatggcgcgtgatagtgctccttccatcatattcattgatgaaatagattccttgtgcggccagcgtggagagggcaatgagagtgaagcttcaagacgtatcaaaactgaacttcttgtgcagatgcaaggtgttggacataatgatcagaaagtcctagttcttgcggcaacaaatactccctatgctcttgatcaggccatcgcggcgttttgataagcgcatttacataaaggggaataggatgttgttaatgagcatccttagggggcactcttgttaacatctaatgcattgaaaa

SEQ ID NO: 6142 - DNA, 960 bp, Gossypium hirsutum
  Clone ID: GOSHI-09MAY01-C7992_1
cgacgcaagagaagagtgcagataaactttccctaattcattgcaattagcatcagccaaatccctaccttacatccttccctgtcctcccatccaatccctaaatttcacaatgaacaaagaaaaaattgattaatttttcatcgatcccatgcaatttctttgagaaaatatatctaatacccagaacaaaagaagaagaaatgtatagcaatttcaaagaacaagcgatagagtatgtgaagcaagcggtccaagaagacaatgctgggaactatagcaaagctttccctttatacatgaacgcgctcgagtatttcaagacccatttgaaatacgagaagaaccccaaaattagggaggctattacccagaaattcaccgagtatttacgccgtgccgaggagatccgtaccgttctcgatgaaggtgggcctggaccggctactaatgggggcgctgctgttgccactcgccccaaaagtaagcccaaggatggtagcggcggaggggaaggaggtgatggggaggatcccgatcaggctaagttgagagctgggcttgattcggctattattagggaaaagcctaatattaagtggaatgatgtggctgggttagaaagtgctaagcaggctttgcaagaagctgttattttgccagtcaaatttcctccattttttactggaaagaaaaggccatggagagcttttctgttgtttggggccacccggaacgggtaagttctccttggcccaggctgttgcacctggaaccaaatccgcgctttttagtgttcctcatcggaacttttctcaaagtggaatggggaaaccaaaaacctgttccaacctttttcaaagggccgtgacgtgcccctcatccttttcttggagagtaaatcctttgtggacccctggtggggcaataactaaactcaaactttcaactgactttggc

SEQ ID NO: 6143 - DNA, 548 bp, Gossypium hirsutum
  Clone ID: LIB3585-016-P1-K1-C4
cccacgcgtccgcccaccctccaaatctctagttttctataatcctgtttggaaactaagaaaaagtttaaaattttcactggggatgcaattccactgaaaaaaaattaaaacagccagaaaagaagatagagaaatgtatagcaatttcaaagaacaagcgatagagtacgtgaagcaagctgtacatgaagacaatgaagggaattacagtaaagcttaccctttatacatgaacgccctcgagtatttcaagacccatctgaaatacgagaagaaccctaagatcagggaagcgattacccagagattcaccgagtatttgcgtcgcgctgaggagatccgtgccgttcttgatgaaggtgggccaggaccggcttctaatggggatgctgctggtgctacgcgtccgaaaagtaagcccaagaacggtggtggcggaggtgaaggcggtgatggaggggaggatccggaccaggctaagttgagatctgggctttaattcggctattaattaaggaaaaacctaatgttaagtggaatgatgt

SEQ ID NO: 6144 - DNA, 414 bp, Gossypium hirsutum
  Clone ID: LIB3272-058-P1-K1-H8
ctcgtgatagtgctccttccatcatattcattgatgaaatagattccttgtgtggtcagcgaggtgagggcaacgagagtgaagcatcaagacgtatcaaaactgaacttcttgtgcagatgcagggtgttggacatagtgatcagaaagtcttagtgcttgcagcaacgaatactccctatgctcttgatcaggccatccgccgccgttttgataagcgtatttacattcctctccctgatttgaaggctcgacaacatatgttctttttgaacctgttcgtaaaacccaagatgcaatgtttttctacaagacgcctaatgacatgtggatgccatgtggacccaagcaagcaggtgttgtccaaatcactatgcaagaattggcagccaaaggacttgcagcacaggttct

SEQ ID NO: 6145 - DNA, 643 bp, Gossypium hirsutum
  Clone ID: GOSHI-09MAY01-C7952_1
gatgctttgaatagagaagttagagaaaagaaagagaggctggagcgtgagaggcaacaaagggaaagagaagaggaagagagagagcaaaggaggcgtgaagtagagagggaaagggaggagaaggagagagaacaaagaaggcttgagaaagagagggagcgaattatgcagatggagagggaaagggaaagggccagacaagctgttgaaagggctactagagaagcacgggaatgagcagctgctgaagctcgtgcgagagctgaaagggcagctgttgaaaaggcagccactgaagcccgagaacgtgcggaaagggctgcagtgcagagagcacaggctgaagcccgcgaaagggcagcagctgaggcaagagaaagagcagaacgagctgctgcagaagcaagagagaggactgctgcaacaaaagctgaagctgaagcaaggcttagagctgaaagagctgctgccgagagggctgctgctgaagctcgagaaagagcagctgcttctgcaagggcgagccagcaaaagaatgacgatgatcttgaatcattctttatgggtttctcgagcaagcagtgcaccaaggccaagagctaactcatcagatcccctgtttgatggacaaaacaaggga

SEQ ID NO: 6146 - DNA, 492 bp, Gossypium hirsutum
  Clone ID: GOSHI-09MAY01-C7962_1
cggacgcgtgggcggacgcgtgggcggacccgggtcgagaaaactcagaaacacgcaggaaacccaaagtctttctcctttttttccccctctttttttatacacaaaggtaataattttcgaaaatggcgtttgctgttacctcctccccggctgcaatttctggttccagcttttctcgttcaagtgcctcctctgacctcaaaattccgcaaattggttcatttcggctagcggatcgccatgcaacggtgaatctatctcaaaagcgttgcgcagtgaagcccgtgaatgcggagccaaagaggaacgattccatgctttctcatgctgcaaccacctctgctcctgaagtgtcggaaaaagttgaggtggaggattttgaccaattggccaaagaacttaacaatgcttctccactcgaaatcatggataaggctctggagaaatttggaaacgacatcgctattgctttcagtggagcggaggatg

SEQ ID NO: 6147 - DNA, 603 bp, Gossypium hirsutum
  Clone ID: GOSHI-09MAY01-C7932_1
acccgtccgcccacccgtccggcgagaagagatcttcaccctaaaaaaataactttaaattcctcctgggcgttcttttttaaacctactgtttaattcctaaaaactaaattttcctggtaataataatacctataattaatcaatgatggaaaagtaaaaacccctgcctccttaataagtaatccgatattagccgtctgattcttttcccccagaatcagtaacccatttatctggaaaaaaaaggacggaaattccgattttatcttgaggaaattgaagaaaaaaaagggaaaattcattgtaagtatgcgaagttgggtgatggattcaggcgacggagcaactacttctcaacaaatgggatcgttgaccgaagatcttcgtgagagacatcaacaagaattagaaaacttgacattaacaacacagcccttcaaaacattaaggctatttcttctggctatctttcaatattataagcgattagcattatatcttttggcaaagggtagttggcttgcgctttcaagcactctaatagcagcttttggaatttttgcttgtaacaatcgaggtcctcatgaaaagcatgttgat

SEQ ID NO: 6148 - DNA, 420 bp, Gossypium hirsutum
  Clone ID: GOSHI-09MAY01-C7882_1
ctttgtgaatcctttcaacccttgctttaacgtcccttttttttttctgaattacagagagaatgggattttccaaagacaagaggaagcagctgaacctgaaactatatgtatcaaacaacaaagcgagctaagatttgatggagatagcaatgaagcagttgaagaagggaaagcaggagagtggttgaacctgagcttgggtgggaattcagtatcaacagcaggagattctgacactcaactaacaccagtttcaaccagggttttctcatgtaacttctgcatgaggaagttttacagttcacaagccttgggtggccaccaaaacgcccacaagagggagaggggtgcggccaggagataccactcccagcggatgacgtcgtcgtctatgatggctttgccaatgattagtag

SEQ ID NO: 6149 - DNA, 831 bp, Gossypium hirsutum
  Clone ID: GOSHI-09MAY01-C7872_2
acctcacctcacctcacctcacctttctttccatttccactccctttctctatctttacgagttcagtagagaaagaaagcaggatgatgctcggaaaacgctcacgtcagccgatcaagaggacgacaagcatgacgggtatcaccgtcgatgtctccgacgcggaggatgtcgtcgaccagcaccaccaagactcaatcatatctcatcttcctccccctcaaatccaccctatgcatgaatcccccgacggtacctccctctacgatcaccgtttcttggccatggtgtcgcccagaaacccaacttctttcactaaccgtatcgtcgacagtagcaccacagacactgcttcttttttgcgagcttgttggctttgtaatcgccgcttagctcctggtcgtgacatatatatgtatagaggggatacatcgttttgtagtcaagagtgcagagaaaaacagatgaagcaagatgaaagaaaagaaaagctaaacattaattcttcaaagaaagaagaccgccatgcccattcctcttcaaccaccacctcctccaagacttctaaagcgaagcctgtggttgctgcttgaactttgaagaaaggtagatcgatgagtaatttccataggaattaagccaaaatccaaacccagccagcctcaaaagaagaagagtagaaatcaatgggctttcgtcatatataatagtgggtgcagttaaattattataaagatgtggatggtgatgcaaataggcaaagctttaagcttcttatacatggattccaatgttataactctttctaatatagtttccttttttactac

SEQ ID NO: 6150 - DNA, 507 bp, Gossypium hirsutum
  unsure (1)..(507): unsure at all n locations
  Clone ID: uC-gsronu33B136h11b1
atgcgttttctttgccgtccactcgtgcagacacacgtgcggggctcatacgcatacatatatatagcaggatgatgctcggaaaacgctcacgtcagtcgatcaagaggacgacacgcatgacgggcatcaccgtcgatgtcgtcgaccaccaccaagacccaatcatatcccatcctccccctcaaatccaccctttgcatgaatcccccgacgctaactcccgttacgatcaacgcttcttggccatggtgtcgcccagaaacccagcttcttttactagccatgtcatcgacagcggcaccactgccgctgctccttttttgcgagcttgttggctttgtaatcgccgcttagctcctggtcgtgacatatatatgtataggggggatacagcgtttngtagtcaagagtgtagagaaaaacagatgaagcaagatgaaagaaaagaaaagctaaacggctagagttggttgaaccaaattctaacagattatttaaagaaga

SEQ ID NO: 6151 - DNA, 598 bp, Gossypium hirsutum
  Clone ID: GOSHI-09MAY01-C7862_1
tgtcttatcagcttataaactaagaggtgactttgcgagactcaacttccctaaccttcgtcaccacggttcccacgtaggtgacgtacaagcctttgccttcctctgttgacgctaagcttcaagccatttgtgagagcttggtacaaaaccctaagcaagggagcaagaagaaatcatccaaggttacggcagacaccaaaagcaggaacaacaaaaaatccgacatggcagagccaaagcccgaggagaatacagcgaaagtggagaactcctcatctttgtctacggttcaatccgagagtgagggttcggctgtatcttcacctttatcagatcttacattctcggatttcgacgaacaaccatggccggaagtcgtttcttcttcggaaacttttatgttgtccaagtacccttcagagatcgattgggattccattctaaaagcctggagggaaaaacccatgtgtacctttctgtgtaagtcttttgatgtttaggaagctcctttcatgtatttgggtgtattttgtaaagctagctgcaatggggtttttggcagttgcaggggcctgtattttaggttattaaaagt

SEQ ID NO: 6152 - DNA, 639 bp, Gossypium hirsutum
  Clone ID: GOSHI-09MAY01-C7482_1
tcgcccacgcgttcgcgagccaaaacgagtggttaccatttttgaacgattagatttttagatggcatctttattccatggttgttttttgttcccgagggagcaatcccctgtaccaactccagaaacacagtttctttctcacttgtcttccccccctcacccctcaatggctgcaatcactaatttcttaactaagccacctacttccgatcttcacttcaccccaaaactcacttctctttgctctcatgcttcttttctaccatcccttgcgactaggcccagatctttttcaacaaagctaggaacaagcacaagctctcgcttcattaccaaggctacagctgctcctgggaccaagaatgctccgagtgatgagcgagttcagaaggttcacagcattgaggaattcgatgaagctctcaggaaggctaaaaacaggcttgttgtggtggaatacgccactagcttcagctatcatagcagtaaaatttacccgtttatggtagaccttagcaggacatgcaacgatgtcgaattcatcctcgtgatgggtgatgaatcggacgagactagggagctttgcaaaagagagaaaattacgaaagtcccgcactttagcttctacaagagcat

SEQ ID NO: 6153 - DNA, 745 bp, Gossypium hirsutum
  Clone ID: GOSHI-09MAY01-C7772_1
cccacgcgtccgcccacgcgtccgagaatcagaaaaataaacagagagagggaaaaaaacaataaagagaaaaaatggatgaagaggagcatgaggtgtacggaggggaaatccccgacgaaggagagatggagggcgaattggaccctcagaacgccgacgtcgacatgtccgccgccgatgaagacgctgtcaaggaattggacgagatgaagaaacggttgaaggaaatggaagatgaagcggcggcactccgggaaatgcaggccaaagtcgagaaggaaatgggtgctgttcaagatcccgctggtgcaacagctaatcaggcgagcaaagaggaagcagattcacgatcagtttttgttggcaatgttgattatgcatgcacacctgaagaagtgcagcagcattttcaatcttgtggcactgtaaacagagtaaccattctgacggacaagtatggtcaaccgaaaggatttgcttatgtagagtttctggaagcagaagctgttcaagaggctcttgtgctgaatgaatctgaattacatggccgccagttgaaggttatgccaaaaaggactaatgttcctgggatgaagcagtaccgtccaaggcgattcaatccttacatgggctaccggtccaggaggccctatataccgccttattcctattctccttatggattcggcaagattcctagattcacgaggccgatgcggtatatgccctactactagaagac

SEQ ID NO: 6154 - DNA, 624 bp, Gossypium hirsutum
  Clone ID: GOSHI-09MAY01-C7712_1
agcttttctccgtgtcttgcttgtaactcatcctcttattattttctttaaataaaacccattttcaagactcagcctttgttcaaatttccaagctgcaagcttgaaaagattgacactttcatggttcaaagcttgtagctccctctcattctttgacaaagcccttgttaacctttgtcttcttttctcttgatctatcaaggacgggaaaaaaatgtttggtacccaaagtaaaagagaccttgctttggaattgcaagcacaatttccaattttaaggccaagcatccatgcaagaagagctaatcttacagtgaaattccaagacctttatgggtttactgttgaaggtaatgtggatgatgttaatgtgttgaatgaggtaagagaaaaggtaaggcaacaagggcgagtttggtgggcacttgaagcaagcaaaggagccaattggtatttacagccacaagtttcttcattatcggaaggaattgtgttgaaatcttcactcaaattggcagctttggctaattctattacactgaagaggcttattagaaaggtattccccctgtacttaggcctaaggtttggttttcgctatccggtgccgccaaaaaaaat

SEQ ID NO: 6155 - DNA, 442 bp, Gossypium hirsutum
  Clone ID: GOSHI-09MAY01-C7702_1
ctttttgttaatctctctgcctggaactgcaattaaaaactgtccattgacactgttctcgtttttttctctatttgaacaagcatgggtttaggccataaaatcaggaccggatatgcgaagctcagctttctttcgagactggctcgtcagtctcatgatgctaagactcttccagcattgccctgccaaatcatgaagcaagatggagatagactacgatcccttgcactctttggggcaggggtctcagggcttttgggttgtgctaccatagcttattctgatgaggctgagcatggtttggcggttcctaactatccttggcctcatcaaggcatactaagctcatatgaccatgcttctatgcgtaggggtcaccaggtctaccaacaagtctgtgcttcttgtcattcaatgtctctaatctcatttcgagatc

SEQ ID NO: 6156 - DNA, 647 bp, Gossypium hirsutum
  Clone ID: GOSHI-09MAY01-C7732_1
gaactaggtaaattgatcatcgttaatcatatttattttatcatgctcaagaaagaaaggggactgctcatactttgcatccatggctatccccgagctctggcactcttggcgtcaccagcattgacttcttcgtcattccaaaggttcacccagctgtggcacccgacctgagaggctacggcgacacggatgcgccagatttgggcaccacttatacctgcttccatatactgggggatttggttcagcttttaaatattatttcccctaacgaacacaaagtgttggtagtagggcatgactggcgacctgccatagcttcgtatttgtgtttgtttacgccagacaaagtgaaagctgtgttcaacctcagtgtgtcctttattccacataatccacatatgaaccctattgatgggtggagagctatctatgggaatgattattacatgtgtacattccagcaacctggaaaaatagaagctgagtttgcggagatgggtacagagacagtagtgaaggcatttctgacatacagagttcctggtccaataatgttacccaaagggaaaccatttggacattcagcggataccccaattgctttgccttcttggttatcagaagaagagggtcattactat

SEQ ID NO: 6157 - DNA, 465 bp, Gossypium hirsutum
  Clone ID: LIB3493-024-P1-M1-H5
gttgatttcactgaaattatccacagttgaatcgagggttccaattagttagtcgcagtgagaaagaactacttaagtaccatcttaattaacaaaacaggccaaagatggaaggggttgagcacagaatagttaaggtgaatggcataaacatgcacgttgcagagaaggggcaaggcccggtcattcttttcgtccatggcttcccggagctatggtactcttggcgtcaccagattgctgctttgtcttccaagggttaccgagctgtggcccctgacctgaggggctacggtgacacggatgctccggattcagtcacctgttacacctgttttcatatagttgggggatttagttggcttttaaacaccatcggccctgacgaacaggtgttcgggttggccatgattgggagctatcattgcttggtatttgggcttgttcaggccagacaaagtgaaa

SEQ ID NO: 6158 - DNA, 433 bp, Gossypium hirsutum
  Clone ID: LIB3165-020-P1-K1-D10
gcgaaaaagctccacaaaagaaactgaaattataggttgtggatgtgaaagatggaaggagttgagcatagagttattaaggtgaatggcataaacatgcacgtagcagagaaaggggaaggcccactcattcttttcatccatggcttccccgagctatggtactcttggcgtcaccagattgcttctttgtcttccaaaggttaccgagctgtggcacccgacctgagaggctacggtgacacggatgcgccagatttggtcaccagttatacctgcttccatatagtgggggatttggttcagcttttaaatattatttcccctaacgaacacaaagtgttggtagtagggcatgactggggagctgccatagcttggtatttgtgtttgtttaggccagacaaagtgaaagctgtgttcaacctcagtg

SEQ ID NO: 6159 - DNA, 439 bp, Gossypium hirsutum
  Clone ID: GOSHI-09MAY01-C7722_1
cccacgcgtccgcccacgcgtccgcccacgcgtccgaaaaaaggtttaaaaactcgctcaaccccttttatgtccggcccaactccggccgtggtccaatcatcggaccgacgtcgtccaccgcgccggccaccatacacggtggccgaaaatcgaaagaaggttggggaagaagtcaacgaggtaggtggccattttggtgttagcgggctaggggagccgaccctcgagtgaagaacgtgctgacgaggcacgtgggcgatagcagggaggcacgacgctaaagggtggctaaggtttcctttgctgaaactagtttaggtagtgggcttatcgggcttagggttattttaattttgggcctattgggttgtaattttggctgggtttaattgtgtttaatgtttgagttgatgtaatgggcttattttggtttagt

SEQ ID NO: 6160 - DNA, 371 bp, Gossypium hirsutum
  Clone ID: LIB3120-045-P1-K1-F6
aaaaggtttaaaaactctctcaaccccttttatgtccggcccaactccggccgtggtccagggatcggaccgacttcggccaccgcgccgttcaccatacacggtgtcctaaaatttattgatggttgttttgttttattttgtattttttattttttttttttttttttttctcttttttttttttttttcttttacttttttaattgttttttttttatttgttttttgttttttttttttgttattttttatttttaatttttttgtttttatttagttttttttttttttttttttttttttttttttttttttattttttattgttttttttttttttttttttttttttttttttttatttattt

SEQ ID NO: 6161 - DNA, 449 bp, Gossypium hirsutum
  Clone ID: GOSHI-09MAY01-C7642_1
accactacttgttatttgcattaaccttcactctcctctttattcatcaaccctcgtattagcgtttcttcttcttcttcttcttcaaaagcttcatcccgccatcttccctcattctcaaaacgttttggcgtctatttgccaggtttataactcagaaatcaaagctcgaattagcgattgtgccaacaatacgtatgaagtcagggatgctaagtttaagatctggaaacccttgctttcaacagcattggcagcagccatagtcgcttttggctctgaatatctctgctatggcgtgaacctaataagtttgaggcagaaactcgcggtgaatttaggtatcgcgatctgctgcccagcttggttctgcggatttgaaaaaagctgttcacgtgaacgaaaatttcagaagggcaaacttcacatctgctgatatgagggaatct

SEQ ID NO: 6162 - DNA, 418 bp, Gossypium hirsutum
  Clone ID: GOSHI-09MAY01-C7142_3
tttcacgcgtccgcactttgttctttttcttctctcttcaaaatctaacctcgaaagctttagagattctcattttgctaagcgtattttagatcgggagtttagaggttattcattaatggcggatacagagacatttgctttccaagctgagatcaatcagcttcttagcttgatcatcaacactttctacagcaacaaagagatctttcttcgtgagctcatcagcaacgcatccgatgctttggataagatcagatttgagagcttaacagacaagagcaagctagatgctcaacctgagctcttcatccacattattccagacaagactaacaacacactgtccatcattgacagtggtgttggcatgactaaggctgatttggggaacaatcttggtacaatcgcaagatct

SEQ ID NO: 6163 - DNA, 996 bp, Gossypium hirsutum
  Clone ID: GOSHI-09MAY01-C7142_2
cattttctcctctttctctctattcgaaatttgaatactctctcattttacgatatttcttagtgtgttttggatcgggaggttagaggtttatcatcaatggcggatactgagacgtttgcatttcaagctgagatcaatcagcttcttagtttgattatcaacactttctacagcaacaaggagatcttccttcgtgagcttatcagtaacgcctctgatgctttggataagatcaggttcgagagcttgacagacaagagcaagcttgatgcacagcctgagctcttcattcatattgttccagacaagaccaataacactctatcaatcattgatagtggtattggtatgaccaaagctgatttggtgaacaatcttggtacaatcgcaagatctggtactaaggagtttatggaagcactggctgctggtgctgatgttagcatgattggacaattcggagttggattttactcggcttacttggtcgccgaaagggtggttgttacaacaaaacataatgatgatgagcagtatgtgtgggagtctcaagccggtggatcgcttcaccgtcacgagggatacttccggggagaaccttggcaggggtactaaaattacccttttcttaaaagaggatcaacttgagtatcttgaggagcggcgtttaaaggacttgattaagaagcactctgagttcattagctatcctatttctctttggattgagaagacaaccgagaaggagatttctgatgatgaggacgaggaggataagaaggatgaggaagggaaagttgaggatgtagatgaggaaaaggagaaggaagagaagaaaaagaagaagattaaggaggtctcgcatgagtggtcattggtgaataagcaaaagccgatttggatgaggaaaccagaggagataaccaaggaagaatatgctgcattctacaagagccttacaaatgattgggaagagcatttggctgtcaagca

SEQ ID NO: 6164 - DNA, 900 bp, Gossypium hirsutum
  Clone ID: GOSHI-09MAY01-C7142_1
ctaaacggccaatagaaggatctagaaacactactgaagcattttctatataataatgtcgttacgcgctacttattgtctcagtaatctctcttcacctgaatataatcttttgcttacggtttttcctgcgtgcttttgaattggggttttgagttattctcaatggcggacacagagacgtttgcttttcaagctgagattaaccagcttcttagtttaattatcaacactttctacagcaacaaggagatctttcttcgtgagctcatcagcaacgcttctgatgcattggacaagattagattcgagagtttgacggacaagagcaaacttgatgctcaacccgagctgtttatccacattgtccccgataagacaaacaatactctatcgatcattgatagcggtattggcatgactaaggccgatttggtgaacaatcttggtaccattgctaggtccgggactaaggaattcatggaggcattggctgctggtgctgatgttagtatgattggacaattcggtgttggtttcttcccggcttacttggttgctgagaaggttattgtaaccgcctagcataatgatgatgaacaatatgtgtgggagtcccaagcgggtggttcattcactgtggccagggacactgccggggagaaccttggtaggggttcaaagacaactctggggtgagacaggatcagcttgagtaccttgaggagcgacgtttgaagaatttgattttaaagcctcctgcattcatcagcaacccgatttccctttggattgagcagaccgccgagaaggagatttctgatccatgaagatgaggaggataagaaggaccaagaagggacagtttcggatcgttgatgaggagaaagagaaggaagg

SEQ ID NO: 6165 - DNA, 384 bp, Gossypium hirsutum
  Clone ID: LIB3166-014-P1-K1-D9
gtagtctcttaacttgccagtcaacttcctgcttttcaattgcggtaaggaggcatggtgaatggctgcacagagacgtttgcttttcaagctgacattaaccatcttgttagtttaattatcaacactatctacagcaacaaggagatctttattcgcgagctcatcagcagcgcttctgatgcattggacaagattagattccagagtaagacggacaagagcaaacttgatgctcaacccgagctgtttatccacattgtccccgataagacaaacaatactctatcgatcatagatagcggtattggcatgactaacgcctattaggtgaacaatcttggtaccattgctaggttctggactaaagaattcatggaggca

SEQ ID NO: 6166 - DNA, 169 bp, Gossypium hirsutum
  Clone ID: uC-gsronu33B146b11b1
tccatgcgtccgcccacgcgtacgaagctgatgtggtcaacaatcttggtacaggcgcaagatctggtactaaggagtttatggaagcactggctgctggtgctgacgttagtatgattggtcaacttggtgttgacgtttacttgctttactaaatttttgggatgat

SEQ ID NO: 6167 - DNA, 888 bp, Gossypium hirsutum
  Clone ID: GOSHI-09MAY01-C107159_1
cttccacattgactgcggcagttccactccttccaccgactcctacaacatctcttggctacccgacaaattcttcactggcggttccacctccgtggtctccgagcccctacatttccatcttcaacacgaaaagactctccgttacttcccactctcctccggtaagaagaattgctacaatatcccccttcctgctggccgttactacatccgtacttttaccgtttacgacaactacgacggcaaatcccattccccttccttcgacgcttctgtcgagggcactctcgtcttttcctggcgctctccttggcccggagctctcactcgagatggcgcttactccgatctctttgccttcgtcaaagacggtcaactcgatttctgtttttacagcattgccactgaccctcccgtcatcgcttctctggaagtcgtccagatcgatcctttgtcatataactccgcccaaaccagcgatagctacattctagtcaactatgggcgactctctcccggttcatcacaatggggacccggtttcacatccgacccggacgccttcggccgctcctggcaatccgattccgattaccgagctggaaagtcggaatccgctaaagttataaccactaaagaaaaattaactggtaccgataaagcgccgaattactttcccatgaaattgtaccaatcggcggtgacaattgagggacgtctggaatacgaattaccagtggatgcaaagcttgattacttggtgtggtttcattttgcggagatcgattcgacggttaaaaaggcaggggagagagtgttcgatgtgctggtcaacgataagaatgtgagtagagtggatatattaaaggaagttgggagctttgc

SEQ ID NO: 6168 - DNA, 637 bp, Gossypium hirsutum
  Clone ID: GOSHI-09MAY01-C7132_1
gttctgggttttagctgcaattttttgcactgaaagaggacttggctgtgaaaaattgaacttcaagctatttaggactctttaaattttctagtttgtgtcatagtgctgggaaaatggcgaatgctatatcgatatcgccatattttagaccttcagatactagatcaatgggggtacttaatgttcttggtgggagagtattaatggagaactctttagggaaacttaggtgcgggtcttcgagtccgagccaaaggtctaatatgcctcattttagatgttccaccaactcccatagcgttagtccgtatcaaaataaggacccttttctgaatatgcacccagaagtttcgatgcttagaggtgaagggaatcctatagtaacaaacccgagaaaggatagctccagtcccgagagcttagggggcatgacgggttcaagtaattatagtgaggctaagatcaaagtcattggtgtcggaggcggtgggtcaaatgctgttaaccgtatgatagagattgctttgaaaggtgtagagttctggattgttaacactgatattcaagccatgaaattgtcacctgtctttcctgagcaccgtttgcaaattggtcaggagctaactcggggtct

SEQ ID NO: 6169 - DNA, 504 bp, Gossypium hirsutum
  Clone ID: GOSHI-09MAY01-C7082_5
cccacgcgtccgatcagtactgcattgttgtaaagtttttcttaattttcttcctttgggaaatcctgaggaattaacacttgagtgttagctcatctcgcatgagctattgccaattgtcgattttgatgacaacaatctgtagccttcttgaaaagattattgatagcaaaaaccatgtttttgttcgatttgtgtgatgtatggtgataaaagaagactttggattttccatttggtcactatatatctttagtttgatattattgaatcgagttagactcgttttattaagtccattgatggaagtgttacttgccttatcttctttgttcgcttcattgatattgtacctggtggatggtggtgatttgtgtatagtgcaaggtgtgcatgcaaacattcatctgtactacaacagaagtgaaatgccgggagcatgccgaggcgaagcattctaaatccgacctatacacatgttttcctcaccttaaaaagatcaca

SEQ ID NO: 6170 - DNA, 774 bp, Gossypium hirsutum
  Clone ID: GOSHI-09MAY01-C7082_3
ggcgtattcctttatcgacaattgacagcctctatccttttggcccacacttgcattactgcattcgtatagacacgctttgcggatcattgtcttgcctgtttactgccggcaccccccccatttgccttatttggcctttatcatctctgatacgtccctcttccaagttttcacttccaattcgatcaaaaaacccttctttttttccctcatcaatccaccatgggaggaggaaatggccaaaaatccaagatggcccgtgagaagaacttggaaaagcaaaaagctgctgccaaaggaagccagcttgagtctaacaagaaggccatgtccatccagtgcaaggtgtgtatgcaaacattcatgtgcaccacaacggaagtgaaatgccgggagcacgctgaggcgaagcatccaaagtccgacgtgtacgcgtgctttcctcatcttaaaaaataaacatcgaaactccacagaaagaacggggatgtcaagacagcttgtaatgcatatcatctatctatgttgtatcttggtactctacaatttatcttaaattctctttcacaagcctgtaaaaaactcactagctgattttactcgtgcaaactaaatgtttgtgttcaatcatggatttgtatgataacagagctttgaaggagaaattccagtctttcacataaaaaaaaaaaaaataaaaaaaaaaaaaaaataaaaaaaaaaaaataaaaaaaaaataaaaaaaaaataaattttataatattataaaaa

SEQ ID NO: 6171 - DNA, 611 bp, Gossypium hirsutum
  Clone ID: GOSHI-09MAY01-C7082_1
ccctctcgtccgattaattctcccattttcctttttgccttctagaaatttccaagttcttcttcaaaaccctcacatcccattcgatcaaaagaactcaaatctttatcatccaccatgggaggaggaaatgcccaaaaatccaagatggctcgtgagaagaacttggaaaagcaaaaagctgccgccaaaggaagccagcttgattctaacaagaaggccatgaccatccagtgcaaggtgtgcatgcaaacattcatctgtactacaacagaagtgaaatgccgggagcatgctgaggcgaagcatcctaaatccgacctatacacatgttttcctcatcttaaaaagtagcacactggggaagtggagatggcttgtagcatgcatctatcttgtcccattggtactgtatgagtaacttcttaaaatctctctcacaaaagccctataagctctcacttggtgatttcgatgatgcaattgtcatgtcgtgttctgtctcgatacttgcttgttgcttgattttgatatgattaatgtggtaaagctggtggtgttatttgtggagctgttttttcttaacctttttttgccactttgtctatgaa

SEQ ID NO: 6172 - DNA, 506 bp, Gossypium hirsutum
  Clone ID: uC-gsflmaxxa029h01b1
gggaggaggaaatgcccaaaaatccaagatggctcgtgagaggaacttggaaaagcaaaaggctgccgccaaaggaagccagcttgattctaacaagaaggccatgaccatccaggtagtatctttgcttcatttgttaggttcaacactctgtttttttttgctcgatctgttggctttttttttgatcaaatgatttatgattattttgtttccttgtacatatagatcaaacttgacaaattgggttgaatttattttcactgtttttttcctgggttaatatattcatttcttgttagttggttttcactatttgatttgtgtacatgctttctagattcttacattaagttgtacagctactggaacttatttgcctggattccctgctaaaaattgatgtccaaatcaaagtttgggagttaatcatttacttaaaaaagtaaatactttttattttccttttaagattctagtccaaaagttgatgctcggtttttttt

SEQ ID NO: 6173 - DNA, 437 bp, Gossypium hirsutum
  unsure (1)..(437): unsure at all n locations
  Clone ID: LIB3148-047-Q1-K1-E11
cccacgcgtccgtgaatttagacacattttgtgaactacattatcagatacatgactcgggttttggtttcttgttcatatcattgttgtcctttgctcgggttcctctgataacataactggtttatgatggtgcctgaaaacagtgcaaggtgtgtatgcaaacattcatgtgcaccacaacggaagtgaaatgtcgggagcacgctgaggcgaagcatccaaagtccgacgtgtacacgtgttttcctcatcttaaaaaataaacatcaaaactctacagaaagaacggggatgtcaagacagcttgtaatgcatatcatctatctatgttgnatcttggtactctacaatttatctttaattctctttcacaagcctgtaaaaaactcactagctgattttactcgtgcaaactaaatgtttgtgttcaatca

SEQ ID NO: 6174 - DNA, 1334 bp, Gossypium hirsutum
  Clone ID: GOSHI-09MAY01-C7052_1
cgcctattcgccatttttagatccatcacttctgtttgtaactgaaaaaacaaaacccaatttgaaaccctaacaaagaaccagggaacaccgaaggaagaatctcgagaaccatggacagagactggggctccaaacccggttctggaggtgctgcctccgcccaaactgaagccatggaccgccgcgagcggctccgtcggcttgctcttgaaaccatcgatctcgccaaagatccctatttcatgcgcaaccacctcggcagttatgagtgtaagctttgtctgacgctacacaacaatgaagggaactatttggcacatacgcaagggaagcggcaccagaccaacttagctaagagagcggcgcgtgaggctaaggaggctccggctcagcctcagcctcacaagcgtaaagtttctgttcgtaaaacagtcaaaattggtaggccaggatatcgtgtgacaaagcaatatgatccggagaccaagcagagatctcttctcttccagattgaatatcctgaaatagaagacaatacaaagccaaggcaccgtgttatgtcgtcttatgagcagagagtgcaaccatttgataggagatatcagtatctcctttttgctgcagaaccctatgagatcatagctttcaaggtcccaagcactgagatcgataaatccactccaaaattcttctcgcattgggattctgactcgaaaatgttcacattgcaggtatattttaaaaccaagccactagaggtgaacaaacctccacctcctcctgcagtcaatggtactgcggccccaggtgctcctccaaggcctttgcctccaccacctcatgctccagcaccgcctcctcctcctccacctcaagggctgccaaaccctcctaggggccctccacctccagctcctggttcattaccgccgcctccgccccctatgggaaatggtcctaggcctatgcctcctggtggcaaccctatagccccaccaccacctcctgggggtagcgggacaatgggaaatttcactcctaggcctccaactaaccctcctccacaaggtgtccctggtcatcagatgcagggacagggtttgctcccgccgcctctcacctcctagcatgggacagtagttcacctggcttccagtgtcctgttatgccatatttgaatcatttttggtcagattaaactggtaattggatttattattacctgagcaaaaaaacctacttaagatgtatgtatgtttgagtttgtggtacttggttttaaatgttagcaacagcattataatttgcttaaacaaaggctttaatggttg

SEQ ID NO: 6175 - DNA, 1094 bp, Gossypium hirsutum
  Clone ID: GOSHI-09MAY01-C7042_1
cccacgcttccgatgcgaggccatttctttaaattagagtatgtaaagcatcgaacgtctgtatctggtgcaatgattgattcacacgtcacagcggaatattggaagaatacccacgcggccgcccgcgcggccgaagattaaaatgcctgagacctatgttgttcaccttggaaatagcaatgaactgatgcaagttgcagaagacagtgtggctaaaagggttttgcgtgaacatgttcgtgaatcgcttggagtgcgcaatgacgatttactctttgccttaataaatagtgtttcacgaggaaaagggcaggatctctttctacgcgctttctacgaggccttacaactgatcaagcaaaagaaaatgcaggtgccaccattgcatgcagtaattgtgggaagtgacatgagtgcgcatacgaaacttgaaatggaattacgagcttatgtaacacagaagaaaattcaagatcgtgttcactttgtgaacaaaactctaacagtagctccatatttagctgccgtagatgttcttgttcagaattctcagggacggggagaatgctttggacggataacaatcgaagcaatggcatttcagttgcctgtgctgacagggaacagctgccgggggcacaacggaaatagtagtgaacggcacaacaggtttattgcaccctgctgggaaagaaggggtgacaactctggcgaaacatattgtgaaactagctacgcatgtagagaggaggcttacaataggaaagagagggtacgaaagggtgaaagaaagatttctagaacatcacatggcagagagaattggtgaagtacttaaagaagcgttgaggaagtctaaaatcagatcaagtaaacacctttgacagtgaacacccccgcccaccataaaattacaatgaggtatatccagttttcaatcaatataatggagtgacatctttaattctggcctttttcttttcttcttctgtcttcttttcaactagttcgccgtatgtaaattattttacattgttataacacaatgttcagtagctggttatctggtcgacaagtcttttaaattttac

SEQ ID NO: 6176 - DNA, 382 bp, Gossypium hirsutum
  Clone ID: LIB3165-009-P1-K1-C9
cccacgcttccgatgcgaggccatttcttcaaattagagtatgtaaagcatcggccgtctgtagctggtgcaatgattgattcacacgtcacagcggaatattggaagaataggactcaagagcggttgaagattaaaatgcctgagacctatgttgttcaccttggaaatagcaatgaactgatgcaagttgcagaagacagtgtggctaaaagggttttgcgtgaacatgttcgtgaatcgcttggagtgcgcaatgacgatttactctttgccttaataaatagtgtttcacgaggaaaagggcaggatctctttctacgcgctttctacgaggccttacaactgatcaagcaaaagaaaatgcaagtgccaccattgc

SEQ ID NO: 6177 - DNA, 928 bp, Gossypium hirsutum
  Clone ID: GOSHI-09MAY01-C107379_1
cccagcgtccggaaaatatcaccatatataacttcaaagaggtgttaacattaagtatgttgctgttggaaatgaaccatttctcaagtcctacaatggctcatttataaacactacagtgcctgctcttcaaaacattcaaaatgcactgaatgatgccggtgttggggacaccataaaggctactgtgcccttaaatgctgatgtctacaactcgcctgaaagcaaccctgttccgtctgctggccggttccggactgatatcagtggacctatgacgcaaatggtcgatttccttgccaagaatggtgcacctttcactgtaaacatctatcctttcctcagtctttatggaaatgatgacttccctttcaattacgctttcttcgatggtggaaacccgatcacggataatgggattaagtacactaacgtttttgatgccaactttgatacattggtttcggctttgaaagcagtaggccatggggatatgcccattattgttggggaagttggttggcctactgatggtgacaagaatggcaatatggctaatgctcagagattttacaatggactcttgcctagacttgcagccaacaccggggacccctctccgtccgggatacattgaagtttacttgtttggacttatcgatgaggatgccaagagcgttgcaccaggaaattttgagtgtcattgggggatctttcggtacgacgggcagcctaaattcccattaaatctttcaggccagaatcagaaccagttccttattggtgcaaaggatgtcaaatatcttcaacagcaatggtgcatgttcaatccgaatgccaaggacatcggcaaacttacggacaacataaagtacgcttgcactttctccgactgcacggctctcggttacgggtcttcatgtaacac

SEQ ID NO: 6178 - DNA, 509 bp, Gossypium hirsutum
  Clone ID: GOSHI-09MAY01-C7372_1
cggcgagacgagccgtttatcattacgataggtgtcaagtggaagtgcagtgatgtatgcggctgaggcagcctaacagaccggtaattgacttgaaccaattctgattctctcttgcatactatcaaatggcagctactgcagcaatcaccactctcccccagttcagtgggttaagacccaaagtttctactgctccagttaggagcctggcagcagttcaaccaatgaggcgcaaggggaagggtgctctcggtgctcgatgtgatttcatcggatcccccacaaatttgataatggtgactacaacaaccctgatgctgtttgctgggaggtttgggttggctccatcagcaaacagaaaggccaccgctggattgaagcttgaagtaagggactcaggcttgcagactggtgaccctgctggttttacacttgctgacactttggcttgtggtgttgttggccatatttttggtgttgggatcgttcttgggctcaagaacatt

SEQ ID NO: 6179 - DNA, 419 bp, Gossypium hirsutum
  Clone ID: LIB3165-014-P1-K1-F2
agccttccgcccacccgtccgttttttaatctaaacctgaaatcaaactagaaaagatcagagagagggtgagaggcaccttgtaattgacttgaaccaattctgattctctcttgcatactatcaaatggcagctactgcagcaatcaccactctcccccagttcagtgggttaagacccaaagtttctactgctccagttaggagcctggcagcagttcaaccaatgaggcgcaaggggaagggtgctctcggtgctcgatgtgatttcatcggatcccccacaaatttgataatggtgactacaacaaccctgatgctgtttgctgggaggtttgggttggctccatcagcaaacagaaaggccaccgctggattgaagcttgaagtaagggactcaggcttgcagactggtgacc

SEQ ID NO: 6180 - DNA, 492 bp, Gossypium hirsutum
  Clone ID: GOSHI-09MAY01-C7302_3
tattttttttaaaaagggttgcccccttctaactctgaaaggcaatggcttcaatgcttagctcaggaaccgtccttaggccaaccccatttcttggccaaaacagaaatgctaaccctctcagagatgtctccgtgggcactgccaaatacacaatgggaaatgaactgtggtatggaccagacagagtgaagtacttgggacccttttcagctcagattccatcctacttgaacggcgagttccctggtgactacggatgggacactgccggtttgtcagctgaccctgaggcctttgctaggaacagggctcttgaggtaatccatggaagatgggcaatgctgggagcactaggctgcatcaccccagaagtccttgagaaatggcttagagttgacttcaaggaaccatactgcggacgcgtgggcggacgcgtgggcggacgcgtgggcggacgcgtgggctccaaccttccatacaattctcacc

SEQ ID NO: 6181 - DNA, 655 bp, Gossypium hirsutum
  Clone ID: GOSHI-09MAY01-C7302_1
acgatttttcaactcaaaatcaatccccattgacaaacaatggcttccatgcttagctctggaactgttcttaggccaaccccatttcttggccaaaccaaaaatgctaaccctcttagagatgttgtctctttgggcactcccaaatatgcaatgggaaatgaactatggtatggaccagacagagtgaagtacttgggaccattttcagctcagactccatcttacttgactggagaattccctggtgactatggttgggacactgctggtttgtcagccgaccctgaggcctttgccaggaatagggctcttgaggtcatccatggaagatgggcaatgttgggagcactaggctgcatcacaccagaagtacttgagaaatggcttagggttgatttcaaggaaccagtatggttcaaggcaggagctcaaattttctcagaaggtggcttggattacttaggcaaccctaacctagtccatgctcaaagcatcctcgccgttctcggattccaagtcgtcctaatgggactcgtcgaaggattccgcatcaatggcctccctggtgttggtgaaggcaatgatctttaccctgggggccagtactttgaccctcttgacttgctgatgaccctggtacatgtgctgaact

SEQ ID NO: 6182 - DNA, 535 bp, Gossypium hirsutum
  Clone ID: LIB3584-029-P1-K1-D4
cccacgcgtccgctaaaatcaactgaatatatatattttttttaaaaagggttgcccccttctaactctgaaaggcaatggcttcaatgcttagctcaggaaccgtccttaggccaaccccatttcttggccaaaacagaaatgctaaccctctcagagatgtctccgtgggcactgccaaatacacaatggtaaggtttttttttcttttatcttttcctaagcatttggtgtgtaatgtaatgtaatgtgtagggaaatgaactgtggtatggaccagacagagtgaagtacttgggacccttttcagctcagattccatcctacttgaacggcgagttccctggtgactacggatgggacactgccggtttgtcagctgaccctgaggcctttgctaggaacagggctcttgaggtaatccatggaagatgggcaatgctgggagcactaggctgcatcaccccaaaagtccttgaaaaatggcttagagttgactttcaagaaccagtatggttcaaggcaagaacttaaa

SEQ ID NO: 6183 - DNA, 417 bp, Gossypium hirsutum
  Clone ID: LIB3166-001-Q1-K1-F10
cggacgcgtgggcggacgcgtgggtgacaaacaatggcttccatgcttagctctggaactgttcttaggccaaccccatttcttggccaaaccaaaaatgctaaccctcttagagatgttgtctctttgggcactcccaaatatgcaatggttagttctttaggtttccctttcttttacaattttcttcttggggaaatgaactatggtatgggccagacagagtgaagtacttgggaccattttcagctcagactccatcttacttgactggagaattccctggagactatggttgggacactgctggtttgtcagccgaccctgaggcctttgccaggaatagggctcttgaggtcatccatggaagatgggcaatgttgggagcactaggctgcatcacaccagaagtacttg

SEQ ID NO: 6184 - DNA, 568 bp, Gossypium hirsutum
  Clone ID: GOSHI-09MAY01-C7322_1
tttcgtcaagtatgggagctggtaggagaatcttgggaggtttcaatttagcaatcctgatggtgatgatgctattgagcaccaaccgacactgtgcggccgacgcggttaagaagaataagagcatgagcagccgctggtgcgatgattcttcaaataaggagtgcctgcagctttcggacgacatagaaacgatggagttgttgatggattcagaagcaagcaaaatggtatttgaagcaagtgcagcaatcaacttcgccagcagtaaaaatccaactaccagagcccttgacccttctcaagctgcctgcgaccgtaatactggcaagtcttgcgaacctgatagtaatccaggcacaaaggtacctccaaattgttcactatacaacagagctgttgccactgatttaactactttttcttgctatgctggtatattgtgtttcaatttatcaagatatatatatatatatatatatatatatataaataaggatgatggagaaacatctctttaatatatgcataaatatttctggttcaataatctcttttatatttggag

SEQ ID NO: 6185 - DNA, 332 bp, Gossypium hirsutum
  Clone ID: LIB3148-045-Q1-K1-B8
cctgcagctttcaaacgccatggagacgatggagttgttgatggattcagaagcgagcaggatggtatttgaagcaagtgcggcaatcaacttcgccggcagtaaacgtccaactaccagagcccttgtcccttctccagctgcctgcgaccgtaagactggcaaacgttgcgttcctgatagtaattcaggcagaaagaaacctccaaattgttcactatacaccagaggttgcaaatgatttactactttttcttgctatgctggtatattgtgtttgtgtgtcattttcgattattatgaataatggaaaaataatttggttgaatcat

SEQ ID NO: 6186 - DNA, 588 bp, Gossypium hirsutum
  Clone ID: GOSHI-09MAY01-C7282_4
cgattcatgcctttccctcactttctaggttctactctttcagtgagggtttccaaattagcctatctttgatacgcaggtgtctggattggttaaagaatggccatgacgccacaaatggcttaataaataaatcccacacccagttggccaaagctttacaccgaagaagcaaagcagcatcggcatggcagtttattgcaattccgctcccttttcttgcaaagcctcgagaaacagagaccccacacccttatccgcactcttacccacccgtctcttctcacttcttcaacccccaatcagcttccatccagatagattaaagctctcaacttgcaggtgggataaggtggcttctgctgttgtttctgaagaaagtgcagttgggtcaagctcttctgggactgatgtattcaacctcacttacctagaggggaatagtcggctgggggatatcagcggggtgagagaactcaggttaaacttgctcttatgttccgcatactgatagcaagggaagccggcgagttgaataccgctgtcactctcactgaaatgcttcgtgaaataattggaagagagagg

SEQ ID NO: 6187 - DNA, 817 bp, Gossypium hirsutum
  Clone ID: GOSHI-09MAY01-C7282_3
cagaggaggaaacaccctcgcctccgcccacgcgtccgggaggaggaaatgtgggcatatattaagttttaaggttttcaggaggaaaaacttttgcctctgaaactatggctccattctctttacgtagccgtcttcaggcttctgcgctaagcaagaggcgtctcaaatccaaagccaagcatgggaggaaagggatgaagaacatggaggaaagcttcaaaagattgaaatctgaaatggaagaaataagcgaggaacaaaagaatatcagggaagggcaaaggcaagttaaagaaaaattcggaatcatcgaatccgagtgcgaggaattgaagagggaaactaggctcataatccagcaaagtgccagaactcaggttaaacttgctcttatgttccgcatactgaaagcaagggaagccggcgagttgaataccgctgccactctcactgaaatgctccgtgaaatagtaggaagagagagggaggaaagcaaagctgacatctgaatgactatggtaagcttcctcggtgcagctgctccaaatgttaagaactagaagtgtgtgacaattaagcgcgtgttatctttcagcattgccgttttgttattaagtactgctaatctacgtcgtttcatgtttggtatgttaaacttagaacttatcaaaccttttttctgttgtgtgtctaaggttgaataaacaaaatatggtgacttgaaaacaacagaagttaaaagtaaactagttattgttatgctgaacatataccttaaattgccaatattgtgcattgtcttgtttgctttgtc

SEQ ID NO: 6188 - DNA, 652 bp, Gossypium hirsutum
  Clone ID: GOSHI-09MAY01-C7282_2
gcaaaagcagcatgggcatggcagttcattgcaattccgctcccttgtcttgcaaaacttggagaaacagaggccccacactcttacccgcccgtctctgctcacttcctcaaaccccatttagcttccgttcagatgcattaaagctctcaacttgcaggtgggataaggtggcttctgctgttgcttctgaagaaagtgcagttggatcaagctcttctgggactgatgtattcaaccttacttacctagaggggaatagttggctgtgggatataagtggggtgagagttttggttgatccaatattggtgggtaacttggattttggtattccatggctctatgatgctgccaagaaatttttgaagaatttcgagcttactgaccttcctcaagttgattgcttactcataacacaaagccttgatgatcactgccatttaaaaaccttaaaaccgctctccgagatgtccccaaatctcagagtcattgctactccaaatgccaagcctttgctggatcctgttttcagaaatgttacatatctagaacctggtcaggagtctgaagttgaagcagagaatggttccggagtcagaattcgacctactgctgggccagtcctgggtcctccatggcaacgacctgt

SEQ ID NO: 6189 - DNA, 949 bp, Gossypium hirsutum
  Clone ID: GOSHI-09MAY01-C7282_1
cccacgcgtccgcccgccaggaggaaaaacttttgcctctgaaactatggctccgttctctttacgtagccgtcttcaggcttctgcgctaagcaagaggcgtctcaaatccaaagccaagcatgggaggaaagggatgaagaacatggcggaaagcttcaaaagattgaaatctgaaatggaagaaataagcgaggaacaaaagaatatcagggaagggcaaaggcaagttaaagaaaaattcggaatcatcgaatccgagtgcgaggaattgaagagggaaactaggctcataatccagcaaagtgcgagaactcaggttaaacttgctcttatgttccgcatactgaaagcaagggaagccggcgagttgaataccgctgccactctcactgaaatgctccgtgaaatagtaggaagagagagggaggaaagcaaagctgacatctgaatgactatgataagcttctcggtgcagctgctccaaatgttaagaaataaaagtgtgtgacaattaagcgcgtgttattaagtactgcaacttatatttcctatctacttcgtttcatgtttggtatgttaaactttgaacttatcaaaccttttttctgttgtgtgtctaaggttgaataaacaaaatctggtgacttgaaaacaacagaagttaaaagtaaactagttattgttatgctgaacatataccttaaattgccgacattgtgcattgtcttgtttgctttgtttttgtacattgctctcatttcttctgtttgcaactagcagttgatttactttaacattttatgttaaatttagttacatatgtactcagtttatccactcttcccccgcccccccctccagtcatacttttcttcactttcatctggccaattaaaaaaattgaagagttgagatgagcagtaaaaaaaaaacataatccaaaatt

SEQ ID NO: 6190 - DNA, 581 bp, Gossypium hirsutum
  unsure (1)..(581): unsure at all n locations
  Clone ID: LIB3829-022-Q6-K6-G2
tctctttacgtaccgtcttggggttctgcgctaagcaaaagcgtctcatccaaagccaagcatgggaggaaagggatgaagaacatggcggaaagcttcaaaatattgaaatctgaaatggaagaaataagcgaggaactatttttatcagggaagggcaaaggcaagttgggggggggggcggaatcatcgaatccgagtgcgaggaattgaagagggaaactaggctcataatccagcaaagtgcgagaactcaggttaaacttgctcttatgttccgcatactgaaagcaagggaagccggcgagttgaataccgntgccactctcactgaaatgcttcgtgaaatagtaggaagagagagggaggaaagcaaagctgacatctgaatgactatgataagcttataggcgcagctgctccaaatgttaagaaataaaagtgtgtgacaattaagcgcgtgttattaagtactgcaacttatatttcctatctacttcgtttcatgctcggtatgttaaacttggaactgatcaaacctcttttctgttgggtgtccaagggtgaataaacaaaatctg

SEQ ID NO: 6191 - DNA, 216 bp, Gossypium hirsutum
  Clone ID: uC-gsflnu33B094h09b1
tcgtcacgcgtccgcccacgcgtccggaaaaactgttgcctctgaaactatggctccgttctctatacgtagccgtcttcaggcttctgcgctaagcaagaggcgtcttaaatccaaagccaagcatgtaattataatttttttcgggtggtctttttgcaaattttcggtgccatatcttgctaatttacaattggaatgggggacaagggagga

SEQ ID NO: 6192 - DNA, 1134 bp, Gossypium hirsutum
  Clone ID: GOSHI-09MAY01-C7252_1
ttggaaggcccatccttcttctttttcgttgtcctgctgtatttatgttgtcagcttgttttaaggttctagacttggtagctatccggtaatcaagtctagcttcttatagttgttttttgtttccatggcggtaggcttatccgccgccgtaactcctaaacccttccgctcatttccgctgctgaagcctgctccaattttccatcctttactgcacctcccaaaaataacaacctacggagctcgaagaaagaaaagctttgctgtttgtttcgtggtggatgaagaacagaagcagagcgctcctacccagatcgtggaacaaggattcgaggaagttagagatcgtcagatcttaataccggcgcgtctgtcggagaaattagctagaaagagatccgaaaggtttacttacctcgttgccgctgtcatgtctagctttggaattacatccatgtctgttatggccgtttattacaggttttggtggcaaatggagggaggagaggtgcctctttctgaaatgttcggcacatttactttagcagtcggtgccgctgtgggcatggagttttgggctagatgggctcacagagctctctggcacgcatcgttatggcatatgcacgagtcacaccatcgacccagagaaggaccgttcgagctaaacgatcgcctcgcctccgcccacgccggcccagcaattgctcttctctcgtatggtttcttcaacaaaggccttgtacctggtctatgtttcggtgctgggcttggtataacgatgtttggaatggcttacatgttcgtccacgatggtctcgtccataagagattccccgtaggccctatcgccaacgtgccttacttcaggaaggttgctgcggctcaccagctccatcattcagaaaaattcaatggtgttccatatgggctgtttctagggccgaaggaagtggaggatgtgggaggacatgaagaattggagaaagaaatcaacaggagaatcaaatcaagcaaaggttcctgaatatataatacgattaatttaactgttttcaaggaacccccattttttgagaaacgatattgtcaaatatcataaacctgaaatgattctatgttgatcactgt

SEQ ID NO: 6193 - DNA, 283 bp, Gossypium hirsutum
  Clone ID: GOSHI-09MAY01-C7242_1
catcgctcacatagcacaggctcgaaaaatagccctttttactttgttatatagattatgttatatagattattatttatctatatagagtattattaatccatagatatatagattctaaatttgattattattagatagattgattatatagctatatccaacttttctatagagatatagaacttttatcagtaattccatctcatttatattatattctatatcatccatatttttaaataaaacaatggctctaaagaaatatctcaaataacacaac

SEQ ID NO: 6194 - DNA, 786 bp, Gossypium hirsutum
  Clone ID: GOSHI-09MAY01-C7272_1
cacgcgtccccacgcgtccggcacatacaaagctaccatggctaattttcaaatgaaaaaagttcaacaatgcacacacggcaagctgtggaactcttccagcgaagctctaaccttgaccgacaagaaagtttggcaaggctctcattatgcggatttcccagaaataattgaagatggggatgcgagtgagtttacacatgaatcagtgactgatgatgctgatattcatggttcagttgctggtcttgtgtacaggcgacgtgacggaactaagtggattgttgcctggagcaacccacaagctgagaacagcaaggtctatactgatatccagagacaacctgttcactgggggcaaatcaaaaccaaccttgagaaaagaggaaaaccaaaatttaaagttacaaagtttggttacaatgcatctattgaaattgatcccgtgagtcgttcacccacaatgaaggcatcatttgagttagaggcataactgccttatcgtcttcatcaagctgtggtggtaattaaggctatcaaaattaaataatagtgtgatgcttgctgctgcattacctggactactattatagtaaaaagatttgatagccagtagaaccattagaaagtgtgtaggccttcacaatcatgtcagtgccatgtatatgtacatggttgactatttgttgtaatattttggaagaattaatctaaatggccttttctattttatccttagcctaccttttttcccctatatttttctgtctattttttggctcctat

SEQ ID NO: 6195 - DNA, 1100 bp, Gossypium hirsutum
  Clone ID: GOSHI-09MAY01-C7262_1
aaaacccgcgcccgcccacgcatccgcaaaagccaaggtcaaacgaaggcaaaaataaggttttccatggaaggggaagctggttcatacgaggacgttaagccaaacgtcgtcgctaaacaaagtaatggcgatgttgtcggggataatggtgttggaaatctgggatccgttgaagcccctgattttctttccaagaaaaatttccagaactgttccgtggcaactcctgcatctggactgaattccactggccctgctccatctcaactaaccatcttctatgatggacacgtttgtgtgtttgatgcaattcctgtggaaaaggtgcgggagattatgcttattgctgcaactggtgctgctaactctgttgacatgaagaaagttgcaactgattgtgccaccacctcacctgttcttacgaggtctccttcgcttcaaagtactgctactgcaactgctctggcttcaccacaggcacaggtgtatcctactaacaggacccctttctgcaaactgaaagaactaccaattgcaaggagacactcccttcagcgattttttgagaagcggcgggacaggctggtgaacaggaatccatatcctaatccatcaacaccaaaatcattcgatgacaccaaagctaacctcagtgctgcaacttcatcagaatcgggttgctttggtaaatcacctgttgctcaagaagaattccatccaaaagctccagctcatgttgcataagttaagcatatacgaatccctatatatatttgataaaaactaaactagctgtgttattattgtgaaatgcaaactgaactaggataatgactttgatctgtcggtggagttgatgttgtttgcaagtgtacaacttaaagtaggtctcatggtaggtttgctattgtttgccatgagagtgttgtctaaatgtagaatcaattctcttgttctcctattgcctctaggtggccgttgtgatgtcttttaaacctgggcaccatgtctatattctttctgccaattaacaaactaagctatctaggatctgctatgtatgtatcttcaccttggctgcttctatctcgtatttt

SEQ ID NO: 6196 - DNA, 410 bp, Gossypium hirsutum
  Clone ID: LIB3165-012-P1-K1-E5
cccacgcgtccgctaaatcctcacacaatcacttaatagaaacccaataacttacaaatccaccatgtccggtagcaaagactgtggcggccaccacaaatccccccggaaaaatttccggcgagtcatctcttgtattctaatcctcctccttctcgttctcatcacaatcttactcatatgggcaatccttcgtcctagcaaacccaacttcactctcctcgacaccaccgtctacgccttcaacgccaccaccttcaacttcctcacttcaaactttcaaatcaccgtccgttcagaaaacccaaacgatgatatcggtatttattacgaccggctcgacgtttacgctacttaccggaaccaagaaataacactccggactcgattcccaccaacgtaccaaggcc

SEQ ID NO: 6197 - DNA, 346 bp, Gossypium hirsutum
  Clone ID: LIB3165-050-Q1-K1-G10
cagacacttacccatacacgacttcttttccttctgggtcggcttcagatcctggggtggacgcacactaagaccccccggaaaaatttccggcgagtcatctcttgtattctaatcctcctccttctcgttctcatcacaatcttactcatatgggcaatccttcgtcctagcaaacccaacttcactctcctcgacaccaccgtctacgccttcaacgccgccaccttcaacttactcacttcaaactctcaaatcaccgtcccgtcaaaaaaccccaaccaagatattcgtttttatttccgcccggttcaccgtttcccctcctacccgaacccaaaaaata

SEQ ID NO: 6198 - DNA, 435 bp, Gossypium hirsutum
  Clone ID: GOSHI-09MAY01-C7232_1
cgatggctctctcaaactcagtcccgtcagcttgcattatctgtctcagtgcttctaatcaattctatcccccatcgtcacgctttcaagtctctcaagccccctctcttctggccatggcaaaaggtgaaaatgggtcctttgactgtttctccaatggggtttgggacgtgggcatggggaaaccagcttctctggggttaccaaccttcaatggattctcaacttcaacaggtttttaatcttgccgtggagaatggcatcaatctttttgacaccgccgattcttatgggactggcagactcaacggacagagtgaaaagcttttagggaagttcattagagaatttcaaggggaaaaacggatacgagatgagattgtgattgccacaaagtttgcagcttacccatggcgtctaacatcagggcaattt

SEQ ID NO: 6199 - DNA, 546 bp, Gossypium hirsutum
  unsure (1)..(546): unsure at all n locations
  Clone ID: LIB3825-028-Q6-N6-A9
aaaccaanaatcagtcatataatataagtccccatgttttatatatgaagaccaattttgtaggataataatatatacatacaaacgagattatgcagtttatttatttaaacactgaaacaattacttgcagaaggaagcaaccacacagcaaattcaccagccaattctcttacaaagcttgtagccagacaagattgcacaaattgccataactagaaatgttgcaaaggccatgctggttgatacgatggttcccttcctaagtgctgtgcctcgctcaacctgtccaatggttggcactgctaccgaagcagatgagacgagaaggtaaaccaacaactgttttccagagcaaccccatgaattagctttcacacacaagaattataatagcagcgatacaaatagtgtgtttacaacggcgagtggacttgcctggtcaaggacaaagcttaggtagtctgaggttaaatccgagatcagaatgcctctatgagcaatgtcactaatgcctttaaacaattggaaagctgtgtataccaa

SEQ ID NO: 6200 - DNA, 537 bp, Gossypium hirsutum
  Clone ID: LIB3825-027-Q6-N6-C3
aatataagtccccatgttttatatatgaagaccaattttgtaggataataatatatacatacaaacgagattatgcagtttatttatttaaacactgaaacaattacttgcagaaggaagcaaccacacagcaaattcaccagccaattctcttacaaagcttgtagccagacaagattgcacaaattgccataactagaaatgttgcaaaggccatgctggttgatacgatggttcccttcctaagtgctgtgcctcgctcaacctgtccaatggttggcactgctaccgaagcagatgagacgagaaggtaaaccaacaactggtcaaggacaaagcttaggtagtctgaggttaaatccgagatcagaatgcctctatgagcaatgtcactaatgcctttaaacaattggaaagctgtgtataccaaagctataatggctacaatgaagcagtatatcaattctgagtaatcggtgaagcttggagatggatggtgtttgttgtttgtggatggggtaaccagtgtgagagctg

SEQ ID NO: 6201 - DNA, 643 bp, Gossypium hirsutum
  Clone ID: GOSHI-09MAY01-C100709_1
acagaacatcaaggctctaatcttacacccatcagcacacctaaagacacccctcagcctgctgctttgagacgtaacttctctagatcagactcaacagcaagtgaaggtgcacaaaaggaacgagttgttcccccttctcaaaatgctcctaccacgtccctcagaattgatcattttctgcgcccttttaccttgaaagctgtacaagaacttctagggaaaactgggactgtaactagcttctggatggaccacattaagacccattgctatgctacatattcatctgtagaagaagcaatagagacacgaaatgctgtttacaaccttcaatggccacctaatggtggccgcctattggtggccgactttgttgatccccaggaagttaaaacccggcttgatgctccaccacagactccaactactcctgggacttctggttctactgctcctcaagctcaacctgcttctcagccccagccctctccgcgtcagcaggtttctaggcagcagcttccaccaccttctgcacttcctccaccgccacctttgcctaaccctccaccagttagagaacggctccctcttccgccgccaccggcagagaaagtagatcctcctattgtcactctggatg

SEQ ID NO: 6202 - DNA, 734 bp, Gossypium hirsutum
  unsure (1)..(734): unsure at all n locations
  Clone ID: AI055152.1
cttcaccagaagggcttttatatcacttttgtcaacactgaatttaaccataaacgtatacttaaatctcgaggacctgatgctcttaatggtctcccttcttttcgttttgagactattcccgacggccttccgccgaccgacgtcgatgccacccaagacatcccttccctctgcaactccactagcaagacttgcttaccccatttcaaacaactcctccgcaagctaaacgattctgcgtccacatccaaagttccccctgtttcttgcattgtttcggatgggtgtcatgagcttcactcttgatgcagctaaagaactgngcgtccctgaagttctgttttggaccacaagcgcttgtggcttccttggttacgttcactatcaccaattaatggaaaagggttatacgcctctcanagatganagctatttaaccatgggtacttggataccgtcataaattggataccgacaatggaaggtatccgattgaggaactaccttctttcttnagacaactgattcgaatntnngtatgctgatttatttctctgaaccaaagagctannaagcgtagcaatatattggacacgtngatgatngaacacgatcatggacgactcactcatgttacccatttacnagggtctttgcactgttgaaatcatgtggtatatgatgacccatgacattttgaaaanaacatgcctctgtgatcagaacccatt

SEQ ID NO: 6203 - DNA, 578 bp, Gossypium hirsutum
  Clone ID: LIB3825-024-Q6-K6-G12
tcggcaactccactagcaagacttgcttgccccatttcaaacaactcctccgcaagctaaacgattctgcgtccacatccaaagttccccctgtttcttgcattgtttcggatggtgtcatgagcttcactcttgatgcagctaaagaactaggcgtccctgaagttctgttttggaccagaggcgcttgtggcttccttggttacgttcactatcaccaattaatggaaaagggttatacgcctctcaaagatgaaagctatttaaccaatgggtacttggataccgtcataaattggataccgacaatggaaggtatccgattgagggatctaccttcttttcttagaacaactgattcgaattttgttatgcttgattttattttctctgaaaccaaaagagctcagaaggcgtcagcaattatattgaacacgtttgatgatttggagcacgaatcattggacgcactcaactcaatgctacccccagtttactcagtgggtcctttgcatcttgttttgaatcacaatgtggataatagtgaattgaaacaaataggatcgaatctttggaaa

SEQ ID NO: 6204 - DNA, 673 bp, Gossypium hirsutum
  Clone ID: GOSHI-09MAY01-C100659_1
gaaggacctctcttgtggataatcaagctgaatatgaggatgtagcagctgctaatgatacagaatttctgaatgtagatgatgatgagctatgtgaggatgatgatgatggcatgccatgtgatgaaagccgtcttcttgaaaatagtggatggtcctctcgcacaagggctgttgccaaatatctccagaatttactcgaggatgaagctttacatggacgtaaggtactttacatggacagtcttttggctcgtaaaacacgtaaagaagcatcgaggatgttttttgaaacactggtactgaagacaagagattacatccatgtagaacaggtgaaacccttcgacaacatctgtataaaggctggagcaaaactcgtgaaatcagatttctaaactgatctcccttccaaaggaaagagcaaatacggtgaaaagtgccttgttgtagttgtagttctgatgcgcaggccacaccaggtaattattttgtttcaaaatggtatttgtttttcaaattttattttaaaacagaagatagttgttgtctaggtcatctcatgtaattgggtagccttaacagtgggatggaactgcattgttacgacaaatgtagcaggataataattgtttatatgtgtaaaatatatcaatttacgattgaagatgct

SEQ ID NO: 6205 - DNA, 551 bp, Gossypium hirsutum
  Clone ID: GOSHI-09MAY01-C100349_1
cggacgcgtgggcggacgcgtgggtcaaaacctgagaaacccgaaagggccacatacgctgccgcccctgtcatgaagaagaaaactgctaaacagagacgtgctgcccaaaccattgaagatgaagaggaattgacccgggaatatcggctattgaagaaactaaaaaagggggctattgatgaaactgagtttgcaaagttgacaggaactgaagatttagtttgaactttcaagtatgtagttttgcagggtttgacttgccctttccctttctgaaggaagagcttgaggcgtacggccgttactttttctagaagaccaattctctacagctcttttaacaatggattttggaaagtagagttttggtgttcaagtgatggaaagtagacgcgcagcatattgatatgtctgaatttatataattgttccaatctctgaatttctttatttcacatttgattttgttgattcagtcactacaactattgtaatgtgtatgttaggggaaccagatttatacatttgattttagagtgttagcgatt

SEQ ID NO: 6206 - DNA, 632 bp, Gossypium hirsutum
  Clone ID: GOSHI-09MAY01-C100289_1
atcaaaacctccatcattggatgcccacttattaccagttgatttgccagagataatatcattgacaggcagtcagggaatcgagaagatagcctgggatgcttctggagagcgattagcagtgtcgtataaaggaggggatgatatttataaaggtctcattgcaatatatgatacgaggaggaatcccttgatttctgcatcactaattggttttatacgaggtcctggcgacaatccaaagccaattgcattttcctttcatgacaagtttaagcaaggaccattgctttcggtgtgctggagcagtggattttgctgtacttaccctctactatttcgatcctaaatttcttacgcggtcaaggtattttcaggtctgccatgtttattgactgcatgataaattttaggcatgatacataaacaaacccttgaatttcacccagatgaaaatcaaatctcttttatttgcgttatgaacccttaattctattgtaattatacccattaaatttaagagtaagtgacttttggctattaaaaacaagagaattttgatatttatttggaatgtctgtccttggttttttggttgttgcccagatttagtatatacttatttagctgtg

SEQ ID NO: 6207 - DNA, 965 bp, Gossypium hirsutum
  Clone ID: GOSHI-09MAY01-C101969_1
gtagtgacaaaaaacgacggaagccaccattcggaagctttacggacttgaattaaccgaccgaaactcacgttcgctcttgttgcggaactcgatcttcaccagcagtaagttccatggcaaaaatctaccaataaccttgaacaaactatgaaaataaattactaaatcctcgtattaggactcaatcttttaagagttgcttgtatataaagatcatataagggcataatttttacaaaaaatctcaattaagggcttttcacgcactttaatctaatttgtaataaaaaattaggttaatattgatgtgttaagaacaaaacaacataataattaaatcagatgatggttgaaaattaaagaaagtcaacatttaagagacccttatttgagtaatactttagaaaaattttgactcttatttaactattttgaaaggtatggcttttatttgaatacttttgtaatgttaagcttttatatgatcattttaaaagatttagtccttcaataagcaacccctaaacagttaggccccgaattcgaggatttagccaaaataaatcaataagttaccctttttttttcaggtgagaatatacaccggtgatggagtttcaactgagttagagaaatcaaaacaagagtacttgcaagcatcaataatggtgagcaatacaaaaaagattgcattcccagaactgctgctgaacaacatgtttgattttgctgtggatatgaactcattggttcaatgggtttgccaacaattacccacttctggttcgttaaggaaatcaatggtggattgttataggaaccataatgctggcaaaacatcatcacccattagtgttgagaaaataccatatgactttgaattccaatatctgctagctatgtaaacaaattttcttttcgtttgtttggcatgaaagaaaatatgagattatttatctgag

SEQ ID NO: 6208 - DNA, 1060 bp, Gossypium hirsutum
  Clone ID: GOSHI-09MAY01-C1942_3
atttccggacacccctagatcctcttcacctgccgcatctcagtacctccgcagttcactgagaaatggatgaggaagttaaggctgtggttcctgagtcactcttgaagaaacagaagagggctgaagaatgggagcttgccaaaaagcaggagcttgaagttgcaaagaagaagaaagtcgagaaccgcaagctgatttacactagggctaagcagtatgcaaaggagtacgaggctcaggaaaaagagctgattcaattgaagcgggaggcaaagttgaaaggaggattctatgtagatccagaagctaaactcttgttcatcatccgaatccgtggtatcaatgccatgcacccgagaacaagaaagatcttgcagctattgcgtttgagacagattttcaatggtgtttttcttaaagtgaacaaggcaaccgtgaacatgcttcacctggtcgagccttacgtgacttacggataccctaatctcaagagtgtgagggaattgatttacaaacgaggtttcgggaagttgaacaagcagagagccgctttgactgacaatgcaatcgtcgagcaggcgcttggcaaatacgggatcatctgtgtcgaagatctcatccatgagatcatgacagtgggtcctcattttaaagaggccaataacttcctttggcctttcaagttgaaggcgccgctgggtggtttgaagaaagaagaggaaccattacgtcgaaggaggagatgccggtaaccgggagaattatatcaacgagctgattagaagaatgaattaaaaattggtatttttttcggtgttaaatggttcgatttcgtattttaatttaattttattagaaagctagaaacaattatcttaaaaagtatgaaaatatttcaatggtaccaatattctcccccctgactttgccttgagaaattttgtggctagtacattgagaggcacattccttttagttttattattgacttatggattttgttctctttcctttacattattaataatatcaaatatggtccctttactttttaatt

SEQ ID NO: 6209 - DNA, 1057 bp, Gossypium hirsutum
  Clone ID: GOSHI-09MAY01-C1942_2
ccccgcgtccgatttcaaaggctgttgtcgttccccttttactctttaccttcgctcccgcccttgataactctccagcagccgcatccaagtaagagatgggtgaggaagctaaggctgtggttcccgagtcactattgaagaagaataagaggaatgaagaatgggaacttgctaaaaagcaggagcttgaagttgcaaagaagaagaaagttgagaaccgcaagctgattttctctagagccaagcagtatgcaaaggagtatgaggctcaggaaaaggagttgattcaattgaagcgcgaggccaagttgaaaggagggttttatgttgatccggaagctaagcttttgttcatcattcgaattcgaggtattaatgccatgcacccaaggacaagaaagatcttgcagctcctgcgtctgagacagattttcaatggtgtttttcttaaagtgaacaaggcaacaatgaacatgcttcaccttgttgaaccttatgtgacttatggatacccgaatctcaagagtgttagggaactcatttacaaaagaggttttggaaagttgaacaagcagcgagttgccttgaccgacaacgcaattgttgagcaggcactaggcaagttcggcatcatttgtgttgaagatctcatccacgagataatgactgtgggacctcatttcaaggaagccaacaacttcctttggccatttaagctcaaggcaccattgggtggtctgaagaagaagaggaaccattacgtcgaaggtggagatgccggcaaccgtgagaattacatcaacgagttaattaggagaatgaattaaaaaaccaaactcgggttttgttttaaaaaactagtggttgatgtcttttttggtttattttgtaagggattctgatgttaatttctgttggaagttggaatcacttttttgttatcgaagacgcggatatttttgctttgtgttgccagtgttatactttgtgactgagagctttctcaaagttcttctggtttagaatttattactaatatgttatttattggtcc

SEQ ID NO: 6210 - DNA, 1001 bp, Gossypium hirsutum
  Clone ID: GOSHI-09MAY01-C1942_1
cccgccccccccccctaaaatcctctcgcgctgccgcagctgagatccgacactccacagcgcagcaatgggtgaggaagtaaaggctttggttcctgagtcactgttgaagaagaacaagaggaatgaagaatgggagcttgccaaaaagcaggagctcgaagccgcgaagaagaagaaagtcgagaaccggaagttgattttcaacagggctaagcaatatgcaaaggagtacgaggctcaggaaaaagagttgattcaattgaagcgggaggcaaagttgaaaggaggattctatgttgatccagaagctaagcttttgttcattgttagaatccgcggtatcaatgccatgcacccaaggaccagaaagatcttgcagctcctacgtttgagacagattttcaatggtgtttttcttaaagtgaacaaggcaacaatgaacatgcttcaccttgttgaaccttatgtgacttatggatacccgaatctcaagagtgttagggaactcatttacaaaagaggttttgggaagttgaacaagcagagagttgctttgaccgacaacgcaattgttgagcaggctctgggcaagttcggcatcatctgtgtggaagatctcatccatgagatcatgactgtgggacctcattttaaggaggccaacaacttcctctggcccttcaagctcaaggcacctttgggtggtctgaagaagaagagaaaccactatgttgaaggaggagacgctggcaaccgtgagaattacatcaatgagctaattcggagaatgaattagacgttggctttatttgttaattcagtatttttggtttgttttgaaggatcctgatatgatttcttttggccttttagaaacagttttgtttaaaaggatgaatatttttcacggtgtttaccataatcttcttaatgaactctgtcaaagttttgttgcttcccccaaaaaaaaaaaaaaaattctgcggtcgacgcggccg

SEQ ID NO: 6211 - DNA, 427 bp, Gossypium hirsutum
  unsure (1)..(427): unsure at all n locations
  Clone ID: LIB3166-023-P1-K1-C5
ccgttccggaaanacccgggcggcccaagccttccgaaagcccttgttaactttccagcatcctattccaagtaaaaaatggttgaggagggtaaggctgtggttcccgagtcactattgaagaagaataagaggaatgaagaatgggaacttgctaaaaagcaggagcttgaagtgccaaagaagaagaaagttgagaaccgcaagctgattttctctagagccaagcagtatgcaaaggagtatgaggctcangaaaaggagttgattcaattgaagcgcgaggccaagttgaaaggagggttttatgttgatccggaagctaagcttttgttcatcattcgaattcgaggtattaatgccatgcacccaaggacaagaaagatcttgcagctcttgcgtctgagacagattttcaatggtgttt

SEQ ID NO: 6212 - DNA, 412 bp, Gossypium hirsutum
  Clone ID: LIB3831-002-Q1-K6-B1
cggacgcgtgggcggacgcgtgggccccccccctttcagtaagccgcaccatcgtatattccacagttcataggcacagagagagatgggtgaggaagtcaaggctgtgattcctgagtcgctcttgaagaagaataagaggaatgaagaatgggagcttgccaaaaagcaggagcttgaagctgcaaagaagaagaaagtcgagaaccgcaagttgattttcaatagggctaagcaatacgcaaaggagtatgaggctcaggagaaagagttgattcgattgaagcgcgaggcgaagttgaaaggaggattctatgtggatccggaagctaagcttttgtttatcgttcgaatccgtggtatcaatgctatgcacccgaggacgagaaaagatttgcagctcttgcgattg

SEQ ID NO: 6213 - DNA, 400 bp, Gossypium hirsutum
  Clone ID: uC-gsronu33B079c01b1
cccacgttcacgggcaatcaagagaacatgcgatcactatgagaccattagaagctggattctgagtgactacagcaacaagcgaatgcaaaaccaaggtgcaaacacaccacaactgcggtacgatgaaccaggagttgaaagaaagagccaaaacctgcgaaactgtaatagatagctgatcaacatgcaaagtagaacgacgcataggaagaagagctgatacaattgaagcggtaagcaaagctgaacggaggatgctatggtgatccagaagataagcttttgttcattgttagaatacgcggaatcaatgccatgcacccaaggaccagaaagatcttgccagtcctacggtagagacaagattccaaaggtggctcatttaaagcgaacaagg

SEQ ID NO: 6214 - DNA, 355 bp, Gossypium hirsutum
  Clone ID: LIB3148-015-Q1-K1-F6
ctcatccatgagatcatgactgtgggacctcattttaaggaggccaacaatttcctctggcccttcaagctcaaggcacctttgggaggtctgaagaagaagagaaaccactatgttgaaggaggagacgctggcaatcgtgagaattacatcaatgagctaattcggagaatgaattagacgttggctttatttgttaattcagtatttttggtttgttttgaaggatcctgatatgatttcttttggccttttagaaacagttttgtttaaaaggatgaatatttttcacggtgtttaccatttaaaaaaaaaaaaattatttaaaaataaataaaaaaataaaaaaataata

SEQ ID NO: 6215 - DNA, 1341 bp, Gossypium hirsutum
  Clone ID: GOSHI-09MAY01-C1972_1
cttgagtattgctttcttctccaattctcaacctcgaacttatctacgacttcaaagctttggtctctctatatataaacattcactttcttccacgatcaaaatatcagtcacaccaaaccaaagagggggatcgaaatggggtggaaaggaattctgggttttgattatggaatagttttagcacctatgggccatgatattgctggacctgagctcgtagctgctgttgcaaacgctggtggccttgcccttcttcatgctcctgattgggattcaccagagcagctaaaggagctgataaggaagacacgagagctaactgataaaccctttggggttggtgttcttttgccattccctcacaaggagaacataaaggctatattggaagaaaaggtggctgttctgcaagtagcgtggggtgaatgctcaaaggaccttgttttagaagctcataatgcaggggtcatggttgttcctcaagttgggagtcttgaggaagcaaaaaaagtaattgatgcgggtgtagatgcgattatcgttcaaggctatgaagctggagggcacgtaattggacaggatggtctaatttcattattgccacgagtggttgatgcggtggctggttgtgatattccggtcattgctgctgggggcattgtagatgctcgtggttacgtggctgccttggctcttggtgctaaaggcatttgcatgggaactaggtttcttgcaactcgagaaagctatgctcacccaacatacaaacagaaactgatcgaacacgatgaaaccgagtacaccgatatcttcggcagagcactctggcccggtgcaccacagcgtgtcctgcgaacaccgttcgtctgtgactggaaatcccttcctgctcatgaaaatgaaagtaatcagcctgccatcggtcgatcactaatacatggcatggaaaccgaaatccaacgcttttctgcttcagatcccaatccaacaacaacaggagagatcgaaaacatggcactctatgcaggccaaagtgttggcctaatcaaggagattcttcctgctggagaagtagtgaagagactggttgaaggggctcaacatttgatccgccaaagatttaatgaggactcggtctaaaaatccatttgtaaacatatattgcactttgtttatgtgagagtgtttttaaagcttggttggtgaagctgttacagcattttaatgtatgaaataaatctaaagagactaatataatgcaggaaagaaagctgtaccaagattttttttttctcatttctcctttaagaaatatgaattacaccatttaacaggttc

SEQ ID NO: 6216 - DNA, 642 bp, Gossypium hirsutum
  Clone ID: LIB3543-053-Q1-K6-B12
ccccgcgtccgccccgcgtgcgggcggcgggcggcaaacaaatagggaatcgaatggggtggaaaggaattctgggttttgattatggaatagttttagcacctatgggccatgatattgctggacctgagctcgtagctgctgttgcaaacgctggtgcccttgcccttgtggatgctcctgaatgggattcaccagagcagctaaaggagctgataaggaagacacgagagctaactgataaaccctttggggttggtgttcttttgccattccctcacaaggagaacataaaggctatattggaagaaaaggtggctgttctgcaagtagcgtggggtgaatgctccaaggagcttgttttagaagctcataatgctggggtcatggttgttcctcaagttgggagtcttgaggaagcaaaaaaagtaattgatgcgggtgtagatgcgattatcgttcaaggccatgaagctggagggcacgtacttggacaggatggtctaatttcattattgccacgagtggttgacgcagtggctgatcatgatattccggtaattgctgctgggggcattgtagatgctcgtggttacgttgctgccttggctcttggtgctaaaggcatttgcatgggaacta

SEQ ID NO: 6217 - DNA, 640 bp, Gossypium hirsutum
  Clone ID: LIB3543-009-Q1-K6-A4
tgctttcccctttgttccttggtaaactggttatgttctatgttactctgataagggtcggacacggatatgtggctgaccaagaaccttttcttatgagacctattgttgcctttatgtaaatctaggttaccatgactctgtatttcagtctaagactttgtgtctgacacttatattaggacatggttatgaggaaggatcctacaaggacctttaaatacaagaaaaaagaatatacatgtaccggatatgaatacaacactcacacccaaatatatatatatgtttagtctctgattttgcttcctcatagaccatctcatgagctaaatgtaactacattgaaggttgggagtcttgaggaagcaaaaaaagtaattgatgcgggtgtagatgcgattatcgttcaaggccatgaagctggagggcacgtacttggacaggtttgagcatttcttaagctctattacattgcaaggtttcaactgtataatcaatataccggagcttcttactttccaaaattcataaccctgtttatgtgttcctcaataccataaaactttgcaacaactgaaagtttggggtaaaaagtttgatgtttttaccattttcaggatggtctaatttcattatt

SEQ ID NO: 6218 - DNA, 829 bp, Gossypium hirsutum
  Clone ID: GOSHI-09MAY01-C101939_1
ggcttactgaacaaacccccaagcaaaaccctaattcatttcctacatctttattactctcttcggcatttattcaaacaccattcgcacctccaattttgaagccatcaaagcccattctcgtgcccgaaaatctaattcgtgaccttcaccagtcaatcgtttcaaccgccgataacttcttgaattccctccaacaaaatccggttttcaaaaacatcatctcattgtccactgaattccaaagcttcttcaatgaggtgaaaacttgcagaaaccagtacgtgaagattatgaattattctccagtttcaaatcacaatttcgctgcggttttgcctggtgattcagtggcaggggtcgtggttgctaacggaatcctaaatttcttaaacatttacaacacgttgttaatcgttaggctggttttgacttggttccctaactcacctccagccattgttagtcccctcagtactatatgtgatccgtacctgaacatattccgggggataattccaccattgggaggaacattggatctatctccaatacttgcatttctggttctaaacgcatttactagtaccgccgcagcactcccggtggagcttccggtggctggacaacctctgagaagagcttcatctccttcgttcactgctttaacctcgtcgcagaagaaatggatgagacgactcaacgagagccggtccaagagctccaaatcgaatgccaccatttaaacttagcacttccttttgaattaaataaaggtcctttaaacctcttactctgtatcagtttatcactggaaatcttttgccat

SEQ ID NO: 6219 - DNA, 598 bp, Gossypium hirsutum
  Clone ID: GOSHI-09MAY01-C101909_1
ctttttccgctcatataagtagtgaataataaggaaagggttttcaatagttgtagaaagagagccctagcagtcatttaaacttataaacagagagagatggcagccgaggtgatcttgaagctcacaatatgcttcctagcattaatggttggtgtccaaggtggagacccttacttattcttcacatggaacgtcacctacggcaccatctctccattgggagttcctcaacaaggaatactcattaacggtcaattcccaggacccgaaattaatgccaccagcaataataatatcgtggtcaatgtgttcaataaccttgatgagccattccttttaacatggagcggtgttcaacatagagaaaaattcatggcaggacggtgtacttggaacaaattgtcctattgcacctggtactaactttacgtaccaattccaaagtaaaagaccaaattggtagctatatttattatccatccacagctttacatagggcagccggtggttttggtggtcttagggttcatagtcgtttacttatccctgtcccatatcctgatcctgctgatgaatacacagttcttactggtga

SEQ ID NO: 6220 - DNA, 1301 bp, Gossypium hirsutum
  Clone ID: GOSHI-09MAY01-C1892_1
aaaaaagttaaaaatccgaccaaaaatgaagaagaaaaagttgaaaaattggaaaagggttgttgttttttctttcttcttttctttgagcaaagctttctttctttcactttttgtttaaattgctttggtattattatataaatcacttcacattttccaaggatttgcagtctcctaagtttattttgggctctagaacaactgtcaacaacaagcaaatgccaatcacattccattgtgcaaagaagtgaacctttttcatacagaagaacaaaactgggaatccccaactttcgtttccattttttgttgcttcatttcacttccaagatgcttcctttcacctgcattctcttcatgtgcatcttggcttcagtttcaagagctaccttcaatcttagcctccctcatcaacaccctcaccctgaatccggtgttcttgatgttcaatggagcttaaatgcatctttatctagaagacaaacattgtctgaaacccccaaagatcaatgtcgaactggaaaccccattgatgattgctggagatgtgaccccaactggttcaataaccgtcaacgcttagccgactgctccatcggcttcgcacgaggcaccctcggcggcaaaggcggtcggatctacaccgtcaccgattcctcccccccccgccccgttaaccccaaaccaggcacccttcggcacgccgtcatccaagacgaacccctttggatcgtcttttcaaccaacatggtcatcgaactcaaacacgaactcattttcaactctttcaaaaccattgacggtagaggggttaacgtccatataaccggaaatgggtgtttaacgttacagtacgtgtcgcatattatcatccataatatccatgttcaccattgtaaaccttcggggaacactgacattgcttcatctccaacgcatgtggggaggagagggagatcggacggtgatgggatctccatttttgggtctcagaaaatctgggttgatcattgttctttaagttactgcaccgatgggttggttgatgctgttatggggtccactgggattaccattagtaatagctattttgctcaccatgatgaagttatgctcctgggacatgatgacaggtatttgcctgattcagggatgcaggtgacgatagcattcaatgtatttggggtgggattggtgcaaaggatgccaaggtgtaggagagggtatattcacgtggtcaacaatgatttcacttcatggcaaatgtatgccatcggcggcagcggtaaccctaccat

SEQ ID NO: 6221 - DNA, 455 bp, Gossypium hirsutum
  Clone ID: GOSHI-09MAY01-C1862_5
cccacgcgtccggttcttccccacatcgagggcataatgtactgtttgtcagtttcctacaaagaatgttcactcgagtaggcagataattccatgaaatcttccagatggtgattaaaattttatgtggtagatcgaggctccataattttttataaaattcccggttgtgcgtttgtcaagcgtatgctctaggttctatgctttgtaatggtttataggcacttcgatctgcttattcacccaaaggttcatcgctccaagcctgaaagtccccatcaggttcttttgccagtgggaatcccgaggatcttacctgctgcttcttctgagaaggtattgaccattaaactccctggtccattctcttaccgtatgattggttaacccagcatccttaaaatcatgtaaggtcgcctcaccacccgcgcgtccgcgtacgcgtgggtcgcgcc

SEQ ID NO: 6222 - DNA, 778 bp, Gossypium hirsutum
  Clone ID: GOSHI-09MAY01-C1862_2
actcgtaaacgctctatcgaaatttatctttattaactgcccaggtgggggttccactcttaacttgcttaacgatattaagcttgttgctcttaacaccttccagttcttctaaatagctaagaactaagcttgcacccccccgactcccgctcctcgtttcggcacgtacatgagtatttatgttaccccagatggcccatagcgtgcaacaacatagtttgcagagaggttgagtttggggaacaagggtcttggacaatgacggaaaagatggttcatcgtttctagttcttccccacatcgagggcataatgtactgtttgtcagtttcctacaaagaatgttcactcgagtaggcagataattccatgaaatcttccagatggtgattaaaattttatgtggtagatcgaggctccataattttttataaaattccttgtagttggtttgtaaagcgtatgctctaggatctaagctttgtaatagtttataggcactacgaactgaaaattcacccaaaggttcaccgctccaagcctgaaagtcctcatgaggttctcttgccagtgggataccgaggatcttacctgctgcttcttctgggaaggtattgacaattaactgcctgttacattctcttattgtttaaggaattattaaggaaaactggaaaattcgctagtatgctatgaggaaccgaaaaataagattgcgcccagaattgtccctacacttgatagttgtccagataagaacagtaatgtatgagtgc

SEQ ID NO: 6223 - DNA, 940 bp, Gossypium hirsutum
  Clone ID: GOSHI-09MAY01-C1862_1
cggcgcgtgggtttgaaacttccctctaacttttcatttcttttcttcttcaatccggctctctctccaagtcatttttcctctggttttcggcataaacgggcacgctttcaaccaggtaagttcattcctgccttcttagagattctttagctaatatgtgggctaaactattcgctgatctaggggtatattcaaacttaagattgcccgatctggattttaactgatggatatcatgtataaaggcccctatcttcgatttatcttcccctttagcattacatcttttaataatggataaagaatcacctccaatgatgatttccttcccttgcatgtcgaaacctatcctggttgctgtcctgcaagctaacgctttggcagcgaaggcagagggcactccaaaatgaagctttgtgcatgacaggagaacaaatccttcactgtttctggctactatcactgtttttggctactatcccagaggccgattgttgattacactagtcaaacgcttcatcgaaatttatttttattaactgcccaggtgggggtttccactttttaacttccttaacgatattaggcttgttgctcttaacaccttccagtttttctaaatagctaagaacaaagcttgcaatctcctgactcgatctttttgttttgtcacgtacatgagtatttatgttaccccagatggcccaaagcgtgcaacaaaatagtttgcagaggggttgaggttggagaacaagggtcttggacaatgacggaaaagatggttcatcgtttctagttcttccccacatcgagggcataatgtactgtttgtcagtttcctacaaagaatgttcactcgagtaggcagataatgttaacattaatgggagacaatattaatggcaaacaatacaaagtggtgcaagtttagcccctt

SEQ ID NO: 6224 - DNA, 463 bp, Gossypium hirsutum
  Clone ID: LIB3582-010-P1-K1-F8
gataattccatgaaatcttccagatggtgattaaaattttatgtggcactacgaactgaaaattcacccaaaggttcatcgctccaagcctgaaagtcctcatgaggttcttttgccagtgggataccgaggatcttacctgctgcttcttctgagaagttattgacaattaactccctgttccattctcttacgtaattattgattaactcagcatccttaaaatcctgtgaattgacctcaccagaataaaaactagcatttctactaacaattctaaaaaatataaaaaaaaaaaaaaaaaaaaaaaaaaaaagctaaacaaactaaccaatacattgggctgtcagtgtaaaggatccaaacgtactggctcatccatccaaaataatggtcattctttggtgatgcgaaaaaacaattctctggcggacttattacaactttagccatgtgaaaacac

SEQ ID NO: 6225 - DNA, 487 bp, Gossypium hirsutum
  unsure (1)..(487): unsure at all n locations
  Clone ID: LIB3828-019-Q1-K6-E3
ctttgtaatagtttataggcactacgaaccgaaattcacccgaagttcaccgctccaagcctgaaagtcctcatgaggttctcttgccagtgggataccgaggatcttacctgctgcttcttctgggaaggtattgacaatcaactccctattccattctcttacgttattattgattaactcagcaaccttaaaaatcttgtgtattgacctcaccagaataaaaactagcatttctaaaaaaaaaaaaaaaaaaaaaaaaaaaaaaaaaaaaaaaaaaaaaaaaaaaagggcggacaaccaaaaaaaaaaaaaaaaaaaaaaaaaaaaaaaaaaaaaaaaaaaaaaaattntttttttttataatttattttatattaatatttaaaaatttaaaantttttatnntgaaggaggaaagcttaaannnattgtgggtgatgttttaagggattattaaattngtgggnttgnttagttaattttg

SEQ ID NO: 6226 - DNA, 370 bp, Gossypium hirsutum
  unsure (1)..(370): unsure at all n locations
  Clone ID: LIB3197-049-Q1-M1-G12
gcaagctaacgcttcggcagcgaaggcagagggcattccaaaatgaagctttgtacatgacaggagaacaaactcttcactgtttctggctactatcccagaggccgattgttcattacactcgtcaaacgctccatcaaaatttatttttattaactgcccaggtgggggtttccactttttaacttccttgacgatattaggcttccagttcttctaaatagctaagaacaaagcttgcaatctcctgacccgatctttttgttttgtcatgtacacgagtatttctgtctccccagatggcccataacgcgcagcanaacagtttgcagagaggttgagggtggagaacaagagtcatggacaatga

SEQ ID NO: 6227 - DNA, 296 bp, Gossypium hirsutum
  unsure (1)..(296): unsure at all n locations
  Clone ID: LIB3145-013-Q1-K1-D11
ggtagancacgcgtacgctgaaaattcacccaaaggttcatcgctccaagcctgaaagtcctcatgaggttcttttgccagtgggataccgaggatcttacctgctgcttcttctgagaagttattgacaattaactccctgttccattctcttacgttattattgattaactcagcatccttaaaatcctgtgaattgacctcaccagaataaaaactagcatttctaaaagcctcctatgctaccatagaaaaaatataacacaacaacaaccccctttaatgtgtcctacccc

SEQ ID NO: 6228 - DNA, 246 bp, Gossypium hirsutum
  Clone ID: LIB3145-020-Q1-K1-D12
agcgtatgctctaggatctaagctttgtaatagtttataggcactacgaactgaaaattgacccaaaggttcatcgctccaagcctgaaagtcctcatgaggttcttttgccagtgggataccgaggatcttacctgctgcttcttctgagaagttattgacaattaactccctgttccattcataaaaaaaaaaaaaattaaaaaataaaatatataaaaaaaaaataaaaaaaaaaaatatatt

SEQ ID NO: 6229 - DNA, 759 bp, Gossypium hirsutum
  Clone ID: GOSHI-09MAY01-C1802_2
cccgcagacccacgcgtccgcccacccgtccgcgacgtttttatccaaggtggatcgtaaatttagggtgccacatcacttataaatcaggagccttttcttccttgaaatcaaaataaataggagacacaggcttggaagggaactaagctagaggtagagagaaagaagggagttgccaaaatgtcgtcgttcttgcagtcatttctggatcccaagaaaagctggttggcagctctgcacatgaaatccctttccaagcgcctccgcaaatacggccttcgctatgacgatttatacgaccgttactatgatttggatatcaaggaggcgttgaatcggctgccccgtgagatcgtcaatgcccgcaaccaacgccttaagcgttcgatggacctctctatgaagcacgagtatcttcccgaaaaccttcagcaaatgcaaacaccatttaggagcttatcttcaagatatgctttgctcttggtaggtctttgacctgtataactctatttaccaattcccttgagcttcgttttcttggctttggttatttcatggaatttcatgacatctataagtgctcgaacaagagtattctatttattctaagtattcctaacatgaaagtcatacatatatcccatgtctactttgaggtatatgtctcctacatgggtactttatgcgatgcttggaatgaagttagcaaaggaaaaggaagaaaaagtaagtaaagaaatatagaggttttcatag

SEQ ID NO: 6230 - DNA, 686 bp, Gossypium hirsutum
  Clone ID: GOSHI-09MAY01-C1802_1
gcgttcgcccagcgtccgcccacccggccccccgcccgtactaaaaaactcagatacttggtcgaggaagaaggcaaagcacagccaaaatgtcgtcgtttttgcaatcacttttggatccgaagaagagctggttagcttctctgcatatgaaagcccttaccacacgcctccgcaaatacggccttcgttacgacgatctgtacgatccttactatgacttggatatcaaggaggcgttgaatcggctgccccgtgagattgtcgatgctcgtaaccaacgccttaagcgtgcaatggatctctccatgaagcacgagtatctcccagaagatcttcagaaaatgcagacaccatttaggagctatcttcaagatatgcttgctcttgtgaagaaggagagagcagagcgagaagcattgggagctttgcctctgtatcagcgaaccattccttaagggttttcatgccgtatctcatagtcattgctgttgaaatttgcgttcgattatctgtatgtgcgtatggtatttcgatagcggcagtggactgaatttttacaattcctggtttggttggtttacacagtcatctgtgtcagtttttgaactgaatcacttatttaggtttaagtctgttggcagtgtccccatattaacagactggaacggcatttaccccccctt

SEQ ID NO: 6231 - DNA, 402 bp, Gossypium hirsutum
  Clone ID: LIB3146-053-Q1-K1-B3
cccacgcgtccgcccacgcgtccgcccacgcgttcgcccacgcgtccgcccacgcgtccggggcaaacccttaattccagaaaataaaaaactcagatacttggtcgaggaagaaggcaaagcacagccaaaatgtcgtcgtttttgcaatcacttttggatccgaagaagagctggttagcttctttgcatatgaaagcccttaccacacgcctccgcaaatacggccttcgttacgacgatctgtacgatccttactatgacttggatatcaaggaggcgttgaatcggctgccccgtgagattgtcgatgctcgtaaccaacgccttaagcgtgcaatggatctctccatgaagcacgagtatctcccaaaagatcttcagaaaatgcaaacaccattt

SEQ ID NO: 6232 - DNA, 364 bp, Gossypium hirsutum
  Clone ID: LIB3584-002-P1-K1-F8
gcccacgcgtccgaaaaactaatacttggtcgagaagaaggcaaagcacagcaaaatgtcgtgtttttgcaatcacttttggatccaaaaactggttagctttttgcatatgaaagcccttaccacacgcctcgcaatacgcttgttacacattgacgatccttactatgactggatataggaggcgttgaatcggtgcccgtgagattgtcgatgctcgtaccacccttagcggcaatgatcttcatgaacacgatattccagagatcttaaaatgcaaccatttagactattcaaatatgcttgtttggaaaagaagagcaacggaacttgggagcttgcttgtatacgaaccttcttaagg

SEQ ID NO: 6233 - DNA, 567 bp, Gossypium hirsutum
  Clone ID: GOSHI-09MAY01-C101589_1
accagtttcaagttctttctctttcccaggatctgggaaaaagtgggagggaaagagtagagaaaaatgtaccctcttgtaaataccccgatgttatgcaagaatggaaagtctgctttataagaatctgaaagtcaagtgcatcgctagaggtagtggatgcaatagtatggaaattctttccagcgatggaaatcagaaaaaaggagaagctttttactatgataccccattttctgaagaaactggaatttgggtacctgtgtctgtccctcctgtgtctgaaaattaacatgaagaatgggatagaggcctatgtctgaatggaggatactttcctgatgatggtgtgcgatcaaatcagtttattgaagaaagttaggatctgaccatgtgggatgtgctcagtgagatgttaatagccgctcgaggcaaagtgagttctatagcttcaggtgatgttcaaagatttgggatcacttggttatccagccctcttcttgaacaatcttggtaagagatggctcaaacgcttgcagaagcctatttttgtaacatcaatgaaat

SEQ ID NO: 6234 - DNA, 818 bp, Gossypium hirsutum
  Clone ID: GOSHI-09MAY01-C1512_4
attttctcaaacattcttcaatcttttcatctctcctcagacccgatcgatctatcttcttgctccgttccctctttcaagaactggctaacacacaggaaccacttgtggaggaaactaacaagaaccaagaggtggttcttgccctctatgaggccttaaacactcgagacgtcgaaactgttcacaaaatccttgcccctgaccttgaatggtggttccacggtcccccgactcaccagttcttgatgcgcctgctcaccggtgcttcatcctacgattctttccgtttcgaggttgatcccctttcggttaccacctttgggcccaccgtcatcgtcgaaggctgcgatcacagccgttcaatctcttgggttcacgcttggaccgtaaccgatgggataattacccaagtgagggaatacttgaacacttctctcaccgttactcgccttggaaactctacccaatcttcactgtccgactacaatccttcatcatcatcatcatcatcgacggctgcgtcttcctcggtgcattgcccttccgtctgggagagcagcattttccaacagggttggaaaatccgtgccgggtcttgtcctggcaatttagtcatttcactatcatatatctttctgatcaggtgcagccgtgagtaggaataaaataaaataaaaggagtactttcgtgtcagctccttattggcctttacttgctgatgcactaaaaaacagtgtcgtttaaagagagagagagatcaaaaatgtgaatttggtttggaccctgttcggtagggtcatattattatcctgtt

SEQ ID NO: 6235 - DNA, 788 bp, Gossypium hirsutum
  Clone ID: GOSHI-09MAY01-C1512_3
tttcacgcgtccgtccacgcgtccgaccacgcgtacgtccacgcgtccgtcctcgcgtccgcaaaatccaaaacctctcgaaccgagcctaagcgtctccaaaaccactcaaagtaagaaatgatatagactggctaggcttgaatgtttgaaacatctccgccgcacccccagccgtccagtttgactccgcctcttgctactttactcccccatcgcctccccttcggccaccactgttgcgataaccgttagatcgacgagatctcctgttccaaccgcagtcaaatcatgtccaaatctcgcgtttatgctgacgtcaatgtccttcgtcctaaggagtactgggattacgagtccctcgttgttcaatggggtgatcaagatgattatgaggttgttcggaaagttggaaggggaaaatacagtgaggttttcgaaggcataaatgttaataacaatgaacgctgtataatcaagatcctcaagcctgttaagaaaaagaagatcaagagagagataaaaatccttcagaatttgtgtggtggaccgaatattgttaagcttcttgatgttgtaagagatcatcactccaaaactcctagcttgattttcgagcacgtcaacagtacagatttcaaggttctctaccctactttgactgactatgacattcgctactatatatatgaacttctcaaggccttagattacctcggtgcattgcccttccgtctgggagagcagcttttccacagggttggaaaatccgtgccgggtcttgtcct

SEQ ID NO: 6236 - DNA, 556 bp, Gossypium hirsutum
  Clone ID: GOSHI-09MAY01-C1512_2
tgatattccggaaggaaccattcttctatggccatgataactatgatcagctagttaaaatcgccaaggtactagggactgatgagttaaatgcatatttgaacaagtaccatttagagttggatcctcaacttgatgcacttgttggaaggcacagccgtaagccttggtccaaattcattaatgcggataatcagcatcttgtttctccagaggcaattgattttcttgataagttgctgcggtacgatcatcaggacaggctaactgcaagagaagccatggcccatccttacttctctcaagtcagggcagcagaaagcagcaggatgcgaactcagtaaccgggtacactctgggttcctttgtaaatcaatccagacttttggacagatatgttgtgtttaaatgttacataaaagctacataattctaatgactgccatcgtcagttttaggaaaggtgatttaccatcattactagccatttgcccggagtaactttttatctaagaatacagaccttacagtttttttaaaaaaaaaaaaaaaaaaa

SEQ ID NO: 6237 - DNA, 1343 bp, Gossypium hirsutum
  Clone ID: GOSHI-09MAY01-C1512_1
ctaggaaggaaaataaatgggctggcttgaatgaatgaaacgcgatgcgccaaccctccacttttactctgcttattgctaatttgcgccaccgtcgcctcccgccctcccctcgcccacgccggtgccggttacagtaagatcgacgagatctcctgtcctagtcgccggcgaatcatgtccaaatctcgcgtttatactgacgtcaacgttcttcgtcccaaggagtactgggattacgagtctctcgctgttcaatggggtgatcaagatgattatgaggttgttcgaaaagttggaaggggaaaatacagtgaggttttcgagggcataaatgtcaacaacaatgagcgttgtataataaagatcctcaagcctgtcaagaaaaagaagattaagagggagattaaaatccttcagaatctatgtggtggcccgaatattgttaaacttcttgatgttgtaagagatcagcactcaaaaacaccaagcttgatatttgagtatgtcaacagtacagatttcaaggttctctacccaactttgactgactatgacattcgctactatatatatgaacttctcaaggccttagattactgccattcacaaggaataatgcatagagatgtcaagcctcacaatgtcatgatagatcatgagctgcgcaaacttcgcttgatagattggggacttgctgaattttaccatcctggcaaagagtataatgttcgtgtggcttctcggtactttaaagggcctgagcttctggtagatttgcaggactacgattattccttggacatgtggagccttggttgcatgtttgctggaatgatattccggaaggaaccattcttctatggccatgacaaccatgatcaactagttaaaatcgccaaggtactagggactgatgagttaaatgcttatctcaacaaataccatttggagcttgatcctcaacttgatgctctagttggaaggcacagccgcaaaccctggtccaaatttattaatgcagataatcagcatcttgtttctcccgaggctattgattttcttgataagttgcttcggtacgaccatcaggacaggctaactgctagagaggctatggcccatccttactttgcacaagtcagggcagcagagagcagcaggatgcggactcagtaactcaattcccttgggaggatttcatttgtaaatcagaaccagactcatctggggtaagagatttaatgtgttgtttaatgttctcaaaaatattgtgactgcggttctcaatcttaggcagttaaaaaggctgtggacgaaacataaacttctctttactttcc

SEQ ID NO: 6238 - DNA, 384 bp, Gossypium hirsutum
  Clone ID: LIB3146-001-P1-K2-G11
cccacgcgtccgcccacgcgtccgcccacgctttcgcccacgcgtccgtccacgcgtccggcgacgcgttcgggcccatccttactttgcacaagtcagggcagcagagagcagcaggatgcggactcagtaactcaattcccttgggaggatttcatttgtaaatcagaaccagactcatctggggtaagagatttaatgtgttgtttaatgttctcaaaaatattgtgactgcggttctcaatcttaggcagttaaaaaggctgtggacgaaacataaacttctctttacttttcactagcctcggtaacttcgtttccgagtttatatacatttattttcaagaacgaagtatttatgctttaattttacaatcgtagctc

SEQ ID NO: 6239 - DNA, 624 bp, Gossypium hirsutum
  Clone ID: GOSHI-09MAY01-C1502_1
cccacgcgtccggtttatattggataactctatgcaattagggcctggcggctccactgctgtaactgcaattgtcgttgatggcaaagatttatgggtagcgaacattggtgactctagagctgttgtgtgtgagaggggctctgccaatcaaattacagtggaccatgagccgcatgctgaacgaagaaggatagagaagcagggtggctttgtgactactcttcctggagatgtgcctagggtgaatggtcaacttgcagtagcacgggcctttggggatcagagccttaaagctcatttaagctcagaacctgatgtcagacatgtccccatagactccactattgactttgtaatactggctagtgatggtttgtggaaggtaatgaagaatgaagaggcagttaatttggtgaaatccgtgaaggatccccaagcagcagccaaactgttaacgaccgaggcattggctagaaaaagcaaagatgatatatcatgcattgtaattcgatttggctgatgcagatagcattgtttggtttgccagtgggaggcgttgtacatggggggaactcttatggagtggagagctggaggttcatgtatgtgggtaggtttcgt

SEQ ID NO: 6240 - DNA, 609 bp, Gossypium hirsutum
  unsure (1)..(609): unsure at all n locations
  Clone ID: LIB3825-034-Q6-K6-D6
gtcgttttaatccattacccaagnacccatcggnaacccaccatcgtcaccgtcaattgccccgataagcccggtctcggctgtgatatttgccgtacccttctcgaattcggactttcaatcaccagagcagatttttcgacggatggaagatggtgttacatggtgttttggttggttccaaatgtttcgaattcatgtgaaattgattgggaaagcttgaagaataggcttgtttcgatgtgcccttcgtgtttggttccatttttttcctttaattatcagcaaggaggagatggaaatggaagcacaacccatcctctgatttatttgttgaaactttgttgcttggaccgcaagggattacttcatgatgttacaaggatactgtcggagctccagtttacaattcaaagagtgaaagttatgacaacgccggatgaaagagttatgtacttggttttcatcacggatggaatggaactcttacatacaaaagagagacgagatgacacaagggagcatctaatttctgttttgaagaattattgcatcagctgtgagcttcagttggcagggccagaatatgagaaatctgaagccttgcct

SEQ ID NO: 6241 - DNA, 489 bp, Gossypium hirsutum
  Clone ID: uC-gsflmaxxa058a09b1
tgtcttcgcgtccgattgattccgccggcgagggccctttgaattaccaaccggatgtgggtattccaaatgacgacgtcgttttaatccaattacccaaagacccatcggaacccaccatcgtcaccgtcaattgccccgataagcccggtctcggctgtgatatttgccgtacccttctcgaattcggactttcaatcaccagagcagatttttcgacggatggaagatggtgttacatggtgttttggttggttccaaatgtttcgaattcatgtgaaattgattgggaaagcttgaagaataggcttgtttcgatgtgcccttcgtgtttgggtccatttttttcctttaattatcagcaaggaggagatggaaatggaagcacaacccatcctttgattatttgttgaaactttgttgctgggaccaaagcaattgctgaatttggagttgttttcttgcttttcaatattggccttgagttat

SEQ ID NO: 6242 - DNA, 524 bp, Gossypium hirsutum
  Clone ID: GOSHI-09MAY01-C1522_1
cccacgcgtccgcccacgcgtccgcccacgcgtccgtttttttttttttagaaaaaagaaaagagaaggccggaaatccaatcaacgagtagcagtagcagtagcagtaaccaaatttggttaccaactatttgacaaagctatattactaaataacctaaaagaatgatcacaacatcatgtcatgtacaacaatattagattcccctttccaaggataccactctcttccaaaaattacatccttcattatgctcatttccaatactactttggttaggggaaggacatttaatattatattaatatgatataaccaaacaaaatcaaacacacctttgaatgcattttgcaggcatgtgaaggtaggaaaactccttggagagatcaactacaacatcatttccactctgtaattcataacagctccctttcccagtcaatacgagggagctgagatgaggcaagcaatccccgcaagtctcatcaagcaactcgtacagtctcaagctgatatgggttcg

SEQ ID NO: 6243 - DNA, 886 bp, Gossypium hirsutum
  Clone ID: GOSHI-09MAY01-C101489_1
atggcctctttctcacgcagtcccctcttccggcctggggttccttcggcgatcggctatgccgccgtcgactagctaccgacgacacaaagagatgcgcttttcagccacgtttagaaacgctcgaaggccaggccttcctgacctgaaggccgaagaaagggaacccgtgcgccgcttgtgacccgaatccgatgataagaaagagatctccggcggcggcctacggggcgattccaggtacgatttttttttttccgtttcttatccttttattatttattaaactaatttttaaaagatttggacaaataaataaaataaaaaatgaaaagaaacggaaaacagagagaaaaaaaaaagatggttcaaccttttcgaatctttgttctgttttcgattaactggtgtgcgtaaaaaaatacaaggatctgatctaggcctttatagccgatttgaacaactctctattctactatttttgtttgtttctgttgtgtgcttgtgcttggcttcttggttgttgcgtgttcacctttccttgcaggtagcagtggtagaggcggctgaggtgtcagacgcagtggcagaggcgtgcgttggaggtgtggcagatgaggaggccacgcatggaagcttgcggcgctagggaacttagggtttggctgaaaatttttaagtcttgtgggctattgggctgttattagttttgggcttttggattgggtctatttttgttaatggactgtaatttttaatatttgggcccgggcaaaaatgggctcttacattccaagtatgtcaatcttttgtcaactagttcttttatttttagcctgttgcaaaattttaaatatttgtatgacatgctccgatatttgttttc

SEQ ID NO: 6244 - DNA, 588 bp, Gossypium hirsutum
  Clone ID: GOSHI-09MAY01-C1452_3
tgacaaacctggctcgttccggtgtccttaaggtggtttacatgattctcatggtgtgcatgacgatgatgagtgcgcccaaggcagccaaagccgccatcacgtgcatcgacgtggtgaaccacttgatcccgtgcttgtcctacgtacaaaacggctgtacacccgctgttgcatgctgtattggagtaaaagcactctacggcgaggtccagcccgccagcggccgccaaaacgggtgcaaccgcatcaaaccggcggtgaacgggaattccgtacaccaccaataaccccaatctcgcagccggcctacctgctaaatgtggtctccaactcccttacagcatcagcccctccacttgactgcatcaaggtgcagtgaggttgatgatgatgatatggaaggagtggaagaaggttccagcttagcttatataagtatcttgctaaagttataaaattttatttaggttgttttttatttttagatatatatttgtttaatttttattaaaatgttgttattctttttttatatatttctttattttgttttttattattattattatattttatttttatatt

SEQ ID NO: 6245 - DNA, 924 bp, Gossypium hirsutum
  Clone ID: GOSHI-09MAY01-C1452_1
ccctcgcgtccgccctcccgcccgctccaaacactagtagaaggtttagttttacaaacatggctagttccggtgtccttaagttggtttccatgattctcatggtgtgcatgacgatgatgagtgcacccaaggcagccaaagccgccatcacgtgcagcgacgtggtgaaccacttgatcccgtgcttgtcctacgtacaaaacggcggtacacccgctgctgcatgctgcagtggggtaaaagcactctacggcgaggttcagacctccccggaccgccaaaacgtgtgcaagtgcatcaaatcggcggtgaacggaattccgtacaccagcaataacctcaatctcgcagccggcctacctgctaaatgtggtctccaactcccttacagcatcagcccctccactgactgcaacaaggtgcagtgaggttgatgatgatgatatggaaggagtggaagaaggttccagctcagctagataaagtagctagctaaggttaaataagctgtgttggtgtgttgttttttagaaaattccatatataatcggggaaagaaaaaaaaatagaaaatgtactttctaactgtatttcgtatgtgatatgtataatgtgtcgtaatctttatttattagtgatgctcctacgttttatacgagtctgtaatgacaatagctttcccttttccatatataggaaggctcatttggaaatgttatttgctttagatacttatttgccaaaaaaaaaaaaaaaaaaaaaaaaaaaaaaaaaaaaaaaaaaaaaaaaaaaaaaaaaaacaaaaaaaaaaaaaaaaaaagggggctagaggaatcaaactaaccatctcgggccccccgagttaaaaacttaatccttgtgtaaacaaaaccaaaaaatgtgaaaaacctgttcgatttt

SEQ ID NO: 6246 - DNA, 510 bp, Gossypium hirsutum
  unsure (1)..(510): unsure at all n locations
  Clone ID: LIB3584-005-P1-K1-E12
gcgttcgtaacactagtagnaagtttagttttacagacatgggtagttccggtgtccttaagttggtttccatgattctcatggtgtgcatgacgatgatgagtgcacccaaggcagccaaagccgccatcacgtgcagcgacgtggtgaaccacttgatcccgtgcttgtcctacgtacaaaggcggtgggcacccgctgctgcatgctgcagtggggtaaaagcactctacggcgaggttcagacctccccggaccgccaaaacgtgtgcaagtgcatcaaatcggcggtgaacggaattccgtacaccagcaataacctcaatctcgcagccggcctacctgctaaatgtggtctccaactcccttacagcatcagcccctccactgactgcaacaaggtgcagtgtggtttttgttgatgatntggaaggagtgcccgatggttccagctctccttgntttcgttgctcgctccgggttcctccgctgtgttggtgtgttgttttt

SEQ ID NO: 6247 - DNA, 281 bp, Gossypium hirsutum
  Clone ID: LIB3585-003-P1-K1-C7
cccacgcgtccgcccacgcgtccgcccacgcgtccgcccacgcgtccggctgtactttctaactgtatttcatatgtgatatgtataatgtgtcgtaatctttatttattagtgatgctcctacgttttatacgagtctgtaatgacaatagctttcccttttccatatataggaaggctcatttggaaatgttatttgctttcggttaaaaaagaaaaacatcgagctatcagaagcagatgaaaagcttcatgccacacataatctagaatgcagaacg

SEQ ID NO: 6248 - DNA, 236 bp, Gossypium hirsutum
  Clone ID: LIB3189-021-P1-K1-B4
ctcatatctctaattgaaggcttagttttacaaatcatgtttagtgtcacggagtcacttgaggtagtttcacatagatatagatgctgcacgaacagaatttgaggagtctgttgcgcaggcattctttgatatggcgaatgacgtggtgaaccacttgatcccgtgcttgtcctacgtacaaaacggttgttgaccagattgatgatgctgtaatggggtaaaagcactctacg

SEQ ID NO: 6249 - DNA, 491 bp, Gossypium hirsutum
  Clone ID: LIB3585-024-P1-K1-D7
caaaagaaaccttaccagttaccgctgctgcagccgttcccttcccctgaccccgcgctcagtcgtgctttacctccgtcgccgtcggccattccccctgcctcgccatctctctccggcggccttcgcttcgcctcctcatctctggctctgtccgtccgtcggccttgcctcgcctcctcatctctgcctcgttctttgtcagtttgttggtcgccatcgcccgtctacctttgttctaagttcaaaaatggcttccctccttaaggcctcttccaatgtattttggtccgagaagctacctttcttgtctagaagcaagacaagacaaggtgttgttccaaagaaagtaacatttcgttcagttcctgtcgcattatccttgtctacatcgactggaaccgttgaacatgacccaatatctaattctccggacattgcgatcccaatcatggtaaatggttgtaccggtaaaatgggaaagtctgtta

SEQ ID NO: 6250 - DNA, 264 bp, Gossypium hirsutum
  Clone ID: uC-gsflnu33B099g10b1
tcgcccacgcgtccggaaaatatctcaaatctcctcctcctcctcagtcgtgctttacctccgtcgccgtcggccattccccctgcctcgccatctctctccggcggccttcgcttcgcctcctcatctctggctctgtccgtccgtcggccttgccttgcctcctcatctctgcctcgttctttgtcagtttgttggtttgtcttttcccgtctaccttccgttcttagctttatactatggctccctccctttagggcccct

SEQ ID NO: 6251 - DNA, 585 bp, Gossypium hirsutum
  Clone ID: GOSHI-09MAY01-C1412_1
cggacgcgtgggcgcgagtccagcttatgagtacttagacactaagtttgggatccatggaagtgcgttgaaagtaacaaacatagcctttcgaatcttagctcgaggcagctaccttacaatcagcacgctagtatcagccatgttaccattccttggagatttcgagagcctaacgggagcattaagcacgttccctctaacattcatcctcgcgaaccacatgttcctcatggcgaagaagaacaaattgagttcattacaacaatcatggcattggttaaatgttgggttctttgcactcatgtctgttgcagccacagttgcaggtataagacttattattgtggattcgaaagagtatcatatatttgccgacgtgtgacgataatgctcgtaaattaatgaattgatgaagatgaaggggttgcagatattgagattacgaactcggggttgttacgggatgtgcatgtgttacgctgaccgtgttaaacctcgagtttgtatggaatattattacgtattccatcgctcgagtgatttttttttttcggttacgatgagtgtgtattcttttttaat

SEQ ID NO: 6252 - DNA, 663 bp, Gossypium hirsutum
  unsure (1)..(663): unsure at all n locations
  Clone ID: LIB3543-044-Q6-K6-A5
aaacatccctataaaaactagcaaggaatctgcgtttcaatggcgtctctgacccctatttcccactcccactcccactcccttcttaaaaggcccaacgttagacctcctcctcctcccagtttcttttccagtttcatcctcaaggatttcccatattccaaaactctctcccttaaacttcccaggatgcttactaggaacgtcgttgtatcagccacgacggcggagaagcccaggaagaggtatcctggggaagctaaagggtttgtggaagagatgaggttcgtggctatgaaattgcatactaaggagcaagccaaggaaggagagaaggaagtgaaacaacctgaagagcggcccgttcagagatgggagcccagcgttgatgggtacttgaagttccttgtggatagcaagttggtttacgatacgctcgaaggaattattgataaggctcctttccctagctgtgggtaccctttttctatttttattgaatctgaattctggctcctacatatgtttgtttttggttttttgatttcattagatcatagttgtgcatgttggactgtttttatacttattgtacttagttntgtttaggtgaagagttgattatatgatttgacatgggctgaatgacatgatctttttata

SEQ ID NO: 6253 - DNA, 604 bp, Gossypium hirsutum
  Clone ID: LIB3585-024-P1-K1-A10
cccacgcgtccgcccacgcgtccgaaggaatctgcgtttcaatggcgtctctgacccctatttcccactcccactcccactcccttcttaaaaggcccaacgttagacctcctcctcctcccagtttcttttccagtttcatcctcaaggatttcccatattccaaaactctctcccttaaacttcccaggatgcttactaggaacgtcgttgtatcagccacgacggcggagaagcccaggaagaggtatcctggggaagctaaagggtttgtggaagagatgaggttcgtggctatgaaattgcatactaaggagcaagccaaggaaggagagaaggaagtgaaacaacctgaagagcggcccgttcagagatgggagcccagcgttgatgggtacttgaagttccttgtggatagcaagttggtttacgatacgctcgaaggaattattgataaggctcctttccctagctatgctgaatttagagacactggactggaaaggtctgaaaaattggcaaaggatttacagtggttcaaagagcaaggctacactattccaaaaccatcttctcctggtgttacgtatgctgagtatctcaa

SEQ ID NO: 6254 - DNA, 647 bp, Gossypium hirsutum
  Clone ID: GOSHI-09MAY01-C101769_1
cccacgcgtccgcccacgcgtccggaaaaaaaaacctaacacttctcctatccattcgactaaaccaaaatccctcattcgaacgcccttacgtttctcttctcgacggaaggtgtcatataatggccaatcaaggtcttattcaaccataggtccgcgagtttcgctcaccagccttagaatcgttacctagcttcgattgtgatgaatcaagtgaggaatcgaaggagccgtctccctgtatgcatggtgtggagaagccgttcgtggtgacgtgtcgaggctcgggactcagtggcgctggagaccctcgctaaggaggctgcaattttggtcctagggtttcagtccttgaaaccggaatttgggccacctaggtcgagtttcaattgggttaaatttttgggctgtgatagttttcttgtaaataggctatgtaattaagtttattgggtctgttgggccataagagtaatttgtaaatggactggacacttattattggattttatttgggtattttgttttttttcattcgggttttggcatgggccccggcgaaatgggcctattataggggattctggggttctctttgatggggggccccccttcatctaattcattgatttgtaatcttctttctt

SEQ ID NO: 6255 - DNA, 1759 bp, Gossypium hirsutum
  Clone ID: GOSHI-09MAY01-C1752_1
ccaaaacttccctggttgaaaaacgaggcagaagcctcaagaaaggatgaatgttttgtctattgttttacgtaccagtaattatggggctgaaccaatgctgaaatcttgtggtgttaatataaactctaatttcacccaagtggatggacgtattctgccagcaccaaggttaagagtcggcaacggtgaagatttctttccaaggaatgggcgttggaattttaacaacaagaaattggtggagccatctaggattgaaagatgggctgttgtgaacttctcggctcctcgttgtgatccaaacaacattgcaagggatttgattcgttgtggagaaatgaaaggaattcgtattgatcccccatttgatatattcaatgagatgaaccagaatagacgcctttcacccgtcgttagagttgaaaaaatgtttgaacagatacagtctaaacttcctggagctccgcagttccttctttgtctgcttcctgataggaaaaactctgatctttatgggccatggaagcggaagaatctttctgagtatggcatcgtgactcagtgtatggcaccagctagggtgaacgatcaataccttacaaatcttcttctgaagatcaatgctaagcttggaggtcttaattcaatgctaactattgagcaaacaccttcaatccctatgatttcaaaggttccaactatcatccttggaatggatgtatctcatggctctcctgggcagtctgatgtgccttcaatagctgcggtggttagctccaggcaatggccattgatttcccgctatagggcatcagtccgtacacagtctccgaagcttgaaatgatagattctcttttcaaaccagtttctgacaaaggggatgagggtatcatgagggaggctctcttagacttttatacaagttcagggaagaggaagcctgatcagatcattattttcagggatggggttagcgagtctcagttcaatcaagttttgaacaaagaacttgatcaagttattgaggcttgcaagttccttgacgagaattggaaccctaagtttgtggttattgttgcacaaaaaaaccatcataccaagtttttccagcagggatctcctgacaatgtgctacctggtactgtcattgacaacaaagtatgccatccgaagaacaatgatttttacctttgtgctcatgctggaatgatagggaccacaaggccgacccactatcatgttctcttagaccaggttgggttttcagctgatgatctgcaggagcttgttcattctctatcctacgtgtatcaaaggagcaccacagccatatctgttgtggcccctatttgctacgctcatttggcagcttcacagttggggcaatttatgaagtttgaggatgcttcagagacatcatcgagccatggtggggtgactgctccgggagccatttctgtacctcagcttcccaggttgaaggataatgtcagcagctccatgttcttctgctgaaaaccgttgaaccatgtttttgtatagggcttttggattttggctaccaaaaactatttatgctgctttttcatgtctttagacttttgggttgcaacactcttaggtgttccgtatgttatctgaacttatgaacggttgtctagctaagctcacttctgcagtggcttttgtggctttttcctgtttggttttatactttgataaatatggtcaatggtttgctcttttgattctttt

SEQ ID NO: 6256 - DNA, 466 bp, Gossypium hirsutum
  Clone ID: LIB3166-015-P1-K1-A2
cggaccggaaggcccgcccagccgcacccgtacgaccacgctctttatggtccatgtaagcgttagattctttctgagtatggcatcgtggctcagggtatgtcaccagctagggtgaacgatcaataccttacaaatcttcttctgaagatcaatgctaagcttggaggtcttaattcaatgctaactattgagcaaacaccttcaatccctatgatttcaaaggttccaactatcatccttggaatggatgtatctcatggttctcctgggcagtctgatgtgccttcaatagctgcggtggttagctccaggcaatggccattgatttcccgctatagggcatcagtccgtacacagtctccgaagcttgaaatgatagattctcttttcaaaccagtttctgacaaaggggatgagggtatcatgagggaggctctcttagacttttatacaagttcaggga

SEQ ID NO: 6257 - DNA, 490 bp, Gossypium hirsutum
  Clone ID: GOSHI-09MAY01-C1712_1
gacttggattggaagcggagcgtctggacgagacgagccaacctacccttccctgccatgcgatagcttagctatagtgtcgcgtaacctaaattcactggactggccgtcacaacacaacgactggactgacaatgccgtgacccaactcaactgaatcgcatcgcatcacattctcgtctggtgaggtgatatcatagaggacaggaccgatcggactgcccaacagaagagcagcccaaacggaatgtggaacgcgacctgcactgtagcattacattcagcgcgtgtggtgtggacgctccgcgcaaccggtccactagactgggcagtaccgtacggtcctttcgctttgtttccttcctttcttgtcacgtcacgcgggtctgctcgtcaagctatgaattaaaggctcggcttacggtaccgattcaatgcagtactgtaccgcaactccaacaaaaaaaactagagtgaggggatacgtaac

SEQ ID NO: 6258 - DNA, 436 bp, Gossypium hirsutum
  Clone ID: LIB3585-050-P1-K1-H10
cccacgcgtccgcccacgcgtccgtttatattacaagccgaccttctagtcgatacgagctaaccttcccggggcgggcatgccacatcttttctattctatcacctaacctaaattcactgcactgccctttacaacacaacgactggactaacaataccgttacgtaactcaacttaattgcattacatcacattctcgtctggtcagctaatatcgtagagaccaggaccgatcggatttcccttcacaacagcagcctaaattgaatatggaacgcgacctgcactgtagcattacattcagcgcgtgtggtgtgttcgctccgcgcaacctgtccactagactgggcagtaccctacggtcctttccttttgttttcttcctttcttttcacgctacgctggtttgctcttcaagctatacattaaatgct

SEQ ID NO: 6259 - DNA, 621 bp, Gossypium hirsutum
  Clone ID: GOSHI-09MAY01-C1722_1
cggccgcgtgggcggccgcgtgggttcgaagtggagaactgaaactctgatcgatcaacgagtttagggttttagcttcgcaaagcttcttcttctatctcgtctcgcttataccttggaacactaaagcaaaaaacaagcgaatatggaggctggagatggaggcgctgaccgagtcgttgactcaaaggatttacaacaacaaagcaaagccttcgataaactcactgaccgtgtcgaagatcgacagcttgattcttctcgtgcccaatcggccatggcatcgattgcagcctcggctgaagcagaaaagaatgctatgagattgagagagaaagaattagctgctgttaaaatcaacgcggctgaagttgacatcattgcgaacgaattagagttggacaaaaaggtggctgagagaacactccgtgagcacaagggcgatgccgttgctgccattcgatcattgcttcactagaccgagccggcgacaaatgatatcactctaaactatttagaatcattaaactcagttttaaggcgatggcagttatgcttattggtttcattcaaaagacgtaaaaggcagttgtggcctttgtagattgtgtgaaataatgc

SEQ ID NO: 6260 - DNA, 394 bp, Gossypium hirsutum
  Clone ID: LIB3145-045-Q1-K1-A12
ctttttcactgtttcttcaactgaaaactcaggtcgattcaacgaacaacgttagggctttttaccatctgaagcttaaccaatagccgacaatggaagccggagatggaggggttgacgtagtcgttgattctaaggatttacagcaacagagtaaagccttcgataaactcaccgatcgtgtcgaagatcgccagctcgattcttctcgtgccaaatcggccatggcatcgattgcggcatcagctgaagcagaaaagaatgcaatgagattgagagagaaagaattagctgcagtaaagatcaacgcggccgatgtggacatcatcgcaaacgaactagagttggacaaaaaggttgcagagagaacacttcgcgagcacaaaggtgatgc

SEQ ID NO: 6261 - DNA, 1366 bp, Gossypium hirsutum
  Clone ID: GOSHI-09MAY01-C1692_1
cccacgcgtccgcccacgcgtccgcccacgcgtccgcccacgcgtccgggcaaacacgcttgggaagttgcaagatactcccccaggaaagccttttgctactcgagcaagagcacctcctttacctttccttctttcatctcttcttcaatcgagaccgcaagttaagcttcctgaagagcagtatggcgatgaggatggattagatgatgatttggatgaatcctccgactccgaggatgagccagaatatgatgagctgccacctttcaagcggttgagtaaagcacaaatagcaaagcttagtaaagctcagaagaaagcatattttgacgagttggaatatagggaaaagctttttatgaagaaacaactgaaggaagagaaaaagcggcgaaagatgatgaagaaaatggctgctgcagccaaggatctgccaagtgagtacggtgaaaatgcagaagaagaaagtagtggtgcttcttctgttccagttcccatgccagatttggtgttgcctgcttcttttgattctgataatccaactcatcgctatcgttcccttgattcctccaacccatggcttgttaggcctgttctagatacacatggttgggatcatgatgttggttacgaaggtattaatgtcgaaagactgtttgttgcaaaagagaaatttcctatttcattttctggccagattacaaaggacaaaagggatgccaatgtccaaatggaactagccagttctttaaagcatggggaaggtaaagcaacttcagtgggttttgatatgcagactgttggaaaggacttagcctatacactgcgcagcgagaccaggtttagtaatctgaagaagaataaggcaacagctggcatctcagttacactcttaggtgatgcactatcagctggaatgaaatttgaagacaaactgattgctaataagcagttccaggtagtcatgactgggggtgctatgacaggacgcggcgatcttgcttatgggggcagcttggaagcacaattgagggataaagattaccctctgggtcgctccttatctacacttggtctatctatcatggattggcatggagatctcgccattggatgcaatatacaatcacaggtacctgttggacggtctacaaatctaatagctcgtgccaatctgaataacaaaggcgcacgacaagtcagtttacgaataaatagctctgagcagcttcagcttgctttgacttctctctttccattactgaaaaaactatttgactatttccatcaagttcagtaatggacaatgatgaaaattaggtggcctaccggaatgacattttttaaaaatggccatatcttt

SEQ ID NO: 6262 - DNA, 527 bp, Gossypium hirsutum
  Clone ID: GOSHI-09MAY01-C101669_1
aagggctcagcatcgtttcgtgctacatcaatcgacggcagctttccgaatcccgagaatgactctgattgtgacgaagtgaactcgagaccagtcgccaggggacccttagcctcgtccgaccccgattatgacggagcgaacgaagaccaggtttgtgggggccgtacggtgatgtggcacggctcggtgtagcgcatggaggcggggcacgtggctgtggcgcacatgcgaaggcacacgagagggcagaggctcgacacgtggagacgaaggccctgggtggctgtggcgtggcatgtatagaggctaattggtgtgcatggaggctgctagggtttgccacagtgcattatgatattgggccttttgggctgaatcgatttgctggtttaggtttagggctaggctaatttgggtagtttgggttaaaatgagttgggccaccttgggcttgtgtaactggacatttgatttttttattatttaaatctagttttaaaatgaccgggttaaaattggttatt

SEQ ID NO: 6263 - DNA, 485 bp, Gossypium hirsutum
  Clone ID: GOSHI-09MAY01-C1652_3
tcctttggaacgtttaaagacggccccgccggctcagaatccacatagtataaaatacaacggaacggttcaaggcttgaagtatatttggagaacggaaggttttcgtggattattcaagggcaatggtactaattgtgcacgcattgttccaaactctgcggtcaaattcttcagctatgagcaagcttcaaagggaatcctgtatctatatcaacagcaaactggcaatgaagatgctcaactcactcctcttctacgccttggagctggagcatgtgctggaataattgccatgtctgcaacttacccaatggacatggtacgaggcaggcttactgtacagacagacagctctccttttcagtacagaggaatgtttcatgctctgtcaactgtgttgcggcaagaaggcccacgggcattggacaagggttggcttccttcagtcattggagttataccatatgtgggtttgaattttc

SEQ ID NO: 6264 - DNA, 728 bp, Gossypium hirsutum
  Clone ID: GOSHI-09MAY01-C1652_2
cccccgcgccccccctcgcctccgcaaacactaggacacaagggcaactgtggaatgcggagcctctttttactgtaaatcgcttcacagatctgattttcttgaccgccggataatccttctcgactttccgacatacttcgttgggcttttgtggcgagagacggactttcaaagttttctttccctgtttttgtttttccatggcttcagaggatgtgaagactagcgaatcggctgtgtccacgatcgtgaatctggccgaggaagcaaagctcgcgagagagggtgttaaggcccctagctatgctattcttagcatctgcaagtctctcgctgctggcggcgtcgccggtggagtgtcacgaactgctgttgctcctttggaacgtttaaaaatcttacttcaggttcaaaatccacatagtattaaatacaatggaacaattcaaggcttgaagtacatttggagaacagaaggttttcgcggattattcaaaggcaatggtactaattgtgcgcgcattgttccaaactcggcggtcaagttcttcagctacgagcaagcttcaaagggaatcctatatctgcatcaacggcaaactggcaatggtatgatcaatattgccatcgtctttttgctgagcaaccatctcatgtttgctttacactgataacatatggaattcagttatcttttaggttcatcgattgatgcctgcatacat

SEQ ID NO: 6265 - DNA, 1353 bp, Gossypium hirsutum
  Clone ID: GOSHI-09MAY01-C1652_1
cccacgcgtccgcccacgcgtccgcccacatatatcgcctcggagatcggacccttgagtcgccggataatcatcgacgactgcccgagactccgccggagccaccagaaaagtacttcttaccgtttctacggcgagagagtggatttgaatatattggccgtgttttggttttcgatggcttcggaggatgtgaagactagtgaatcagctgtttcgacgatcgtgaatctagctgaagaagcgaagctcgctagagaaggcgttaaagctcccagttatgctgttcttagtatctgcaagtctctcgttgccggcggcgttgctggtggagtgtcacgaactgccgttgctcctttggaacgtttaaaaatcttacttcaggttcagaatccacatagtgtaaaatacaatggaacaattcaaggcttgaagtacatttggagaacagaaggttttcgcggattattcaaaggcaacggtactaattgcgctcgcattgttccaaactcggccgtcaagttcttcagctacgagcaagcgtcaaagggaatcctatatctgcatcaacggcaaactggcaatgaagatgctcaactcactcctcttttacgccttggagctggagcatgtgctggaataattgccatgtctgcaacttaccctatggacatggtacgaggcaggatcaccgtacagacagaccgttctccttccccgcgtccggggatgttccatgctctatccactgtgttgcgggaagaaggtccacgagcattgtataagggttggcttccttcagtcattggagttataccatacgtgggtctgaacttttctgtgtatgaatctctaaaagattggttaatcaaaagtagaccatttggattggttgaagactctgagttgagtgtgacgaccaggcttgcttgtggtgctgctgctggaactgtaggccaaactgttgcttaccctcttgatgtgattcgcagaagaatgcaaatggtaggatggaaagatgcagcgtcagttgtatctggtgatgggaggaacaaggcctctcttgaatatactggcatgattgatgctttcaggaaaactgttaggcatgaaggctttggagcattgtacaagggtctggtccctaattccgtgaaggttgtaccatcaatagctattgcatttgtgtcatacgaggtggtgaaggacattttaggagttgagattagaatatcagactgaaatggtgccaattcaacttaatgtttatgaggtgtgtggtatttttgtaggcaaggggatagagagaaaggtaaagtagggatgatcttcttaacctttttgtctgggaaa

SEQ ID NO: 6266 - DNA, 900 bp, Gossypium hirsutum
  Clone ID: GOSHI-09MAY01-C1672_1
ataaattctggaaacagcattaagcgccgaaccgtgcccattagaaaacgctctgaaatctgtcaacccatcctttcatttccttttcagttttgacgatttcaatcccccaaaagcttatcttcccaaaagcatttctattttctatgaagctttcccctcccgtccgctttctttcccagcaaaactctcaatctggttcccgttcccattcacgcctctcttggtcttcagcataagtagggactttcatttccaggtatactttctctttcctctttagagtttcagttgcgatggtatgagcgagggtatttgtttgtctcggtgtgtgattgaatctgattatgttcgcttttttattctcctgctgtatatcatggatatatgtcgctatcaatgaccgatcctgatcttgggttctacattttctgattattgtgagggaatctccttctataatgattgaatgccagcccttctccacccctgtttgaactgctttccaacatgctattgcttcagcagcaaaagctgaggtaatcccgtgatgaagctctgagcgtgatactaggactcttccttcctgattcctggctactatacgtgatgccgacttgttctgcctctcattgaacgcaccgtcgaagttaatcttgacaaaattatgagcgccccatatggcccaaagcgcgcaacagaaaagatgacatttgcaaggattgaactgctcaaaaacccatggcattctcggaataaatggtcaatagtctcaacccctttcccacatcgaggacaatttgtgcaatttgcaaggtttctgcttcgcatatttgtctttgtaggcagatagttccttgaaaatttccaaactgtaatctttattctctctggtatatg

SEQ ID NO: 6267 - DNA, 566 bp, Gossypium hirsutum
  Clone ID: LIB3583-030-Q6-K1-G10
tttcctactgctttctttcccagcaaaactctcaatctggttcccgttcccattcacgcctctcttggtcttcagcataagtagggactttcatttccagcccttctccacccctgtttgaactgctttccaacatgctattgcttcagcagcaaaagctgaggtaatcccgtgatgaagctctgagcgtgatactaggactcttccttcctgattcctggctactatacgtgatgccgacttgttctgcctctcattgaacgcaccgtcgaagttaatcttgacaaaattatgagcgccccatatggcccaaagcgcgcaacagaaaagatgacatttgcaaggattgaactgctcaaaaacccatggcattctcggaataaatggtcaatagtctcaacccctttcccacatcgaggacaatttgtgcaatttgcaaggtttctgcttcgcatatttgtctttgtaggcagatagttccttgaaaatttcaaactgtaatctttattctttctggtatatgaaggaaccagagtttttataaaaattcctataaatgggctgta

SEQ ID NO: 6268 - DNA, 510 bp, Gossypium hirsutum
  unsure (1)..(510): unsure at all n locations
  Clone ID: LIB3829-009-Q6-N6-B11
aattcaaaaaccttctcagaaaagaaggctgcaggagtccttcctgttctattggggcagatacctcaccaggatttttttatttggggggggcaggggtcangcgagattctcagtgcccagtgcctataaactattacaagtgtatgagggggattcctagagcttatgctttacagaccatctataggagatttttataaaaaaactctgggtccttcatataccagagagagataaagattacagtgttgggaaattttcaaggagctatctgcctacaaagacaaatatgcgaagcagaaaccttgcaaattgcacaaattggcctccatgtgggaaagggggtnagactattgaccatttattcccagagtgccctgtgtcaatgggggtgtggacagcgttatccattcagaataatattagtgggtcaaaacatggattttataaagtgggttacatgggggttttgagcaggtcaatccttgcgaaatgtgcatcttttct

SEQ ID NO: 6269 - DNA, 585 bp, Gossypium hirsutum
  Clone ID: GOSHI-09MAY01-C1662_1
cccacgcgtccgcccacgcgtccggaaagagagctgagagatcagctttttggggggtatataaaaagacggatatctatgggatttcaacttcggaacaattagatgttgatgatcttttggatttgtccaacgatgagttttttccctctgcttcggccgccaccagccatgatcagttccctccttctgagacccctttcagcgacgcttccgccgcttcctcctcctctgccgccctcactccctctttctccttagactttaaccacgatatttgccttcctagtgatgacgtggctgagctggagtggttgtcgcagttcgttgaagattccttcaccgacttcccctcatactcgctccccggaatccttaaccctagaaatgataactcgtcgttttcaagcaaagctcggagcaagcgttccagagcggtaacaacattgaacggcacaaactggacgacgacgacgtctggagcggcaggtaccttaacgggaaaaacaaagacgaaaagggaaatccaacgtcaagcatccccggcagcggtagaagggatgaagcgatgctcacactgcgcgt

SEQ ID NO: 6270 - DNA, 1531 bp, Gossypium hirsutum
  Clone ID: GOSHI-09MAY01-C1192_1
catttaaccattgctcaaaaccacaccactggcttgtagaccgccatgaaatagaccttcgatctaacacctttccttttcatttcccctttccttaaaaacaagctcaatcaattcccccattaaccctaaacgaaaatcagctgaaaaaaaaaccatttatttttcttcagctctaagcgacaagaacaatggctgacttcaagaaagccactgctttgattctcacagtggctttgcttgtgaatctcgctttaatggttgatgctgatggtgatgatgataagaagattcgagtcaggaaacataagggtgagaagcagtgtatacaagggtgggaatgttcctactggtcgaaatattgttgcaaccaaacgatttcagatgtcttccaggtttatcaatttgaggacctgtttgctaaaaggaattcgccggtggctcatgctgttggattttgggattaccattcttttattttggctgcttccatttatgagcctttgggttttgggactactggtggtaagcatatgcaaatgaaggaagtcgcggcttttcttgctcatgtcggcgccaagacatcttgtggagatggtgtcatagacggaggaccgttggcttggggtctttgcttcaagagagaaatgagtcctagccaggattactgtgatgattactacaaatacatgtatccatgtgcccctggagctcaatactacggccgtggtgctttgccaatttactggaactacaactatggagctgctggcgatggtataaaagttgatttgttgcaccaccctgagtatctcgagcagaacgcaactattgccttccaggctgccatctggaggtggatgaccccaatcaagaagaaccaaccttcagcacacgacattttcgtgggtaactggaaaccaaccaagaatgacacagaggaaaaacggggtcctacttttggctccaccatgaacgttctctacggagattacacttgcgggcaaggcgatatcgatcccatgaacatcatcatctcccattaccttcattaccttgacttactaggtgttgggcgagaggaagcagggccacacgaggagctaagctgtgccgagcagaaagcattcaacccaaccccagctccacctgctgccagtgcttcctgatctttggttcagccaatttcattgttaaaatgcagttgtcaatgaagggtaatttaataagagagctgggcaattaggttgttgtaaaatcatggtctatgtcggtgtgagaaaagggcccatcaatttcatgatattatatatagttgtatacgtttgatttgctgctgttaggtggtctttataatttgcttttttgtgtgtgtgtagattttgatatatttgatgcttgttgtgctgtccacgacattcatataaaattgtatgtattgaaccaccatttttattcaatttgtctcctaaaattatttgctattataaagaaataatataatttgtttatataaaaaaaggggcggccg

SEQ ID NO: 6271 - DNA, 594 bp, Gossypium hirsutum
  Clone ID: LIB3543-039-Q1-K1-H8
gtcgacccagcgttcgccccgcgtccgccccgcgtccgctggagagaaaaaaccatttatttttcttcagctctaagcgacaacaacaatggctgacttcaagaaagccactgctttgattctcacagtggctttgcttgtgaatctcgctttaatggttgatgctgatggtgatgatgataagaagattcggggggggaaacataagggtgagaagcagtgtatacaaggatgggaatgttcctactggtcgaaatattgttgcaacaaaacggtttcagatgtcttccaggtttatcaatttgaggacctgtttgctaaaaggaattcgccggtggctcatgctgttggattttgggattaccattcttttattttggctgcttccatttatgagcctttgggttttgggactactggtggtaagcgtatgcaaatgaaggaagtcgcggcttttcttgcacatgtcggcgccaagacatcttgtggagatggtgtcatagacggaggaccgttggcatggggtctttgcttcaagagagaaatgagtcctagccaggattactgtgatgattactacaaatacatgtatcc

SEQ ID NO: 6272 - DNA, 539 bp, Gossypium hirsutum
  Clone ID: LIB3584-042-P1-K1-G9
cccacgcgtacgaggacgcgtgggcggacgcgtgttctagacagaaatgagtgctctccagcattactggggtgatgactacaaatacatgtattcatgtgcccctggagcttaatactacgtgcgtattgctttgccaatttactggaactacaactatggagctgctggcgatggtataaaagtcgatttgttgtaccactctgagtatatctagcagaacgaaactattgcctttcaggctacaatctataggtggatgaccccaatcaagaagaaccaaccttcatcacacgacatattcgtgggtaacttggaaaccaaccaataatgacacaaaggaaaaacggcgatctacttttggctccaccatgaacgttgtatacggagattacacttgcggacaaggcgattttgatcccatgaacatgattattttccattacctatattaccttgacttactaatgtttgtgccagaggaaacaaggccaaactaggagctatatttgactgagcagaaagcatttaacccaacc

SEQ ID NO: 6273 - DNA, 480 bp, Gossypium hirsutum
  Clone ID: uC-gsflnu33B144e02b1
cggtcgcttgggcggacgcgtgggcggacgcgtgggcggacgcgtggggcacacgacattttcgtgggcaactggaaaccaaccaagaacgacacagaggaaaaacggggtcctacttttggctccaccatgaacgttctctacggagattacacttgcgggcaaggcgatattgatcccatgaacatcatcatctcccattaccttcattaccttgacttactaggtgtcgggcgagaggaagcagggccacacgaggagctaagctgtgccgagcagaaagcattcaacccaaccccagctccacctgctgccagtgctttctaatctttgggtcagccaatttcattgttaaaatgtagttgtcaatgaagggtaatttaataagagagctgggcaattaggttggtgtaaaatcatggtctatgtcggtgtgagaaaaggggccatcaatttcatgatattatatataggtatata

SEQ ID NO: 6274 - DNA, 328 bp, Gossypium hirsutum
  Clone ID: LIB3149-020-Q1-K1-A8
aaggaattcgccggtggctcatgctgttggattttgggattaccattcttttattttggctgcttccatttatgagcctttgggttttgggactactggtggtaagcgtatgcaaatgaaggaagtcgcggcttttcttgcacatgtcggcgccaagacatcttttggggagagggtgatataccggggagcttttggatggggggttttcttttcaagagagaaatgagtcctagccaggattactgtgatgattactacaaatacatgtatccatgtgcccctggagctcaatactatggccgtggtgctttggcaatttactgga

SEQ ID NO: 6275 - DNA, 996 bp, Gossypium hirsutum
  Clone ID: GOSHI-09MAY01-C1182_1
aaatacggctattcacgcgtccggaaagcaagaaaatagtctccttttttttttctcttcttctgcaaatccttttctacaacgaccctaagaaaacggcggcatcttctagaaaatcgagtggaccggttctccgatccctctccccatcaggccgattcagttctcactatgtttcacactctccgtcttcttcttcctcggcttttgcttattccagttcgagctttacttcacgctcttctactttctttaatcaacctagatctatttctccaccgcgcgtcaatgtttataaccacactcaatcgtcgcagtctgttcgattctcgctcgatagccgtccgatctcgccgaatcgttcgatttcagctgtccgtagaaacaccgaggcgttgagaaatttacagagcaaacagccaaagcgtacctgtatgtgttcccctacgacgcatcctggatcgtttcgttgcagtcttcataaaggattcaataattcgcacgcgtcgtctggttacgcgcctagcaatcggctcaacgcgcgtagatctgcgatgacgaactcgctggtgagaattggaggagtcgaaggagatttggttaagagagcgttgtcggctttgattaggccttcctctcaccagcagcgtcgccgagcagcgttccagccgaggccgagccggctttccgtgatgtctaaagcggaggatttatgaagattccttttgcggtatgtgtaatcttctaatgctttttggttaagtctccaagattttccggtgataggggatcgagcttcggagtaacgccggatggtagcgttgcagtcagatttcggcgtagaggttggagatctggacgaaggattcgggacggatatgatttttagtgtactccgggcgaccgaaaccgtaaaatccgaggaacaaattatcatatagtttgttggtgtaaatacatatatttgcaggcaatggtaaatttgaggagcttttg

SEQ ID NO: 6276 - DNA, 406 bp, Gossypium hirsutum
  Clone ID: LIB3165-017-P1-K1-D10
cagccaaacacggctatatagaaatatttaatgcaaaaaaaaaaaaatattctccttggtgtttctcttctcctgcaaattattttctacaatacccttaaaaaatggcggcatcttctagaaaatcgagtggaccggttctccgatccctctccccatcaggccgattcagttctcattatgtgtcacactctccgtcttcttcttcctcggcttttgcttattccagttcgagctttacttcacgctcttctactttctttaatcaacctagatctatttctccgccgcgcgtcaatgtttataaccacactcaatcgtcgcagtctgttcgattctcgctcgatagccgtccgatctcgccgaatcgttcgatttcagctgtccgtagaaacgccgaggcgtt

SEQ ID NO: 6277 - DNA, 882 bp, Gossypium hirsutum
  Clone ID: GOSHI-09MAY01-C1152_2
caaaatgtgaaatggttcggtgcggtttctgtcggaatacttgctagctcggctaatatcgatgagacggtggttgagaagagaggggaagaggagaatcctcgaatgccggttcaaggtccggcttgtaacgtgtctaatatgttggcagggtggcatacgtttaacacattgccatttgctgggaaaactgctgtttatattgatgatagagcaaccgtgctgcctaggaagttggagtggtcgggattcattttgaattctagtttgctttggaaagacggagataagccggaatggatgaaagatattgatacgttggatggggatattgagagtcccctgggtttggttaatgacccttcggtggtggagccacttggaaactgcggtcgtcaggttttgctctggtggcttcgagttgaagctcgtgctgatagcgaatttcctcccagatggataattgacccacctctggagatcacggtcccatcaaaacgcactccatggccagatgctcccccggaactccctgctaatgaaaaaccagctgtgggcattcaagatccaatagtgaagcatagcacaaagaggacatccagatcaaaacatcgaagtaaaagaaagcatgaaccaaaaactgacacacaggtttcgacaaggcattctgaacaaaactaaaatctttaccccaccacctatggaactgctgcaccatgagattggaccaaatagggggcaaatgtagatggtgttaccagtaaatatggagaagcacctctcacaacaatccaggttttacgtgcaattcaattcgagtttgtcccagggttcaaacattttttaaaatttctttctattctttttacttttatggttttt

SEQ ID NO: 6278 - DNA, 2010 bp, Gossypium hirsutum
  Clone ID: GOSHI-09MAY01-C1152_1
gcaaatttaggaaaagaaatttatttcttcccaaattaaaaccctccatttgatttcctttttacgaaatgtgtctaaattcccctaaaccacgcgcttatgtcccaaacaaaaagaattagaagatgggcatgccacaaacccaagagcagcaatctgacagtaaccctgaatcaattcaaccgtaattccaaagtaatcgatttcctaagcccccacccaatcgacctacccaaatatttgaaaacataatcataattcctgttatatttccatccctcgcgtccgccgccgcgtcgctctgttgcaggagcttcggagacgacagatttcgaagaggatgaagctttctgcgttgcaccagagctacatcagccgtcgaaccaacagcttcagatcatctgggccgttggattcgtcttccgacagtgccattaaatcccctgccgccattttctggcttgtcttccatgctctttgttgtttaatcagcttgctcctcggctaccgcttttctcgcttggtcttcttctttttgttctccacttcttctactaacttctatacgtcgccgttccgatccactgccgagctcgtcaaaaccctcgatgtccactccgttctctccaacaaccccgtcgccaaccttgacttgcctttgcttaacaagaccgtcaccaattcgagggtcgtcgtggggcgccacgggatccggatcaggccgtggccgcatccggacccggttgaggtcatgaaggcgcaccggatcatagaaatagttcaaaaggagcagaggtcacaattcggcatcaagaatcccaggacggttatcgtggtcactccgacgtatgtacgcactttccaagcgctgcatttgaccggtgtgatgcactctctaatgctggttccctacgatctggtttggatcgtggtggaagctggtggcgtcagcaacgaaacggcgtcgcttattgcgaaatcgggtttgaaaactatccacgtcggattcaatcaacggatgccgaattcctgggaagaacgacataaattagagtccaagatgcgtcttcgtgctctaagaattattagagagaagaaattggatggaattgttatgtttgccgatgatagcaatatgcatagtatggaactttttgatgagatccaaaatgtgaaatggttcggggctgtttcagttggaatacttactcattcggttaatactgatgagatggcggatcggaaaaaggatgaagaggagaatcctagaatgcctgttcaaggcccggcttgtaacgcctctaatatgttggcggggtggcatacgtttaacacattgccgtttgctgggaaaagtgcggtttatatcgatgatagagcgaccgtgctgcctaggaagttggagtggtcgggattcgttttgaattctaggttgctttggaaagatggagataagccggaatggatgaaagatatcgatacattggatggggatatcgagagtccactggatttggttaaagacccatcggtggtggagcctcttggaagctgcggtcgccgggttttgctctggtggcttcgagttgaagctcgtgccgatagcaagttccctcccagatggataattgacccacctctggaggtcaccgtcccatcaaaacgcactccatggcccgatgctccccccggaactccctgctcacaagaagccagtgataggaatccaagaaccaatcatcaagcatactacaaagacacgaacatccagatcaaaacgtcgaagtaaaagaaagcacgatgaaacaagaacagacagacgcacaacaggtttcgacaagacattacaaaactaaaaaaatcattagcccaggaatgtatacaccctgaccgagttaaaaccaccgtgccaagaccgagttggggggaatgcagatggatcttatcaggcattgggtatgtatccatgtgcacccttttaccgtaggccgagttatacatgcttttccg

SEQ ID NO: 6279 - DNA, 525 bp, Gossypium hirsutum
  Clone ID: uC-gsflnu33B025a12b1
tctttcacgcgtccggggaaaactgctgtttatattgatgatagagcaaccgtgctgcctaggaagttggagtggtcgggattcattttgaattctagtttgctttggaaagacggagataagccggaatggatgaaagatattgatacattggatggggatatcgagagtccattggatttggttaaagacccgtcggtggagggcctcttgaagctgtggacgcgagttatgctttggctggcctctcgagtttgaaagacttcgcattgcttgtattatgtcaaaaagttttttttccccttttcccctttttgctttatttgggggatattttaataatttttttgtggtatacccccccccttaatcccccccttttttttttgggggggctaagtgaaaaatttatccctaaatccctgttgggctttttctctcccccccccaaatttcttccaaattaaaataataatattcctgggtgccccaaataactcctttttttcctctcccaatatattt

SEQ ID NO: 6280 - DNA, 378 bp, Gossypium hirsutum
  Clone ID: uC-gsronu33b112a06b1
tttcattatatgtaattttactcactaaaacatatggtttcgtgataacagtacggataccgaggtcactccgacgtagggacgcactttccaagctctgcattcgaccggggtgatgcactctatagtgctggttccctacgatctgggttggatcgctgaggacgctggtggcgaaagcagcgaaacggcgtatgttattgcgaaatcgggtttgaaaactatccacgccggattcaatcaacggatgccgataccctgggaagaacgacataaattagatgccaagatgcgtctgcgtgctctaagaattattagagagaagacattgatggaactgttatgtttgccgatgatagcaattgcatagtatggaac

SEQ ID NO: 6281 - DNA, 798 bp, Gossypium hirsutum
  Clone ID: GOSHI-09MAY01-C1142_1
caaatcaacaaaatccaaaacatcatttccgcaccaaaaaagaaacgcgcatttacgttgggagagttcagcgaaaatggcaggcgaagcagcagcggcggcgaatttctggggtgatacgccggaggaagactattacaggtcgcagggtgtacgcaacaccaagtcttacttcgacactcccaacggaacgctcttcacccagagcttcttacccttggataaaaaagtgaaggcctccgtctacatgacccacggctatggatccgacactggttggctcttccagaagatctgcatcaacttttccaattggggttacgctgttttcgccgctgatcttctcggccatggcagatccgagggtctccgctgctacttaggtgacatggagaaagttgctgcaacatccttatcattcttcaagcacgtccggaacagcgatgaatacaaagacttacccgcattcctgtttggtgaatccatgggaggagcagcaacaatgctcatgtactttcaatccgaccctgaaacttggacgggtctaattttctcggcgccgctctttgtgatgcctgagaacatgaagccgagtaaggtgcggttgttcgtgtacggtctgctcttcggattagctgatacatgggcaactatgccggataacaagatggttgggaaagcaatcaaagacccagcaaagcttaagatcatagcatcaaatccaagaagatacactggaccaccaagggttggaaccatgagggagctggctagggtttgtcagtacattcaagacaa

SEQ ID NO: 6282 - DNA, 1012 bp, Gossypium hirsutum
  Clone ID: GOSHI-09MAY01-C1172_1
ggcaccacagactgttcctccctcattaacaggagcacttgctatagttccgcaaccatcgaaggataaatttgagcccaagtcagcagtttgggctgatacattgagcagaggactggtcaatttgaatatatctggacctaaaacaaacccactgtctgatattggagttgactttgatgctattaatcggaaggaaagaggttggaaaagcctgccccaactgcaataacgtctactgtcacaatgggtaaagctatgggatctggttctggaattggccgtgctggtgctagtgttctcagagctccagcaaatcctatggtgggttccggcatgggtatgggaatgggtggtggtcctgttggaggtgttggcatgggaggctatgttggtatgaatcaacaacctatgggcatgggaatggggatgaacatgggcatgaacccaggcatggggatgaacaacatgggcatgaatccaggcatggggatgagcaatatgggcataaatccaggcatggggatgagcaatatgggcatgaatccaggcatggggatgagcaatatgggcatgaatccaggcatggggatgagtaatatgggcatgaataaaggcatggggatgagtaatatggacatgaataacggcatggggatgaacatgggcatgaatccaggcatggggatgaacaacatgggcatgaatccaggcatggagatgaacaatatgggcatgagcgcaggcatggggatgaacatgggaatggggcaggcaacccacatgcaatctcaaagtgggatgcctggcggttacaaccctatgatgggttccagtggctactctcaacagcaacatggtggtggtggtggttaccgatgagaaatcattgtcaagtagagtaacggaagttacatccctgcttgtgatgcaagattaaaagaggttgaaatagcaagacccaggtgtcgccatcgaattccagagtttagtggcagcggcctgatgatgc

SEQ ID NO: 6283 - DNA, 388 bp, Gossypium hirsutum
  Clone ID: LIB3083-068-Q1-L1-C11
gaatggggcagtcaacccacatgcaatctcaaagtgggatgcctggcggttacaaccctatgatgggtttcagcggctactctgaacagctacatggtggtggcggtggttaccgacttgaattgattgagcaggggagtaacggtagttacatccttgcttgtgacgcaagtgtaaaagggggtgatgttgcttgacacacgtgtttcaatgaaattgcagactttaatgacgtccctctggccatgcgatccatatcttattaccgactgttattgatgatacgagaactggcgcttactgtgagctgttccacccagaacagcttatttgctggatggaggacgcagttttcagctttgtgcgtggtcactacagccttggcaag

SEQ ID NO: 6284 - DNA, 756 bp, Gossypium hirsutum
  Clone ID: GOSHI-09MAY01-C1102_1
aaagcatccctacaagtacaagtcccccccaccaccaccaccgcaccacccaagcacccttacaagtacaagtccccacccccaccgtcaccacccaagcacccctacaagtacaagtcccctccaccaccaccaccatcaccccccaagcatccttacaagtgcaagtccccacccccaccgtcaccacccaagcacccctacaagtacaagtcacccccaccacccccaccatcaccccccaagcacccttacaagtacaagtctccaccacctcctcctccagtttacaaatacaagtctcctccaccaccaccaccccattatgtctacgcttcaccccctcctcctcaccactactaagccacggctttgaccgtgctccaatccaagtggaaaagataatgctgtgatgcaaataaagctacaaaaagatagtttgaaaaggatatatctagagagataaagcaaaagattgggagcctagactagtctccgcgtttgaactgaagaacaataatgatgtagacaaattgcatttcaatgctgtattattcagtggtttcgcccgtatttatttatttccaattctgcttaataataaaaatgattagtatatataatcctgtacgtgttttccaaccattttgcatgagtttctgtccattcctaaattaaaggtccaccccttttttaataaaataaaaaaagggcggaaaaataaaatattaaagagaaaagatcataaaacttaat

SEQ ID NO: 6285 - DNA, 1156 bp, Gossypium hirsutum
  Clone ID: GOSHI-09MAY01-C1132_2
gttgaggatgccggcaccccatctgccggccagcagaaaaatgcttcttctgtctcaaaatttgatgaaaaacatgttgcctttgtaaagttctcagagaagcataggaagttgttaaatgcttttatccgccagaatcctggcctccttgagaagtcattttcactcatgctgaaggttccccgctttgtcgatttccccgcgtccccccctcacttcaggcccaaactaaagcatcaacaacatgatcatcatcacagtcctctaagaatatcggttagaagagcttacatacttgaggattcttataaccaactacgtttgcgatcaactcaagatttgaaggggaggttgactgttcacttccaaggagaggaaggtattgatgctggcgggcttacaagggaatggtatcagctgttgtccagagttatatttgacaaaggagcattgcttttcactacagtggggaatgagtcaacattccagcctaaccccaactcagtctaccaaactgaacatctttcatacttcaaatttgttggacgagttgttggcaaagcactttttgatgggcaactcttggatgtccacttcactagatctttctacaagcatatcttgggggccaaagttacttatcatgacattgaagcaattgatcctgattacttcaaaaacctgaagtggatgcttgagaatgatattagtgatgtcctagaccttacttttagcattgatgctgacgaggagaagctgatattgtatgaaaggacacaggtgactgactatgagctgattcccggtgggcggaacattaaagttactgaggagaataaacaccaatatgttgatttagttgctgagcatcgtttgacaactgctattcgtccacaaatcaatgcatttttggaaggattcaatgaattaattcccagggaattaataactatttttaatgacaaggagctggagttactgataagtggtctaccagaaatagatatggatgatatgagggcaaataccgagtactctggttttagtgctgcatcacctggtatacagtggcacatgggggttgggatggcttacactcaagcatatggttttaaccatcacaacagtcctggaaaacaccattggttctgggtat

SEQ ID NO: 6286 - DNA, 990 bp, Gossypium hirsutum
  Clone ID: GOSHI-09MAY01-C1132_1
cccagcgtccgcaagcagcaaaggcatgatatattgtggttcactcacctatacgcaagctacttacttatagataaggttggactaaggctcttataaatacattgaagtcataagtatctgtatgtttcattatgccaattaaacaaaccctgaagatggattattgaacgcacggcagcctaacaagatatatctaccctgatgaagaaaaagctgatattgaatgaaaaggacacaggtgactgaactatgagctgattcctggtggtcgagaacattaaagttactgaggagattaaacaccagtacgttgacttggttgctgagcatcgtctgacaactgctattcgtcctcaaataaatgcatttttggaaggattcaatgaattaattcctagggaattaatttctgtttttaatgacaaggagctggagttactgataagtggtcttcctgatattgatctggatgacatgagggcaaatacggagtactctggttttagtgctgcatcacctgttattcagtggttttgggaggttgtccaggggttcagcaaggaggataaagctcggcttcttcagtttgtgactggtacctcaaaggtgcctttagaaggttttagtgcacttcaaggaatttcaggttcacagaagttccagatacacaaagcatatggcagccctgatcacttgccttctgctcatacctgtttcaatcaattggatttacccgagtatccatcgaaggaacatctaaaaaagaggttgttgcttgcaattcacgaaaccaatgaaaggttcggatttggttaaggttcaaggtggtaatcaaacttatggtgtaaataaagatatataaatgcacaactgaaacgggattggtatcttgttatggggggtataagaagacttggaaccgacttctgaagtgatacatcatgtttatatacttactgtacagtcgcaaattgactatttagaagt

SEQ ID NO: 6287 - DNA, 506 bp, Gossypium hirsutum
  Clone ID: AI726738.1
ctgatgtcgaggatgccaacacatcttcaggccagctgaaaacttctggtcctatcacaaaatttgatgaaaaacatgtctttgtgaagttctcggagaagcataggaagttgttaaatgctttcatccgccagaatcctgggctgcttgataagtcattttcacttcttcttaaagttccccgctttgttgattttgataacaaacgggctcacttcaggtccaaaataaagcatcaacatgatcatcttcacagtcctctaagaatatcggttagaagagcttacatacttgaggattcatataaccagctacggatgcggtcaactcaagatttgaaggggaggttgactgttcacttccaaggacaagaaggtattgatgcaggtgggcttacaacggaatggtatcagctcttatccagggttatatttgacaaaggagctttgctgttcactacagtgggcaacgaatcaacgttccagcctaatcccaactccgtctat

SEQ ID NO: 6288 - DNA, 442 bp, Gossypium hirsutum
  Clone ID: LIB3147-058-Q1-K1-H1
cccacgcgtccgcccacgcgtccgcccacgcgttcgaatgaattaattcctagggaattaatggctatttttaatgacaaggagctggagttactgataagtggtctaccagaaatagatatggatgatatgagggcaaataccgagtactctggttttagtgctgcatcacctgttatacagtggttttgggaggttgtccaagggttcagtaaggaggataaagctcggcttctacagtttgtgactggtacctcaaaggtgcctttagaaggttttagtgcacttcaaggaatttcaggttcacagaagttccagatacagaaagcatatggcagccctgatcacttgccttctgctcatacctgtttcaatcaattggatttacccgagtatccatcgaaagaacatctaaaaaaaaagttgctgcttgcaattcacg

SEQ ID NO: 6289 - DNA, 570 bp, Gossypium hirsutum
  Clone ID: GOSHI-09MAY01-C1122_1
cccacgcgtccgcccacgcgtccgcccacgcgtccgaatgactggaaacttcatgacatcagcttacggagctcaagctcctcctcatcaaggacttggggttctacctggcactcctttagtcggtcactcttactttcctcatcatggtatgccagtcatgaacccagcattctcaggttcttccatggaacagatgaacgcaatttgctggagcagggtcccatgcccaaagtggccagttatctggaaatggagctaactttaacatgcagcaacaaagttcatctaatctgccgagtgagaagaatgttgctattcctcctgtcgtgaagtttcaggcatctaaagacaccgagcaacgaagatgtacagcaagcagtccaggtgagagagcagagaaagacgggacctgtaatactgctgaaggaaaaaatacacctcttatccttatagctccagcctatccacagggagcctcgaagcctaacgaaactgaccagaggacaagggtgatacgagttgtgcctcataatcctagatcagccaccgaatcagcagcacgtattt

SEQ ID NO: 6290 - DNA, 568 bp, Gossypium hirsutum
  Clone ID: GOSHI-09MAY01-C1092_3
cccacgcgtccgcccacgcgtccggtgactacattgaccctaacttcacctggaagaacttcaatctcgaggagcaggccaaagttatcgtagccccgagaagcaacaacaaacttgatgcgaccaaattgaagacagaattccctgagctcctttcgattaaagagtctcttattaagtatgtattcgaaccgaataagaagactggtggagcttgatcagttactttgcctgttgtcgactttgtcttcaaaggtaaactatgtgagactagttgagcttgagattttaggttatgaattcattgattttcctctctttttttatcatcttttttatgaatttggttcgtgtgggtcgatatggatggtgataacctcgggcgatacgcacgcacgcctcttcccagatgactcgaaagattgctggtattttgtatttgaatgttgtattcatatatgaacatttgaataagtcagttggaaatggttttatctggttatgaatatgcattttgagttttaaaaaaaaaaaaaaaaaaaaaaaaaaaaaaaaaaaaaaaaaaaaa

SEQ ID NO: 6291 - DNA, 568 bp, Gossypium hirsutum
  Clone ID: GOSHI-09MAY01-C1092_2
tcctcgcgtccggaagatttttggatctgttgaccaacatcatttccctactggatttgggtctggcataaatgcaactttccatcgaattcttgaacttcaggtcccaagtgaattcatgttaacatctgaatctagcgttgagataaattcaatcaggaccgtcaatgaagcacacagcttagattgcaatctaaatcagttccgctgcagagttgttgctgttcatgtcctggttctagagaagagcaaccggaaatgtgataacataaaatcaaatacttacaccagacctcatagtgttgacattccacttgcttgctttatattggatgatgggtcatcttcttggtgttgctgggctaatgctgaaagagcggcaacattgctgaggctgcagaacactgccaggacctctaccatgtatcatcttcaaagaattgtagaggagcatgacaggattactgtgaaaagcgctagatcaacttctgatccttttgatcaagatttcactgttactgtcggttcaggaagggcactaactggcttggatgaagattttgacgtc

SEQ ID NO: 6292 - DNA, 1388 bp, Gossypium hirsutum
  Clone ID: GOSHI-09MAY01-C1092_1
tcgcccacgcctgcccggacgctgcattttcaacccaaaattttttttaaaaaaaattctaaataagtgatggggtttccggccaatggctcatcggacaaaccattgaagttcctgatctacggtcgaactggttggatcggtggtttattaggcaaactctgcgaatcccagggaatcgattacgagtacggctccggccgtttagagagccggatttcgcttgagtccgacatagccaacgtgaaaccgacccatgtattcaatgccgccggtgtcaccggtcgtccgaacgtcgattggtgcgaatcccataaggtggagaccatcagaaccaatgtggtcgggacccttaccctcgctgacgtctgcagagacaaaggcctcatcttgattaattatgctacaggttgcatctttgagtacgatgaggctcatcagataggaacgggtatcgggtttaaggaagaggatactccgaatttcaccggctccttttattctaagaccaaggctatggtggaggaattgctcaagaattatgaaaatgtatgtaccttgcgagttaggatgcctatttcatcggatttagccaatccccgaaacttcatcacaaaaatcactcggtatgataaagtggttaacattcctaactcgatgaccatcctcgatgagcttcttccgatttccatcgagatgggaaagaggaacttgactggaatttggaactttacaaacccgggagtggtcagtcacaatgagatattagaaatgtaccgtgactacattgaccctaacttcacctggaagaacttcaatctcgaggagcaggccaaagttatcgtagccccgagaagcaacaacgaactcgatgccaccaaattgaagacagaattccctgagctcctttcgattaaagagtctcttgttaagtatgtattcgaaccgaataagaagactggtggagcttgagcagttactttgcctgataaaaagtttgtcttcaaagataaactatgtgagactatttgagcttgagattttaggttatgaattcattgatttcctcttctttttatcatcttgtttatgaatttggttcgtgtgggtcgatatggatggtgataacctcggccgataatcacacacgcctcctcccagatgacccgaaagattgctggtatttttgtatttgaatgttgtattcatatatgaacatttgaataagtcagttggaaatggttttatctggttatgaatatgcattttgagttttatatttggtatttgcctcctttgcttggcttcatcttttggctcatgttcaatttactgtatttttcttgtttcatttagcacaacaccttaatgtggtagatcttttggtc

SEQ ID NO: 6293 - DNA, 423 bp, Gossypium hirsutum
  Clone ID: uC-gsflnu33B079h10b1
ttgggtcgatatggatggtgataacctcgggcgatacgcacgcacgcctcttcccagatgactcgaaagattgctggtattttgtatttgaatgttgtattcatatatgaacatttgaataagtcagttggaaatggttttatctggtataaaataaagaccagaaaatgaaacacacaaaattaaaaaagaaatataaatcaaatccgctgcaaagttgaagctgttcatgtactggttctagagaagagcaaccggaaatgtgataacatgggggcccattcttaaagcacacctcatagtgttgacattccacttgcttgctttatattgtatgatgggtcatcttcttggtgttgctgggctaatgctgaaagagcggtgacataagctgaggctgcacaacactgacaggacctgtac

SEQ ID NO: 6294 - DNA, 395 bp, Gossypium hirsutum
  Clone ID: uC-gsflnu33B085h10b1
tgtgggtcgatatggatggtgataacctcgggcgatacgcacgcacgcctcttcccagatgactcgaaagattgctggtattttgtatttgaatgttgtattcatatatgaacatttgaataagtcagttggaaatggttttatctggtaaaaaaaaaaaaaaaaaaaaaaaaaaaaaaaaaaaaaaaaaaaaaaaaaaaaaaaaaaataaaaaaaaaagaaaaaaaaaaaggaaaaacataaaataaaaagatatatataaaaaaaaatctgggggggcccttttagagtgaccgattttatgtcccgcggcaagggagacatatattttttttttggggcaccataattctttttcctgggcggctttataaaacgtgtgtagtgggaaaccc

SEQ ID NO: 6295 - DNA, 574 bp, Gossypium hirsutum
  Clone ID: GOSHI-09MAY01-C101069_1
aaacatttcttctttcttgctgtcttcttcgtagcttaaaggcttcttctgtcgtgagagccttgaaatttggctttcctattagatttctttttcttctttggattacagtaaaccagtaagtggggaagtgtaatggtgattttgtatttggtccattgggagactccagcaaggttggtgtggacaactagcttctttcgccacaagcttatgatcttttaatttttatgtaaaagtaaaacacagaaattatctgtgtacaatctttgcttttcttcttttacagcaactttttgtgtctttttactcgccggaaagttttaggcacaaaaatattacacacatacacgaagttttaagatatagaaagacaagtttgtataaagaaaatggagtctggccgtctttttttcaatccctccactacccaccgcaacatgttgcttctcgggaacactgaacccatctttcgaggggcaagaacaatggttagcatggaggaaaacccaaagaagcgactgttcttcagctcgccggaggatttgtacgacgaagagtactacgacgagca

SEQ ID NO: 6296 - DNA, 607 bp, Gossypium hirsutum
  Clone ID: GOSHI-09MAY01-C1042_19
gtggctttctatatataacgggtgcatcccactgcctgaattcttcactacaaaaaacccatttttctgtcatcactatcgattccatatggcggctatattaaacaatggcaccactcatcatactttccaatcattcacaaaataacaaagccattcctcaacatatttaaaggcaacaaactttttgataaatactgtgaatgtaaagggtggtcacagttattgttgcaaccataccatttctgattagttccgttcttaccagttggaggaccttttcgcgaagcgttacacgcctgttgctcatgccgttgggttcttggattaccattcttttcatttctggtttttctcattttttttttcatttattttatactttattttttttattttttttttttttttttttttttattttttttttttttttttttttttttttttttttttttttttttttttttattttttttatttttttaatttctattttctttttatttttttatttttttttttttttttttttattttattattttttattttattttttctttcttttatttttttattttttttttttatttcttttatttta

SEQ ID NO: 6297 - DNA, 482 bp, Gossypium hirsutum
  Clone ID: GOSHI-09MAY01-C1042_15
gaagaacacaagaagaaagtggaagcaaagaacgcattggagaattacgcttacaacatgagaaacacagtgaaagatgaaaagattggttcaaagctctcaccagatgataagaaaaggattgaagatgctattgaagaagctattcaatggttggatagtaaccagttggctgaagctgatgaatttgaagataaaatgaaggaattggagagtgtttgtaaccctatcattgctaaaatgtaccaaggtgctggtggtgatatgggtggtagtatggatgaggatgctcctccgtctggtggaagcggtgctggccccaagattgaggaagtagactaagtaattggtgtgggctctattttaaattagattcgcttaaaatacagtttattgcttgaacttgggtaattgattttgatatttgggttttagactttgtttttcaatgagatgacttttaatcctttttcatatgagac

SEQ ID NO: 6298 - DNA, 553 bp, Gossypium hirsutum
  Clone ID: GOSHI-09MAY01-C1042_14
tcacgcgtccggtcgccgagtcgaagaggattcaaacccctttccccacagcaaaaatgaagtacaacccacgagtctcctcctctcgtcgcaagagccgcaaggcccatttcacggcaccctcgtcggtccgccgtgtgttgatgagcgccccactctcatccgatttgaggtccaagtacaacgtccggtccatgccggtgcgcaaggacgacgaggtccaactggttcgtgggacttacaaaggccgggaagggaaagttgttcaagtctaccgtcgcaaatgggtgatccacatcgagcgcatcacccgggagaaagttaacgggtcgaccgtcaacgttgggattaacccatccaaggttgtcattaccaagctgtggctggacaaggaccggaagtcgtttttggaccgtaaggctaatggacaggctgctgctgataaggataatggtactaaagtctctgccgaggatatcatgcaaagtgtccattaaggttgacttgtttttcattgctatgatatgctctggtatgttacaatgtacggagt

SEQ ID NO: 6299 - DNA, 889 bp, Gossypium hirsutum
  Clone ID: GOSHI-09MAY01-C1042_12
cccacgcgtccgccctcgcggccgccctcgcctccggcactgtccatgatgtcgtcctcgttggtggttccactagaattcccaaaggtccaacaacttttgcaggatttcttcaatgggaaggagctttgcaagagcatcaaccctgacgcagccgtcgcgtacggtgccgcagtccaagccgcaatcttaagcggcgaaggcaatgagaaggtgcaagacctcctgcttttagatgtcaccccgttatccctcggattagaaaccgccggcggtgtgatgactgttttgatcccaagaaacactaccatccccaccaagaaagaacaggtcttttcaacatactccgataaccaacccggtgtattaatccaagtttacgaaggtgaacgaacaagaacaagagataacaacttattaggcaaattcgaactctccggcatcccaccggctccacgaggtgtaccgcaaatcactgtgtgcttcgatattgacgccaacggcatcttaaacgtttcagccgaagacaaaacaaccggtcaaaagaacaaaatcaccatcacgaacgataagggacgactctccaaagaagagatcgaaaagatggttcaagaagctgagaaatacaaatccggagacgaagaacacaagaagaaggtcgaggcaaagaacgcatgggagaactacgcttacaacatgaggaacacagttaaggacaaaggcaccaagttttctgctgaggacattatgcagagtgtcgattaaggttggctcttggtttcttatctgtctgatgtgcaactgttagactgatgtgttctttcttatgtaccaatagtcatacgatgagaatgtggatttgagactgatatgcttatgtgcatttttt

SEQ ID NO: 6300 - DNA, 731 bp, Gossypium hirsutum
  Clone ID: GOSHI-09MAY01-C1042_11
cggaatcccgggtcccgaccgcacgcgtccgcccactacgccgaccacattttgctttgtatctttgataatggaagccaaatggctggttcttttttcagtggcggcaatgctgatggcactggccaactgccaggaatctgtgaagccattggtgaagatggtaaagggcaagaagctgtgtgacaaagggtgggaatgtaaagggtggtcaaagtattgttgcaaccataccatttctgattacttccaaacttaccagtttgaggacctttttgcgaagcgtaacacgccggtagctcatgcggttgggttctgggattaccattctttcattacggctgctgctcagtatcagcctcatggatttggtaccactggggaaaagctccagaatatgaaggaagtcgctgcttttcttggacatgtcggcagcaaaacttcatgtggctacggagtcgctaccgggggaccattggcttggggtctttgctacaacaaagaaatgagccctagcaaaatatattgcgatgattactacaaatacacctatccttgcacaccaggagtctcatatcatggcccggagaagtagccctgcctatctactggtccgtacaaagccggtctccagttccccgttggtaggatcggccgctatttgaagaaaggaaggtattcacagcgggtcggaaccggagccccagtttacttggctgcaggtcttgagt

SEQ ID NO: 6301 - DNA, 766 bp, Gossypium hirsutum
  Clone ID: GOSHI-09MAY01-C1042_10
cccacgcgtccgcccacgcgttcgtttacgcgtgcggccgttcgtagctgattctcagttttcgttatttttcttctttgttctttacattcttttcgtctacacaacagatagttagtaatggccggtaaaggagaaggtccagctatcggtatcgatctcggtacaacttattcttgcgttggtgtttggcaacatgaccgtgttgaaatcatcgctaacgatcaaggtaacagaacgacgccgtcttatgttggttttactgataccgagcgtttgatcggagatgcagcaaagaaccaggttgcaatgaacccgattaacaccgtcttcgatgctaagaggttgattggtcgtagattcactgattcttcagtgcaaagtgatatcaaattgtggccattcaaggtcatagcaggacctggtgacaaaccaatgattgtcgtcaattacaagggcgaggagaagcaatttgctgctgaggaaatctcttctatggtccttattaagatgcgtgaaatcgctgaggcttaccttggttttacagttaagaatgccgttgttaccgtccctgcatacttcaatgactctcagcgtcaagcaacaaaagatgctggtgtcattgccggactcaacgtcatgcgaatcatcaatgaaccaacggctgcagccattgcttacggtcttgacaagaaggcaaccagtgttggtgaaaagaatgtcttgatctttgatctcggtggcggtacttttgatgtctcccttc

SEQ ID NO: 6302 - DNA, 604 bp, Gossypium hirsutum
  Clone ID: GOSHI-09MAY01-C1042_9
cgccaagtcgaagaggagcaccgtacgacaccctgccgccgcaacaatgaagtacaacccgcgtgtctcctcctctcgccgcaagagccgcaaggctcatttcacagcaccttcttccgtccgccgcgtcttaatgagcgcacccctctcatccgatctgaagtccaagtacaacgtccggtctatgccggtgcgcaaggatgacgaggtccaagtggttcgtgggacctacaagggacgcgaagggaaagtggttcaagtgtaccgccgcaaatgggtgatccacatcgagcgcatcacgcgcgagaaagtgaacggttccaccgtcaacgttgggatcaacccatccaaggttgtcatcaccaagctgaggctggacaaggataggaagtctttgctggatcgtaaggctaagggacgcgccgctgctgataaagataaggggactaagttttcagctgaggatataatgcagagcgtcgattaaggttgtcttttttcttcttcgttctgtcttgatgttgcaactgttaaacttgattgttgttcttttcttatgttaccaattatcatacaatgaagaatgtgggattttgtaaacttt

SEQ ID NO: 6303 - DNA, 731 bp, Gossypium hirsutum
  Clone ID: GOSHI-09MAY01-C1042_6
cccacgcgtccgggccactgccggagacactcacctgggaggcgaagatttcgacatccgaatggggaaccatttagtgcaagagttcaagagaaagaacatgaaagacattagtgggaaccctagagctcttaaaagggtgcgaactttttgcgagagggcaaaaagaactgtctcgttcaccggtgaaacgaccattgaaatagatacggtatacgaaagtattgactattactgaaccataacccgtgccagatttgatgagctcaacatggatctattcagaaagcgtttggttcctagcggagaaatgtttgagggatgctaagatggacaagagcactgcccatgatgttgctcttgtcggtggttccactagaattccaaaggtccaacaacttttacaagatttcttcaatgggaaggagctttgcaagagcatcaaccctgatgaggccgttgcatacggtgctgcagtccaagctgctatattgagtggtgaaggtaatgagaaagtgcaagatctcttgctcttggatgtcaccccattgtctcctcggtttggaaaccgctggtggtgttatgaccgttttgattccaaggaacaccaccattccaaccaaaaaagaacaagtcttctcaacctactccaaccaaaaaagaacaagtcttctcaacctgctccgacaaccaacctggagtgttgatccaagtctacgaatgtgaaagaa

SEQ ID NO: 6304 - DNA, 843 bp, Gossypium hirsutum
  Clone ID: GOSHI-09MAY01-C1042_5
gaaacaggcgacgcattgaaggtggacttatggaaccagcctgaatacatagaaaacaatgcaaccttagcctcgcagccagcaatctggagatggatgacaccggtgaagaaacaccaaccgtcggcccacgatgtgtttgtcggcagctggaaaccgaccaagaacgacacgttggccaagcgggtccctggggttcggagccaccatgaatgtgctctatggagatcaagtttgcgggcgaggtgatgttgacaccatgaacaacatcatctctcattacctttcttaccttgacctaatgggagttgggagagaagaggcaggaccccatgaagtgctcacatgtgaagaacaaaagcctttcactgtatctccttcttctgcatcatcatcatcatcatcttgatctggttttggatttgatattgggtgattcatttcttaattagcctcgtatatctccattgccaatggaagggccactataatatatatatatacacatatagattatttgagaaattcagtgtgtgaatccatattacccttaaaaaattatggatgctgtgtaaattcttgagacacattgtcttcacttcaattgtaactctgattaataagtgtgattgaatgagtcacatatagccattcgccaaaacttggaatatatgatttatgcagtcatttttaaaaacactagttcgtcttattttaatgcatatgatattttttttctgtaaaatgcacgcaaaagatgtttcttattagtattatttgaaatataagacatgaaaaaggccggccgttttgtagggtccaatctatcgtcccggttcttgc

SEQ ID NO: 6305 - DNA, 839 bp, Gossypium hirsutum
  Clone ID: GOSHI-09MAY01-C1042_4
gcgacgccaacgcccgtccgcccaccgcccgtctcgcgaagaacaataactctatctggtactaaaagaacaaaatcaccatgcacgaagagtgtactaagggcctgacttcttccaaagaagaaattgaaaagatggttcaaggaagtcagagagatacctaaatccgaagatgaagaacataaaaagaaggtcgaggcaaagaatgcattggaaaactatgcatacaatatgaggaacacagtgaaggacgagaagattggtgctaaactcccagcagctgataaaaagaagattgaagatgctattgaacaagccattcaatggctagacagcaaccaactcgccgaagccgatgaatttgaagacaagatgaaggagttggagagtatttgcaaccccatcattgctaagatgtaccaaggtgccggcggtgacatgggtggtggcatggatgaggatgttccggctggtggaagtggtgctggtcctaagattgaggaagttgactaaatcattgattttcttcacctggtttctctattgttctcttatgttttttgggatttaaactgtttggttttgttgtttggtttctaatcggattgaaatgaacttttatagggtttgttccttttttgggatactctatcagtagcacctgtgattgttgtgttttggaaaacaggtcccttttgaacttattaaagatatcaagacttttgtttatgaaatgctgtttacctttttaaggggagtaccgcttccttactatcttacttttaccatacttttctttctctctttctctctctctatctctttacatcatttttttt

SEQ ID NO: 6306 - DNA, 1204 bp, Gossypium hirsutum
  Clone ID: GOSHI-09MAY01-C1042_3
cccacgcgtccgcccacgcgtccgcccacgcgtccgcaatatcctctaattctaaagctaagagttttaagttaacgaagcatttgggtcgtttcgaagtaatggaaacttcaggaaaagtaaagaagggagccggaggaaggaaaggtggtggcccgaagaagaagcccgtttcaaggtctgtcaaagctggtctccagttccccgttggtaggatcggccgttacttgaagaaaggaaggtattcacagcgggtcggaaccggagccccggtttacttggctgctgttcttgagtacttggccgctgaggttctggaattggctgggaacgctgcacgtgacaacaagaaaaacaggatcatcccaaggcacgttctacttgccgtgaggaacgacgaagaattagggaagcttctcgccggcgtaaccatcgctcacggtggtgtgttgccgaacatcaacccagttcttttgccgaagaagactgaaaaggccgccggcaaagaacccaaatctccatcaaaggccaccaagtctcctaagaaagcttaatttgttttaacaaaactagattcacagggctttatttttcttagttgtatgtccttttgggtgattgttttcacagtgtaggggaagactgccttaagcaatatggaagcattgttagaatctcattatgatgtatgttactttaatggaaatgaaacatctagtttccttgaaaaaaaaaaaaaaaaaaaaaaaaaaaaaaaaaaaaaaaaaaaaaaaaaaaaaaaaaaaaaaaaaaaaagggggggggggggggtgttttttttaaaaaaaaaaaaaactcataaaaaaaaaaaaaaaaaaaatgcccttggcccacataaaacaaattcactgcccgggaaattcacaacgtttacccctttttaaaaccctggcataacataacttattggcctggtggtaaaaacccctttaggcgggaaacctttggcctaacaaaccttaacccatcccccttcccaacattttcccaaccctgaatggaataaatgaaagcgcccctgtatgtggcccttaacacacatttgggacctgttgatttcccaaagggcaaacccccctatttgttagctttatagcccgcgtttgttggggtttccccccttttttcctttaaattttcaacgcctttgccccccaatctttaa

SEQ ID NO: 6307 - DNA, 1300 bp, Gossypium hirsutum
  Clone ID: GOSHI-09MAY01-C1042_2
cccacgcgtcagcaacaacaagaagaaaaaacccagtattctgtcatcactatggaggccaaatggctgctatgttttacaatggcagcactaatggcagtggcaaatggccaggaatcagtgaagccattggtgaagatagttaaaggcaagaaactttgtgataaagggtgggaatgtaaagggtggtcacagttttgttgtaaccaaaccatttctgattacttccaaacttatcaatttgagaaccttttcgctaaacgtaatacaccggtggcacatgcggttgggttctgggattaccattctttcattacggcggcggctcagtatcagcctcatggttttggtaccaccggcggtaagctccagagcatgaaggaagtggcagcttttcttggacatgtcggcagcaaaacttcatgtggttatggagtggcaactgggggaccattggcttggggtctatgctacaacaaagaaatgagtcctagcaaattgtattgtgatgattactacaaatacacctacccttgcactcctggagtttcttaccatggccgtggtgccttgcctatctactggaactacaactatggagaaacaggagacgcattgaaggtggacttgttgaaccaccctgaatacttagaaaacaatgcaaccttagctttccaggcagcaatctggaggtggatgacaccggtgaagaaacaccaaccctcagcccatgacgttttcgttggcaactggaaaccaaccaagaacgacaccttggccaagagggttccaggttttggaaccaccatgaatgttctttatggtgaccaagtttgtggtcaaggtgatagtgattccatgaacaatatgatctctcattacctttattaccttgaccttttgggagttggccgagaagaagctggtcctcatgatatgctcacctgtgaagaacaagaacccttcactgtttctccctcatctgcaacatcatcatgaaaaaaggaaacaaactctagtatatgcggatttatttcaatttgcgtgaatcccacaatggattgctcttaacaattgtggagttttacagcagtttgtgttggttgtataaaatttgagattttctttttcttgtttttactatcaaattgtagctaatagtatgtgattgagtggtgtatatgtctattgcccaaacatggaatataaaattgatttttttattttccgcaaaataaatttatttcggtttttaaaaaaaatatcacttaaataattattaccaaaaaaaaattcatat

SEQ ID NO: 6308 - DNA, 1829 bp, Gossypium hirsutum
  Clone ID: GOSHI-09MAY01-C1042_1
cgaatggagggcgacccaggcgtccgcccacgcgtccggtcgtcaattacaagggcgaggagaagcaatttgctgctgaggaaatctcttctatggtccttattaagatgcgtgaaatcgctgaggcttaccttggttttacagttaagaatgccgttgttaccgtccctgcatacttcaatgactctcagcgtcaagcaacaaaagatgctggtgtcattgccggactcaacgtcatgcgaatcatcaatgaaccaacggctgcagccattgcttacggtcttgacaagaaggcaaccagtgttggtgaaaagaatgtcttgatctttgatctcggtggcggtacttttgatgtctcccttctcaccattgaagagggtatctttgaagtgaaggccactgccggagacactcacctcggaggcgaagatttcgataaccgaatggtgaaccactttgtgcaagagtttaaaagaaagaacaagaaggacattagtggtaatcccagagctcttaggaggttgaggactgcttgtgaaagggcgaagagaactttatcgtccactgctcaaacaaccatcgaaattgactccttgtatgagggtatcgatttttactctaccattacccgagccaggtttgaagaacttaacatggatctattcagaaagtgtatggaaccagttgagaaatgtttgagggatgctaagatggacaagagcactgtccatgatgttgttcttgttggtggttccactagaattccaaaggtccaacaacttttacaagatttcttcaatgggaaggagctttgcaagagcatcaaccctgatgaggccgttgcatgtggtgctgcagtccaagctgctatattgagtggtgaaggtaatgagaaagtgcaagatctcttgctcttggatgtcaccccattgtcttccggtttggaaaccgctggtggtgttatgaccgttttgattccaaggaacaccaccattccaaccaaaaaagaacaagtcttctcaacctactccgacaaccaacctggtgtgttgatccaagtttacgaaggtgaaagaacaaggaccagagacaacaacttgctcggtaaatttgagctctctggcatccctcctgctcctagaggtgtcccacagatcactgtctgctttgatatcgatgctaatggtatcttaaacgtatctgccgaagacaaaaccactggacaaaagaacaaaatcaccatcacaaacgacaagggccgactctccaaagaagaaattgaaaagatggttcaagaagcagagaaatacaaatccgaagatgaagaacataaaaagaaggtcgaggcaaagaatgcattggaaaactatgcatacaatatgaggaacacagttaaggacgaaaagattggtgccaaactcccagcaactgataaaaagaagatcgaagatgctattgaacaagccattcaatggctagacagcaaccaactcgccgaatccgatgaatttgaagacaagatgaaggagttggagagtatttgcaaccccatcattgctaagatgtaccagggtgccggcggtgacatgggtggtggcatggatgaggatgttccggctggtggaagtggtgctggtcctaagattgaggaagttgactaaaacattgattttcttcatctggtttctctattgtgttctcgtatgttttttgggatttaaaccgtttggttccttttttgggatactctatcagtagcacctgtgattgttgtgttttggaaacaggtcccttttgaatgtttatgaaatgctctttacttttttttt

SEQ ID NO: 6309 - DNA, 444 bp, Gossypium hirsutum
  Clone ID: LIB3493-041-P1-M1-D3
aaccactttgtgcaagagtttaaaagaaagaacaagaaggacattagtggtaatcccagggctcttaggaggttgaggactgcttgtgaaagggcgaagagaactttatcatccactgctcaaacaaccatagaaattgactccttgtatgagggtatcgatttttactctaccattacccgtgccaggtttgaagaacttaacatggatctattcaggaagtgtattgaaccaattgagaaatggttgagggatgcttatatggacaagaacactgcccatgatggtgtcttggagggggatccttagattttaaatgtcacccattatattatattattttttggtatatatattaagttaattttttatttagcttttattacttttttaattttttatatattttttttaatattaatattattctttctttttttaaat

SEQ ID NO: 6310 - DNA, 382 bp, Gossypium hirsutum
  Clone ID: LIB3146-012-Q1-K1-E11
gcaaccccatcattgctaagatgtaccattgtgccggcggtgacatggatggtggcggggatgatgatgttccggctggtggaagtgtttctcatcctaagattgaggaagttgactaaatcattgattttcttcacctgatttatctattgttctcttatgttttatgcgatttaaactgttcggtttagttgatcggtttctaatccgaatgatatgaactttcatagggttagctcctttttagggatactctatcagtaaacccttgttattgtttgtgtttaggaaaatatgtcgctttttgaacctatttaagaatatccaacactctattttattaaaaaaaaaaaaaaacaggctgcctcttttagagaatcca

SEQ ID NO: 6311 - DNA, 769 bp, Gossypium hirsutum
  unsure (1)..(769): unsure at all n locations
  Clone ID: AI055116.1
aaaaaaccaatttttgtncattacttatgatgccaaatggctgctattttttacaatggcagcactaatggcagtggcaaacggccaggaatcagtgaagccattggtgaagatagttaaaggcaagaaactttgtgataaagggtgggaatgtaaagggtggtcacagttttgttgtaaccaaaccatttctgattacttccaaacttatcaatttgagaaccttttcgctaaacgtaatacaccggtggcacatcgtntgggttctgggattaccattctttcattacggcggcggctcagtatcagcctcatggttttggtaccaccggcggtaagctgcagagcatgaaggaagtggcagcttttcttggacatgtcggcagcaaaacttcatgtggttatgtgagtggcaactggnggaccattggcttggggtctatgctacaacaaggaaatgaatcctagcaaattgtattgtgatgattactacaaatacacctacccttgcactcctggagtatcttactatggccgtggtgcctagcctatctattggaacttcaactatgggaaaacatgcgacgcattgaaggtggacttatttgaccaccctgatacattataaacatgcatcctaactttcaggcacactttggaatgatgacaccgtgatgaacatcatcgttgtccacaattttgttgcactgtaacctcataacaccttgccaacggttcctgttggcttattaggttatgaataatatgn

SEQ ID NO: 6312 - DNA, 565 bp, Gossypium hirsutum
  Clone ID: LIB3585-061-P1-K1-A2
caacaacaagaagaaaaaacccagtattctgtcatcactatggaggccaaatggctgctatgttttacaatggcagcactaatggcagtgtcaaatggccaggaatcagtgaagccattggtgaagatagttaaaggcaagaaactttgtgataaagggtgggaatgtaaagggtggtcacagttttgttgtaaccaaaccatttctgattatttccgaacttatcaatttgagaaccttttcgctaaacgtaatacaccggtggcacatgcggttgggttctgggattaccattctttcattacggcggcggctcagtatcagcctcatggttttgggtaccaccggcggtaagctccagagcatgaaggaattggcagcttttcttggacatgtcggcagcaagacttcatgtaagaaagccacaaaactaaacttaggaaaaaataatggcgtcgcccagactcgaactggagaccttcagtgtgttagactgacgtgataaccaactacaccacgacaccatttttgtctaggtttaccatacaaaatagttaaaaataaa

SEQ ID NO: 6313 - DNA, 283 bp, Gossypium hirsutum
  Clone ID: uC-gsronu33B138f04b1
tcgttcacgcgtccgcccacgcgtccgatcactgtctgctttgatatcgatgctaatggtatcttaaacgtatctgccgaagacaaaaccactggacaaaagaacaaaatcaccatcacaaacgacaagggccgactctccaaagaagaaattgaaaagatggttcaagaagcagagagacgaggtttgttttattgcattcgtagttataatttgttattggtgtagcatcaattttgtgagctgcgtgtttctccgattatatttattgctggttgtggac

SEQ ID NO: 6314 - DNA, 431 bp, Gossypium hirsutum
  Clone ID: LIB3083-118-Q1-L1-C4
aaaaaacccagtattctgtcatcactatggaggccaaatggctgctatgttttacaatggcagcactaatggcagtgtcaaatggccaggaatcagtgaagccattggtgaagatagttaaaggcaagaaactttgtgataaagggtgggaatgtaaagggtggtcacagttttgttgtaaccaaaccatttcttgattatttccgaacttatcaatttgagaaccttttttgctaaacgtaatacaccgttggcacatgctgttgtttctgggattacctttcttttatttcggtgttggcttatttttatttttaattgtttgttttttttttgctgtatttctctattatcgttttttgtttatttttgtttttttctttttatttttttttttattaatattttttattttttatttttttttttct

SEQ ID NO: 6315 - DNA, 291 bp, Gossypium hirsutum
  Clone ID: uC-gsronu33B029b07b1
agcgcatcacgcgcgagaaagtgaacggttccaccgtcaacgttgggatcaacccatccaaggttgtcatcaccaagctgaggctggacaaggataggaagtctttgctggatcgtaaggctaagggacgcgccgctgctgataaagataaggggactaagttttcagctgaggatataatgcagagcgtcgataaggttgtctttttttttcccttctcaatcatgtgttttgcaactgttgaagttttagttttatggagttttatttttgttttgtttttatgctatt

SEQ ID NO: 6316 - DNA, 397 bp, Gossypium hirsutum
  Clone ID: LIB3135-026-Q1-K1-B11
cccacgcgttcggggacttacaaaggccgggaagggaaagttgttcatgccagtgcgcaaggacgacgaggtccaagtggttcgtgggacttacaaaggccgggaagggaaagttgttcaagtctaccgtcgcaaatgggtgatccacatcgagcgcatcacccgggagaaagttaacgggtcgaccgtcaacgttgggattaacccatccaaggttgtcattaccaagctgaggctggacaaggaccggaagtcgttgttggaccgtaaggctaagggacgggctgctgctgataaggataagggtactaagttctctgccgaggatatcatgcagagtgttgattaaggttgtcttggttttcattgctatgatatcctttgttatgttacaatt

SEQ ID NO: 6317 - DNA, 424 bp, Gossypium hirsutum
  Clone ID: LIB3197-025-Q1-M1-B3
acgctttgtagtagctgttttctctcttttagttattggtttttttttcgttctttatattcttttttgtcgacacaacaaaagaaaatagtgatggccggtaaaggagaaggtccagcgatcggtatcgatctcggaactacttattcatgcgtcggtgtttggcaacatgatcgtgttgaaatcatcgctaacgatcaaggtaacagaacgacgccgtcttatgttggttttaccgacaccgagcgtttgataggtgatgctgccaacaaccaacttgttttgaaccctatcaacaccgtattccttgcacaaagattgattgtacatcaattcaaggatgcttctttataaagtgacactaaattgatggacgtgctggaatagcagcagagattttgatgctgaaaccgcttataattta

SEQ ID NO: 6318 - DNA, 398 bp, Gossypium hirsutum
  unsure (1)..(398): unsure at all n locations
  Clone ID: uC-gsflnu33B085c04b1
gtgaattacgcttacaacatgagaaacacagtgaaagatgaaaagattggttcaaagctctcaccagatgataagaaaaagattgaagatgctattgaagaagctattcaatggttggatagtaaccagttggctgaagctgatgaatttgaagataaaatgaaggaattggagagtgtttgtaaccctatcattgctaaaatgtaccaaggtgctggtggtgatatggtggagattntgaatgatgatgctcctacatctggcggacgcggcgctggccctccatttgaagatggtgactgacacatggcgcacggctgtatttgaaactagagacgctggacatgctgcttacagcttgaactccctggataaatttgtacatcggagccctgact

SEQ ID NO: 6319 - DNA, 413 bp, Gossypium hirsutum
  unsure (1)..(413): unsure at all n locations
  Clone ID: LIB3493-006-P1-M1-F4
cgccgaatccgatgaatttgaagacaagatgaaggagttggagagtatttgcaaccccatcattgctaagatgtaccagggtgccggcggtgacatgggtggtggcatggatgaggatgttccggcaggtggaagtggtgctggtcctaagattgaggaagttgactaaaacattgattttcttcatctggtttctctattgtgttctcttatgttttttaggatttaaaccgtttggttntgttgtttggtttctaatcggattgaaatgaacttttatagggtttgttccttttttggaaacaggtcccttttgaacttcctaaagatattaagacttctgtttatgaaatgctctttacttttttattttagttgtgtttgaaacatatataaatgaagttcttttctag

SEQ ID NO: 6320 - DNA, 334 bp, Gossypium hirsutum
  Clone ID: uC-gsronu33B157e07b1
cccacgcgtccgtaccaatcaatatcctctaattctaaagctaagagttttaagttaacgaagcatttgggtcgtttcgaagtaatggaaacttcaggaaaagtaaagaagggagccggaggaaggaaaggtggtggcccgaagaagaagcccgtttcaaggttctgtcaaagctggtctccagttccttgttggtaggatcggactgtatttgaagaaaggaatggttcttcgcttggatggattgctggtatgaatgagcaagtttgttctctgatggtttgcgatctattttggtttattaactcaatattcttgggtttcttcttttgta

SEQ ID NO: 6321 - DNA, 238 bp, Gossypium hirsutum
  Clone ID: LIB3083-099-Q1-L1-C9
gggggggaatcataaaaatggggcacattttaaactaataacatcaaagaaccaacacaattccaacttcaatcacatacgccaatgatatatatagttcaaggcaagaaactttgtgataaagggtgggaatgtaaagggtggtcacagttttgttgtaaccaaaccatttctgattacttccaaacttatcaatttgagaacctttttgcttaacgtaatacaccggtggcacatt

SEQ ID NO: 6322 - DNA, 230 bp, Gossypium hirsutum
  Clone ID: uC-gsronu33B007c11b1
caatccatccaaggttgtcatcaccaagctgaggctggacaaggataggaagtctttgctggatcgtaaggctaagggacgcgccgctgctgataaagataaggggactaagttttcagctgaggatatattgcaaagcgtctactcttgtgggatctagtttgctgtcaaggtgatgttgacgccatgaacaacatcatgttacattacctttattaccttgacctaat

SEQ ID NO: 6323 - DNA, 1505 bp, Gossypium hirsutum
  Clone ID: GOSHI-09MAY01-C1072_1
ctttcaagacagtgggaaggttgactttaatgtgtggcgacgggaccaatgatgttggagggcttaagcaggcccatgtaggtgttgctctattgaatgcagtgcctccaactaaaagtgagagctcatcgggaacatctaaagatgaaaacacaaaggcattgaagtcaaagaaatctaagcccactgtagaagcaacgggcaattcagaagcctcttcaaatggaaaggtagtccccagatcagaatctagcaacaatgcaaccagtaaccggcatcttaatgctgcagagaagcatcgacagaagctgaagaagatgatggatgagctgaatgaggagggtgatggtcgctctgctcctattgtcaaactgggggatgcctcaatggcatcaccatttactgcaaagcatgcatcagttgccccaaccactgacataattcgtcaaggacgcagcacccttgtgactacccttcaaatgttcaagatcctcggccttaactgccttgctacagcctatgttttaagtgtgatgtacttagatggtgtcaagctgggtgatgttcaggcaactattagtggtgtatttacagctgcatttttcctgtttatctcacacgctcgcccactacccaccctttcagctgcacggccccacccgaatattttctgctcctatgtcttcctttctctcatgggacagtttgctatgcacctgttattcttgatctcttctgtgaaagaggctgagaaacacatgcctgaggaatgcattgagccagaatcagagtttcaccctaatctagtgaacacagtttcatacatggtgagcatgatgcttcaggtagcaacatttgcagtgaactacatgggtcatcctttcaaccagagcatccctgaaaacaaaccattcttgtatgctcttggagctgctgccggtttctttgtgggtataacttctgatctatttagggatttgaatgattggttgagcttggttcctttgcctgtgggattgagggataagctcttgctatgggctctactaatgtttctgtgctgctatgcttgggagaggttgttaagatgggcattccctggtaaaatcccagcttggaggaagcgccaacgtgtggctgctgctagttctgagaagaagctggtctaagtgaacagagaattctccctctactaatgattttggaaaaggatgacaccggtcagattattatatttagtgaattagctcaagatatgcaactcctttttttttttaatttgatatttgttaaatcatgttttgcttaatcctttaggacgtggaatctgttaaatggtattttgctcatagaatgaggaggttattctttaggaaagcataaactttgattttgttatttttgcaaagccaacttgaaagaatagttgtttcaacacttaaaagaaaaacaaattgtagttgagctcataagccatattttgattagatttattgaattatagc

SEQ ID NO: 6324 - DNA, 524 bp, Gossypium hirsutum
  Clone ID: GOSHI-09MAY01-C1062_1
cccacgcgtccgttcaaatccgatgctttccttttcctccttcgaaatcagctcaaggagatatggctcaaagaaccgaaaaagaagagactgaattcaaagtccctgaaaccctgacgctatgcgttaacaactgcggggttacgggtaatccagccaccaacaacatgtgccagaagtgttttagtgccaccacggccgcaacatcctcctcttcctcttcctcttccaccaacaacaccgctacttccgctaccgacgataaatcctcgagatctacgccgactcgttcacaggacaatcgatccgattccgctccacctacaacagctgcaacaacggcaacagcaacgacgaatagtccgatgaccgcttcaaatcggtctggatacgataccgcggaaaagaagtcggtgaatcgatgttctggttgcagaaaacgcgttgggttgaccgggttccggtgtcgatgcggagagcttttctgttcggaccatcggtactcggatcgacacgattgtagc

SEQ ID NO: 6325 - DNA, 403 bp, Gossypium hirsutum
  unsure (1)..(403): unsure at all n locations
  Clone ID: LIB3145-045-Q1-K1-A8
tacgactacaaggcggcgggtcgcgaagccatcgctagggaaaatcccgtggttaaagcagccaagattatcagagtttagtttttaccaaatggatccaaattaaattaaataaactattcaaaacatttttcgacctgaaaatagcaagttgtggagatctatgctcgatctcaaaaagaaaaagaaaaaagtaaaaaaagactgtttcagagagggagaattagttgtggggttgagtttttaattgtgaaaaaagaaagtttgtaagagatttgcaatcttgtcccttgttgtaaagtaaaaaaagaagaagataaaaactaggggccaaatggagcagattaattttnttgannaaaaananngngggctaaataaagggacttggtaacagggacat

SEQ ID NO: 6326 - DNA, 290 bp, Gossypium hirsutum
  Clone ID: LIB3166-044-P1-K1-E12
ttttcttggtgagatcgagcatagatctccacaacttgctattttcaggtcgaaaaatgttttgaatagtttatttaatttaatttggatccatttggtaaaaactaaactctgataatcttgactgcttcaaatcggtctggatacgataccgcggaaaagaagtcggtgaatcgatgttctggttgcagaaaacgcgttgggttgacggggttccggtgtcgatgcggggagcttttctgtttggaccatcggtacttggatcgacactattgtagctacgactacaa

SEQ ID NO: 6327 - DNA, 1157 bp, Gossypium hirsutum
  Clone ID: GOSHI-09MAY01-C1012_1
gaattcgcccttcgagctttgtttcctagtcactcgccctctgcgcaatcaccgatcaaagctgaagatgggaagccttggaaaagcaatatacaccgtcggattctggattcgggagaccggtcaggctctcgatcgccttggctgccgcctacaaggcaactattttttccaggagcaactttctaggcatcggactctgatgaacgtatttgataaatctcctctggtggacaaggatgcattcgtagcccctagcgcatctgtcattggcgatgttcaggtgggaagaggatcatctatttggtatggatgtgttttaaggggggatgtcaacagcattagtgttggatctggaactaatatacaagacaactcccttgtgcatgttgcaaagtctaatctaagtgggaaagtgctaccaactaacattggaaacaatgttactgtaggtcatagtgctgttttacatggctgtaccgttgaggatgaagcatttgttggcatgggagccacacttcttgatggtgtagttgtggaaaaacatgctatggttgctgctggagcccttgtaagacagaatacaaggatccctgctggagaggtgtggggaggcaatcctgctaaattcctgaggaagctaactgaagaagagatagcgtttatttcccagtcagccaccaattataccaaccttgcacaggtacatgctgctgagaatgcaaaaccctttgatgaaattgaatttgagaaagttcttcgcaagaagtttgcgaagagggatgaagagtatgactcaatgctgggcgttgtccgtgaaactccaccagaactaattcttccagacaatgtcctaccagataaagagcaaaagtcctctcaaaaatgatctttttttttatttattagttgcttttttatttgctccaaaagtcttgagatttggcatcaagaaaaatttgttgttatgttccaagtacatggcagagggatgatttttcttttccaaataataccggacatgttttagtatagaaccatggtataaaactctactgtttgtatggttactgagagtcgcagttcatgaccggagagatgtaatttgatgtctaatgttccatgtacctaagatgcttgttttctacttataattg

SEQ ID NO: 6328 - DNA, 629 bp, Gossypium hirsutum
  Clone ID: GOSHI-09MAY01-C1002_2
aaaaaaaatccgtagtttctttaaggcacctctgctatcttcgttgattttcactttctcgggcgattgctttatcgattggaacctgggttttggaagtctttaagtaatggcaagtgagtttggggaatcagcgagccattcgccccaaaatccatcttgctctagtaacaatggtaatggtgatgctggtaactttgagtgcaatatctgctttgaattagctcaagatcccatcgttactttatgcgggcatcttttctgctggcccttgcttgtacaaatggcttcatattcattcccgttctcgtgaatgtccaatttgtaaggcccttatcgaggaagaacaattggttcctttgtatggaagggggaaatcatctactgatcctaggtctaagtctatcccgggtgttaatattccaaatcgtccagctggacagagacctgagacggctcctccaccggaaccaaatcaatttccccaaaatggttttggattcatgggagggttgggaggttttgcgccaatggctacggctaggttcgggaatttcacactgtctgcagcctttggtggtcttattccatctttgtttaaccttcaagtgcatggatttcctgatgcc

SEQ ID NO: 6329 - DNA, 989 bp, Gossypium hirsutum
  Clone ID: GOSHI-09MAY01-C1002_1
atttgagatgatttgagtcgttagaggctttggtttttatatgacagccttcaatttttggggaaattcttgcaattttctgatactagtggattttatgattggtgtttgttttcgttccaattcgatttttgtaggaatcggagtttcggaggtctaggaaaagaaatggcaagtgggtttggggaatcagcgagccattctccccacaatccatcttgctccaccaataatgctaatggtgatgctggtaattttgagtgcaatatttgctttgacttagctcaagaccctattgtcactttatgtgggcatcttttctgctggccttgcctttacaaatggcttcatactcattcccgttctcaggaatgtcctgtttgtaaagcccttgttgaggaacaaaaattggttcctttgtttggaagggggaaatcatctactgatcctaggtccaaatctatcccgggtgttaatattccgaatcgtccagctggacagagacctgaaacggctcctccaccaccacctattcagtttccccaaaatgggttcgggttcatgggaggcttgggaggttttgcaccaatggcaactgctcgatttgggaatttcacactctctgctgcttttggtggtcttatcccatccttgtttaaccttcaggtccatggatttcctgatgcggctatgtttggtccagctgctggttttccatacggctttccaagttcatatcttggtggccatgcttatggataccatcatcaccaccaccaccatcatcatcgcaccgcacaaggccagcaggatcattatctgaagatgctgtttctgtttatcattgtttgtgttatctttgcaatgatttaccaatagaccatatctgctatcaaagcataaattgctaacttattttaggagtgccaatccgatatcttgtgtaaatctaataaatgcattttcatttacctttttgtcttttactt

SEQ ID NO: 6330 - DNA, 505 bp, Gossypium hirsutum
  Clone ID: LIB3583-055-P1-K1-F7
caagtttcttcgaagagttttcttctgcgatcttcatcttttttattttttattttttatttatttttgacttctttggatcggtcgattgccatatcgatcggtccttctatctcttcaatatctctttgaaggaatcggagtttcggaggtctaggaaaagaaatggcaggtgggtttggggaatcagcgagccattctccccacaatccatcttgctccaccagtaatgctaatggtgatgctggtgattttgagtgcaatatttgctttgacttagctcaagaccctattgtcactttatgtgggcatcttttctgctggccttgcctttacaaatggcttcatattcattcccgttctcaggaatgtcctgtttgtaaagcccttgttgaggaacaaaaattggttcccttgtatggaagggggaaatcatctactgatcctaggtccaaatctattccgggtgttaatattccgaatcgtccagctggacagagacctg

SEQ ID NO: 6331 - DNA, 456 bp, Gossypium hirsutum
  Clone ID: LIB3584-028-P1-K1-A9
acgcccacgcatacgcgattcttgtacgaatcattgtttccgaggtctaggaaaagaaatggcgagtgggtttggggaatcagcgagccattctccccacaatccatcttgctccaccaataatgctaatggtgatgctggaatgtcctgtttgtaaagcccttgttgatgaacaaaaattggttcctttgtatggaaaggggaaatcatctactgatcctaggtccaaatctattccgggtgttaatattcccaatcgcccagctggacagagacctgaaacgggttctccaccaacacctaatcacattgcccaaaatgggttcaggttcatgggaagcttgggaagtttttcaccaatggcaacccctcaatttgggaatttcacactctttgctgcttttggggggcttatcccattcttgctttacctttaagtccatggattttctgatg

SEQ ID NO: 6332 - DNA, 348 bp, Gossypium hirsutum
  Clone ID: LIB3189-021-P1-K1-F7
cgcgagcggccgctcgcgatctagaactttcatttgattatgttacaattgaatcccgatctacgatagtgaaatgttctctttgtttaaccgttatgaatgatgtttttcttggaattagtgatgatgttttcttgtatatgatatctggaacctgggttttggaagtcttaagtaatggcaagtgagtttggggaatctgcttgccattcgccccaaaatccatcttgctctagtaacaatggtaatggtgatgctggtaactttgagtgcaatatctgctttgaaataactcatgatcccattcgtactttatgcggtcatttttattgctgtccttgtttgttc

SEQ ID NO: 6333 - DNA, 346 bp, Gossypium hirsutum
  Clone ID: LIB3145-031-Q1-K1-F4
acgcaacgcgtctgtaaataaataccaagtttcttcgaagagtcgttttctgcgatcttcatcttgggcttttttcttttcttatgcaggtgtcatctatttttgacttctttggatcggtcgattgccatatcgatcggtccttgtatctcttcaatatctctttgaaggaatcggagtttcggatgtctaggaaaagaaatggcgagtgggtttggggaatcagcaagccattctccccacaattcatcttgctccaccaataatgctaatggcgatgctggtaattttgagcgcaatatttgctttgacttaactcaagaccctattgtcactttatgtgggc

SEQ ID NO: 6334 - DNA, 409 bp, Gossypium hirsutum
  Clone ID: GOSHI-09MAY01-C1032_3
ggcacaccaatgcaaagttccacaaaaaacaggtgagaatcatgagcacaaaataaaatccccaattttgctgatcattagcaatggcaaccaacaccacccaagagcaacatcctgcagctggtaggcaccaagaagtcggccataagagccttttgcaaagcgatgctctttaccagtatatatcggagactagtgtatatccaagggagcctgaacccatgaaagagctcagagagttgaccgctaagcatacatggaaccttatgactacatcagctgatgaaggacaattcttgaacatgcttcttaagctgatcaatgcgaagaataccatggaaattggggtttatactgcttattctttgttagccaccgccctcgctttacccgatgatggaaagatctt

SEQ ID NO: 6335 - DNA, 1233 bp, Gossypium hirsutum
  Clone ID: GOSHI-09MAY01-C1032_2
cccacgcgtccgccaattcaaagttccacaaaaaacaggtgaaaatcagagcaaaaaataaaatccccaattttgctgatcattacccacgcctccccgcacccccccgcccccgcgtccggcagctggtaggcaccaagaagtcggccataagagccttttgcaaagcgatgctctttaccagtatatattggagactagtgtatatccaagggagcctgaacccatgaaagagctcagagagttgaccgctaagcatccatggaaccttatgactacatcagctgatgaaggtcaattcttgaacatgcttcttaagctgatcaatgcgaagaataccatggaaattggggtttatactggttattctttgttagccaccgccctcgctttacccgatgatggaaagatcttggccatggatatcaacagagaaaactacgagttaggattgcctgtaatccgaaaagctggcgttgcacacaaaattgaattcaaagaaggccctgccatgcctgttcttgataaattggtggaagatgaaaagaatcatgggtcgtatgatttcatctttgtggatgctgataaagacaactacctcaactaccacaagaggttgatagagttggtgaaggttggtggtttgattggctacgacaacacactgtggaacgggtcggtggtggcaccgcccgatgctccgcttaggaagtatgttaggtactacagagacttcgttttggaactcaacaaggctcttgctgttgaccccaggattgagatttgcatgctccctgttggcgatggaatcaccctttgccgccgtgtcaaatgaaccaccaccaatgctaccgccgccacagccgctactaccacccaagatcgacaaactttcatattttttttgtgcaatttcaaatatggtgtaaatttaatttggcatttataaacgcaatgcctatctaccattatcaaatcatattacattctaaaccaaaaaaaaaaaaaaaaaaaaaaaaaaaaaaaaaaaaaaaaaaaaaaaaaaaaaaaaaaaaaaaaaaaaaaaaaaaaaaaaaaaaaaaaaaaaaaaaaaaaaaaaaaaaaaaaaaaaaaaaaaaggggggggccctttttaaggatccaaatttttcccccgggggttggcaaataaatatttttttttaggggccccaaaaaaaaatttcctgggccggtttttaaaaaagggggatg

SEQ ID NO: 6336 - DNA, 749 bp, Gossypium hirsutum
  Clone ID: GOSHI-09MAY01-C1032_1
cccgggtcgacctcgcgtccgcttatgattacatcagctgatgaaggggatccctcgcgcccgcttcttaagctgatcaatgcgaagaataccatggaaattggggtttatactggttattctttgttagccaccgccctcgctttacccgatgacggaaagatcttggccatggatatcaacagagaaaactatgagttgggattgcctgtaatccaaaaagctggcgttgcacacaaaattgaattcaaagaaggccctgccatgcctgttcttgataaattggtggaagatgaaaagaatcatgggtcgtatgatttcatctttgtggatgctgataaagacaactacctcaactaccacaagaggctgatagagttggtgaaggttggtggtttgattggctacgacaacacactgtggaatgggtcggtggtggcaccgcccgatgctccacttaggaagtacgttaggtactacagagacttcgttttggaactcaacaaggctcttgctgttgaccccaggattgagatttgcatgctccctgttggtgatggaatcaccctttgccgccgtgtcaaatgaaccaccaccgtcgccgccgccgccacagtcgcttctaccacccaagattgacaaacttataagtacttcaaaatttcataaatttttttttgtgcaatttcaaatatggtgtaaatttaatttggtatttataaaagcaaagcaatgcccatctaccattt

SEQ ID NO: 6337 - DNA, 385 bp, Gossypium hirsutum
  Clone ID: LIB3146-036-P1-K1-D8
ataaatggaccgttacagatcgctttcaacgttagtgcgcatcgagaaaatacttggggctgtggttagatgactaatgactatcaacacaacccaaaaccagcagcgtacaactggatggctccaggaacgtcgccataagagcctttacgcatagcgatgctctttaccagaatatattggagactagtgtatatccaatgtagcctgaacccatgaaagagcttagatggttgaccgttaagcatacatggaaccttatgactacatcagctgatgaaggtcaattctcgaacatgcttcttaagctgatcaatgcgaataataccatggaaattggagtttatactgcttattctttgttagccaccgccctccctttacc

SEQ ID NO: 6338 - DNA, 905 bp, Gossypium hirsutum
  Clone ID: GOSHI-09MAY01-C1022_1
gtcatatctctcagatggtactaatgacaaaattcaagctgttattgagtcaggagtctgcccccgactggttgagctcttgatgcacccatccccaacagtcctcattcctgctcttcgcacagttggaaatattgttacaggggatgatatgcagactcaatgtattataggccaccaagcccttccgtgccttttgaacctgctgacgagtacctacaagaagagtatcaagaaggaagcttgctggaccatctcaaacatcactgcgggaaatgtagatcagatacaggctgtaatcggcgctggcatttttgcccctctagtccatctacttcaaaacgctgagtttgagatcaagaaagaagctgcttgggcaatttcaaatgctacgtctggtggcacccatgaacaaataaagtttttggtaagccaaggttgcattaagccattgtgtgatcttctaaactgtcccgacccaagaattgtcactgtttgtttagaaggtcttgaaaacattctgaaggttggggaagctgagaaaaatctgggtcacaccggagaggtcaatctctatgcccagttaattgatgatgctgagggattggagaagattgaaaacctccaaagtcatgacaacaatgaaatctatgagaaggcagtgaagattcttgaaacatattgggtagaagatgaggatgaggcattacccactggtgatgcttcgcaacctgggttccagtttggtggcaatcaacttcctgttccttctggtggattcaatttcagttgaagaacacttggtggggtggaatggagctgaaaggtcggtattttcttggttttttttttatggaattcacatttatttcaagtcatgccacagtatgttcttaagaagtcgt

SEQ ID NO: 6339 - DNA, 185 bp, Gossypium hirsutum
  Clone ID: uC-gsronu33B172g06b1
ggcccggaattcctgggtgtaccacactcgtcttccacacgcgtccgatgataagaagctgcttgggcaatttcaaatgctacttccggtggcacccacgaacagataaagttcctggtgagccaaggttgcattaagccattgtgcgatcttttaaactgtccagacccaagaattgtgacagt

SEQ ID NO: 6340 - DNA, 514 bp, Gossypium hirsutum
  Clone ID: GOSHI-09MAY01-C1352_1
tatcgatgtgacgattactattaagaacgacatgaacaggggtgggtttttgaagatgacaaagcaaagagacaacaagttgaagaaatctcctgaatctgatccttcttctgagaattctgattctgggtattttagaaatggaccaaagaaggtggaatcagatgattctgtcgatgggtttctcaagaacaatgagtttaagaagcctaatatagaatctggatctgggttcagagacagggatgcaacttctagcaagtgtttgagtaaattcaaaagtgtgaaaactggatctccaaagtatgatttaagaagaaatgggaagaatgattattacagtcctcaaaagggaagcaaatatgaatgtttaacctgtagcaagacctttgactcccatagggctcttggagggcatagagcaagccatacaaaggtgaatggctaccatgagtcaatacaggagagttatgaaaataacctgggcaatgattcttttacggctcccatgact

SEQ ID NO: 6341 - DNA, 557 bp, Gossypium hirsutum
  Clone ID: GOSHI-09MAY01-C1302_1
gcgggaaagggaaaggaaaggagagatcggaaaggaaaaggagtaattattattttaattaattacaccatttttacggagattcaccgaatcaaatcaggtctgcaactaaaatattaatatgccacatgttgatgtgatgacaatagctgcagttcttacagctctataaaaatcatccctttttcttctattttggtcttccttctctcccttccatccacccacggtcatgtctcccagcaagcttgattccactgattcctttggacatgaggaggcaagtgtttcgtgctcaaagccagagagatggttgtgttgattcactttctattttccattctgagaaggcagtggaagaacttcttcaacaaactcctgttgcaggaatggatgaacatcttatagagttctcagaagctttgagaactgttgctaaggcattaagacgagctgctgaaggaaaggcttctgcacaagctgaggctgctgaatggaaacgtagatatgagctggagagaaccaggaatattaagatggagcgaaaagctcgcatg

SEQ ID NO: 6342 - DNA, 439 bp, Gossypium hirsutum
  Clone ID: GOSHI-09MAY01-C1332_6
aactggttgatatggaatgttgttaccttacagttgagttcttccgaaagcttcctcaagacgtggataagggtggcagtgctacgcaatcaatatttgaccgatacaatgactcctacctgaggagaattggaagtacagttttgtcttacgtaaatatggtctgcgctactttgcgccactcgattccaaagtccattgtttattgtcaagtccgtgaagctcaaagaagcctgcttgactttttctacacggaattgggtaaactggagcaaaaacgattatcagcgttactgaatgaggatccagcaatcatggaacgccgatccgctcttgcgaagagactggaattatataggagtgcacaagctgaaatcgatacggtcgcttggtccaagtaagagtgggtaaaattagatccatggggcatggtattggg

SEQ ID NO: 6343 - DNA, 416 bp, Gossypium hirsutum
  Clone ID: GOSHI-09MAY01-C1332_5
tgagatttgccgtctttttgatcaaaatttcagagaacattgacatgaggtgcgtactggtggtgataaggtttacaatgttttcgacaaccaacttcctgctgctttgaaaaggttgcaatttgacagacaactatcaatggagaatattaggaagctcgttactgaagctgatggctatcaaccacatttaatagctcctgaacaaggatatcatcggttgattgaatctactttagttactatcagaggtccagctgaggctgctgttgatgcgactcattccattctgaaggatctggttcacaaggctatgagtgaaactccaacgtcaggggattttcaaggggattttcaagggaacaacagaccacctgtataatgcaaccactcaggagcaggaaactactttgaat

SEQ ID NO: 6344 - DNA, 1901 bp, Gossypium hirsutum
  Clone ID: GOSHI-09MAY01-C1332_1
cttcctttaagccacctcttctttttcttcctacgcctccgcttaacaaaaaaaaaaaaaaactgtctcagatctgaggtgccgttgctgatttgttcatcagcttgattgaatctgacgcctattatcgtcgccggcaccgatctgttgctttaaaaagaaatggagaatttaatttctcttgtgaacaagattcaaagagcttgcaccgctcttggtgaccatggagaagcaagtgcattgccgactctttgggactcattacctgcgattgccgtcgtcggcggtcagagttcagggaaatcttcggtgctcgaaagcattgtcggcaaagattttttaccccgtggatcaggaattgttacccggagacctctggtgttgcagcttcataagactgatgaaggaagcagagaatacgctgaatttcttcaccttccaagaaaaagattcaccgatttcgctgccgtcaggaaggagattcaagatgagacggatagagaaactggccgaaccaagcaaatctccagtgttccaattcatcttagcatatattctcccaatgttgtcaatttgactctgattgaccttcctggtcttacgaaggtagcagttgagggtcagcccgagagcattgtgcaagatattgagaacatggttcgctcttacattgagaagcccaactgtattatcttggcaatttcacctgctaatcaagatcttgctacatcggacgcaattaaaatctcaagagaggtggaccctacaggggagaggactcttggtgtcttgacaaagattgatctgatgggttaaggcactgatgcagttgatatattggaaggcaaatcttaccggctgaaattcccttgggttggtgtcgtgaatcgctcacaagcagatattaacaagaatgtggatatgattgctgctcgacgtacagagcgtgagtatttttctagtacgcctgagtataggcatcttgctcatagaatgggttctgagcatcttgctaagatgctttcaaagcatttggaaactgttatcaagtctagaatccctggcattcagtcccttattaataaaacaattgctgaacttgaaaccgaattgagtcgccttggaaagcctattgcagctgatgcgggtgggaagttgtacacaattatggagatttgccgtctttttgatcaaaatttcagagaacatttagatggggtgcgtactggtggtgataaggtttacaatgttttcgacaaccaacttcctgctgctttgaaaaggttgcaatttgacaggcaactatcaatggagaatattaggaagctcattactgaagctgatggctatcaaccacatttaatagctcctgaacaaggatatcgtcgtttgattgaatctactttagttactatcagaggtccagctgaggctgctgttgatgcgactcattccattctgaaggatctggttcacaaggctatgagtgaaactccagagttaaagcaatatcctgcactcagaggagaggtgggaaatgctgcgatcgagtctcttgaaagaatgagggatcagagcaaaaaagcaacacttcaactggttgatatggaatgcttgttaccttacagttgagttcttccgaaagcttcctcaagacgtggataagggtggcagtgctacgcaatctatatttgaccgatacaatgactcctacctgaggagaattggtaggttcatatacacaaaaagtttgagtatggatctcaattgtttgaaacttaatcgaaggatactattattcaatgtattttatttctgataatgggtttctaacaatgtatgagcaggaagtacagttttgtcttacgtaaatatggtctgcgctactttgcgccactcga

SEQ ID NO: 6345 - DNA, 448 bp, Gossypium hirsutum
  Clone ID: LIB3146-019-Q1-K1-A9
cggacgcgtgggtggaaatgatcttatctttcgggttggatttgttgatgttgtcttctagactggaaaactatttagggaggctgacaaggaatcgggtcacaaaaagacaataacatcacttacaaaatctgcagactgttcacacttccttactggttccttagataaatctgccaagctatgggacacaagaacgttgactcttatcaagacctatgttacggaacgtccagtcaatgctgttgctatgtctccacttctcgaccatatgtagagggtcagcccgagagcattgtgcaagatattgagaacatggttcgctcttacattgagaaggtaaaatgcatttgatctttattgtgtgctccttctagtaaaatttacttaaataagatttacaacgatgttactgccaataatattttaggataacgcgtattttata

SEQ ID NO: 6346 - DNA, 460 bp, Gossypium hirsutum
  Clone ID: LIB3585-067-P1-K1-E3
cggacgcgtggccggacgcgtgggcgggacgcgtgggaaaactgtctcacatctgaggagccgttgctgatttgttcatcagctcgattgaatctgacacctattatacgacgccggcaccgatctgtcgctttaaaaagaaatggggaatttaatttctcttgtgaacacgattcaaagagcttgctccgttcttggtgaccatggacaagcaggtgcattgccgactctgtgggactcattacctgcgattgccgtcgacggcggtcagagttcagggaaatgttcggtgctcgcaagcatcgcctgcaaggattttttcccccgtggatcaggaatagttaccctgggacctctggtgttgcagcttaataagactgatggaggatgcagagagtacactgtatgacttcaccttccaagagagagattcatcgatttcgctggcgctaggaaggag

SEQ ID NO: 6347 - DNA, 412 bp, Gossypium hirsutum
  Clone ID: LIB3135-045-Q1-K1-B4
ccaagctatgggacacaagaacgttgaatcttatcaagacctatgttactgaacgtccagtgaatggtgttgctatgtctccacttctcgaccatatgtagagggtcagcccgagagcatcgtgcaagatattgagaacatggttcgctcttacattgagaaggaagtacagctttgtcttacgtatatatggtctgcactactttgagccactcgattccaaagtccattgtttattgtcaagtccgtgaagctaaaataagcctgtttgactttttctacacggaattgggtaaactggagcaaaaatgattatcggcattattgaatgaggatccagcaatcatggaatgccgatccgctcttgcgaagagactagaattatataggagtgcacaagctgaaatcgata

SEQ ID NO: 6348 - DNA, 443 bp, Gossypium hirsutum
  Clone ID: LIB3120-036-Q1-K1-B11
cccacgcgtccgattttaggataacgcgtattttatatgtgactttcttcgaaaatcctaggaaaagtgtattgtagattgttgctgcaaattgccacttcctctgtttccaataactttgcagtatacattttttatggtttgtgcaagaatgacagctgaacattgttgctgcaaatcctaacaatgtatgagcaggaagtacagttttgtcttacgtatatatggtctgcgctactttgcgccactcgattccaaagtccattgtttattgtcaagtccgtgaagctaaaagaagcctgcttgactttttctacacggaattgggtaaactggagcaaaaacaattatcggcattactgaatgaggatccagcaatcatggaatgccgatccgctcttgcgaagagactgaaattatatatgagtgcacaagctgaaatc

SEQ ID NO: 6349 - DNA, 180 bp, Gossypium hirsutum
  Clone ID: uC-gsflnu33B129d02b1
ttctctttcgtccgcccacgcgtccgcccacgcgtccgcccacgcgtccgaaaaaaaaactgtctcagatctgaggtgccgttgctgatttgttcatcagcttgattgaatctgacgcctattatcgtcgccggcaccgatctgttgctttaaaaagaaatgtagattcctgcttcttcc

SEQ ID NO: 6350 - DNA, 493 bp, Gossypium hirsutum
  Clone ID: GOSHI-09MAY01-C1322_1
ccggggcgggccacgcgtccgcacctatcgaacaaccctcagtcaggttctcttcttctccacaaattcacctccgatgggtcgggctcagggacccttctgatcaggtatgctcgcaaatcttctttcattgcctctttagctaagttatgagccataagatttgtagatctgtatgtatgttgaaaggttatttggtgaaaagattacttttgctgctgaatgttctgtattatacccccaatcaccgatttatcagtcttatctaattgacttttgtttattgatactgagtctcattcgatgataaccaatgtgaaccctatctgttttcccataaccactgcttggaggcaatggaaccaactggtgggcaccaacacatagacttgtgcctcgtgatcgcccacaaagggcaacaaaatactcgacatggaatgctggaactattcttgaacactcagctactccacatttgggacatactaccacc

SEQ ID NO: 6351 - DNA, 905 bp, Gossypium hirsutum
  Clone ID: GOSHI-09MAY01-C1292_1
cacgcgcccgcccacgcgtccggaaaaattctcttccttttttttattccttcctttttcctttcatccaatcgaccaaattcagagcttacaaaagaaaaatggccggaatcggacctttaactcaagactgggagcccgtcgttattcggaaaaagcccccaaacgctgccaccaagaaggatgagaaagtcgttaacgccgcccgtcgagccggtgccgagatcgaatccgtcaagaaatcgaatgctgggacgaacaaggcagcatcgagtagcactactttgaatacaaggaaacttgatgaggaaactgaaaatcttgctcatgaacgagtgccaactgaactgaagaaagccatcatgcatgctcgaatggagaagaaactcacccagtctcaacttgctcagatgatcaatgaaaagccccagattatacaagagtacgaatccggaaaagctattcctaaccaacagattataggtaaactcgagagggcactcggtgcaaagctgcgagggaagaagtgaggagggtcttatcgttaatcaaacagaagttgaatatggggtccagttcttgagtcctaaaaaatggtgatgtaaataaatgcactctacagttactatggctcgcatgtaataacagcgtcttcgatgttatctgaagactatgactatgactgatgaaatgaagtgtgttcttgactgttgcaaggggttctctgtgctttttttgttttgcttttgcgtcatcagaggaagacacacttctttgtcgaacagatgatggtttcaacaattagaaacaccaataaatttggtttggcgtaaacttgatgcaattgggattatgtgctcggatcttagggacatgtcattttcccttgtgaaattttgatcctg

SEQ ID NO: 6352 - DNA, 362 bp, Gossypium hirsutum
  Clone ID: LIB3135-003-Q1-K1-G10
cccacgcgtccgaaaagccccagattatacaagagtacgaatccggaaaagctgggcctgaccaacagattataggtaaactcgagagggcacttggtgcaaagctgagagggaagaagtgaggagggtcttgtcgttaatcaaacagaagttgaatatggtgtccagttcttgagtcctaaaaaatggtgatgtaaataaatgcgctctactgttactatggctcgcatgtaataacagcgtcttcgatgttatctgaagactgactatgactatgactgatgaaatgaagtgtgttcttgactgttgcaagggaaaaaaaaccctttcgaaatctccgttacaaaaagaaggggagttat

SEQ ID NO: 6353 - DNA, 258 bp, Gossypium hirsutum
  unsure (1)..(258): unsure at all n locations
  Clone ID: LIB3148-020-Q1-K1-H2
gcaaagctgagagggaagaagtgaggagggtcttgtcgttaatcaaacagaagttgaatgtggtgtccagttcttgagtcctaaaaaatggtgatgtaaataaatgcgctctactgttactatggctcgcatgtaataacagcgtcttcgatgttatctgaagactgactatgactatgactgatgaaatgaagtgtgttcttgactgttgcaagggnaaaaaaaaaaaaataattaaaaaacaaaaaattaattaaa

SEQ ID NO: 6354 - DNA, 670 bp, Gossypium hirsutum
  Clone ID: GOSHI-09MAY01-C1252_2
cggacgcgtgggcggacgcgtgggcggacgcgtgggcggacgcgtgggcgagatgattgttttcaggcaactcaccaagttaggagtgaaggaaattgccgatataatgctcaaagaagtgtttgacaggcttaaaagcaaagaaatcgagctccaagtgaccgaaaggtttagagaaagggtggtggaagaagggtacaacccaagttatggagcaaggcctttaagaagagccataatgagacttctggaggacagcatggctgagaagatgcttgcaagggaaatcaaggaaggtgattcagtaatagtagatgttgactctgatggaaatgtcacggttctcaatggcagcagtggcacttccgagtcattgaccgatccgattccagttgtgtaaaccacatataagccactctagatatgttgttttgtaccctcttttttctttttcttctccttttgattgaactggctatactattatgaagtctgttttgttgggaggactagttgggcagttgaaattggaaggcattagttgctttttgcatttggaagtgttgaaactgtaaatcttttaacactgaatttgtgcatgcatggttggagtaggctttcaacgaggatggtggttggtagtgttgttttgcttagtttatttcacaat

SEQ ID NO: 6355 - DNA, 1915 bp, Gossypium hirsutum
  Clone ID: GOSHI-09MAY01-C1252_1
gagcagctgaaggtgcgattgatgctgccaatatcttgaagtctgctctggcaagaggtgaattgcagtgtattggagctaccacactcgatgaataccgaaagcatattgagaaagacccagctttggaaagacttttccagccagttaaagtgcccgaaccatctgttgatgaaactatacagattttgaaaggtttgcgagagcgttacgagattcaccacaagcttcgttacacagatgaggccttaatctctgccgcacagctttcataccagtacatcagtgaccgttttctgcctgataaagcaattgacttgattgatgaagctggatctcgtgttcgccttcgtcatgcacagctccctgaggaagctagagagcttgagaaagagctccggcagatcacaaagtcgaagaatgaagcagttcgcagccaggactttgagaaggctggggaattacgtgatcgggaaattgaactcagggctcagatcactgcaatccaagagaaagacaaggagatgaataaggcagaggcggaggcaggggatggagggcctgtagtgactgaagtcgacattcagcatatagtctcttcatggactggtattcctgtcgagaaagtatcaactgatgaatctgatcgcctacttaaaatggaagagacccttcataagcgagtcattggtcaggatgaagctgtcaaagccattagccgtgctattcgacgtgctcgtgttggtctcaagaaccccaaccggccaattgccagcttcatcttttctggaccaactggtgtaggaaagtcggaactagcaaaggctctagctgcttactacttcggctctgaagaagccatgatccgacttgatatgagtgagttcatggaaaggcacacagtgtccaagctcattggttcaccccctgggtatgttgggtacactgagggtggtcagctaactgaggctgttaggaggcgaccatacaccgtagtactttttgatgagattgagaaagcccatcctgatgttttcaacatgatgcttcagatcctcgaggacggaaggctcacagatagtaaaggaagaactgtcgatttcaagaatacactcctgataatgacatctaacgttggaagcagtgttatcgaaaagggtggacggcgaattgggtttgatctcgattatgatgagaaagacagcagttacaatagaataaagagcctggtgacagaagaactgaagcaatatttcaggccggaatttttgaacagattggacgagatgattgttttcaggcagctcaccaagttggaggtgaaggagattgccgatataatgctcaaggaggtgtttgacaggcttaaaagcaaagaaatcgagctccaagtgaccgaaaggtttagggaaagggtggtggaagaagggtacaacccaagctatggtgcaaggcctttaagaagagccattatgagacttctcgaggacagcatggctgagaaaatgcttgccagggaaatcaaggagggtgattcagtaatcgttgatgttgactccgatggaaatgttacggttctcaatggtagcagcggtacgcctgagtcattgggcgatccaatttcagtcgtgtaaccaaatagccttttttggatatatgctctttttacctttccgttttcattgaaaggactacttggccgttgatttgaaagtcatcgctagcttgcccgttggcattgaaggtgtatttctgacacttaaaatcgcctgcttaattggaaggggcaaaaaaagaactggtagtgttggtttagaatttaacttcacaataaactgttcggatatattgttttgaattatattgaaatacgttcttaatgtgattatgttccccttctacccccctttatttg

SEQ ID NO: 6356 - DNA, 566 bp, Gossypium hirsutum
  Clone ID: GOSHI-09MAY01-C1242_1
ggttcatgaaatggaaaatgggttcaacatatggtcctttaatggcaggctactttatcggatactgaaggatcatttcttccagttcttgtggcgtccaaggccaccatccttcttgacacctgagaaggaggaagagattgcaaggaacttgaagaagtatagctagaagtacgaggcagaggaccaggatgtatcgatgttattgagcgagcaagatcgagagaagagaaggatgttgaaggaggaatgggaaaagtgggttagtgaatggaggcgggcacaagaggaagaaaaattggagaggcaaaagttgagggatggagaagctagtgatgaagaagaagaatacgaggccaaagaagttgaagtagaggaagtgttggatgtgtcggaagaggtcctttcatttgaagagtgagaacctgtagtagaggagcttgattcttcattatgatgttgttgttacctttactttttgattttgttaccgtaagaattttgggtcatgacattgccaagtctagttgattatgatttatttgaaaacaagttaattttagatc

SEQ ID NO: 6357 - DNA, 1067 bp, Gossypium hirsutum
  Clone ID: GOSHI-09MAY01-C1272_1
cccacgcgtccgagcaaattaacgcctttttcttctgtttgctgagctctctcccccaacatcaccatggcagatagggtataccccaaacaagcgacaaatggcaccgccgccacatccaacccttcttttccggccactaaagcacaacaatacggagcctcccgccctgtctaccgtccacaacccgaacgccaccgctaccgccgctcttgctgttcttgctgcctttggaccaccatagctatcctcgttctcatcctcatagccgccgtagcttctgctatattgtacgttctttaccgccctcaccgtcctactttcactgtttcctccctcaaaatctcggcacttaacgtaacctcagcttccaagctgatcaccaacatcaacctaaacgtcacagccaaaaacccaaacaagaaagtcgtctacagttacaacccaatcaccgtagcgcttgtcacagacgacgacatcgctattggggaaggttccttcggttccttcgtgcacggaactaaaaacacgaccctcttgaaagctgccataactagtagcaaccaagaactcgatgacgcgtcagctgccaagttgaagaaagctttgaagagcaagaaggggctgccattaaagataaagctcgatactaaagtggaagcaaaaatgggagcattgaagacaccaaaggtcgggataagggttgtttgtgaagggattaaagctactggcccgaaggcaaaatcagcaaccacagcttcaacttctaatgcaaaatgtaaggttgatttgagactcaagatctggaaatggactttctgatcgacgagaatattttgagaaagagaaacaatggagaagaaaaaggtttgttgtttattttattttattacttttgttatggttgttttttttttataaagttgtgtcgttatttttttagggaggtaatatgtttgcaaattgggtgatttgattgtatagggtatagaaaaatgtaatgtatacgttatttcttttctttttcaatatatattttggatttttcttttgtgtaaaaaaaaaaa

SEQ ID NO: 6358 - DNA, 488 bp, Gossypium hirsutum
  Clone ID: LIB3584-039-P1-K1-G10
cccacgcgtccgcccacgcgtccgcccacgcgtccgcggacgcgtggggacaaatggcaccgccggcgcaaccaacccttcttttccagccactaaagcacaacaatacggagcctcccgccctgtctaccgtccacaacccgaacgccaccgctaccgccgctcttgctgttcttgctgcctttggaccaccatagctatcctcgttctcatcctcatagccgccgtagcttctgctatattgtacgttctttaccgccctcaccgtacgactttcacagtttcctccctcaaaatctcggcacttaacgtaacctcagcttccaagctgatcaccaacatcaacctaaacgtcacagccaaaaacccaaacaagaaagtcgtctacagttacaacccaatcaccgtagcgcttgtcacagacgacgacatcgctattggggaaggttccttcggttccttcgtgcacggaactaaaaacacgaccc

SEQ ID NO: 6359 - DNA, 989 bp, Gossypium hirsutum
  Clone ID: GOSHI-09MAY01-C1262_1
gaaaaataatcagcattttgtgtccaatcacaacgacaaaactccgtggattgagcaataatcgccatggcaacttccgtgaagaacaactcactacctccttctttgatctcgaatctcaatcaagttcttttatcacgacaacaacacaccattgatcatcaatccacccactcctcttcattaccttcccattcacgcaatgtcgacgagccagattgttctaaaccactgcttctcatcaccaattgcgaaggaatcgattcaccaggactcattttcctcgttcaagctctgctctctgacgctcgcttcactctccatgtctgcgctcctcaatcggacaaatcggttgccggtcattccctgacggtgcgagagacggttgcagtatgttcagttgaaatgagcggtgccactggttttgaagtttcaggaactcctgtggactgtgtctccttagctctgtctggagcattgttttcatggtcaaagcctgttttggtgattagtggaattaacagaggatcaagctatggtcgcaacatgttctactcaggagctgttgctgcagctagagaggcattaatttgtggtgtgccatcactttgtttatcattcaactggaagaaagatgttagcagtgaaagtgatttgaaaaatgcagccgatttttgtttgcctttaatatcagcggctgtaagagatattgagaggggaaagttcccagaaagttgctttctgaatatagaaatcccatcttctcccctagcaaacaagggattcaaactgaccaggcagagcttatggaggtcacctttaagctggaaagctgtatcagcaaataggcaccctgctgcaggccaatacctgtcgaatcagcaaagtcttggtattaaacttgcacaacttatccgggatgcctccgctgccggtgcagcgaggcgcttgaactcgcataggaagaatgttgagattgaatctgttgg

SEQ ID NO: 6360 - DNA, 1013 bp, Gossypium hirsutum
  Clone ID: GOSHI-09MAY01-C1202_2
tttttcgccctcccctcccctccccccccgcgtccggagaacctaaaagatcgaagagagacaatagagaaaaagtagcgacgaacatggaaagagagcaacaagtttacttggcaaggcttgctgagcaagctgaacgatatgacgaaatggtcgaggccatgaagaatgttgccaagttggatgttgaactgactgtggaagagaggaatctgttatctgtggggtataagaatgtgattggagcaagaagggcatcatggcggatactgtcttcaattgaacagaaggaggaagctaagggtaatgaacaaaatgtgaagaggataaaggagtatcggcagagggttgaagatgagctttcaaagatctgtgatgatatactatccgtcattgataagcatctcattccatcttcctcgacaggggaatcaactgttttctattacaagatgaaaggagattattttcgttatttggcagaatttaaagcaggagatgatcgtaaagaagctgctgaccagtcacttaaggcttacgaggctgccaccaccactgcaaattcagatttgcctccaactcacccaattagacttggcctggctttaaacttctctgttttctactatgagatattaaattctgctgagagggcttgccatctggctaaacaagcttttgatgaggctattgctgagcttgatagctcttaatgaagaatcttacaaggatagcaccctaattatgcagcttctcagggataatctcaccttgtggacctcagatctgcccgaggaaggaggtgagcaatcgaaagtagatgagcctcaggcagagagttaattcgatggaagagcattgttctaaagactggtttgtcgaggtgtgcttgagcccgcgcttggagtttgggccatagcatgaaggtccagtttttctttttaatgctgcttcctagagtgtgggagttggtttatttatgcatccagaacgaagtcttcaagaaatcctta

SEQ ID NO: 6361 - DNA, 1081 bp, Gossypium hirsutum
  Clone ID: GOSHI-09MAY01-C1202_1
acggcaaaatctaaagatcaaagactcaaagacaaagaaagcggccatggagaaggaaagagagcaacaagtttacttggcaaggcttgctgagcaagctgaaagatacgatgagatggttgaggccatgaagagtgttgctaagttggatgttgagctgactgtggaggagaggaatctgttatctgtgggatataagaatgtgattggagcaagaagggcatcctggcggatactgtcttcaattgaacagaaggaggaggccaaaggtaatgaacaaaatgtgaagaggataaaggattataggcaaagggttgaagatgagctctcaaagatatgcaatgacatactctcagtcattgataagcacctcattccatcttcctccaccggggaatcaactgttttctactataagatgaaaggagattattttcgttatttggcagaatttaaggcaggagatgatcgtaaagaagctgctgatcagtcacttaaggcttatgaggctgccacttccactgcaagctcagatttgcctccaactcacccaattagacttggcctggctttgaacttctcagttttctactatgagatattaaattctcccgagagggcttgtcatctggctaaacaagcatttgatgaggctattgctgagcttgatagccttaatgaagaatcttacaaggatagcacccttatcatgcagcttcttagggacaacctcaccttgtggacctcggatctgccagaggaaggaggtgagcaatcaaaagcagatgaacctcaggctgagagttaattggatgaaagagtattcttttaagactgggcttgtcgagataggaaaggggcttgctgctagagtgacctgctttcaactcatggtagtagtaccaggatttgttacctatgacatggttcgatttgtttatcagatgttttcggactgttgttctgtgttctcttctgtttaaacataattgaatcggttacactttatagtctttatgacttacttccttatgttcaattttttgttgtcttagcttcttgtttttccatgtgtttctga

SEQ ID NO: 6362 - DNA, 587 bp, Gossypium hirsutum
  Clone ID: uC-gsflnu33B140c12b1
ctaactctatggaatgctgggaacgcctgcaagcgcaccggtgcgccagttccggaatcgacccacgcgccctgcgtttttgtacgcggacgcccacacgtgcggtcattgataagcacctcattccatcttcctccaccggggaatcaactgttttctactataagatgaaaggagattattttcgttatttggcagaatttaaggcaggagatgatcgtaaagaagctgctgatcagtcacttaaggcttatgaggctgccacttccactgcaagctcagagttgcctccaactcacccaattagacttggcctggctttgaacttctcagtttgctactatgagatattaaattctcccgagagggcttgtcatctggctaaacaagcatttgatgaggctattgccgagcttgatagccttaatgaagaatcttacaaggatagcacgcttatcatgcagcttcttagggacaacctcaccttgtggacctcggatctgccagaggaaggaggtgagcaatcaaaagcagatgaacctcaggttgagagttaattggatggaagagcattctttaagactggg

SEQ ID NO: 6363 - DNA, 581 bp, Gossypium hirsutum
  unsure (1)..(581): unsure at all n locations
  Clone ID: LIB3543-051-Q6-K6-H7
ccccgcgtccgccccgcgtgggggggggggggggccacgcgtccgcccacgcgtccgcatactctcagtcattgataagcacctcattccatcttcctccaccggggaatcaactgttttctactataagatgaaaggagattattttcgttatttggcagaatttaaggggggggaggagggcggaagaagctgctgatcagtcacttaaggcttatgaggctgccacttccactgcaagctcagatttgcctccaactcacccaattagacttggcctggctttgaacttctcagttttctactatgagatattaaattctcccgagagggcttgtcatctggctaaacaagcatttgatgaggctattgctgagcttgatagccttaatgaagaatcttacaaggatagcacccttatcatgcagcttcttagggacaacctcaccttgtggacctcggatctgccagaggaaggaggtgagcaatcaaaagcagatgaacctcangctgnagagtaattggatgaaagagtattcttttaagactgggcttgtcgagataggaaagggcttgctgct

SEQ ID NO: 6364 - DNA, 250 bp, Gossypium hirsutum
  Clone ID: LIB3146-047-Q1-K1-H1
cggacgcgtgggttcagatcgggcggccgctcgcgatctagaactagtggtagtagtaccaggatttgttacctatgacatggttcgatttgtttatcagatgttttcggactgttgttctgtgttctcttctgtttaaacataattgaatcggttactttatagtctttatgacttacttccttatgttcaattttttgttgtcttagcttcttgtttttccatgtgtttctgattgaagcacacttta

SEQ ID NO: 6365 - DNA, 453 bp, Gossypium hirsutum
  Clone ID: GOSHI-09MAY01-C1232_1
aagaaaacgatgacgttacaccctctttcgagactctatcggagtatattgaaagtaccaagaaaagtcaagatttcgagatcatctccggccgtctcgccatgattgtgtttgcagcgacagtgacaacagagttcgtgacgggaacctccatatgtaggaagatggatttgcaagggattgctgaagcagtgggtgcgtgcttaggcgcagtgacttgtgctgcggcttttgcttggttatcgagcgctcggaacaaagtgggtcggatcttcaccgtcggttgcaactcgcttattgattcggtgatcgaccaaatcgtggatggatcgttctatgaaactgatggtactagtgactggtctgatgatatctgaaagtagggaatggtaaattatgtcttgatgttcatatatagataggatggtctccctttgagagaaatgataataa

SEQ ID NO: 6366 - DNA, 623 bp, Gossypium hirsutum
  Clone ID: GOSHI-09MAY01-C1222_1
atcgtatccgggaaagcctgtgactgtaatctgctcacttgcagaatctgggaattgtgagagctggcttgtttcggaaggtgttttgcctcctctcataaggcttgttgaatctggcagcacagttggtaaagagaaggcaataatttcactgcagaggttatcgatgaccacagaaacagccagagcaattgtagggcatggcgggtgttcgaccactaattgaaatctgccggactggaggctcggtgtcacaggctgcagctgctagtacattaaaaaacatatcagctgttcccgagcttcggcaagtgctagcagaggaaggaatcataaaagtgatgatcaatctccttgattgtggaattttgttgggttcaaaagagtatgctgcagaatgcttgcagaacctcactgccagcaatgagaatctgagaaggtctgttgtttcagaaggtggaattcgaagcctattggtataccttgatggtcctttaccccaagagtcagcagttcgagctttgaggaacttggttggctcggtatcgatggaagttcttgtatcacttggcttcgtccctcgattagttcatgtgctcaaatctggatcattgggtgcacaa

SEQ ID NO: 6367 - DNA, 1013 bp, Gossypium hirsutum
  Clone ID: GOSHI-09MAY01-C2982_1
cccccccgcctcatttagtgcaaaaaccatcttcttttttctgctttctcgtatagcatcctgttttgagaaacttttttttttgagggaatcagaaaatgtcatcggagaacgggaaaaggttgctggaaactgatgccggcggcttgaattttgaggctaccgagctgactttagggttacctggagagcctagagtaacatcggacggtggagctaagttgggcagtaaacgtggattttccgaaaccgttgatcttaagttgggtgacaacaatcgagaggttaagctgggtcactccctccaagaagctgctaagtctcctgtttcaaagacacaagtggtgggttggccgccggtgagaggctttgcaaagagaggaaagaagagttgcaaatatgtaaaagtggcggtggacggtgctccatatttaaggaaagttgatctcgagatatacaatagttatcagcagctgttaacctcccttgaagacatgttttcatgtttcaccataagaaactatttgaacgagaagaaaatagagcaagtgaatggaattgagtatatgcctacatatgaggataaggacggagattggatgttggtgggagatgtaccatggcaaatgtttgttgaatcttgcaaacgcttaaggttaatgaaaagttcagaggcagttggattaggtctaacgacaggtccaaaatactcaagcacaaattaaagaaagaagcctttttaattcaagcatccaagaaagaaatcataaagaattgtacagaggcttttttgctttgtttgaactatttttacctgacgggcagggtttttgactaagatatagactgccaaattgcaagaaacataaattaaataagctgtaattgtagtgcattgatgttgtgggcttttttctccacattacttaaagttaatcatctcttcttcctttttcagttgtctcctttgttttcatttttctaaataaaaggattaatttcaaacttaatca

SEQ ID NO: 6368 - DNA, 627 bp, Gossypium hirsutum
  unsure (1)..(627): unsure at all n locations
  Clone ID: LIB3584-009-P1-K1-C3
cagnagctgctaagtctcctgtttcaaanacacaagtggtgggttggccgccggtgagaggctttgcaaagagaggaaagaagagttgcaaatatgtaaaagtggcggtggacggtgctccatatttaaggaaagttgatctcgagatatacaatagttatcagcagctgttaacctcccttgaagacatgttttcatgtttcaccataagaaactatttgaacgagaagaaaatagagcaagtgaatggaattgagtatatgcctacatatgaggataaggacggagattggatgttggtgggagatgtaccatggcagtaagctcttaaaattgaaccttttcatttgctcttcctcaagtgtttttcttttctaaactttttactaattttttattcttatttctttttccagaatgtttgttgaatcttgcaaacgcttaaggttaatgaaaagttcagaggcagttggattaggtctaacgacaggtccaaaatactcaagcacaaattaaagaaagaagcctttttaattcaagcatccaagaaagaaatcataaagaattgtacagaggcttttttgcttttgtttgaactatttttacctgacgggcatggtttttgac

SEQ ID NO: 6369 - DNA, 399 bp, Gossypium hirsutum
  Clone ID: LIB3148-009-Q1-K1-F2
ggagattggatgttggtgggagatgtaccatggcatatgtttgttgaatcttgcaaacgcttaaggttaatgaaaagttcagaggcagttggattaggtctaacgacaggtccaaaatactcaagcacaaattaaagaaagaagcctttttaattcaagcatccaagaaagaaatcataaagaattgtacagaggcttttttgctttgtttgaactatttttacctgacgggcagggtttttgactaagatatagactgccaaattgcaagaaacataaattaaataagctgtaattgtagtgcattgatgttgtgggcttttttctccacattacttaatcatctcttcttccttttgtttcacttttcttaataaaaagattcattttcaacttaaa

SEQ ID NO: 6370 - DNA, 852 bp, Gossypium hirsutum
  Clone ID: GOSHI-09MAY01-C102999_1
gccttgtttgggagctatgaagtgaaagaaaaaaataaggagcaacagagagtttttctagttactaacatcatcaacatcatcatcatcatcatcatcatcataggccatgaaccaaggagtgttgcagagctcaccagtgcaacaattaatggccggaaaccctgattggtggagcatcaacaacgccatgcgaccaccatcaactcatcatcatcatcaacaaacagcttcccctttcttccctttccctccaccacagccaccaccaccaccggcggcagcggcggctgctgctactttcttccctcaactcatccctacttccacttcttcttcttcttcatggcatgataataataaccaagaggttcctgaatcatggagtcaattactcttgggaggactggtgggagaagaacaagcaacagcattacaacaccaagcttcaactggtaataataatattatgaaacaagaaaactatgtgtatggccatgcggaatgaagattaccatcatcatcatcatcattatcaaggatctaaagcaacaactaattggtccatggctactgcttcttcatcaccaaaatcctgtgtaacaacaagtttcaacagcaacatgttggatttttcaagcaacatcaaagctgataccgctacaaggcaacacccaccattaatggatccatcacctgagtgtaatagctgcactgcaagtggtggggcattgaagaaaactagggttcaaccttctgcaactcaatctactttcaaggtgaggaaagaaaaattaggagacagaattacagcacttcaccagcttgtttcaccatttgggaagactgaca

SEQ ID NO: 6371 - DNA, 1481 bp, Gossypium hirsutum
  Clone ID: GOSHI-09MAY01-C2952_1
tctcgcccacgcgtccgcccacgcgtggcgccccgccaccgcgcaacgacaaacctttcattattacacacctgtttccattacttctctgaccaaaactccgcctctgacaccacctgccgccaccaatgtccatcgccgcctgccttctcaccccttccccactttcctctcctagttcccttaccatcacccctaaattccccaccactttccctctccacctccacctccgcctttcctcctccgccacctgtctccgtcacagccgatcttccccgttcttaaccttctgcgccggcggcgatggtggtgatattaacagcaacaacaacaactcgggtggcggcggtggaaacgatgagaatggaaaacacaggggtggtgatgacgagaatgcgggtgacaagaacaggaaagaggcgatgattgtcctggcggaggcagggaggtcaacggagagtctgccgaaggacttggcggcggcgatccaggctgggaggatccctgggtcggtcatagagaggttcttggggcttgaaaaatcggggcttatgagatggttgatgcagtttggagggtttaaagaaaggcttttggctgatgatcttttcttagctaaagttgcgatggagtgtggtgttgggatcttcaccaagactgctgcagaatatgaacgtcgcagagaaaactttttcaaggagctggagatcgtttttgctgatgtggtaatggccataattgcagatttcatgcttgtgtatcttcctgctcctactgtttctctccggcctcctcttgcagtcagtgctggagctatttccaagttcttctatagctgccctgataatgctttccaggttgctcttcctggtacttcgtattcacttttgcagagattaggagcagtaatgcgtaacggcgcaaagctttttgcagtgggcaccacttcttcgctggttgggacagccatcacaaatgctttgattaatgctaggaaggccgttgataagacatcggcagctgaagttgaaaatgttcctatactatccaccagtgttgcctatggtgtatatatggcagtttcgagcaacctcaggtaccaagtgctggctggtgtaattgaacaacggattctggagcctttgttgcaccagcacaagcttatgttgagtgcaatatgctttgccgttagaacaggcaacacattcttgggttctctattgtgggtggattatgctcgcttggtcggtattcagaaggctcacgaagaggacgcagcagcataggttgaggttggaaccaaccagttatggtggttttccccatcaaaggaggtttgctggaaaagctttgttgcctcccatgctagttttcattacaatacaattttacttttgtttgacctgttcttataaaataaactctttttttgcttttttcccaaaaaaaaaaaaaaaaaaaaaaaaaaaaaaaaaaaa

SEQ ID NO: 6372 - DNA, 415 bp, Gossypium hirsutum
  Clone ID: LIB3272-036-P1-K1-H12
atcacccctaaattccccaccactttccctctccacctccacctccgcctttcctcctccgccacctgtctccgtcacagccgatcttccccgttcttaacagcaacaacaacaactcgggtggcggcggtggaaacgatgagaatggaaaacacaggggtggtgatgacgagaatgcgggtgataagaacaggaaagaggcgatgattgtactggcggaggcagggaggtcaacggagagtctgccgaaggacttggcggcggcgatccaggctgggaggatccctgggtcggtcatagagaggttcttggggcttgaaaaatcggggcttatgagatggttgatgcagtttggagggtttaaagaaaggcttttggctgatgatcttttcttagctaaaagtgcgatggagtg

SEQ ID NO: 6373 - DNA, 1021 bp, Gossypium hirsutum
  Clone ID: GOSHI-09MAY01-C102949_1
ctggctgcatgtatgtcaaggctggtcagtttgagaaagctgaggcatgtcttgagaacttagagaaagaaatatgcctcgtcagcgcgaggcttaccattatctgattagcttgtatgccggtacttcgaatcgagatgaggtttatcggctatgggaagatctgaaacagcgttatcctactgttaacaatgcaagttatcttattatggttcaggcacttgctaatctaaaggatttcaagggtttgaagaaatgttttgaggagtgggacactagttgctcttcgtatgataggaggttggtaactagtaccatccgtggttttctatcgggtgacatgcttgaggaagcggaagtcgttctggataatgctatgaagagaagtaaaggtccttatactaaggctcgagagtatttcatggtttacttcttaaggaaatgtcgctttgacatggctttgaagcatatggaagcagcggtttctgaggtcaaggactggagccctgtgaatcccgaaaccatgactgctttttttgattatttcatgaatgagggtgatgtcaaggccgccgaggagttctgcaagcatctaaagaataacaattgtcttgattccgaggtgtaccatcagttgctaagactttatgttgctgctggtaaggtggctcccgacatgcgccgaaggttggaggatgatgcgattgaaatcagcaaagagctcgaggatttgcttgtaaaggtttgcccagagtaatgttgtaatctgaagctgttaacaacctatattcatttaggataatcttgagtctattccatgatctctggtggtaagtttcggtctggtattttttgcgaactgggatattccagttggttcaatgactttccaaagtacctcatttatagagatgtagaagatgctatgaaaatgaacattaggaaaaagggtcatcaatgatgtagcgaatttagatcattcttaaaaattacaaggtcatgtcagtgatatgtaagttgc

SEQ ID NO: 6374 - DNA, 1016 bp, Gossypium hirsutum
  Clone ID: GOSHI-09MAY01-C2962_1
caaaaagtgattagttgcagttcacacccccccctttaaaaataataataaccgtatcggtgataccgatggggactacttgctgaggggtcgaagaaacattctgcgcccgccccgtcctatttttgggaatggaatcattggcctggacggcggccacataaggaaggcgtatgagaagctgaggttctgcagaatcaatatcctatgatctttatttcaaacctctgagaaggtgttggtgagtgggcgtttcaagtaaattcgaatcgacatggcattccctactaagataaaagggatgaatccaatagttgagatggacggagatgaaatgactcggattatttggcaatctataaaggaaaagctaatttttcccttcttggagttggatataaaatattttgaccttggtcttcataatcgtgatgccacgaatgatgaagttaccatcgcaagtggcgaagctactcttaagtataatgtagcaattaaatgtgcaaccataactccagatgaaggtcgtgttaaagagttcaacttaaaggaaatgtggaaaagtccaaatgggactattcgaaacattttaaatggaactgttttcagggaaccaattatctgcaaaaatgtccctcggcttgtcccaagttggaccaagccaatctgcatcggaagacatgcttttggcgatcaataccgagcaactgatttagttgtacaggaatctggaaaacttatgcttgtcttcgttcctgataagagtaatgagaagaaggagcttgaggttttcaacttcaaaggtgctggcggtgtaactttgtcgatgtacaacactgatgagtctattcgtgctttcgctgaggcttcaatgactactgcttaccagaagaaatggccactttatctaagcacaaaaaatacaattctaaagagttacgatggaagattcaaagacatgttccaggaagtttatgaaactcaatggaaatcaaagtttgaggcagaaggtattt

SEQ ID NO: 6375 - DNA, 961 bp, Gossypium hirsutum
  Clone ID: GOSHI-09MAY01-C102939_1
tttgcagtgttaaagaagaccatgcaagagtgattgacacatcctatatcttcaaattttggatgcacctatctatagaaaaccatctttgaataacttgtgcaagtccgtactgggatatgaagttcgaaagcctggtgctgctcataattgtctagatgatgcatgtgctgcaatgaaactagttcttgctaagctagagcgtggtgaaattaccctggttccagatgtatctcaacctgaaagggagaagctactactccacagaataccagtctatgttcatagagaagaaatttccaaagtcattcctggagctgttgcgattgaagtaaagccaactaaaaagcttcaaggtcgccattactctgcaattgctgtctttagtagtcctcaagaagcaaaccaagcatatgaaaatatggaaggcaatgaagaaaaggattcgcatggactaccacagaaacttgttagctttcagtttggcgatggatcaactgctagtttatacatccgtaaaatggcacaggaagattctcaccgtgaagttttgtcgaataaaagagcattcgagggcgaggagacatcgattgaatccaaaaagctgaagacggatgagaaaatcacgaagaaagttatggaagataacagtcaacttgatgatcacttaaaagagatagaacgattgaagcaagaactgcaggagaaagatgctaaaattgtgttgcaggataagatgatatctaaccttctaaagaaggttgaagaaatgaaaaaggttcttaataaaaggaaataggtcatgcagtagtgtttttacagtcactttttggtacacgattttacaatctattaaccccaacctggttcaagtgtcatgttcagtgttgttttggttaggaacaccgttcttttgtcctaaacaccgattatatttcattatatctgaatttgtggaatt

SEQ ID NO: 6376 - DNA, 960 bp, Gossypium hirsutum
  Clone ID: GOSHI-09MAY01-C2932_1
aaaaagaacaacatttactgaggctattaatcagattcaacacccatgccattgatattacatcaaaatacctaatctctttttctctcttcctatgtgtgcgcgcaaaatacctaagaactcaaaaggtaaataatggattaatgggtgccgtctgattctactcaacacaacacaacataggataatagacatacccttttcatagaaacactggtgccatatcaagcgttattgtagctagcattttaattagcacgtgaagtgatggtccagccgtgtctttgaatggatctccaacggtatctccggtaatagctgctttatgagaatcactgccttttccaccaagagctcctgtctcaataaacttcttcgcattatcccatgcacctccggcagtgttaagaaagagagccattaaaatgccagaaactgttgcaaacatcaacatagcagctacaacttttgctccaagtagaggatgtccagtatagtgtcccaaaacacggaacaaaaaaccaactactattggtgatatgatagccaatgcaccaggctttatcatctccctcaaagatgccgcggccgcgtgggcggccccgcggccataatctggtttctccttgtagtccatgataccaggcctctcaataaattgttttcttacttcttaacaacctcctgagccgttcgaccaactgcagaacaggcccatgcactaaacaagaatataagcatagatcccaacaatccaccaacaaaaacctcaggaattgcaatatcgacctgtttaaaagattcattagcaaaagatgcaacctcgtccatatatgcactaaacagaaggaaagaagcaagtgctgcagatccaatggcaaaacctttggtggtagcttttgtcgtgttcccaacagcatcaagaacatctgtaatctctcgtacaatctctggctgctg

SEQ ID NO: 6377 - DNA, 344 bp, Gossypium hirsutum
  Clone ID: LIB3584-014-P1-K1-A6
agtagtacaccacctatactgaatagatatgtgcaatatactgagtaccaatacattaagaattaatatcaattgaaagcagttgaacaaatttatatatatcaactgaaagcaaattattagaatacgaaatggcaatattcacatattctaaagcttctatcaagctttggatgtgagctaatggtttcttcagctgcaaaaaccccaatcctcctgagctgaaagttccaagatttcctagctatcatgctcaactactattggtgatatgatagccaatgcaccgggctttatcatctccctcaaagatgccgatgctacaatagcaacatagcgaccat

SEQ ID NO: 6378 - DNA, 1222 bp, Gossypium hirsutum
  Clone ID: GOSHI-09MAY01-C2922_1
cgcattttccttagcatggtaatgtatggttgggttagcttagccccgaaggaaccttaatttccaaacctcggcgttgaccactctaaacgcccttattttagttaacccacacgttccttcaccgcttaatctccaccgcccatcttattctgccctataaaaccacccccttttccacccttttcattccccatgcccccccgaaaaagaacccagtcttctgatctctgccccaaagcaaaaaagttctcatcttttacaatcacagctactgcttatttattttcatggctcaaggagattctaacttccagcaagacatggctaaagaggaagaagaacagaggctgaaatacttggaattcgtgcaagtagccgccgttcacgccgctttgtgcttcaccaacctttacctttacgctaaggaaagatcggggccgttgaaacctagcgtcgagaccgttgagggaacggttaagtgcgtggttggaccggtttatgataaataccatgatgtccctgttgaattccttaaattcgttgattccaaggtgggtgaatcagtgaccaagcttgatcgtcgagtccctccagtcatcaaacaggtctcaaccgaagccatctctgcagcccaaaaggctcccgaggttgctcgtggcgtggcttccgaagtccaccgtgctggagtggtgaacaccgcctcaggattagcaaaatcagtgtacaccaagtatgaacccacagcaaaacagctttatgcgaagtatgaacccaaagctgaacaatgtgcggtttcagcttggcgtaaactcaacatgctccctctcttccctcaagttgcctcggtcgttgtcccaacagctgcttattgcagcgataagtataacgagacagtggctagcagtgcagagaaagggtacaaggttgcctcctatttgcctttggttcctacagagaagatcgctaaggtgtttggtgagcagacgactgaaatggagccgttggtttctgagagttgatctgctttgaatcctgtttatgtgggctatgacttgtgaatataataatctggacctgttttatgtttttacttgtgactgtctcttgtgatggatggaacaatgggttttagttttcatgtttgtttttgttgtattttatttttattgaaataaatttgtttttgatgggaaaaaaaaaaaaaaaaaactcggggcgg

SEQ ID NO: 6379 - DNA, 724 bp, Gossypium hirsutum
  unsure (1)..(724): unsure at all n locations
  Clone ID: AI055190.1
agaacgcagtcttttgatctctgccccaaagcaaaaagttgtcatcttttacaatcacaactactggttatttattttcatggctcaaggagattctaacttccagcaagacatggctaaagaggaagaagaacagaggctgaaatacttggagttcgtgcaagtagccgccgttcacgccgctttgtgcttcaccaacctttacctttacgctaaggaaagatcggggccgttgaaacctagcgtcgagaccgttgagggaacggttaagagttgtggttggccncggtttatgataaataccatgatgtccctgttgaattccttaaattcgttgattcaanggtgggtgaaatcagtgaccaagctttgatcgtccgagtcccttccagtcattcaaacaggtctcaaaccgaagccatcttggcagcccaaaaggctccccgaggtgctcgtggcgttgcttccgaagtcaccgtgctgaatggtgaacaccgctcagatagcaaatcagtgtcaccagtatgacccacagaaagacttatcgaatatgacccaagtgacatgtcggtcagctgcgtaactaatgtccgttttctagttcctggcggtcaaagtgtatgcacatattacaactggtactgcaaaagtcagtgctcattgctgtccacaaatccaggtgtacacataatgactgtttgagatgttaacgttggttatgaac

SEQ ID NO: 6380 - DNA, 617 bp, Gossypium hirsutum
  Clone ID: LIB3825-007-Q1-K6-D11
cgcagtcttttgatctctgccccaaacaaaagttgtcatcttttacaatcacaactactggttatttattttcatggctcaaggagattctaacttccagcaagacatggtattttcattaaagctttctctctctctttttattttttcttttgttgggtttttatgtattttgagttttccttttttttttttttaaattgatttgtttttgtattgtttttttatttgaatttgaaaggctaaagaggaagaagaacagaggctgaaatacttggagttcgtgcaagtagccgccgttcacgccgctttgtgcttcaccaacctttacctttacgctaaggaaagatcggggccgttgaaacctagcgtcgagaccgttgagggaacggttaagagtgtggttggaccggtttatgataaataccatgatgtccctgttgaattccttaaattcgttgattccaaggtgggtgaatcagtgaccaagcttgatcgtcgagtccctccagtcatcaaacaggtctcaaccgaagccatcttggcagcccaaaaggctcccgaggttgctcgtggcgtggcttccgaagtccaccgtgctggagtggtgaacaccg

SEQ ID NO: 6381 - DNA, 281 bp, Gossypium hirsutum
  Clone ID: LIB3146-001-P1-K2-C7
tcgacctattgcgtcaccatatctttttcagacttttacaagctccctctcttccgtgaagttagggtaatctttgtaccaacaactgcttattgcagcgacacgtataactagacagtggttagcagtgcatagaaagggtacaaggttgcctactatttgcctttggttcctactgaaaagatcgctaaggtgtttgttgaacagactactgaaatggatccattggtatctgacagttgatctgctttgaatcttgtttactttggcttataactgtg

SEQ ID NO: 6382 - DNA, 899 bp, Gossypium hirsutum
  Clone ID: GOSHI-09MAY01-C2882_2
gcagttctatcactgaggcaactcaatcggttgatcttattagtgggactaaactgctggcaggtgggatgacatcagatcagatggaccttcttgttgagcaagttaagatgcttgctggagagattgcatttagcaccagtaccctgaaacgcctggtggaccagtctgtaaatgatcctgatagctcaaaaactcagattcagaatttggaaagagagattcaggagaagagaaggcaaatgagggtgttagagcagcgtataattgagagtggtgaagcttcaatcgctaatgcttcatttgtggatatgcagcagacagttatgagattgatgacacaatgtaatgaaaagagttttgagctggagataaaatcagcagataatcgtatcctccaagaacaattgcagaacaagtgttctgagaatgaggaattgcagaataaggtgaatctcctggagcagcggttggcatctttgtccggcgacaaattatccttgtcctctgaacaaggaatatctgaagaatatgctgatgagttaagaaaaaaggttcaatatcaggggactgagaatgaaaaactaaaactagaacaggtacagctttcagaggagaacagtgggttgcgtgtccaaaaccaaaaactggctgaagaagcttcatatgccaaagaattggcgtctgctgctgctgttgagttaaagaatttggcgagtgaggtgacaaagctctcagtacagaatgcaaaactggagaaggaattattggccgctcgagagtcggcaaacactagagcttcttctaatcaggctgtcaatggtttcaaccgcaagtacagtgactgtgggagacctgggaggaagggacggctctctggccgccctcatgacctatct

SEQ ID NO: 6383 - DNA, 648 bp, Gossypium hirsutum
  unsure (1)..(648): unsure at all n locations
  Clone ID: LIB3543-053-Q1-K6-G4
tgtcaactgcttctgccanaactcatcattatgataattgcgaagaattcattttaatcatgtgtcaatcaattgtttgtttcttttgtttcatataccttgggaatgttttacacaataagttgcaagttgcaattaaagttttgcaacgccatttgatatcttactgcagcactgcaatatctttagacatttctctgcttttttctcctattgaatgttgattctacttcctacctgtaaatcagttgcatttgttggttgattttaagacccttgctatgaaattctaaggtacacaaatgttgggctttaccctgttcttaaatatttcttcacaatttaaaattggatgaatttttatattaagatggttcattagtttgccttttcatgttcataattgtgtgttataacttctacgggttaagagaaagatttgcttgtctttagcatggtcctttgtcttccttgcacctttgaactgattaagactaagttgtgcttatctatgcaggggactgagaatgaaaaactaaaactagaacaggtacagctttcagaggagaacagtgggttgcgtgtccaaaaccaaaaactggctgaagaagcttcatatgcaaaagaattggcgtctgctgctgccgt

SEQ ID NO: 6384 - DNA, 687 bp, Gossypium hirsutum
  Clone ID: GOSHI-09MAY01-C2852_1
tccgcccacgctccgcattaaaaaacagggtgaggaacttggccactgctaaagaactgatgaaggttagacagatgtggaaatcaagcttgaatgtcatcgtaatcaatgtcaagtagttagagaagccaaaactttaggtctcattggatctggcaaaaaactcagtgatgatcatcttaaggccacactgcagttcgagcatgaacttattagttggactataagattctcaagttggatagatgcccagaagggttatgtaagaggtttgaataattggctactaaaatgtctttactacgaaccagaagtaactgatgatggagtagctcccttctcacctagtagaataggcgcaccatccatatttgtaatatgtaaccagtggtcacaagcaatggataggatatcagaaagggaggtgatcaactctatgcgggttttagtgactggtgtgctccagctttgggaacaagataagtcagaaatgcatcggaggatgatggccaataaggatttagagaggaaggctaggaatttggatagagaggatccagaagctgcagaaagatatccaagcattagataagaaaattgttttggtctctgggagatggtagcagtctctcggtagctgggaaatgtgtatatcagagtgagactagcaacagtagtttgcagggg

SEQ ID NO: 6385 - DNA, 1252 bp, Gossypium hirsutum
  Clone ID: GOSHI-09MAY01-C2842_1
ggcagcaacaaaccagatctctttccaggagatctatgcatcaaactgtcagagcttcacagcaaagctcctgagcatagctttgcctacacaaagaaaactattgaaaaagcatttggccgtaagctatctgaaatttttgaggcttttgaagaagaacctgtggcatctggaagtatagctcaggtgcaccgggcttctttgagattccgctatcctggtcagcgggtcaagcccatggtagttgcagtaaaggttaggcatcctggtgttggtgaatcaattaggagagattttgtgattatcaactcggtggctaagttatcaacgttcatccctactctgaaatggttgagattggatgagagtgtccagcagtttgctgttttcatgatgtctcaagttgaccttgcaagggaagctgcccatttgaaccgttttatatacaacttccgaagctggagggatgtttcttttcctaagcctgtgtatccacttgtgcatcccgctgttttagtggaaacttatgagcaaggggaaagtgttgcacactatgttgatggccttgaaggacatgatcgggttaagtctgcactcgctcatattggaactcatgcacttttaaagatgcttctggttgacaacttcattcatgctgacatgcatccgggaaatatccttgttcgggtgtctcaaagcaaggcttctcggaaacagctttttaaaacaaagcctcatgtcatcttccttgatgtaggcatgactgctgaactttcaaagggtgatcgtgttaatttattggaattttttaaggctgttgcccgtagagatggccgtactgctgcagagtgcacgcttagactatcacaaagacaaaactgcccaaacccgaaggcttttatcgaggaagtagaagaagccttcactttctggggtactccggagggtgatccagtccatccggctgaatgcatgcaagaattgcttgagaaagtaaggcgtcataaagtcaatattgatggcaatgtatccactgtgatggtcacaactttggttcttgagggttggcaaaggaaacttgatccaggatatgatgtaatgcaaacactacaaacattgctactcaaagctgactgggcaaatctctttcttacactatcgatgggttgatggctccatagaacattatccgaagtacggttagccaaatgcgtcctcccaagggtctttaggatcatgtattctgttctag

SEQ ID NO: 6386 - DNA, 819 bp, Gossypium hirsutum
  Clone ID: GOSHI-09MAY01-C2812_1
cccacgcgtccgattgtttatggtggatttccatgatatgcttttgccttttatcaagaggataaacaacttaccagggagaaagtcttatgcatcccggacggtgttcttctataccaagaccggtattctaagaccaatagctatcgagctttcacttcctcccacaccttcatcaaatcggaacaaatatgtttatactcatggacatgatgctacaacatactggatttggaaactagccaaagctcatgtttgtgcaaatgatgccggtgtccatcagcttgcaaatcactggttgcgtactcatgcttgcatggagccatacataattgcaactcacagacagcttagctcaatgcaccctatttacaagctgcttcaccctcatatgcgctacacgctagaaattaatgcacttgcacgacaaagtttaattaacggaggtgggataattgaggcttctttcagccccggaaagtatgccatggaactaagtgctgctgcttacgagagttggcggtttgacagggaagcattgcctgcggacctgattcataggggcatggcagtggaggatccttcagctcccggtggcctgaaacttttgatcgaggactacccttatgcagccgatggactgcccatttggtctgccactaagattgggtataatcctatgtccaacactttttacccgaccccgatcccgtcacgtctgatgttgaactcccaccctgttggattgacattcataaccgacgtccccatcataaaatgaatgaaccctgtttggcttaactcgccactatacatatg

SEQ ID NO: 6387 - DNA, 447 bp, Gossypium hirsutum
  unsure (1)..(447): unsure at all n locations
  Clone ID: LIB3584-011-P1-K1-H11
cgcttgcacgggggaggggaagtagggggggtggaataattgaggcttctttcagccccggnaaagtacgccatggagctaagtgctgctgcttacgagagttggcggtttgacagggaagcattgcccgcggatctgattcataggggcatggcannnnaagatggggggggggggggtgtttttttttttnnnancnannactacccttatgcagccgatggactgctcatttggtctgccatcaaagaatgggtagaatcctatgtcgaacacttttataccgaacccgattccgtcacgactgatgttgagctccaagcctggtggagtgagatcaagaaccgaggtcaccatgacaaaaggaatgaaccctggtggcctaaactcgccacgaaagaagacttgtctgggatacttacaacaatgatctggcctgcctcaggc

SEQ ID NO: 6388 - DNA, 1063 bp, Gossypium hirsutum
  Clone ID: GOSHI-09MAY01-C102839_1
cttaaaacaaaatatcttttttcactcagatatttgattactcacagcttaaaaatcttcaacatttgtagagaagctgcaaagccatatcccttccatctttgaaaacaagaaacgacaatggaaagcgaaacagcaagacgcagaatcagcaacattgcatcccatttttcaccctgtgatgatactttatctgtttctcaccttcttcccatgaactgtagtgggagatgtgataatagaatgtactttgcacgtcaaggttcagcatttcaagcttgcttcatgagacaagtttcaagaccagagagaactgctcctcagtgttttgcacctcccaaatccgtttccactccattggagagttctaatgctattgaagcaccattattttctagacctacaatgatggattcaaacttgtcaaatttatcaaaaatagaacctctgggactaagattggagattatccatgcctgaccctcctaagtttgctagacccaaataaaattcaagtgataagatgccattgcaatctaagaagaatacatgttggtccatatctaatggcactaaatggtcccctaagatggatgttgcagaatctggacacaattatattatgatggttgaagttccaggtgtcagcattggtgacattagagtggaggttgatgaccaaaatttaacggtgaggggtaaacggtctagccattgttggaaactagctgctgattgctctgatggctcaatctctgcatatcacaaaagggagatatcacaagggccttaccaggttgtgtggccacttcctgctaatgtaaacagggacagtgtctcagctgagtttctagatggatttttacgtattgttattcctaaactttgagatcaaactggtggtggaagcattcatgcacatatatgaagacaaacttatgtactatccatttatgttcaatgcctactctcagtatctgttgctgttattaaattgttagcaaggactttgtaaatccgtactaaaataatatagttcatacgaattttgtgaatttagaac

SEQ ID NO: 6389 - DNA, 663 bp, Gossypium hirsutum
  Clone ID: GOSHI-09MAY01-C2802_1
caatgtctacgcttgttgcctgcaccattagctggttgtgagaaagcccttgtatggtcttgggatgattcaacaattggaggcttaggtggaaagtttgaaggaaatttagttaagggaagcgtacttttacactgtttgaattctcttctcaaatattctgctgtaatagtgcagcccttcagcagatatgacctcgatggttctggaaaagttgttacacttgacatacccttgccccttaagaattctgatggctcagttgctcatgtgggggatgagctaggactatgtgtggccgaacgttcaaaattaaatgatctattaactaatttggctgaccagatacagttgtggacagtcggttacattcgagtgctaagactatttaaagaaagagatatggatcattttggcccggataaagagatatatgaatgggttccattgactgttgaatttgggatgccacttttcaaccctaagttatgcaagagtatatgtgaaaggattgtctcgtctgagttacttcaatcagactcacttactgagcatcatgattcaatgcaaagcatacgtagaatgttgcgtgaggtttgtgcagagtatcaggcaacaggtcctgccgcaaaacttttgtaccaaaaggggcagccaaaggat

SEQ ID NO: 6390 - DNA, 680 bp, Gossypium hirsutum
  Clone ID: GOSHI-09MAY01-C102809_1
attggcttcccgtgcaccactgattgtggcgtatcagttttgccttacactcttgcagaatctgatactagataggcctccaagtacgaggaggttgaagtagagtcccatcttgttgatctttgccaggaggtattcctgttttatatagaaactgcacggtctgggcagacttctgaaacatctccggaggagcaaagccagtggttgattccttcagtttctgggaaacggagagaattggcttcccgtgcaccactgattgtggcgactctccaggccatttgtagtttgggagacaccttgttcgagaagaacttggttcaattcttcccacttcttgcgagcttgataagttgtgagcatggttcaaatgaggtccaggtagctcttagcgatatgcttagctcctctgtgggccctgttttactgcgatcctgttgaccttggtaaaattggaccgtcgtttggatgtgtgatatatttgctttcgtttacctctcatcttactctaaaagttttcaccctctcttttagttttataataattgtcaccggtaatatagtttcagtgtatgaagagctctattcatagatatcatctggggaattttatgttgtatgatagttattattattttcccttgaaatattttcagaacattattttttttttctgt

SEQ ID NO: 6391 - DNA, 943 bp, Gossypium hirsutum
  Clone ID: GOSHI-09MAY01-C2832_3
tcccgggttcgacccacgccgttcttaggtctttaagcttatatgattactgtatttgtaaagtctaaatttcactctgtttttcttttgtggtttgactctgttgtttggttggtgagaaagtgaagggaaagtctgcggaactttgaattttgaatttacttgactgtaaaattaaaaatattgaacttacgatgcttaggtttacattgtattgagtgagtagaatactttgcttgtcatttccgttttcttcggtcaacaaacgggaatttgatcttaaagatccttaagcttgcatggtcatgtttttgcgaagtcaaaatttcatctgcttttctttttggtttgatctgttttttggttggtgggggaggtgtgtgtgaaagttgcttgaaaatgaattgaattgaaattgttggttgatgtaaaattaaaatacgaatgaagttaggtttatgtaggtgaggagtaaatactccttgtcgtcaagggtaatctgatcttaaagatccttaaactatgattagatagagggggcgtcgactgtgatgatttgaatggtaattttaatttgaagttatgattggtttaattcaattttctaatcatgaatgtattgatggagtcttatgttttgattccttttgacttatcttttgatgtttttgtaagtgatcaaatcgttgtgttgtgttcgaagatctgttttaatcgcttgtaatttctttttttaggttgttgattttgtttaaaccaatgtgtgttacagaattaaagggataagtaaacaagattggtagaatggctctagttgctggaggatcgtcaacattgaaccccaatgcccctctgtttgttccggctgtttatcgccaagtggaggatttctcacccgaatggtggaaactggttacgacaacaacttggtaccgtgactatt

SEQ ID NO: 6392 - DNA, 874 bp, Gossypium hirsutum
  Clone ID: GOSHI-09MAY01-C2832_2
cccacgcgtccgcaaaaattcaactgataatttcgaaagaggttttcgattacgctgatcgaagaattaaagggataagtaaacaagattggtagaatggctctagttgctggaggatcgtcaacattgaaccccaatgcccctctgtttgttccggctgtttatcgccaagtggaggatttctcacccgaatggtggaaactggttacgacaacaacttggtaccgtgactattggatcagccagaaccaggatgaagatggcttttacgacaacaccgaggatgatgtatttgatgtcaatgacattgttgatttgctcgcagatccctttgactttgtctctgacgaagatctccagttcgaagagttcatccaatctaatgaaatggaaaccatagcacctcctttaccgtcaaatggtggtacgtacgagtaaataaattcttacgactctggaaatggagaattatgtgtgtgtttgtcgattctacttctactacttgcatttatcgttttatcaaattacattaggctttgagaagggtgttgaagctctgatgaagaatctgagtttggtgccatctagtcctcggttttcagcagaaccggcaaaatacgtggagaagccggcgaagactgtgaatgctaaaagtggtcgtcgttgcatccatcaacctcgttgaatgtgtgtattagccgtccaggttttagctgaaattctctggtcgtttgtaactgttaacctttgtagattttcaagttctataactctgctaccattctaatgcctttgtttctagttgacgatatatcataaatgtaaaaaatgtacaaaagatggttaatttagaaaaaaaatagaaaaaggaaaa

SEQ ID NO: 6393 - DNA, 871 bp, Gossypium hirsutum
  Clone ID: GOSHI-09MAY01-C2832_1
cccacgcgtccgcccacgcgtacgcccacgcgtccgttcttcaactgataatttcgaaagaggttttcgattacgctgatcgaagaattaaagggataagtaaacaagactggtagaatggctctagttgcgggtggatcgtcaacattgaaccccaatgcccctctgtttgttccggctgtttatcgccaagtggaggatttctcacccgaatggtggaaactggttacgacaacaacatggtaccgtgactattggatcagccagaaccaggatgaagatggcttttacgacaacacagaggatgatgtatttgatgtcaatgacattgttgatttgcttgcagatccctttgactttgtctctgacgaagatctccagttcgaagagttcatccaatctaatgaaatggaaaccatagcacctcctttaccgtcaaatggtggctttgagaaggctttgagaagggtgttgaagctctgatgaagaatctgagtttggtgccatctagtcctcggttttcagcagaaccggcaaaatacgtggagaagccggcgaagactgtgaatgctaaaagtggtcgtcgttgcatccatcaacctcgttgaatgtgtgtattagccgtccaggttttagctgaaattctctggtcgtttgtaactgttaaccgttgtagattttcaagttctataactctgctaccattctaatgcctttgtttctagttgacgatatatcaaaaaggaaaaaaaatgtaaaaaagaatgtaaaattttagaaaaaaaaatagaaaaaaggaaaaaagagagaatcatctttcatcaaaaaaaaaaaaaaaaacaccccctaaaaaacccaaactaacaacccc

SEQ ID NO: 6394 - DNA, 536 bp, Gossypium hirsutum
  Clone ID: LIB3584-045-P1-K2-C1
cccacgcgtccgcccacgcgttcgcccacgcgtccgcccacgcgtccggggataagtaaacaagactggtagaatggctctagttgcgggtggatcgtcaacattgaaccccaatgcccctctgtttgttccggctgtttatcgccaagtggaggatttctcacccgaatggtggaaactggttacgacaacaacatggtaccgtgactattggatcagccagaaccaggatgaagatggcttttacgacaacacaaaggatgatatatttgatgtcaatgacattgttgatttgcttgcagatccctttgactttgtctctgacgaagatctccagttcgaagagttcatccaatctaatgaaatggaaaccatagcacctcctttaccgtcaaatggtggtacgtacgagtaaataaattcttacgactctggaaatggagaattatgtgtgtgtttgtcgattctacttctacttgcatttatcattttatcaaattacattaggctttgagaagggtgttgaatctctgatg

SEQ ID NO: 6395 - DNA, 255 bp, Gossypium hirsutum
  Clone ID: uC-gsronu33B029g06b1
cataaattcaactgataatttcgaaagaggttttcgattacgctgatcgaagaattaaagggataagtaaacaagattggtagaatggctttagttgctgtaggatctgtaacattgtactccatttcccctctgttttgtctacttttttttcttttctgcttttgctttttatttctttctattttatttgttattcttattactcttttttgttttttttttttctttctttctttttatctttttttattt

SEQ ID NO: 6396 - DNA, 768 bp, Gossypium hirsutum
  Clone ID: GOSHI-09MAY01-C102819_1
cggccgcgtgggtggggattgactacaaagcaatgcttaagcctgaactcgaaatctatgctgacaaaataagggagtgttctaagaaaagtttgaagacatgattgtccttcagcaacaatcaaaagaaatggcttctaagattgaagacaagaaaaatgtattgctgaacttcaatcccgtattgatgaggttgaagccccaataaatttgttcaagaaggaaatacaggactgtgatcatagatctactgcagaagccaagaaaatggttgaggacgtccagttcgagacgcataagttagatatcacggaaagagaagcaacagagattctaaaggcttcgcaactgaggttgcaagaagcaatccaacaaagtgaagaggaaattcagatacacgcacgtcaactctttatggtcgttgattcagtgtcaaaatataaagaacacgttgaatccaaaatttcagagatgagggttagtctctcggaaactgctgccgccgtatcagatgcttacaagggttcattgccagcacagttccctggtagtgcgaatgcaaattagcagcaatattaagctgaaaatatgtgaatctattattaaggttagtcgtttattttctttgctcaaacactttgtttacttaaattgccatgccatcttcatccttttatgtaaatgtttggtttgtgtctattgcttggtctgtgtcccgtgcttcatctggggtcagatttgatttgattcaaaaaaaaaaaaaaaaaa

SEQ ID NO: 6397 - DNA, 781 bp, Gossypium hirsutum
  Clone ID: GOSHI-09MAY01-C2592_1
gcgtaggataggataaggtagggatatccaagcttatgtagtagggagtataaaacccagttgtggattttgtgatcagaatataatatccctcagtccggcaagtgggtagttgttgcagaagagtaaaatagtaaagagtcacagctgaggcacggaagaagatgccttgcctaaacctttcaaccaacgtcaatctcgacggcgtcgacacctccgccatcctttccgaagccacctcttccgtcgctaaactcatcggcaaacctgaggcctatgtgatgattgtgttgaagggttcagtacccatgtcatttggtggtaccgagcagccagctgcctatggagaactggtatcaattgggggccttaatccagatgtgaacaagaaactgagtgctgcaattgctgcaattcttgaaaccaagctacaagtgcctaagtcacggttcttcctcaaattctacgacaccaagggttccaactttggatggaacggatccaccttctgagcctggcatgttctgaatttctcgaaacatcagtgatgtctattcaaaacaatcttactcgtatgatgaactggtgtgagaagaaattgttaaaacttggcatggtattttaagttgtttatctacgtgtttctgtagggattatgatatgtaaacgttcatgaacactaatccagccaggagcagtatgttatcttggctattggcagtcttcaaataaaaacgttgaaacttttactaaaaaaaaaaaaaaaaaattctgcggccgg

SEQ ID NO: 6398 - DNA, 586 bp, Gossypium hirsutum
  unsure (1)..(586): unsure at all n locations
  Clone ID: LIB3584-005-P1-K1-A9
tcgggtagttgttgcagnaangtaaagggggaggggggggcagctgagcacggaagagttgccttgcctaaacctttcaaccaacgtcaatctcgacggcgtcgacacctccgccatcctttccgaagccacctcttccgtcgctaaactcatcggcaaacctgaggcctatgtgaggggggtgggggagggttcagtacccatgtcatttggtggtaccgagcagccagctgcctatggagaactggtatcaattgggggccttaatccagatgtgaacaagaaactgagtgctgcaattgctgcaattcttgaaaccaagctacaagtgcctaagtcacggttcttcctcaaattctacgtctccttgggttccaactttggatggaacggatccaccttctgggcctggcgtgttctgtatttctcgggtcttccgtgttgtcttttctttaccttcttacttgtttgtttgtctggtgtgtggcgttattgttctccttggcctgggtttttttgttgtgttttttccgtgtttttttggcgttctttttcgttttcctttttgtttccctttttttttcat

SEQ ID NO: 6399 - DNA, 429 bp, Gossypium hirsutum
  Clone ID: LIB3585-034-P1-K1-B7
accacgcgtgcggtggtgttacgagcttattgtttaggaagggtaaagacctcaatagagggtcttgtgatcagaatataatatctgttattatagcaacaggcaaatgctgtaacatagtaaccatgttatgagtcacaactgaggcacagtaaaagatgccttgccttaacctttcaaccaacatcaatctcgactgcgattacacctacgtcatcctttacgaagcctctcttacgtagctaaactcatcggcaaacctgaggcctatgtgatgattgtgtttaagggttcagaacccatgtcatgtggtgagaccgagcacccaactgcctatggagaactggtgtcaattgcgggccttaatccagatgtcaacaagatactgagtgctgcaattgctgcaattcttgtaaccaagctacaagt

SEQ ID NO: 6400 - DNA, 287 bp, Gossypium hirsutum
  Clone ID: LIB3584-034-P1-K1-A1
cggacgcgtgggagtggtagttgttgcagaagagtaaaatagtaaagagtcacagctgaggcacggaagaggatgccttgcctaaacctttcaaccaacgtcaatctcgacggcgtcgacacctccgccatcctttccgaagccacctcttccgtcgctaaactcatcggcaaacctgaggccggttcagtacccatgtcatttggtggtaccgagcagccagctgcctatggagaactggtatcaattgggggccttaatccagatgtgaacaagaaactgagtgc

SEQ ID NO: 6401 - DNA, 581 bp, Gossypium hirsutum
  Clone ID: GOSHI-09MAY01-C2552_4
aaaaaaaaaacgagttaaaagaccgagggatctctttgtcttctcagattttctctttccatctctcaattctcaaaaccctaatttctctgcttttccttttgcttaatcaatcgatcctcgtcaatggccaacagtaatctccctcgaagaatcatcaaggttcctctttcgatatccgtttggtccttttcgatttctcctagttgtttgttttccgagaaacctcaagaaaatcttggttctttttactttttatttttcatcttctgttgtacttttgggttttagagtttagttttatagctgaattgtttaaattttgatgaaccaaaagcctctgctattttcttttggatcgtcttttttgattggcgaaagcttttttctgcctccattttttgtgtgtttttagaaattttcttggttacttctgtttatttttctttgatctaaacaggaaactcaacgtctcctcagtgaacctgcacctggaattagtgcttcaccatcagaggataacatgcggtatttcaatgtgatgatccttggtccaacacagtcaccatatgaaggtgggg

SEQ ID NO: 6402 - DNA, 613 bp, Gossypium hirsutum
  Clone ID: GOSHI-09MAY01-C2552_3
gatccccaaaaccctcaaatactttttttttttccatccaatcgatctcgccaatggccaacactaatctccctcgaagaatcattaaggaaactcagcgtctcccccgcgtcccagcgcctggaattagtgcctcaccatcagaggataatatgcgatatttcaatgtgatgatccttggtccaacacaatctccatatgaaggaggggttttcaagttggaactatttttgcccgaagaatatcccatggcggctcccaaggtccggtttcttacaaagatatatcatcctaacatcgataagcttggaagaatatgcctcgatattctcaaagacaaatggagtccggctctccagattcgaactgtacttttgagcattcaagcactcctgagtgctcctaatcctgatgatccactctcggagaacattgctaagcactggaaaacaaacgaggccgaagccgtcgagacagctaaggaatggacccgtttgtatgcgaccggtgcataatacgagtggtggaaatgttagcttctttgaaataacatttttatgcaacataatgcggaaattcagaagaattaatgtttgaaggagtctgatagtag

SEQ ID NO: 6403 - DNA, 932 bp, Gossypium hirsutum
  Clone ID: GOSHI-09MAY01-C2552_2
acaaaaaaaatagagagcgagttaaagagaccgagggatctctttgtcttctcagattttctctttccatctctcaattctcaaaaccctaatttctctgcttttccttttgcttaatcaatcgatcctcgtcaatggccaacagtaatctccctcgaagaatcatcaaggaaactcaacgtctcctcagtgaacctgcacctggaattagtgcttcaccatcagaggataacatgcggtatttcaatgtgatgatccttggtccaacacagtcaccatatgaaggtggggttttcaagttggaactatttttgcctgaagaatatcccatggctgctcccaaggttcgatttcttacaaagatatatcatcctaacattgacaagcttggaagaatatgccttgatattctcaaagacaaatggagtccagctctgcagatccgaactgtacttttaagcatccaggcactcttgagtgctccaaatccagatgatccactctcggagaatattgctaagcactggaaatcaaacaaggctgaagctgttgagacagcaaaggaatggacgcgtttatatgcaagcggtgcatgaagaccggtggaaccgtttgctctcataaaataacatttttatgcaatgtaagctattcaatgtcaattccatattgaaatctggacgaatgacagtttgaaagagtttgatatttgcaaccaaaaaaaaagcttccaggtgctacccttttagtagtaattcggtcggaagcaatctctaagcttgtatgataatacacatggttctctaaaactcccaaaggctttaactatgggattattctctaatatggtgatttcagattctggctatatgtgtgtgtaatgaatctatcaactggaaatgaaagaagggattgattaaattttgaggctt

SEQ ID NO: 6404 - DNA, 916 bp, Gossypium hirsutum
  Clone ID: GOSHI-09MAY01-C2552_1
ccgctctgtttttctgattctcggattctctcttcatctcccaattctcaaaaccctaattatatttttttatttccctttttgattcagcaatcggggcttgccaatggccaacagtaatctccctcgaagaatcatcaaggaaactcaacgtctcctcagtgaacctgctccgggaattagtgcttcaccatcagaggataatatgcgatatttcaatgtgatgatccttggtcccacacagtctccatatgaaggaggggttttcaagttggaactatttttgcctgaagaatatcccatggctgctcccaaggttcgatttcttacaaagatatatcatcctaacattgataagcttgggagaatatgccttgatattctcaaggacaaatggagtccagctctgcagatccgaactgtacttttaagcatccaggcactcttgagtgctccaaatccagatgatccactctcggagaatattgctaagcactggaaatcaaacgaggctgaagctgttgagacagcaaaggaatggacgcgtttatatgcaagcggtgcatgaagaccggtggaaccgtttgctctcataaaataacatttttatgcaatgtaagctattcaatgtcaattccatattgaaatctggacgaatgacagtttgaaagagtttgatatttgcaaccaaaaaaaaagcttccaggttctaaccctttcagtagtaattcggtccggaaccaacccctctgcttgttttgaaatataacattggtctcttcaaactccccccaagggttttaaatttgggaaattatccctcaaattagtgagattctcaaatccgggcgcgaaaaaaaaaaaaaaaaaaaaatttcctggggcgcgcaccccgcgggtgaaaccccacttccca

SEQ ID NO: 6405 - DNA, 380 bp, Gossypium hirsutum
  Clone ID: LIB3165-036-P1-K1-B12
gatccttgcaatggccaataccaatctccctcgaaggagaattaaggaaactgagcgtctcctcagtgaaccagcacctggaattagtgcttcaccatcagaggataacatgcgatatttcaatgtgatgatccttggtcccacacagtctccatatgaaggaggcgttttcaagttggaactatttttgcctgaagaatatcccatgactgctcccaaggtactcaattctcctgcatcgcttcttaatatttagcatgaccttgttttcgtatccacttttgtatactggattgtctttcctttgatatccgatattactcgtcttcatgacctcgtctagaaaagtttttatagggttttgatatgatttagggatg

SEQ ID NO: 6406 - DNA, 327 bp, Gossypium hirsutum
  Clone ID: LIB3149-004-P1-K1-F12
ccggattctctcttcatctggcactggtcaaaaccctaattatatattgttatttcctattttgtttcatataattttgcttttcaatggccaacagtaatctccctttatttttattattgttctttatttttactcattgtaccttttatttgaattagtgctttaacttttttttttatattcgatattataatgtgatgattctttgttctacacagtcttcatatttttgaggggttttcaagttggaactttttttgcctgaagaatattccatggccgctcccaaggttcgatttcttacaaagatatatcatcctaaca

SEQ ID NO: 6407 - DNA, 555 bp, Gossypium hirsutum
  Clone ID: GOSHI-09MAY01-C2542_1
ggaaaagcagttgattgcagctatatccgtggtcccaagtacttagaagttgatattgacataggttcttctacggttgctaatggagttttggggcttgtcattggtgtaatcacaacattggtggttgacatggctttccttgtacaggcaaatacaacagatgagctgccagagcggctaattggtgcagttcgtgtttctcatatagagctatcgcctgccatagttccgaagctggatgctgatccatcatgattgtattgaccacacacagttcatctatacggattatttgttctaatatttcattcacatttcctcttttatcattcaacattacaaaaaggaagccgccacttttgtttttccacataagattttcaggaaatgtaatgaaaattttaacttctatagcggaaagtgggaggcgaaaaggggtcaaataaaaagaaaaaaaaaggagggtgagaaataaaaggaaacaaagagaaaaatagggggcgggggaaggggggggctttagtgggggggggcgtgaaaatggaaaggaaa

SEQ ID NO: 6408 - DNA, 1203 bp, Gossypium hirsutum
  Clone ID: GOSHI-09MAY01-C2512_1
gaaattccactaacacgctttggttttgaatatctgcttctggaccgaaagctcttcgcttttatcttttgatctttttcttttctttgtttggcgagagagaaagtggaatgctaagactgagaaaatcggaagaaaatcaacgatggtggtgagaaaagtagggaagtatgagattggaagaactataggagaaggaaccttcgctaaggttaagttcgcccaaaataccgagaccggcgaaagcgttgccatgaaagtcctcgatcgtagcaccattattaaacacaagatggttgatcagatcaaaagggagatatctataatgaagcttgttagacatccttacgttgttcgtttgcacgaggtcatagcaagccgaactaagatttatataatcttggagttcattaccggtggtgaattatttgataaaatagttcacaaaggtcgtcttagtgaatcggaagctagaagattcttccaacagctaattgatggtgtggcaatattgccatagtaagggagtctaccacagagatttgaagcctgaaaatcttttacttgactccctgggaaatttaaagatttcagattttggccttagcgcgttgcccgaacaaggagttagcctcctccggacaacttgtcccacgcctccccccgcgcctccggaggtgcttagtcacaaggggtatgatggtgctgtggcggacgtctggtcttgtggggtcatcctttatgttctgatggcaggttatcttccatttgacgagcttgatctcacccccccatccagtcagattgagagagcagacttttcttgcccttcttggtttcctgtgggggcaaaatccttgattcatagaattctagacccaaatcctcaaactcgtattacaattgagcaaatcaggagcgatgagtggtttaacaagggctatgttcctgtcagacttcttgagtatgaagatattaacttggatgaagtaaatgctgtttttgatgatccagaggttgataaggaagaaaggggtaatgagccttcacgaaatgaggatatgggtcctttgagtcttaatgcatttgacttgatcattctttctcaaggcttgaaccttgcaacgctttttgaccgtgggaaggacaatatgaagtaccagacacgatttgtttcacaaaagccagcaagggtggttcttt

SEQ ID NO: 6409 - DNA, 298 bp, Gossypium hirsutum
  Clone ID: LIB3083-105-Q1-L1-D3
ttcgagttggagtctaccacagagattggaaggctgaaaatcttttacttgattcccaaggaaatttaaagatttcagattttggccttagcgcgttgccataacaaggagttagcctacttcggaccacgtgtggaactcccaactatgtagcaccagaggttcttagtcacaaggggtatgatggtgctgtggcagacgtctggtcttgtggggtcatcctttatgttctgatggcaggttatcttccatttgatgagcttgatctcaccacactatacagtaagattgagagagc

SEQ ID NO: 6410 - DNA, 384 bp, Gossypium hirsutum
  Clone ID: GOSHI-09MAY01-C102519_1
ggggtcgggtttcaacacccatcatcgccatcgtcgtcgtggctctttgaggccaccgtggttccccccgtatacggtagtcgagggccacgtaaacttgggttatttaaccccttttgttcaaaacgagcccgacggtgagggtcttctagaccgaggaagatccgaaagaaggaactccctccccgcgacctcttcaagccgaattcgacgacggaggagcagtctccgacgacgaggctacttgggttcggtaaaccccttcttttctttgatataggcccccttttcatcaaaaagtttgtaaaaagaaaagaaaaaaagaaaccaaacaaaaaaaaaacgaaaagaaaagtagagaaataaattgaagtccaccttttc

SEQ ID NO: 6411 - DNA, 461 bp, Gossypium hirsutum
  Clone ID: GOSHI-09MAY01-C2522_4
gtcgagctttcccgtcggcttccttgcttccgttaatgtcaaagctctctttctctatgcgctgtggcttatgtatcgcttcgatttcgcgtccttactgtgcactcgatggcaaatcgatggttgaggcctgacgtgtattcgttgctcgggggcgtcagtgtcgctagacaaatctgatggtttcacatgaagcgcaatatctgcattaaccctgaatgcagggggaccaaggacaacagcgactgctggggtgtcggacaactctgctgagggatgaaaaatgttctgaacatgccttgagataatatgtctcgcgtcatgacgccagaaatcatgcccagtatcgacacctttttcactgacccaaggtgaggcttgactcttgctttatgctgaggctaggagctaacaagaaccgtggacctaagacttcttcgatcgctaccaaaacatgccca

SEQ ID NO: 6412 - DNA, 501 bp, Gossypium hirsutum
  Clone ID: GOSHI-09MAY01-C2522_3
atcgcaaccacctgctggtccaccaaagctgacatcaatggtcaaatattctgaacatttcttgagaaaatatgtccgcaacaagacgccagaaatcatgcccagtatcaacagcttcttcactgacccaaagtgaggcttcactcttgccttatgctgaaactaaaacagaaaaaaaatagaagaactaagtcttattcaatcaataccaagttatgccctttctttctgctgactgtgatgcaaatttgtgttggttttgcacttggatgaggtgtgttctttaagagaataaaaggtggtgtggatttttcgaagttgtgttgttttagcttaaatgaatgacttttatttgcaataacatgattttggtaagtgggcagatgataaccgagatgaaacaaagctatcacaaaaaaaaaagaactaacatagaaaaacccttagacgaaataataacaacacacaaaacgtaaatgaaaaacctgatacttaatgctt

SEQ ID NO: 6413 - DNA, 889 bp, Gossypium hirsutum
  Clone ID: GOSHI-09MAY01-C2522_1
tgatgtattccggcccaagaccaagccttccaaataaaagggggcccacgcgtccgccgttggctcccgtttttcccttatttcaaagctctctctctctattctctttggcttatctatcgctttgatttcgcatccttgctgtgcactcgatggcaaatcgatggttgaggcctgaggtgtatccgctgtttgcggccgtaggtgttgctgtcggaatctgcgggtttcagttggtgcgcaatatctgcatcaaccctgaagtcagggtaaccaaggagaacagggctgctggggttttggacaactttgctgagggagaaaaatattctgaacatttcttgagaaaatatgtccgcaacaagacgccagaaatcatgcccagtatcaacagcttcttcactgacccaaagtgaggcttcactcttgctttatgctgaaactaaaaaataaaaaaaatagaagaactaagtcttattcaatcaataccaagttttgccctttctttctgctgactgtgatgcaaatttgtgttggttttgcacttggatgaggtgtgttttttaagagaataaaaggtgttgtggatttttcgaagaagtgttgttttagcttaaatgaatgacccttatttgcaataatatgattttggtaagtgggcaattatgggttctggatttgcctcattaggtagagtatggatgtggtaatttttaacgatttattgacattttctgggaattttatgatttagctaagatattactgttctttggctccaaggtgatgtgggttgtattagactcgttttctcgtcggttctgcaaatagaaatacaatctaaatacaataacctgttttttatgaaaaaaaaaaaaaaaaaaaaaac

SEQ ID NO: 6414 - DNA, 580 bp, Gossypium hirsutum
  Clone ID: uC-gsronu33B007e03b1
atttcaaagctctctctctctattctctttggcttatctatcgctttgatttcgcatgcttgctgtgcactcgatggcaaatcgatggttgaggcctgaggtgtatccgctgtttgcggccgtaggtgttgctgtcggaatctgcgggtttcagttggtgcgcaatatctgcatcaaccctgaagtcagggtaaccaaggagaacagggctgctggggttttggacaactttgctgagggagaaaaatattctgaacatttcttgagaaaatatgtccgcaacaagacgccagaaatcatgcccagtatcaacagcttcttcactgacccaaagtgaggcttcactcttgctttatgctgaaactaaaaaataaaaaaaatagaagaactaagtcttattcaatcaataccaagttatgccctttctttctgctgactgtgatgcaaatttgtgttggttttgcacttggatgaggtgtgttctttaagagaataaaggtggtgtggattttttgaacttatcatcctttttattctatctcttttattaaatcttcttttttttttctttcattatttt

SEQ ID NO: 6415 - DNA, 327 bp, Gossypium hirsutum
  Clone ID: LIB3135-060-Q1-K1-G3
cccacgcatacaaatcgcttatttcacgttcttactgtgcactcaatggcaaatcgatgaaaaaggccttatgtttatccgctgttcacaaccttaagttttactgtcaaaatctatctctttcacttgacgcgaaatatcttcatcaaccctgaactcagggtaaccaaacataacaggacttctgggactttggacaactttacttagggagaaaaatattctgaacatttcttgagaaaatatgtccgcaacaagactccataaattatgcccattatcaacatcttcttcacttacccaaaatgaagctttactctttcttta

SEQ ID NO: 6416 - DNA, 1654 bp, Gossypium hirsutum
  Clone ID: GOSHI-09MAY01-C2482_1
ccctttttctgtctaacacgggggagggctcttcttttctatcatctccctttccttccctttctcttcctcttccttcacttcatcgcttccctttcctctccaacacaaaacctgaacgacaccctttccttctcttttcctcttacttctctccgtatctctcctgatgttaaagttcagaccctgtcttcttctttagttgcaggggccaacaagcatggtacaaggcgtttggcaaggccaaactcgggttcttataattataaaaccacgttcaagtattcaatggcgttgatcgtggctttgccgattggtactccgccgcagactcagcagatggtgttggacactgggagtcaactgtcgtggattcagtgtcataagaagcttgctaaaaagccgcctcctacggcgtcgtttgatccttctctttcttcttctttcagtgttttgccatgtaaccatcctctttgcaagccacggattcccgattttaccctccctacttcctgcgaccagaaccgtttgtgtcactattcgtacttttacgccgacggaacacttgccgagggtaacttggtgagagaaaagatcactttttcgcgttcccaaagtacccctcctttgatccttggttgcgccacggattccagtgaagacaagggtattttggggatgaaccttgggcggttctctttcgcttaccagtcaaaaatctccaagttttcctactgcgtgccgactcgccggacgaaacctggggtttcgccgaccgggtcgttttatctgggtcaaaacccgaattcccacgggtttcagtatattaaccttttggctttccctcaaagccggaccatgcctaatatggatcctttggcttatactctccccatgctagggataaggataggagccaaaaaactggcaatccccatgcacgttttccgacccgacgcaggcggatcgggtcaaaccatgattgattcgggttccgagttcacttacttggtggatgaggcctataacaaggtgagggaagaagtggtacgactggtaggtccaaggcttaaaaaaggttacgtgtatggtggagtagccgacatgtgtatcgatggcaacccagtccagttcggacggttggtcggcgatatggtattagagttcgaaaaaggggtggaaatcacagtccccaaggacagaatgttagccgacgtcggaggtggggtccactgcttagggatcggacgctcaaacatgcttggaatcgcaagcaatataatcggcaacttccatcaacaaaatctatgggtggaatttgatctggccaataggagattgggattcggtaaagccgattgtagcagagcagcagtataaagaggccattacgttttgcggtgatggatcccgaaatacatgagatgatcgtgaaagaaatatctttatccgacggtctacaatgatggaaagggtcttgtgaagaacactgggttttggttttaagcatatttccaacattggttaactttatacctttacattctgtactactttagtgctatcatgtgtctatctatatggaatgatggggctttatgaaatattatgtattacttatcatatttgtttaggtgatgttatatctatattt

SEQ ID NO: 6417 - DNA, 1185 bp, Gossypium hirsutum
  Clone ID: GOSHI-09MAY01-C2452_1
gaggctgttccgagaccttttcattcgagaaggttaacttgttattctacctgtcaccgttcgaatggactcgccattatcatgtcttcacatgaattttctagagatcttttatcatgaaatctgcttgattgtgctctcaaagttattgattttgacaactaactcacgcaggttatcagtttgactatgtatttgattggactatacggagatacccacaggttggctctagctcaagagctcgggtcagtgatcttttaacttgctggccttgattttcttggaaatattaattttgattctccattaaggatttttatagtatgtttatttgccattcctcaacagcctagcccgaagccaggtttaaatcccccggcgcgcgcggccgaaagaacagaaaggccttcagttggccaagagattggagaaagggggtctggcgctattgagccgcttacaagacgcattggttccgggcagggtttgcatggtgatcaatctagatacacatctgatgacgtgccgtcatccaaggatgtgcaacctgattctgaaaaggttcgctcctcctcaagaaacgatagttcttcaaagaggcctgtcgcagcaggaagccgactggactcctctggtgagcctaacgaaaaccggtctggcagattagtctcaagcagtagtcgcctgtcaacaactcagagaatcctccctgggtttcaatccagatcagcatcttatactcgaacctcagccacaagaggtggtcaagatgattcccttcggagcttcgagttcttgacaattgggagtgggaaaaggaaataaattgaacatgcatcttgtaggaaggatttgctcgtgtcggaagcacacttattatctgacggagatctcggcactataacggtatttacgagcagttactagtatgtgtatcggtggtcatgatttggttccaaccatgacagtctccctggaaagccttttcagtccttccccatgtaccccgtcagtatacttgtcattatgatgcctccagtcagtaaagtaatagaaatgagcgtcgtcctaagtaattgtccatatattttcaacattctatctgtaataaacacttgatgtttctttctttaattagaagattaaaagaaatatatattatagcaaagacgttctgccttc

SEQ ID NO: 6418 - DNA, 435 bp, Gossypium hirsutum
  Clone ID: uC-gsronu33B040f04b1
tctccggagtaagggtgtctggcactattgagccgcttacaagacgcattggttccgggcagggtttgcatggtgatcaatctagatacagatctgatgacgtgccgtcatccaaggatgtgcatcctgattctgaaaaggttcgctcctcctcaagatacgatagttctttaatgagtcctgtttaaacattaagccttctgtactactttgttttacttaattattattggtctttcttattatttttatgctttaatttattcttttaatatcatattttatttttctctatttattaattattatttttttattttttatttcttttttatattattttttttttatttatttttactatttattcttcttttttcttcctttcttttatatttttatcttttttatattacttttatatcataacttttt

SEQ ID NO: 6419 - DNA, 578 bp, Gossypium hirsutum
  Clone ID: GOSHI-09MAY01-C2472_3
aaaaagcaaggcgcattttccagccttatcgccgctaaatcgatcccaaaaagcttacattgtttggcaatgaggttgatggaggaacgaatctcgcatccggacaaatatacagatgaagggaaaccaatgcctccggaattcgaggatccgaagctttacccttccgccctcgcttccgataacgtccttgctgcatccgtggtgtgtgacttccgccacgaagaacgcctaagggccctggaaacaccttttccatgtggtgacggaccagatgaatcttggggcaatgcacgttatgttcacattgacagattacaatggcgctcacattgaagtgaaggcgggtgaggattataagtttttgaatccttcctatgtcccagtggtgagacagttagaatccgcttatctgcagaagttttacttcgagaacacgctcgaaaatgccacgaaagatactactaacatgaagtttatgaacccaaagcatctgtcaattgtgaatcacttgacgttttatttaccagagatgtatcccacactgcataggatactgttcttggacgactatattg

SEQ ID NO: 6420 - DNA, 1369 bp, Gossypium hirsutum
  Clone ID: GOSHI-09MAY01-C2472_1
tctcccacgcgtccgcccacgcgtccgaaaacatgtttccatggctctttcgcgttcttcgtggctgaattcaccaccacggatgcagcaagaacgttatcagaaaagatagcgtaatggtaaagcttcggatcctcgaattccggaggcattggcccacgcgtccggagccctggaaacacgttttccatgtggtgacggacaagatgaatcttggggcaatgcaggttatgttcaaattgaaagattataatggagctcatattgaagtgaaggcggtagaggattataagtttttgaattcatcctatgttccagtgttgagacagttagaatcggctaatctgcagaagttttattttgagaacacgctggagaatgccacgaaagatacgactaacatgaagtttaggaaccccaagtatttatcaatcttgaatcatttgaggttttatttaccggagatgtaccccaagttgcataggatattgtttttggatgatgatattgtggtgcagaaggatttgactgggttgtggaagattgatatggatgggaaagtgaatggggcagtagagacttgttttgggtctttccatcggtatgcacagtatatgaatttctcgcatccattgattaagcaaaagtttaaccccaaagcctgtgcttgggcttatggcatgaatttctttgatttggatgcttggaggagggaaaagtgtactgaggagtatcattactggcagaatctgaatgagaataggactctatggaaattgggaacattgccccctggtttgatcacattttactccacgacgaaaccgttagacaagtcatggcacgttcttggactcggctataatccaagcattagcatggatgagatccgcaatgccgcggtggtgcacttcaatgggaatatgaagccgtggctagatattgccatgaatcagttcaagcctctttggagtaagtatgttgactttgatttggagttcgtccaagcctgcaatttcggtgtttccctcgcgtccgaaaggatcaccagctacaaaagagcttgtttaacaagaagttcaacctcaccttaagcagactattgttattctgcgtggaaggaaattagcctctactgtactccagtgtagcgtagcatagcatagttatattaattttagaatgcttgcttttagtttgttcatacaggtgttgcaattaaaattattaagctgatattcaactgttaaattattctgtaatcataatgttccaagttgttagtcgtctaaagtacagtatatattgtttcaaaaaaaagacaatcatattacctaaaaaaaaatttcaaaaaaaaatggttggtcgg

SEQ ID NO: 6421 - DNA, 416 bp, Gossypium hirsutum
  Clone ID: LIB3145-056-Q1-K1-D12
cgtgtttttaatatgtttcacgtaaacgtaagatccaagctagaattcaatgtccaagttgacacttaggctaatagaaggatttgattaaaactgacttgttgagaactcaattggaatgttttgcaagattgggattcgttagaatataggtcgaagtttggtgaagtttggtggagtttggtgcaagtaacactaattgataatgcaactgtggaattggaaatgctagaactagatgttctttgggtgttttctcggattatgttctttatggctgcctgtcatcattattcagcatttctagttcagttatcgataatcgatgaactaacttgattttgcagaatgaaaaccggaccttgtggaaattaggaacttttgcctcccgtttaatcacattttattccacgacg

SEQ ID NO: 6422 - DNA, 826 bp, Gossypium hirsutum
  Clone ID: GOSHI-09MAY01-C2412_1
cggacgcgtgggttggagttcatcgaccaaacagcattcgtgcacttcttacaactccagcacacactgttcattactattggcgaaagtttgataatgccttcatgcgccctatgtttggtggccggggttttgtgcccttcgttcctggctccccaacagaaaggagtgaacctaatctgcctcaatggcaatgaggtggttgaacaagatctctacaaaaatgtacatgtaatataacaatgcagtcggttgcaaaaaacatgcttctggcgagaagccagtgcggtatgctttgtatgtttcatgtataggcgatattttgttggttttcaagtttcctcaagaggttcttgtttattctccccgaaactaccttcgcacctgatgctatctttccatttgacatttacgaatatttatgatctgggtgaagcttaggggtaggtgtgccattctattttgtacgtatacgagtatttattttgtgtttatatcagtgtgtttagtttttattttggttgttatagaaaaaaaaaaaaaaaaaaaaaaaaaaaaaaaaaaaaaaaaaaaaaaaaaaaaaaaaaaaaaaaaaaaaaaaaaaaaaaaaaaaaaaaaaaaaaacgcagggtgcctaaaaaaaaaaaaaactattttatagcggcccaaaaaaagaaaataacgtgtcctttaatttgaccccactttatacagagaaaaaccccgggcataccccaatttatccgccggttaaaaacacttcccatttccatcatgtgtttaaaagaagaaaagcccccataagggcgctttctaaaagacgtgc

SEQ ID NO: 6423 - DNA, 814 bp, Gossypium hirsutum
  Clone ID: GOSHI-09MAY01-C102439_1
ctaagatgtggtgcttgtacaaaggtacttaagttttcatttgtaaaaggaatccatatagtgccatatgaacttgttgctgcagcacctccaccatgtgaagtcagtgaccgcagtgaggcaattaatgcagcgatttcaacattagcatcttgtagccatggtgttttgcaagcagatcctatgtctaactctgatgattgtagtcacactttcagtaaaagctgcttcactgatggagatcctgtttctcctggcaatactgacaccaaaactatgttttctagttcttacgagcatatggaacagaggaaggattttgttttgaagcagtctcaaaacaaacataaaacttcaacagaaacttttgattcagctgaaccttcttcaactatgtccaggtcagaggaagtgtcccttgaagagttgccaccaactgggtggtacatcgcttcatcacctcatgggatattcttcaccaagcccactgatatatggattggtgtcatccatatcgggcacaagctcagtccactccggtgaaacatcagactaaatatcttagcctgtaatgtttgtttcccaagggtatgagattcatcatgtcgggatgaaaaggaagaatcatcaatcctgagattccagaggggatgattttcttggcattgttatctatatagcagcataggaagaaacagaaaagcatttatcctatcctttattaagaattattatagaacagagtaattctcaggttttgtattatgagttcatgaaagttaatagaggagacattgacttgatttatttagtc

SEQ ID NO: 6424 - DNA, 1404 bp, Gossypium hirsutum
  Clone ID: GOSHI-09MAY01-C2432_1
ggaattctgttagtttacaagcttctgtttccaaaggttccttgtcttcagcaaatctcagtgccattgcttcgaaatgtctttcttacaaagaagtagctgtagcacctccaggtacagttctgaagccattacatgagggggaaactgaacatcaggcgtgcaccatccgaactgagactacaaaatcggaggatggagaccatatgtctgttattgataacgttgtagataatgatgatgatgaaactgaaggaactcatgatagcgaaaatcaatcagaagaatctgctcctgaacttgataacgtttcttccgagcctgcaaccaaggaggatggaagcaatatctctgttgctaataacattgcagatgacagtgaaaatggatcagaagaagctgctcctgaactcgataaggtttcttctgagcctgcaaacatggaggacagaaacagtatctctgttgttcataatgttgcacatgatgacaatcgtgaagaaacggttcctgaacatgataaggtttcgtatgtaaatactgaaaagtctgtagaaacaaagggtagtaagctatcagcattagcggaaccgttcaatcccggagcactctacattgctgttacaagtgtttatgatgtaacagactgtcaagctatgcttgctgagcctgttattgaacctgcagttgcagctcgagttcgttgcggaccgatgttcccattatatcacggaaacaaccattcttacaacatgaaacaaggctttccgagataccaaactctcgaacaaactgagttccgacctccgcgagttatgaaccctcatgcactcgagtttgtacctacaactgagccagcaacagaagcaaaagctctccatgggaaatgaaggacatgacgtggcatctcaatccagcacctgtgaacaaccaaaaacatcagatgtaaatataaagaaaacccgggacggcgaaggatttacggttgtgacgaagcgaagaaggaagaggcagcagtttatgaatggagtaagtaatggaccatacaatcatcatcatcaatcaatatgtgcttaggttatataatgcccatatttcagtaagcaggatacgagggaaaagcaatttgcacatatgttttagtgaaaagctgggttttaatttctacgtttaatttgcagatgaggttgttatgtagctaaataatatatgtaaattgcttctctttgtttacagattttgttttattaataaaaagtgacatttgataaaaaaaatatatttttttaaaaataaaaaaatataaaaaaaaaaaaaataaaaaaaaaaaaatataaaattaaaatttaaaaaaaaaaatatataatataattgggaaaaaaaaaaaaaaaaggggggcccttt

SEQ ID NO: 6425 - DNA, 528 bp, Gossypium hirsutum
  Clone ID: GOSHI-09MAY01-C2782_3
gtgtgcttttcgacacgcaattgcttccgctccgaaggctgaggaaaccctttgatgaacctccgaacaagatttactccctttgttatgcagtctgttattcctatctccccaaatggcccgtactgcaacacagaaggtccgacgctgggatgccgagctttgtgtaaaatcccagaataaccactgtagaaaccccatctggttttcctgcacatatttatgaacactgatattgtaacaggacattctcgaaaaagatgttccatagattcagatccagagccacaacgaggacacattgatgtattcgttagtcgtctaagtagcatattaacgtgagtagctaggaaattccaagagatcttccaaactgtaatttttatttttgaaggtagatcaagtagccataatttcctgtagaagtccttatagtcaacttgtaaagcataagttctaggatcatttgcagtactttgtaatagtttataggcgctacgttctatgaactcacccgacgcttcagca

SEQ ID NO: 6426 - DNA, 599 bp, Gossypium hirsutum
  Clone ID: GOSHI-09MAY01-C2782_1
gttctctcacccttttgttttctgcttgaaattctgcaactccagggactcgtccgaccagacacgcgattgcttccgctccaaaggctgaggaaaccctttgatgaacctccgaacaagataagagaactgaaccctctttatctctggccacaactccgatagccgctttattttgtcctctttcatatgcggcatcgaaattgattgtgacaaaactgtccattggttttttccattttttaacagttatggaagtttgtcgactatttttaccaactgaatctaactctaaaatgtagctattaacaaatctccctatttctcttccagatttactccctttgttatgcagtctgttattcctatctccccaaatggcccgtactgcaacacagaagatccgacgctgggatgccgagctttgtgtaaaaacccaagttaaccactgtagaaaccccatctggttttcctgcacatatttatgaaatgataactctctccacactgatattgtaacagggcattctcgaaaaagatgttccatagattcagatccagagccacaacgaggacacattgatgtattcgttagtcgg

SEQ ID NO: 6427 - DNA, 641 bp, Gossypium hirsutum
  Clone ID: LIB3582-058-P1-K1-B12
cctttcctccatctctcccttttcctgcttcaatctgggtctctcaccctttcgttttctgcttgaaattctgcaaccccagggactcgtccgaccaggtaatctcctccgttactcttaattgcttcagttgctaaaatatgcgccaggctatttgttgatcttgggatatgctcgaacgtacagtccttaaaatataacaaaagctgatggatgtcatgaataagcgcactaaccagtgatttatctgggcttttttgttttgtatttctttattattgataaagagtctccttcaataataactctttcccactgcatgtgaactccgatctggagagcttttcgacacgcaattgcttccgctccgaaggctgaggaaaccctttgatgaacctccgaacaagataagagaactgaaccctctttatctctggccacaactccgatatccgctttattttgtcctctttcatatgctgcatcaaaattgattttgacaaaactgtccattggttttttccattttttaacagttatggaagtttgtcgactatttttaccaactgaatctaactctaaaatgtagctattaacaaatctccctatttctattccagatttactccctttgttatgca

SEQ ID NO: 6428 - DNA, 461 bp, Gossypium hirsutum
  unsure (1)..(461): unsure at all n locations
  Clone ID: LIB3584-007-P1-K1-H8
cttctcagactcccttccttccagttgttccttgtcctccttttcctgcttcaatctggttctctcaccctttcattctccgcttgagtttctgcaacttcagggactcgtctgaccagtgctttccaacacgcgattgcttccgccccaaaggctgaggaaaccctttgatgaacggggcggacatgataggagaactgaaccctctttgtctctggccacaactccaatagccgctttattttgtccgccttcatatgctgcgtcaaaattgattttaactaccctgtccaatggctttttccattttttaacagatttactccattttttatgcaatctattattcctgtctccccagatggcccatactgcancacanaagatccaacgctgggataccgagctttgtgttntaacctagaacttttcccgaagaaatggtctattttttctgttcc

SEQ ID NO: 6429 - DNA, 764 bp, Gossypium hirsutum
  Clone ID: GOSHI-09MAY01-C2752_3
atgaaatctactccctctagattgtccagacagcacagcaaaagagacgatattgtttactgttacccatggtcaagacccaagacattttctgaaacatggttgctatcttcttccacatttcgacaccgaggataggagctatccgtagccactcttcttattttgagattttttagagtaggaataaagttccatgaaatacgccaaatagtgatggcaatttttgatgggaaatgtaaattccatagctttttgtagaaattttttctttcagtttgtattaaataatcactagggtccattttgcctcttgtaatagtttgtaggcacttttggatgaaaattcaccagaatgttctcctcaccagacttgaaaatcatcatgttcttcttttgctagaggaatttgctgtttcttctgtgcaatgtccgcttgaaagaaatttggtctcctctactgactcgctaacatatgccttcttttcagtaacccttttgctgcccaaacgctcttctaggaaagtgaagatcaagagaaacaagattcaagtcgtgatcgagggaaaaacaaagtttacgaggaataggctcgattgcaaaattttgtatcgaggtaagttcatgtgtaaataaagtaacaatttatattttaagtgatttaatgttatttatatgatatgatatttattaccatgaaatattatgctttgtgaattattgtttgataatatgcaaattatatgaacaacttgataagtatg

SEQ ID NO: 6430 - DNA, 877 bp, Gossypium hirsutum
  Clone ID: GOSHI-09MAY01-C2752_1
cccacgcgtccgcataaaacataataaaataggatgaggtttaatttacgagccttgggataaaagtgtaaatatgtgaaagtttaggggtaaaatggtaattttatcaaagttcgttctaggggctgttttgatgaatgtatgtattaaataaattaatttggtatatagatcaagagaaacaagattcaagtcgtgatcgagggaaaaacaaagtttacgaggaataggctcgattgcaaaaattttgtatcgaggtaagttcatgtgtaaataaagtaacaatttatattttaagtgatttaatgttatttatatgatatgatatttattaccatgaaatattatgctttgtgaattattgtttgataatatgcaaattatatgaacaacttgataagtatgagatactagcaaatattggtttctatatttcgaagaaggcgatcaaaatgtgtaattgagaaaaatctcgtttgaactttgggagtagattagggtgcaagtgacatgtcactgggatggttgggcatccgagctcgttgagttgagtccgagttcacttatggatgcaaatgttcgaactcgttgagttgagttgagtccgagttcgtgagatgtaactaggcatccgagctcgttgagttgagtccgagttaacttatggatgcgaacgcccgagctcgttgagttgagtctgagttcacttatgggcgggttacatggtagcttggctacatatgtggcacttatgtgcaaaatttccatgtatccgaattatattccgatgtgttcaacgggtaaaattctactcaaatggaggaatactcgagatgaaagggacgtattggtaaatgctgtgaaatggatactttga

SEQ ID NO: 6431 - DNA, 523 bp, Gossypium hirsutum
  Clone ID: LIB3583-023-P1-K1-A4
cccacgcgtccggttctgccgatttttgctctcctccatagttggggttttttcaactttcaaacttcgtgatcaagagaaacgagattcaagtcgtgatcgagagaaaaacaaagtttacgaggaataggctcgattgttaaaaattttgtaccgaggtaagttcatgtgtaaataaggtagcataattgttatttttaagttattgatgttaaatatatgacatgctgatttttatcatgaaatatatgctttgtggttattttcgaataaaatgcaaattaagtgtattatttgttaaatataaagtgctaccgagtattggtttcggtattttacggaagatggcaaggagatgtgttcgaggaaaatcccgtttgaaccttaggaacagattaggatacaagtgacatgtcattaggatggttgagcatccgaactcgttgagttgagtccgagttcacttatggatgtggaatgtccgaactcgttgagttgagtccaagttcgtgagatgtaacta

SEQ ID NO: 6432 - DNA, 483 bp, Gossypium hirsutum
  Clone ID: GOSHI-09MAY01-C102749_1
gtttccagtggcggttcttgttggagggtcccaatgggttcaaggatatcagcaagcaatccaaacagtggggaaagcctcaaccttttacatttgggttttgctctctgggatattttatcacctatacaaccaatcatcttatcaggcacttgatgagattagccctttgacattttcagttgggaacaccatgaagagaattgtggttatagtgtcaactgttttggtgtttaggaatccagtgaggcctttgaatgcacttggatctgggattgccattcttggaactttcttgtattctcaagcaacagctaagaaggtctctgctcctgaaaagaaaagctaaggattcagtaatctcttcaaagttttaaactttttttttggggtctttccttttgatcagatgatatttgcattttgttcctctttcccccttactataaatgtcaataaatgaccttaataatttgcttgctt

SEQ ID NO: 6433 - DNA, 914 bp, Gossypium hirsutum
  Clone ID: GOSHI-09MAY01-C2702_2
ccggccggaattccggtcgccacgcgcggggatttcttccatttccgcgttatatatacacttggaagggataaaataacagagctttgcttcgtctagaccgatcgaaagggtattcagtgatggccactgaaatcatgaataatgaagttggtgtggaaaaaaatgaggagtcggaggcttcaaatggcattgagaaattagagatttcgaatggcactgatgaggtctccgaaaactcttcatctatgcaaaaagatgaagatggggtgacagaagttgccaaaaagaaaaagaagaaaaataaaagcaaaaaaaagaaggagcccttgaagcagactgatcctccatctattcccgttgttgagctttttccgtccagggagtttcctgagggtgaaattcaacagtacaaggatgataatttgtggaggactacctctgaggagaagagagacttggagcgatttgaaaagccaaaatataatgcagtgcgacaagcagccgaagtccatcgtcaggttcggaaatacatcagaagtatcttgaaacctggaatgttaatgactgatctatgtgagaccttggagaacacagttcgcaagctcatttcagagaatggtttgcaagcacggattgcatttcctactggatgctcactgaattgggtcgctgctcactggactcctaattctggagacaagactgtgctcgagtatgatgatgtgatgaagttagattttggaactcatattgatgggaatatagttgattgtgcctttacagtggcgtttaatcctatgtatgatccgcttcttgaagcttctcgtgaagcaaccaatacaggcatcaaggaagctggtattgatgtccgtctttgtgatattggtgctgcccttcaagaggtgatggaa

SEQ ID NO: 6434 - DNA, 1288 bp, Gossypium hirsutum
  Clone ID: GOSHI-09MAY01-C2702_1
tcgtgatgagccccaaatattgcgcggggggggggggcgtgaagtccatcgtcaggttcggaaatacatcagaagtatcttgaaacctggaatgttaatgactgatctatgtgagaccttggagaacacagttcgcaagctcatttcagagaatggtttgcaagcagggattgcatttgctggtgggtgctcactgaattgggtcgctgctcactggactcctaattctggagacaagactgtgctcgagtatgatgatgtgatgaagttagattttggaactcatattgatgggaatatagttgattgtgcctttacagtggcgtttaatcctatgtatgatccacttcttgaagcttctcgtgaagcaaccaatacaggcatcaaggaagctggtatcgatgtccgtctttgtgatattggtgctgcaattcaagaggtgatggaatcatatgaggttgaaataaatgggaaggtgtttcaagtgaaaagtatacggaacttgaatgggcacagcattgggccctatcagatacatgctggaaaatcagttcctattgtgaaaggaggggagcaaacaaaaatggaagagggtgaattttatgccattgaaacctttgcttctactgggaaagggtatgtcagagaagatctagagtgcagccattatatgaaaaactttgatgcaggacacattccactgaggttgcctagagctaagcaactactagctacaataaacaagaatttttcaacattggccttctgtagacggtatttagatcgtttgggagagactaaatatctaatggcattgaagaatttatgtgatgtcggcattgttcagccgtatcctcctctctgcgacatcaagggcagctatgtttctcagtttgaacacaccatcctactgcggccaacctgcaaagaagttatatcgagaggtgatgactattaaggtggaagaccaaaaagtttagttggtaatcatctcctcaaatattttgcgaataattttagttgtgtactttttgtgttttttaacataaggaaggtccctaaatagtggatgatacccatgtttgtcacttgtctgtactcttgctttgccgtgtttgatgatagatggtgtgattgagacttgaatcaggcaatatatggtgatgggaagactagaattttccattgcagtcaaagttatgtcttactactacaaaacatgaatgatgtttttcttatttgggtaaactttttaaatgttaaaggaggataaagttttttcttttta

SEQ ID NO: 6435 - DNA, 392 bp, Gossypium hirsutum
  unsure (1)..(392): unsure at all n locations
  Clone ID: LIB3166-020-P1-K1-G6
ctttgtggtcgttgcttctatctctctccaaatttattttattttgctttgagatactgncgggcggtaagatgatagtgctcctattgaaagcctcttattttcaatggccctgatgggggtcttgctaatatatgcacttttctgcatttttaaattgtttcctagcagaagttgccaaaaagaaaaagaggaaaattaaaggcaaaaaaaagaaggagcccttgaagcagactgatcctccatctattcccgttgttgagctttttccgtccagggagtttcctgagggtgaaattcaacagtacaaggatgataatttgtggaggactacctctgaggagaagagagacttggagcgatttgaaaagccaaaatataatgcagtgcga

SEQ ID NO: 6436 - DNA, 576 bp, Gossypium hirsutum
  Clone ID: GOSHI-09MAY01-C2692_1
cccacgcgtccggagaacagaaggaaataatcgaagtgaggaagatggtgccttaatcaccaacaaaaaggaaaagtttctaacatcaactgcaataataataaggacatagaaaaattggatgagttctgttcagctttggaacactgatgatgattatagttccattagtcacaaactagattctaagagaaaggacggagattcatctcaaggatgtaaatataggggaacagcaacagcctttatgccattcaagatgaatttgggttttgcagtgaggaaagaagagaaagaggagataccagttcatggattaacgcttttgactcctggaatcaagaatctgaaagaggaatcatgttctacggggtctaggacaagttgtagcagagcagtttcttcttctgcccccaatgctcagtccacttttcgctctgtaccacagccactgtcctattaccagcagcagctgcaacaacaccaacaacagtctgcttggaagcaaaggaggtgctggcacctgagttgcatcgccggtttgtcaatgccttgcgcatttaggaggctctcaag

SEQ ID NO: 6437 - DNA, 739 bp, Gossypium hirsutum
  Clone ID: GOSHI-09MAY01-C2682_1
tcgggttattagttaggattagtcctgttaagtttttataccttctttttatttgttttgaacttttagtatgtgttaatttaacatctgatggtgattaatatcttcattggattgtgcttctagattttgatttgttttgatattttggttggatatgtagaattatccattgaaaaatgttgaaggttaattttgtttcgttaacggaaaaccaaccaaattaaccgaaatattaggttgttttctcttttcctgcaattttgtagttaacagatttgggtttcacgttacattattttcgttaacaagtgcaggtatttttcttcattattttggcggtggatagtgttcattattatttactaataacctgctgattggatctatttatggtgttaagagtaatctttgttagcttatataatatgggattgagaaaaaaaattgttgctgtattgagatttttctttgatctgattggttgtgtttatagattgaatgtttttagatctgtttatggttttccttgatctgggtatgaactggggtttgaaaatgtttttgagtgtatgtaatgtgttgtgataatcaatgaataaaaggagagtttgaggatggatatcttgatgctgctggtcctcaggtctttgagatgttagcgtcgatttcctgggtctggcttggatgtttttacttggcggctgttcccttttactggccggtttcttgcgttaac

SEQ ID NO: 6438 - DNA, 1037 bp, Gossypium hirsutum
  Clone ID: GOSHI-09MAY01-C2652_1
cgcgcccgggcactctcctcgttcgcaaaaactgagtgacgagtttggttgggcttactatagcaagagagacctgtcttaatttgggcatcggtcctttggcgttttccaaaatccctagcccgatctcctgtggaggcagccatgaggaccctattttcaaccaccaaacgcctcatttcttgcactagcgccaccgccgtggccacccattcccgttccttcagcttgatacccatggtgatcgagcactcttcccgcggcgagagggcttacgacattttctctcgtctcctcaaggaaaggatcgtctgcatcaacggacccatcaacgacgacaccgcccacgtcgttgtggctcagctcctcttcctcgaatccgaaaacccatccaagcctatcaacatgtacctcaactcccctggcggtcaagtcactgcaggtcttgcaatttatgatacgatgcagtacattaagtctccaatcaacacaatctgtttggggcaagctgcatccatggcttctctccttttagctgcgggagcaaagggtgaaaggcggtccctccccagtgccaccatcatgattcaccagccttctggtggatacagtgggcaggctaaagatatgaccattcacactaagcagattgttcgcgtttgggattcattgaatgctttgtattgcaagcatacaggacaatcaattgatataattcagaagaatatggatagggattattttatgacccctgaagaggctaaagagtttgggttgattgatgaagtaattgatcaaaggccaatggctttggtcactgatgctgttgctaatgaacccaaagatagcaaagacagcaaagataaaggctccaattaggattagaggcagttagctctttcttgattaattgttactgttcttcaatcttatggttaactctctttttgctgttgattgatgttatgcttctggatttcctgcctgtctttcggggcgcttgctagctaatttttcaatcagacttttcttttttg

SEQ ID NO: 6439 - DNA, 176 bp, Gossypium hirsutum
  Clone ID: LIB3493-025-P1-M1-D7
caaaaactgagtgactagtttggttgtgcttactatagcaagagaaacctatcttaatttgggcatcggtcctttggcgttttctaaaatccctagcccgatctcctgtggaggcagccatgagccctatttaaccacaacgctatttttgactacgcacgcgggcacattccgtc

SEQ ID NO: 6440 - DNA, 661 bp, Gossypium hirsutum
  Clone ID: GOSHI-09MAY01-C2642_1
gtatttttcactcctttattacatatatatttgctcttgcttatacaaacctgagatattgagagagaaagaggggttacagttaaacccaaaaagaagcaaaaggaagaatggttggtgatggaaagttgttcactttggctcaagtctctgagcacaacacccccaaagattgttggctcatcatcaacggcaaggtttacgatgtggcaaaatttttggaagaccatcctggtggcgacgaagtgttattatcagcaacagggaaggatgccacagatgattttgaggatgttggacacagtgatagtgcacgagacatgatggatcaatactatgtcggagagatcgacatctcaactatccccaagaagacgacatataaacccccgaaccagccacactataatcaagacaagacatccgagttcatcatcaagctccttcagttcttagttccccttgccatcttgtgtttagccgttggtattcatcactacaccaaatcgtcttaaaaataatcgagattgtgttacaatgacggaaaaaacttgggtttcatttatgcttcatcttctatgaaaaggctcaaataatcttaagtttggttgtataatttaaggacctgcatttttgtaaccctgatttaaatacaataatt

SEQ ID NO: 6441 - DNA, 1038 bp, Gossypium hirsutum
  Clone ID: GOSHI-09MAY01-C2662_1
aaaaagagtgcgttcaagcttatagtaatgttaggcgtgatgctttggatgagtgttgggtgattctcggagttgagaagttaagtattgaagaagttcaaaagattgaatggaaagctttggatgaaaagatgaagaaatggattcaggctgttaagattactgttagggttcttttgaatggggaaaagaggctttgtgatcagattttcaatggatcgaattcaattaaagagatttgttttaatgaaaccggggaagggtgtgtaatgcagttgttgaattttggggaagcagtggctattgggaaaagatcatctgagaagctgtttaggatcccggatatgtatgatgtgttagcagatgcattgctcgagttcgagatgatgttcactgatgaatatatgtgcacggaggcgaagggagtgttggctggattaggggatgcggcgaaagggacatttttggagtttgagaatgctgtgaagaatgaggcttcaaaaaaacctatgcagaatggggagattcatccgcttactcggtatgtgatgaactatgtgaccctcccggccgattatagcgagactttgaattccttattggagaatgacaaggatgaagcggacggattgaagagtgaagacggtgagctagagacaatgactccgtttgcgaaacggttgctgttgttgatatcctctttggaatccaatcttgaggagaaatcaaaactatacgaggatggtgcattacatttgtatctttctgatgaataataatctgtatatagtgcaaaaggtgaaggattcggagctaagaaagcttttgggagacaactgggttcgtaagcggcgtggctcaatacgccagtatgcaacaagttatctgaggacttgttggaccaaagctttacattgtttgaaagatgaaggaattggtggtagctcgaacaatgcctccaaggtagccttgaaggaaagatttaagagcttcaatgcatgttttgaggacatatataggattcagacaggttggaag

SEQ ID NO: 6442 - DNA, 904 bp, Gossypium hirsutum
  Clone ID: GOSHI-09MAY01-C2622_3
cgggcgacccacgcgcggcgatttatgtcccaccagctcaacagggtaatgtagattagcagagtggaatcctccatgcagaggagaaagactataaaactgcttatagttatttcttcgaagcatttgaagctttcaatgctcttgaagatcctcgagctgtctttagcctcaagtatatgctgttgtgcaaaaggggggtgagccaggctgatgatgttgctggtataatatcatcaaaagctgggcttcaatacgtggggcctgaacttgatgccatgaaagctgtcgctgatgcccatgcaaaacgttccctgaagcttttcgagattgctcttcgtgatttcaaggctcaactagaggaagatcctattgtccacaggcacctttcttccctctatgacactctactggagcagaatctctgcagattgattgagccattctcaagggttgagatcgctcatattgccgaactcattgagttgcctgtagaccatgtggagaagaaactttctcagatgattcttgataagaagtttgcagggacgctggatcagggtgctggatgccttgtcatctttgacgatcccaagactgatgccattttccctgcaacattggagaccctctctaacattggcaaggttgtagataggcctctatgggggggctgctaacataatggcctaagagtcaagatttaccgatgcttatatacagcttgcaactcggttctagcgaaaaacaagtgttcaggtacactggatgtgcacatgttttgacgtttcagcttttaatttaatgggattgcggcacaacatttgggtcaaaatatggagttgattcagccaatattgtgtttgctcaccatatgcttgtctactggttgacttttcaatta

SEQ ID NO: 6443 - DNA, 1606 bp, Gossypium hirsutum
  Clone ID: GOSHI-09MAY01-C2622_2
cccacgcgctcggggaaagatcgattcatcagtcttcttctctgagtagaggttttggatttgtaagcatttacaatgtcttcgtcctatctcccagcaaccactgactcaattgctctggccttagaagccaaaacaccatctgaagccatctcaatcctttaccgtgtactagaaaatcctgcatctgctcccgatgctctacggattaaagagcaggccataacaaatctatctgatcttcttagacaagagaaccgagcagaggagctcagaagccttctgacccaactgaggcccttttttgcactaattccaaaggcaaaaactgctaaaattgtccgtggtataattgatgatgtagctaagataccaggaacatcagatctccagatttctctttgcaaagaagtggtgcagtggactcgtgctgagaagcgaactttccttcgccaacgagttgaggcaaagcttgcggcacttttgatggagaacaaggagtactctgaagcactgaatctcctttctggtctaatcaaggaggtcagaaggttggatgacaagcttcttctagtcgacatagacttgttagagagtaagcttcatttctctcttcgaaacctgccgaaagcaaaggcatctctaacagctgcaaggacagcggcaaatgcaatttatgtgccaccagcgcaacaaggtaatatagatttgcaaagcggaatcctccatgcagaggaaaaggattacaaaactggttatagctacttctttgaagcatttgaagcattcaatgccctagaagatccccgtgctgtatttagcctcaagtatatgctgttgtgcaagataatggtgagccaggccgatgatgttgctagtataatatcatccaaggcagggctacagtatgtggggcctgaacttgatgctatgaaagctgttgctgatgcccatgccaaacgttccctgaagcttttcgagattgctcttcgtgatttcaaggctcaactagaggaagacccaattgttcacaggcacctttcttccctatatgacactctactggagcagaacctctgccgattgattgagcctttctcaagggttgagatcgctcatattgccgaactcattgagttgcctgtagaccatgtggagaagaaactttctcagatgattcttgataagaagtttgcagggacgctggatcagggtgctggatgccttgtcatctttgacgatcccaagaccgatgccatcttccccgcaacattggaaaccatctccaacattggcaaggtcgtagacagcctctatgtcaggtctgctaagataatggcgtagggtgtgatacctaggaatggttatattattaatcactctgcttcgagcccggggagaaagtatgtttgcggactgacatgtttcaatgtttcggttttaatggtgtattgcggaagaacattggactcaaatatgtggtgtattgcctgatatgtttctaaaacttttttctaagttgtctttctttgaatttagcttgttcactttatttggcaacattaattctttaatagaatcccatctttttagggatcccaccccc

SEQ ID NO: 6444 - DNA, 720 bp, Gossypium hirsutum
  Clone ID: GOSHI-09MAY01-C2622_1
attcacaccattaatcataaaaatccaattaattttaaaaggaatgccaaattcatccttccctgtttcctgactcactcgtccgttcactttcccaagaaaacacccaaaaatcccagaaacctctaaaaactcccccaacccatgccctctcctctgggttcaccgacaagctcccggtctgtaacccagaccgtcaatggctcccaccgtttcacgatcaaagggtattccttagccaaaggcatgggcgttggcaaacacatagccagcgagagcttcaccgtgggaggctatcaatgggcaatttacttttatcctgatggtaaaaacccagaagatcattcaacctatgtctccgttttcgtagctttagcaagcgaaggcacagatgttagagcccttttcgagttaactcttttggatcaaagtgggaaagggaaacataaagttcatagccattttgatcgagctcttgaaagtggcccttatacccttaagtataggggaagcatgtggggatacaagcgtttcttcaggcgggctatgcttgaaacatctgatttcctcaaggatgattgcttaaaaataaattgcactgttggtgttgtagtttctgaaacagactgcccaaggttgcactcaatacaggtccctgagtctgatatcggttcccattttggcatcttattggaaaatgaaaaagggtcagatattact

SEQ ID NO: 6445 - DNA, 421 bp, Gossypium hirsutum
  Clone ID: uC-gsflmaxxa060g07b1
ttgacgcgtgggaaaattttctttcactttcccaagaaaacaaccaaaaatcccagaaacctctaaaaactcccccaacccatgccctctcctctgggatcaccgacaagctcccggtctgtaacccagaccgtcaatggctcccaccgtttcacgatcaaagggtattccttagccaaacgttccctgaagcttttagagattgctctacatgatttcaaggctcaactagaggaagacccaattgttcacaggcacctttcttagctataagacactctattggagcagaacctgagccgattgagtgagcctttctcaagggttgagaatgcacatattgctgaactgattgagttgacttgagaccatttggaggaagaaacttttttagaatgattcttgattaagaagtttttca

SEQ ID NO: 6446 - DNA, 373 bp, Gossypium hirsutum
  unsure (1)..(373): unsure at all n locations
  Clone ID: LIB3189-021-P1-K1-A8
gaaaatcctgcacccgctcctgacgctctacggtttaaagagcaggccataacaaatctatctgatcttcttagacaagagaaccgagcagaggagctcagaagccttctgacccaactgaggcccttttttgcactaattccaaaggcaaaaactgctaaaattgtccgtggtataattgatgatgtagcttaagataccaggaacatcagatctccagatttctctttgcaaagaagtggtgcattggactctggctgataaatgaattttttttttttaaaataaataaagaaaaggggggggggggggggtggggggatatacaaaaaanccaaaaaaaggatatgtattgttaggttttttggtatat

SEQ ID NO: 6447 - DNA, 491 bp, Gossypium hirsutum
  Clone ID: GOSHI-09MAY01-C2182_8
ttcacgcgcaacctcaaacaatccctctcagtcaccaaagcaaaatgcgtgaaatccttcatattcaaggcggccaatgcggcaaccaaatcggcgccaagttctgggaagttatatgtgcggaacacggcatagatccaacggggcgttacaatggagatttggatcttcaactcgagaggatcaatgtttactacaatgaatccagttgtggtaggttcgttcctcgtgctgttcttatggatcttgagcctgggaccatggatagcattagatctggtccggttggtcagattttcagaccggacaacttcgggtttggtcagtccggctgccgggaataactgggctaaagggcattatacttgaaggggctgagttgattgattctgtcttgatgttgtacgaaagaagctgaaattgcgattgtcttaaagatttcaggtttgtcattcatgggaggtggactggatctgaatgggacacttttg

SEQ ID NO: 6448 - DNA, 1189 bp, Gossypium hirsutum
  Clone ID: GOSHI-09MAY01-C2182_7
ctttaagctaaccactcccagctgtaagtcttaccctgatctaagctgtttgttttgccaagattgtcgcttagagtttgatgtactagatctatgttagtaatatggaaatagaccctccccttttttatttattgtaatttgggaatatctttgtgaaacatcatggcttagattttgcatatgattattacttgtttgttttggggatttccgaatgtctcacacgtatctttgttattttcatcttgctcgtggccccgtcggtgatttgcaccatttgatatctgcagcactgtctggagttacatgctgcttgcggctccctggtcagctcaactccgatctcaggaaacttgccgcgaatctcatcccctttcctcgtcttcactttttcatggtgggttttgctccactcacttctaggggatctcaacagtaccgagctctaacagtacctgagctcacccagcatatgtgggacgcaaagaacatgatgtgtgctgctgatcctcgttacggtcgttacttgactgcatctgctatgttctgtggttaaatgagcaccaaggaagtggtagagcaaatgttgtttggttctgacttgaaactttctattattttgttttgcttgtttctctccaatttttctcttcttccttttggataaatcttttttattcttcttgttaattttctctaccatttctcgtcttttttttttattcttttctttattcttttttattttctatttttctcttctttatccttttaacctactttattttatattttttattttcattattttctttttatattatttatcattttacttctttctttctttttctcctttttcaatcctttatttattttccttttctccttccctacttttttttatttcctcattcaattatatttttatattcttttccttaacttttaactcttagtttctttttttattatattccttcctcttccattctattttcttttcttttctctttcttctttacattctttattatattactatttgtcttatctcttttcttcttctatatcattcttacctctataattctctctcctacctctattatatcttttttccatttatatatcttttatatctaatcttttccttttctttaccccccccccccccccccccccc

SEQ ID NO: 6449 - DNA, 602 bp, Gossypium hirsutum
  Clone ID: GOSHI-09MAY01-C2182_4
cggacgcgtggggcaactctcatccacccatttctctaaatttcctacatttttttctttagaaaattgcggtttctccttctcttcacaaatcaaaatgcgtgagatccttcatattcaaggtggccagtgcggcaaccagatcggagcgaagttctgggaagtggtttgctcagaacacggcatagatcccaccggtcgttaccaaggagacttggatcttcaactcgagagaatcaatgtctactacaatgaagccagttgtggtagattcgttcctcgtgccgtcctcatggatcttgaacccggtaccatggacagcatcagatctggtcccgtcggccagatcttccgacccgataacttcgttttcggtcagtccggtgctggtaacaactgggctaagggccattacactgaaggtgctgagttaatcgattccgtacttgatgttgctccgtaagaggctgaaaactgctaatggctttaagggttttaggtttggccattaccagaaacagcaacttgtacacgacatcggacccctttaaaaaaaaaacaaaaaaaggggcggccgtttttagggttccaagttttctttc

SEQ ID NO: 6450 - DNA, 619 bp, Gossypium hirsutum
  Clone ID: GOSHI-09MAY01-C2182_3
cctttgtttccgcccacgcgtccggttccgtggcaaggtgagcactaaggaagtggatgagcaaatgttgaatgttcagaacaagaactcttcctactttgttgagtggattcctaacaatgtgaagtcaacagtttgtgacattccacccacaggcctcaagatggcatccacatttatcggcaattcaacatccattcaggagatgtttaggcgtgtaagtgagcagtttacagctatgtttaggaggaaggctttcttgcattggtacacaggagaaggcatggatgagatggagtttactgaggcagagagcaacatgaatgatctggtctcggagtatcagcaataccaagatgcaacagctgatgaagatgagtatgaggaagaggaagcggagtacgaggattaggaaggaaaaactttatgccagttgggcaaattctaatctcaacttccagttgctgaaagaaatagtcattatgctgtgactgttgttgcatttatgtttctaagtgaacttttttcttgagcttttcatgctcaatacttagcaaagcatgcgcagtttatgtactttactcctttcaagtttctaagtaactttttttgtttcaaa

SEQ ID NO: 6451 - DNA, 1762 bp, Gossypium hirsutum
  Clone ID: GOSHI-09MAY01-C2182_1
cccacgcgtccccccgcgccctttcatttcacccttttccgccatatcttcagtgtctcactctctccgtgcttcactccagtttctcctttccctcttcgaagaaaaaatgcgtgagatccttcatattcaaggtggccaatgcggcaaccaaatcggagccaagttctgggaagttgtttgtgctgagcatggcatagatgcaactgggcgttaccaaggagacttggatcttcaacttgagcgaatcaatgtctactacaatgaagccagttgtggtagattcgttcctcgtgctgttctcatggatcttgaacctggaaccatggacagcatcagatctggccctgtcggtcagatttttagaccagataacttcgtttttggtcaatctggtgctggtaacaactgggctaagggccattacactgaaggtgctgagttaatcgattccgtacttgatgttgttcgtaaagaggctgaaaactgcgattgccttcaagggtttcaggtttgtcattccctgggaggaggaactggatctggaatgggaacactgttgatatcgaagataagggaggaatacccagataggatgatgctgactttctcagtcttcccatctcctaaggtctctgatacagttgtggagccttacaatgccactttgtctgttcaccaattggttgaaaatgctgatgagtgtatggttctggacaatgaggccttgtatgacatctgtttccgcacacttaagctaaccactcccagctttggtgatttgaaccatttgatatctgcaacaatgtctggagttacatgctgcttgcgattccctggtcagctcaactccgatctcaggaaacttgccgtgaatctcatcccctttcctcgtcttcactttttcatggtgggttttgctccactcacttctagggggtctcaacagtaccgagctctaacagtacctgagctcacccagcaaatgtgggacgcaaagaacatgatgtgtgctgctgatcctcgtcacggtcgatacttgactgcatctgctatgttccgtggtaaaatgagcaccaaggaagtggatgagcagatgttgaatgtccagaacaagaactcctcatactttgttgagtggatcccgaacaatgtgaaatcgaccgtttgtgacatcccacccactgggctgaagatggcatcaacatttattggcaattcaacatccatacaggagatgttcaggcgtgtgagtgagcagttcacagctatgtttaggaggaaggccttcttgcattggtacacaggggaaggcatggatgagatggagttcactgaagctgagagcaacatgaatgatctggtctccgagtatcagcagtaccaagatgcaacagctgatgatgaagagtacgaagaagaagaagaggaacgcgaatatgaggactaaggagaaggaaagatattgccattttggcaattcaaaatctcaactcccagttgctggtgcttttttttttcctgttttggatgtgaaagaattagccatttacttttgctgtaactgctgttgcatttctggatatttgcagacttgtgtatctttctttctttgaagtttctttctaaatattgtcttgagttttatgaaagcaaatgaactgaatgatgaaatattataggcaaatccccccccctagtgtgcaattctggtaaagcactaaatgtttatgaaatctggagttcgctttttgatagcttt

SEQ ID NO: 6452 - DNA, 421 bp, Gossypium hirsutum
  Clone ID: uC-gsflmaxxa009f08b1
tttctctaaatttcctacatttttttctttagaaaatttcagtttctccttctcttcacaaatcaaaatgcgtgagatccttcatattcaaggtggccagtgcggcaaccagatcggagcgaagttctgggaagtggactgctcacaacacggcataaatgcccccgggctgtgcctcacgaacatcatgctgtcccaaaaggggctgaaattggtactcttggttttggttttgaaggtggtcctgataaatgttgttcttctggatgttccggtaattgtaatcctggtggttttgttctaccatttcctcaaattccagaaatcccaagaattccagaaatcccacaaatcccacagatcccacatatcccacatattccactaatcccacagatcccacatgttccacagatcccac

SEQ ID NO: 6453 - DNA, 350 bp, Gossypium hirsutum
  Clone ID: LIB3585-044-P1-K1-D5
cgtccgaccacgcgtacgcatatcttcagtgtctcactctctcctgcttcactcccgcttctcctttccctcttaagggaggggcgtgagatccttcatattcaaggtggccaatgcggcaaccaaatcagagccaatttctggaaagttgtttgtgctgagcaatccataaatacaaactatcagtttccaagtatacttttatcttggctatctaatacttaatcgtctgcttccttaaccattgttgtgtatcatcctgtaatggcaatcttattagaactatctatcctgaaatctttaggaaaacaggcattttgtataggcatttggtgttcaaggagaatttc

SEQ ID NO: 6454 - DNA, 383 bp, Gossypium hirsutum
  Clone ID: LIB3493-002-P1-M1-G4
acgaaacaatccctctcagtcaccaaagcaaagtgcgtgaaatccttcatattcaaggcggccaatgcggcaaccaaatcggcgccaagttctgggaagttatatgtgcggaacacggcatagatccaacggggcgttacaatggagatttggatcttcaactcgagaggatcaatgtttactacaatgaatccaggtgtggtaggttcggtcctcgtgctgctcttatggatcttgagcctgggaccatggatagctgacgatcaggtcctgcgggaaatactttttcaccaagacgaagtctgtgctgctaggccacgaaccctaactgacgtgcatcttggctatggttgtgaagatgctgccttggctgacttaggccc

SEQ ID NO: 6455 - DNA, 438 bp, Gossypium hirsutum
  unsure (1)..(438): unsure at all n locations
  Clone ID: uC-gsflnu33B081e06b1
gttattgttattttcagattgcacccaaattggggaaaaaaaaaagactcaatttttctgtgcataaaaacccgaatatgaggactaaggagaaggaaagttattgccattttggcaattcaaaatctcaactcccagttgctggtgcttttttttcctgttttggatgtgaaagaattagtcatttacttttgctgtaactgctgttgcatttctggatatttgcagacttgtatttttctttctttgaagtttctttctaaatattgtcttgagttttatgaaagcaaatgaactgaatgatgaaatattataggcaaatctagtgtgcaattctggtnaaaaaaaaaaaaagaaaaataaacaaaaaaaaaaaataataataataaaaaaattaattataaagaatccattcaaaattaaaaaatcaaaaataat

SEQ ID NO: 6456 - DNA, 466 bp, Gossypium hirsutum
  Clone ID: uC-gsflmaxxa009f03b1
tccacgcgtccggtctgcacaagctgccaaacacaatggtttatttattggttccaggtcttttcagcaaccatggccccctatactttgtcagcacaaaaacaagcttctcaaaattgggtctaacttgccatattggctcaaaacacagtgtggatcccaccggtcgttaccaaggagacttggatcttcaactcgagagaatcaatgtctactacaatgaagccagttgtggtagattcgttcctcgtgccgtcctcatggatcttgaacccggtaccatggacagcatcagatctggtcccgtcggccagatcttccgacccgataactttgttttcggtcagtccggtgctggtaacaactgggctaaaggccattacactgaaggtgctgagttaatcgactctgtcttagatgttgctcgaaaagaggccgaaaactgtgattgccttcaagggtttca

SEQ ID NO: 6457 - DNA, 453 bp, Gossypium hirsutum
  Clone ID: LIB3135-013-Q1-K1-B11
tcgtaaaatgagcaccaaggaagtgttgaacatatgctaaacgttcaaaacaagaactcatcctactttgttgaatggattcccaacaacgtgaaatcaaccgtgtgtgacatcccaccaaccggtctcaagatggcatcgacattcatcgggaactcaacgtcaatacaagagatgtgtaggcgcgtgagcgaacaatttacagctatgtttcgaaggaaggctttcttgcattggtatacaggggaaggcatggatgaaatggaatttaccgaagcagatagtaatatgaatgatttggtatcagagtatcaatagtatcaatgatgcatcagttgatgaataataagagtatgaataagaatgagctgtatttgaatgagaaaatttatatttgaactcatgaaatataatttccaggttctggtttttttatataattttgctaaagaa

SEQ ID NO: 6458 - DNA, 481 bp, Gossypium hirsutum
  unsure (1)..(481): unsure at all n locations
  Clone ID: LIB3583-028-Q6-K1-H2
cgccnncacgcgtccgcagntgtcttcacttctctttccgtgcttcacttctcagtttcttnnnctttccctctntnncgaagaaaagaatggcgtggggagatccnnntcatattcagannngtggccaatggcnnngcaaccaaanntcggagccnnnagttctgggaagggttgtttggtgctgagcnnatggcatagatgcnaactgggcgttaccaaggagaccttggatcttcaacttgagcgaatcaatgtctactacaatgaagccagttgtggtagattcgttcctcgtgctgttctcatggatcttgaacctggaaccatggacagcatcagatctggccctgtcggtcagatttttagaccagataacttcgtttttggtcaatctggtgctggtaacaactgggctaagggccattacacagaaggtgctgggttaatcgattccgtacttgatgttggtcgtaaagag

SEQ ID NO: 6459 - DNA, 447 bp, Gossypium hirsutum
  Clone ID: uC-gsflnu33B137e03b1
ttcctttcttcactccagtttctcctttccctcttcgaagaaaaaatgcgtgagatccttcatattcaaggtggccaatgcggcaaccaaatcggagccaagttctgggaagttgtttgtgctgagcataggatgatgctgactttctcggtcttcccatctcctaaggtctctgatacggtcgtggagccttacaatgccactttgtctgttcaccaattggttgaaaatgctgatgagtgtatggttcttgacaatgaggccttgtatgacatctgtttccgcacacttaagctaaccactcccagcttcggtgatttgaaccatttgatatctgcaacaatgtctggagttacatgctgcttgcggttccctggtcagctcaacttcgatctcaagaaacttgccgtgaatctcattcccttttctcgtcttcactttttcatg

SEQ ID NO: 6460 - DNA, 226 bp, Gossypium hirsutum
  Clone ID: LIB3166-007-P1-K1-B9
gactttctcagtcttcccatctcctaaggtctttgatacagttgtggagccttacaatgggactttgtctgttcaccaattggttgaaaatgctgatgagtgtatggttctggacaatgaggccttgtatgacatctgtttccgcacacttaagctaaccactttcagctgtaagctctaacctggatctatgttttttgtttggccaagatttttgctaaaagtt

SEQ ID NO: 6461 - DNA, 1031 bp, Gossypium hirsutum
  Clone ID: GOSHI-09MAY01-C102149_1
ccgggtcgacccatcgcgtccggaaaagatttgggtgatgaatggataggtggccagggggtgttaaaagccaaaagcagagattccaatggatcgaaaacgaaatcaggataaccacacaaggcagaataaggaattatattacttatgctactactctactcttagagaaagggtccaatgagatagttcttaaagcaatgggggggggtattaataagactgtgatgattgcagagctaatcaagacgagagttgctgatcttcatcaaattacttcaattggttcgactgatattacagatatgtgggaacccctagaagaaggcttgctccctctagagattacccgtcatgtatcgatgatcactgttacgttatcgaagaaggagctggatatgtcttccactggatatcaaccacctcttcaggctgatcaagtgaaacccttaaatgaatacgaagatgatggagctcctgagccttcaccaaagacacgaggaagaggacgaggtggtcgaggaaggattagggctaaaggggaatataatggtgatggtttaggaggcaaaggtagaggacgtggaagagggcgttctttccggggtcgaggacgaggcggtgcctatggtggtggaggatactatggcgtctattctgaatcagatgcagcccttacccaagttcgtgggcgtggccgagagaggggaagaggtggccgtgtccgtggtggaggcggtcgtggtcgttattcgaagacggaacctgggccaaaccaagcaaaagccgcttgacatcttgttgttgatatatgtggatgcctgctctgcttgtatctccatcaaccatgaagtccacaatatttatgccatattactagctttgcttgcaagttttatttttggtcatttcaactagataaagttctttttactcttaatttacatatacttagaacatttgtacatttttttcaactttttttttgttttttaaaatagaaataatagagcagcatttttttccccctt

SEQ ID NO: 6462 - DNA, 1213 bp, Gossypium hirsutum
  Clone ID: GOSHI-09MAY01-C2172_1
gtgattcaaaaggctttagaagtggttaatgtggaccagcaaaccagaatggtggcagagcttgatggttcaatcatgaaatgtgttcatgatcagaatggtaatcatgttattcaaaagtgtatagagtgtgtccctcaggaccgaattcaatttatcatttcagctttccatggccaagtggtggcgctttcttcccacccttatggttgtcgtgtcattcagagggtgctggaacattgcaatgatgcaaaaacccaacaaatcattatggatgagatcatgcaatctgtatgcactctagcacaagatcaatatgggaattatgttattcagcatgttcttgaacacggtaagccacatgagcggtccactatcatctcccggctcgcccggcgtccggtggagatgagtcagcagaaatttgcttctaatgtcgttgaaaagtgcttgacttttggtgggccacaggaacgacaaattctggtcaacgagatgcttggttcaaccgatgaaaatgagccattacaggctatgatgaaagatcaatttggaaactatgtcgtgcaaaaggttctcgaaacatgcgatgatcaaaatcttgagttgattctttctcgaatcaaggtccatttaaatggcctgaagaggtatacttacgggaaacatattgtttcccgtgttgagaagcttattgcaactggagaaaggcgtataggattactatccagcctatcctcattgagctcctgaaaagccgatatatggcttctcttctctgcattcctgacaagactgcaaatcaatgcaattttgtacagctgacatggatggtgagtttcttattcattatcctgagtcttatccctactccggggcgggttctcgcgtgccacaaatctgctagacctagagaataagatgatcgttgtcgatatatgagtttgtatattcattgcactagcactattatgaaaagaagacttcaccgatggttgaatcggaagaggatggcatatatttttcatatccattctggaaatttagatgattgaagctatatagattgtacaaagcagaagtttgggtgtaaattgcttaataacaggtagagttccccaattaggtgaagtctttttgaacttttgagatttttttatgggaagctatatatatatatatatgtaaatatgcagcaaagttttggactgtt

SEQ ID NO: 6463 - DNA, 520 bp, Gossypium hirsutum
  Clone ID: LIB3585-016-P1-K1-D12
cccacgcgtccggcctcttagccttcaaatgtatggttgcagagtgattcaaaaggctttagaagtggttaatgtggaccagcaaaccagaatggtggcagagcttgatggttcaatcatgaaatgtgttcatgatcagaatggtaatcatgttattcaaaagtgtatagagtgtgtccctcaggaccgaattcaatttatcatttcagctttccatggccaagtggtggcgctttcttcccacccttatggttgtcgtgtcattcagagggtgctggaacattgcaatgatgcaaaaacccaacagggcattatggatgagatcatgcaatctgtatgcactctagcacaagatcaatatgggaattatgttattcagcatgttcttgaacacggtaagccacatgagcggtccactatcattagcaagcttgctggacaaattgtgaagatgagtcaacagaaagtggcttctaatgtcgtttaaaaagtgcttgactttttggtgggccacaaagaa

SEQ ID NO: 6464 - DNA, 1106 bp, Gossypium hirsutum
  Clone ID: GOSHI-09MAY01-C2162_1
cttgaaatcgtgtgtctaatggaacaagtgttgtggatctcgatatttccttttagacttggtgggtttgcttcaacgacaatacagcttcttggaattgttggtgtgatgacaaaagttacttggcaagttctgcttcttgttgttccaatggctatagcttgcttgtggatgcccacgcgcccccccgcgcctccgcccgcgcggccccgcattgttagcatccagaaatctccagttattcatctgtttggtgaatcaattgccggagcagccacaataaggggttttgggcaagagaaaaggttcatgaagagaaacctttatcttcttgattgtttcgcccgcccgttcttttgcagtcttgcagccatcgagtggctctgcctgcggatggagttactttcaacctttgtatttgctttttgcatgattttgctcgtgagttttccacatggaagtattgatccaagcatggcaggccttgctgtgacatatggccttaacttaaacgcaaggttatcacggtggatacttagcttttgcaagctcgagaataaaattatttccatcgagaggatttatcagtacagccaaattccaagtgaagctcctcccgttattgaaaactcccgcccgccgtcctcatggcccgaatgtggaacaattgagctgctcgatttaaaggttcgctatggggaaaatcttcctgtggtgcttcacggggtatcatgtgcatttcctggtggcatgaagatcggaattgttgggcgtactggcagcggtaaatctacgttgatccaagcattgttccgattgattgagccagctggtgggagaatcattatagacaacattgatatttcaacaattgggctccatgacctacgtagccgccttagtatcataccccaagatcctacattatttgaaggaactattagaggcaatcttgatcctctcgaagagcattcggatcatgaaatttgggaggctctcgataagtctcagcttggagatattgttcgtgagaaagagcaaaggcttgatacaccagttttggaaaacggagataactggagcgtggggcagcggcaacttgtttc

SEQ ID NO: 6465 - DNA, 431 bp, Gossypium hirsutum
  Clone ID: GOSHI-09MAY01-C2112_2
acggtactctcttttctctctctctctctctctctctcgcctcggtcgtttgttttcttttcatttctttaggagggtggtcaatatggggtcttcgattttgccagatctcggagctgagatcttgatccccgtttgcgccgttattggaattgtcttttctcttgcacaatggcttcttgtttccaaggtgaagctctccccgggtcgagactcgggttcccccggtaacaacggtgcgggtgggaaaaacggctattccgattacctcattgaagaagaagaaggtcttaatgaccataatgttgctattaagtgtgctgaaattcagaccgccatatctgaaggagcaacctcatttcttttcactgagtaccagtatgttggcattttcatggttgcttttgcaatcttgattttccttttccttg

SEQ ID NO: 6466 - DNA, 816 bp, Gossypium hirsutum
  Clone ID: GOSHI-09MAY01-C2112_1
tcgcatttttttctctcactttcagctttgcttttcgtctcttttggggaaggggggtcgatatgggggcctcctcgattttgccagatctcggaaccgagatcttgatccccgtttgcgccgtgattggaattgccttttctctcgtacaatggcttctcgtttccaaggtgaagctctctcccggtcgagactcgggttcccccggtaacaacggtgcgggtgggaaaaacggctacgccgattacctcattgaagaagaagaaggtcttaatgaccataatgttgttattaaatgtgctgaaattcagaccgccatatctgaaggagcaacctcatttcttttcaccgagtaccagtatgttggcattttcatggttgcttttgcaatcttgattttccttttccttggctcggtagagggtttcagcacaaagagccagccttgcacttatgacaaatctaagatgtgcaaacctgctcttgccactgctatattcagcacagtatctttcttgctcggtgctgtcacttcagtagtttctggctttcttgggatgaaaattgctacctatgctaatgctcgaaccaccctggaggcaagaaagggagttgggaaggcatttatcactgcattcagatctggtgctgtcatgggctttcttcttgctgcaaatggtcttttggtgctctacattgccatcaacttattcaagctctactatggtgatgactggggtggtctttttgaggcaatcactggttatgggcttggaggttcatccatggctctttttggtagagttggtggaggca

SEQ ID NO: 6467 - DNA, 390 bp, Gossypium hirsutum
  Clone ID: LIB3197-053-Q1-M1-D12
ctttatccctctctcccccgtcggtcataactttgcatttcgtggtatttgagaatgggggcttctattttatcagatctcggaaccgagatcttaattccagtttgcgccgtgattggaattgccttttctctcctacaatgggttctcgtttccaaggtgaagctctctcctggtcgagacccgggttctcctagaaacaacggtgcgggtggaaaaaatgactgcgccgattacctcattgaagaagaggaaggacttaatgatcataatgttggtcttaaatgtgctgaaattcaaagcgccatttctgaaggtgcaacctcgtttcttttcactgaggaccagtatggtggcatttttatgggtgcttttgccaacctggatttt

SEQ ID NO: 6468 - DNA, 366 bp, Gossypium hirsutum
  Clone ID: LIB3083-063-Q1-L1-G8
atccccggctgagaaatcgcccaatatggggctttgaattttgtctgatttcgaacccgagaggctgagcccggtttgcgccgtgattgggattgccttttcgctcgtacaatgggttctagtttccaaagtgaagctttctccgggccgggattcggtgaacaatggttcgggcgccaaagacgggtactccgattacctcattgaagaagaagaaggtcttaatgaccatagtgttgttcttaaatgtgctgaaattcaaagcgccatttctgaaggtgcaacttcgtttcttttcaccgagtatcagtaccgtggcattttcatggttgcttttgcaatcttgattttccttttccttggctc

SEQ ID NO: 6469 - DNA, 239 bp, Gossypium hirsutum
  Clone ID: LIB3166-056-P1-K1-A11
gttctttaccatctgctcgtagcttcttatttcgtttagttagaatggaggttgtattttcgtatgggggcttcgattttgtctgatttcggagccgagatcctgatcccggtttgcgccgagatagggattgccttttcgctcgtacaaagggttctagtttccaaatagaagctttctccgggccgggattcggagaactaaggttcgggcgccaaaaacgggtactccgattacct

SEQ ID NO: 6470 - DNA, 1435 bp, Gossypium hirsutum
  Clone ID: GOSHI-09MAY01-C2082_1
cggaaaccctatgcacacatctacacgtctaatggggtgtctctgcatgaactggcaatatctctctcaaaggacgcctttattctgcaaaggataatgacgttgcatgcatcatttgtgctgatggtggaaatcttttgctttgcgatggatgcccaagggcgtttcataaagaatgcgcttctctgccaacaattcctcatggtcgctggtactgcaaatattgccagaacatgtttatgagagaaaaatgtgcagagcataatgctaatgctgctgctgctggaaggattttaggagttgatgctatagaacaaataacccgcagatgcattcgaattgtgaaaaacattgaggcagaacttagtggatgcgcattatgcagggcatgtgattttagcaaatcaggatttggtcctcggacagttatactttgtgatcagtgtgagagagaatatcatattggctgtttgaggactcataaaatggctgatctaagggaaatcccgaaagggaagtggttttgctgctcagattgtggtaggatccattctacactgcagaagttgctcattcatggagctgaaaggctccctgactcccttttggatgtattaaagaagaaatatgtggaaaaaggtttagatgctgatatcaatattgatgtgagatggaggcttcttagcggcaaattcgcttctcctgaaactagattgttgctttctcaagcagttggtatcttccatgaatgtttcaaccccatagttgatgcagcaactgggagggaccttatcccgtgcatggtttatggaaggaacttaaagggccaagaatatggaggaatgtattgtgctgtattgacaattaactcattcgttgtatcagctggaataattcgagtttttgggcaagaaattgctgaaattcctttagttgctacaagcattgctaaccatggaaagggatacttccagctgttattctcttgtattgaaaagctgttggcattcttgaatgtaaaaaatatcgttctcccagctgccgaagaagctgaatcaatctggacagataaattcggtttcaagaagttaagacctgaccagctcagtgaatatagaaaatcatgctgccagatggttattttccaaggaacttcaatgctacagaaagaagttccatccgatcaactcgttagcagcatcgagcgcacggaattatacaaacatatgaaccaaggaagatcttattttctagagtgaggatgtgcacgtgggggtgctctttttcttctttaaatgttaaatttaattgaatttgtgcacggaattagatagataattgaagtttcataaattgtgttattttgtttgtcacttttaaggtgaagatgataaagaagtggagctcaatttgtgaactgaaacccacgcgtccg

SEQ ID NO: 6471 - DNA, 745 bp, Gossypium hirsutum
  Clone ID: GOSHI-09MAY01-C2002_2
ccagcgtccggccgtctcgcattttattttttcggggggtttgcccggggtttttttaaaacccattagctaaaaagcactgggttctttctgtgttgcttgcagttatcggagttactgcactgctcgttgtaactccggtaagtgggtaccgtccatggccgtacgtaaaacccaacagctccgactgaggggggggaggctctaagaaatttgagggctcatcggagtttgtacatatgagatatcatatgggtccagtccttactgctcatatcaccatccacccaatctggtacggccggtggcagaaatcacagaagaaaatcatccgtgagttcatcaactcgatctcccccgttgagcccaaacacccttcgggggctgggtcctggtagaccgttcagcttcacaccgaccaaacgggagccaacatctcccgtacggtgctattacgtgaagagaaaaacgatcgtttttactcccacgggaaatccttcacgcgctcatcgatacaagtccgttatcaaaagcgctgtaacggcccgtacgaaaccgttacccatcaatcccaaaagcgggttgtacctcttgctcacctcccacgatgtgtacgtcgaaaatattggccacacaaatctgctgattacattacttcacgtccacctaaatcatgctgttcacgctcatctacgcataggtattaaacactccaagctttgactattatttgctcttacccttt

SEQ ID NO: 6472 - DNA, 1391 bp, Gossypium hirsutum
  Clone ID: GOSHI-09MAY01-C2002_1
gcgtgcgccgccctttccacgcgttctttagatcgcgagcggccaattcaccatctctcaaatgctcgagcagtcttgcattttgttttcccttttttttccccacacctttttttaaacccatttgctaaaaatgcactgggttcttccagtgttgcttgccgttatcggagttactgcactgctcgttgtaactccggtaagtgggtaccgtccatggccgtacttaaaacccaacagctccgacttaatgttcggaggctctaagaaatttgagggctcatcggagtttatccatatgagatatcatatgggtccagtccttactgctaatatcaccatccacccaatctggtacggccggtggcagaaatcccagaagaaaatcatccgtgagttcatcaactcgatctccgccgttgattccaaacacccttcggtggctgggtggtggaagaccgtacagctttacaccgaccaaacgggagccaacatttcccgtacggtgctattaggtgaagagaaaaacgatcgtttttactcccacgggaaatccatcacgcgcttatcgatacagtccgttatcaaaagcgctgtaacatcccgtacgaaaccgttaccgatcaatcccaaaagcgggttgtacctcttgctcacctccgacgatgtgtacgtcgaagatttttgcggccaagtctgtgggttccattacttcacgttcccgtcaatcgtggggtacacgctcccgtatgcatgggtgggtaactccgcgaagctttgcccaggagtatgcgcttaccctttcgccgtacctcaatacatgccggggttgaagccgttaaagtcacccaacagtgacgttggagttgacgggatgataagtgtgatcggacacgaagtcgccgaattagcaaccaacccactggttaacgcttggtacgccggtcaagatccggtggctccggtggaaattgcggatttatgtgagggtatatatggaactggaggtggtgggtcttatacaggacagttattgaatgataaagatggtgccacgtataatatgaatgggatcagacggaggtacttggttcagtgggtttggaaccatattgtgagttattgtactgggcctaatgctcttgatcagtaatttttatttttattttgtttaatttttttgaaacttgtgattttgtcttggcattttgtctttgtctctttttcttttttcaggttttttggcctttgtgggttttggtcgggtgggtgatgatgcatgattagttaaggtagttaagtttgttaaatatgtgtacttctgtagtaataagctttgattcctaatatactattttcgtaaaccaatagcttagttaaaaaactaaaaa

SEQ ID NO: 6473 - DNA, 324 bp, Gossypium hirsutum
  Clone ID: LIB3166-037-P1-K1-E2
agtactgcactgctcgttgtaactccggtaagtgggtaccgtccatggccgttcttaaaacccaacatcttccacttaatggtcggaggctcttaaaaatttgaggtcttaaccgagtttattccttttaggtattattttggttccggcccttcctgttattttaaccttccacccaatctgttccggccgttggcggaattcccagaggaaattcatccgggggtgcatcaactcgatctccgccgttgattccaaacacccttcggtggctgggtggtggaagaccgtacagttttacacctcccaaacgggagccaacat

SEQ ID NO: 6474 - DNA, 818 bp, Gossypium hirsutum
  Clone ID: GOSHI-09MAY01-C2392_1
cccacgcgtccgcccacttacatttttcacaaaaaatgagagctccagccttgtcattttgctccaatgtattcccaggctcaactccgcagtgtgaaaagcaacctggcagtggcactgccatttttccaagagcccaatggggttgccgtggctccaatagttatcagcgcctcaaaaaaattagtttccgaagcaactgcaacaaaggcgacgccggttgtggttgcggcggcggaagcgacggtggaggtggactgagcagcattgtaacaagagaagtgtttgaagagatgcttccgtatagaaacgatcctcgttgccctgccgctgggttctacacctatgatgctttaatggaagctgcaaaggcttatcctgcttttgctgcaaccggcgatgatgctactcgcaagagggaagttgctgctttcttcggccaaacttcacatgaaacttctggaggagtagggtggaatgcacccggtggtccgtatgtatggggatactgctttactaagcaaataaaccctccttcggattatttggacaagacatgcaaagagtacccatgtgttcctggtcagaaatattatggtcgaggccccatacaacttacttgtaaggaactacaactatggtcaatttggagcaaccattgggatggaaaaggagttgttagaaaacccagacctgatagtaagcgatgccacattgtgtttccaatctgcattatggttctggatgactccgcaagggttaaagccttcttgccacgatgtgatcactggagcgtggacgccttcagctagggacgt

SEQ ID NO: 6475 - DNA, 541 bp, Gossypium hirsutum
  Clone ID: GOSHI-09MAY01-C2322_1
tgtccacgcgtacgcctaactttgtggatactgggttcacctacaactttccaaggccaacagcaccacctggtgcgcaaaggacatccttgaattagccgcgaatgaggtggttcatccctaaaggttcgtgctttgtattctacagctaccatatttgtggatgcagctgtcacaggtatttgaatgtcatatcatatttgttcacgcatacttgtctctgagtgatctgatcattatgtgttattgcgtttaatatatttaattatttatcacagattagatctatatgtatagagcgaaagaaagatggttgtagaatataggtgatttccatttcacagctaggcttagattgcctttctttttttgctctttcctaaacaatttgcatttgttgtgttgtggcttcacagggtacattagtacacacccctttttgacatcccttttatttgaagtagagtatggaatattgactttgtgatacatcatattagcagaattatttatttaaacaatgcaaataaccaggatctgg

SEQ ID NO: 6476 - DNA, 798 bp, Gossypium hirsutum
  Clone ID: GOSHI-09MAY01-C102319_1
tcgaagactttacctgtggatggcaaggtgtcccaatggtccatctgtgaaatttttggttaacgctgttcacacaatggaagaactgaagctcactggaaatcatttgaaaggttcacgtcctttgttgaccttctcaagcaattttgagaaagatgctcattggaagcttctgaaagagatgatcatacagatatttgggacaccaaaggagcacaggaaagctaagccttatcatgatcacgtctttgttttctccattgctgatgaccacatatggttccgcaattatcagatatctgttcctcacaatgaatcagacaaaatggttcgagggggacttgataaaatgacccttgttgaggttgctccaagattttgtttgaatcctattaagatattcgccggtagctttggaggtccaacgctacatgagaatcccttctatgtctcaccaaaccagatccgagcattggagaaaaggcagaaagccgggaagtatgctaagaaagtcaaagctaagacaaggcggaaaatgcacgagctatctaatcctttggagcctgatgaatttgcagatatgtggagggaatgatatctcaagattcttgttctacaagttaaatcaaatcattattgactaaaatagtttcgcgttggctgccaaaaatggattttagtcagctattttctcttcaaaattttgttagcatcagcattcggttttatcaatggattggttatacaaaattgatcagaatgtatttgtagtatcatctatctacgacttatgagcag

SEQ ID NO: 6477 - DNA, 732 bp, Gossypium hirsutum
  Clone ID: GOSHI-09MAY01-C2242_1
ttgttaaacgattgtcctcctaacctttatgctcggttggtatctaccgtagattctagagactttttgacccgactcaaatctcttaatgaatccgatattaaagttgagtttccattcaaggaagctgcaggagatgatatacattcagctgaagttctgattaacgttgaccaaaaagaaccaagttggtgggtatgggtaactgatgaaatggttccaagcaatgttgaagagtggagtggaattgacgatgagaattacattgttgttagcgaagagcatgttgtggatggtgttgctaactttatggcaaaatgccttttgtcgaaccctaaagctcagactttgaccccagaagaactgcagaaaactatgctgaaagcattagaaggtgtcagcaaattggagaaggttttgagcatttggcatgctggaaagatgttctatgtgttgtcaacttggggacttacattggctgggttatataagagccgtactatagtgaaacttggctgcaatgggcattcacacaactggcaaagttgtaatgagggtactatgaatgaattaaactgttctatagcagagaaagaaagttattgaccaaaaaaaaaaaaattggtctatctgaactgtagtgatgcatggttatttaagtcgtgggtgtgaaatgtaaatgttgtgaatagatacggttgcatttgtaccatttaatggataaatgtattt

SEQ ID NO: 6478 - DNA, 479 bp, Gossypium hirsutum
  Clone ID: LIB3584-039-P1-K1-D12
cccacgcgtccggcggccatgaagctgtggaagttgccaagaccgtcctcgaagtcgccgacgtcgcatggaccgccttggaatgtagccaccacctccaccatcaccatgatgctccccacaatcttcacaattccgagcttcaaaaagaattggaaaccctaaaatccgaaaatcggcgtttaaggaatcaactggaacagaacctcaaacttctcaataatttatctgaatctcctgttctgttaaacgattgtcctcctaacctttatgctcggttggtatctaccgtagattctagagactttttgacccgactcaaatctcttaatgaatccgatattaaagttgagtttccattcaaggaagctgcaggttcttatatactaaatctcttcatttaattgtaattggttaatagaataaattatggcagagtaatgctacttttctcatcatttttatataaactatttgca

SEQ ID NO: 6479 - DNA, 574 bp, Gossypium hirsutum
  Clone ID: GOSHI-09MAY01-C2202_2
gggcaagggatctcgatttcaatctcgttctctccggcagcaccgtctacttggttccggtgagatctcgacgttgtatccgatctcgacccgttccatagcatctcactgaactagttccggttcgccagcgcccccgcgccagctcgggccaaatacaagctggttttcttgggggatcaatctgtggggaagaccagtatcatcactcgcttcatgtacgataaattcgataacacctaccaggctaccattggtatcgactttctatccaaaacaatgtacctcgaagatcgaactgttcgattgcagctttgggatactgcagggcaggaaaggttcaggagtcttataccaagctacattagggattcctcggtggcagtcattgtctatgatgtagcaagcaggcagtccttcttaaatacttcaaattggattgaagaggtgcgggctgaacggggaagtgatgttatcattatgcttgtggggaacaaaacagatcttgtggacaaaaagcaagtctcggtggaggaaggagaagccaaagctcgtgacatcaatgttatgttta

SEQ ID NO: 6480 - DNA, 791 bp, Gossypium hirsutum
  Clone ID: GOSHI-09MAY01-C2202_1
ctcctatttcagctctggcgaaatacaagctggttttcttgggggatcaatctgtggggaagaccagtatcatcagtcgcttcatgtatgataaattcgataacaattaccaggtgtttttctttctttttattatactcctctcattgccctttcatgtatttttacgatccgccttggatctgatcatacctttatttggttgcgatttagattgcctaacttccgtgttcttttaagatcttgtttgctcccatttctgaaatttgtttcttttttatttaccaggctaccattggtatcgactttctatccaaaacaatgtacctcgaagatcgaactgttcgattgcagctttgggatactgcagggcaggcccgcgcctccgccctcgcgcccggctacattagggattcctcggtggcagtcactgtctatgatgttgcaagcaggcagtccttcctgaatacttcaaagtggattgaagaggtgcgggctgaacggggtagtgatgttatcattgtgcttgtggggaacaaaacagatcttgtggacaaaaggcaagtctcggtggaggaagcagaagccaaggctcgtgacctcaatgttatgtttattgaagctagtgccaaggctggcttcaatatcaaggctctgtttcggaagattgcagctgctttgcctggaatggaaaccctttcttcaacaaagcaagaagacatggttgatgtcaatctcaagtctaccaacgctaatgcgtcacagtcgcagcaacagtctggaggatgcgc

SEQ ID NO: 6481 - DNA, 669 bp, Gossypium hirsutum
  Clone ID: LIB3583-025-P1-K1-F9
cccacgcgtccgcccacgcgtccggtcattcattgtgtggttatttgtgtttttcggccactatatgttgtttttgctttttccttttgtggtgctttgtcgcacagcacttgggctacatatccccacgagtttgaagaatttgctacaagcttaaaatgtgaaaaaaaaaagaagtcatcaaactgttctttttttaccattaaatacctctgctagtaattttggatactgcttctttgcttccaatcataccttgtttatttctattccaattagattacattgatatgagcatgctttatctgttgacacctttcataaactagtttctgcgcaaatcacgtatccttttcataaactagttttagttcaatgcagtatggtacttaatttgttttccataattccttgaaaagattttatattacaaaataagatcattgtctatctttaaattttgttcctcatgaagtttgaacatagatttgttgaccagaatgttgtgtttcatgttttcacttagaaataccctttgtaacttttttaaacatttacctgattttggccaactaaaatcttattacttcttatctacatgttttttattcaattattggatattctgtttgattccgtgttaaaatgtggaaggtgttacaggattat

SEQ ID NO: 6482 - DNA, 648 bp, Gossypium hirsutum
  Clone ID: LIB3828-001-Q1-K6-B12
cggacgcgtgggttggatagaataaacaaggtatgattgcaaggtatgattgcaagcaaagaagcagattccaaaattactagcagaggtatttaatgttcaaaaaagaatagtttgatatgagcatgctttatctgttgacacctttcataaactagtttctgcgcaaatcacgtatccttttcataaactagttttagttcaatgcagtatggtacttaatttgttttctataattccttgaaaagattttatattacaaaataagatcattgtctatctttaagttttgttcctcatgaagtttgaacatagatttgttgaccagaatgttgtgtttcatgttttcacttagaaataccctttgtaacttttttaaacatttaccttattttggccaactgaaatcttattacttcttatctacatgttttttattcaattattggatattctgtttgattccgtgttaaaatgtggaaggtgttactggattatggattggcattctgtaactattttccttgacaaacttagaaataaagcaatcacattcactatttttcaagccacttgcgtcttactcctctatgttgaatcaaattgaggaattgctaagtgctagagactataaagctgccatgcagc

SEQ ID NO: 6483 - DNA, 1014 bp, Gossypium hirsutum
  Clone ID: GOSHI-09MAY01-C2222_1
ctttttctttcaaaaaactgacttttctttgattttcggcatacttagggacattcatttctaggtacaccttctcctttctttttaaagtttctgttgcgagtatatgagcaagggcgattgcgaatctcggtatatgtttgaacatgaaatttctagatctatttgttctctgttgaatatcatatatgaatgctcctatcagtggtcggtcttgactcttgtttttacatttcttgattactgcgagggactctcctttgattatgattgctgaccatttcttttcaactcttatttggactgctttccgacatgcaattgcttcagcagcaaaggcggagacgaccccttgatggatctctgagcaagataagagcactatcccttcttcatttctgaccacaatacctaaagccgaatgattataattcctatcatacgcactatcgaaattgattttaatgaactcacgaggtattcttgtgtttctatctcccatatggccctgagtgcacagcagaaattgcggtattgacaagggtaaactgatcaaacacccaggacattcacgaaataaatgatcaattgtttcagctctttctccacatcgagggcaacttgtattgttggctaattttctatactgcattttgacctttgtaggcagataattccatgaaaatctccagattataatcttgatttttattgatagatttaggagccaaagttttttgtaaaatttcctatagatggtttgtaaaaagtaagttctaggattttcatcagaagtttgtaataatttataggtgctacgaaccgaaaatgcacccgaagattcacctccccagaccagaaaatcatcgtgagttactcgggccaaggggatccggaggatttttctagcatcttattctgaaaaggtattattaattagctcctttttacatattctttcattgctatcgatcaacttattaacattaaaatatcgcatagaattaaccactg

SEQ ID NO: 6484 - DNA, 434 bp, Gossypium hirsutum
  unsure (1)..(434): unsure at all n locations
  Clone ID: LIB3145-011-Q1-K1-E1
gcgagggactctcctttgattatgattgctgcccatttcttttcaactcttatttggactgctttccgacatgcaattgcttcagcagcaaaggcggagacgaccccttgatggatctctgagcaagataagagcactatcccttcttcatttctgaccacaatacctaaagccgaatgattataattcctatcatacgcactatcgaaattgattttaatgaactcacgaggtgggtggctccaacttctagtctccttcgtaattactgattttcttttttcaagaccattaagttcaacaatgtagttgctaatgaagtttactatttccttgcatgtactaattctctnttcatgtattcttgggtttctatctcccatatggccctgagtgcacagcagaaatngcggtattgacaagggtaaactgat

SEQ ID NO: 6485 - DNA, 1051 bp, Gossypium hirsutum
  Clone ID: GOSHI-09MAY01-C3992_1
ggaggataaggacctggaagaagcactctgaattcattagctatccgatatacctctggaccgagaagacaaccgagaaagaaattagtgacgatgaggaagatgaacccaagaaagatgaggaaggaaatgtcgaggatgttgaagatgatgagtcgaaatcgaagaagaagaagaagatcaaggaagtttctcatgaatggcagctcatcaacaagcagaaaccgatctggttgcgaaaacctgaggagatcagtaaagaggagtatgcctctttctacaagagcttgactaatgattgggaggatcatcttgctgtcaagcatttctctgttgaaggtcagctcgagtttaaggcgatcctgtttgtaccgaagagggctccagttcgatctctttgacacgaggaagaagatgaacaacatcaagctatatgttaggagggtgttcattatggacaattgtgaggagctaatccctgaataccttgggttcgtgaaaggtgtcgtggattccgatgacttgccgcttagcatctctcgtgagatgctacaacagaacaagattttgaaggtgattaggaaaaacttggtgaagaaatgtattgagatgttcaacgagattgctgagaacaaggaggactacaacaaattttacgatgctttttcgaagaacctgaagttgggtattcacgaagacagccaaaaccgggccaagttggctgatttgctccgataccactcgacgaagagcggtgacgagttgacgagcttgaaagactacgtcaccagaatgaaggagggccagaaggatatttattacatcactggtgaaagcaagaaggccgttgagaactctccgttcttggagaaactgaaaaagaggggatacgaagttcttttcatggtggatgccattgatgagtatgcggtcggacagttgaaggaatacgacggtaagaagcttgtctctgccacaaaggaaggtttaaatctcgaggacgagacggaggaggagaaaaagaaaaaggagggaaaaaagaagtcttttg

SEQ ID NO: 6486 - DNA, 1639 bp, Gossypium hirsutum
  Clone ID: GOSHI-09MAY01-C3922_1
cttggtcctttttgaggctaatggattggctgttctctcagaagttctgtcagccatttttgctgaagttatgcaagggaaacctgaatttacagaccatttgactcacaaattgaagcatcatccaggtcagattgaagctgctgcaattatggaacatattttggatggtagctcttacattaaagcggcacaaaaattgcatgaactggatcctttgcagaagccaaagcaagaccgatatgctcttcgaacttcacctcaatggctcggtcctcagatcgaaacgatcaggtttgcaaccaaaatgatcgaaagagagatcaattcagtaaacgacaatcccttgattgatgtctcaagagataaggccttacatggagggaacttccaaggtactccaattggcgtatcaatggacaacactcgtttagctattgctgcaattggcaaactcatgtttgctcaattctctgagcttgttaatgattactacaacaatgggttaccttcgaacttgtcagcaagccggaacccgagcctggattatggtttcaagggggcggaaatcgcgatggcttcgtactgctctgagcttcaataccggggcaaccctgtcaccaaccatgtgcaaagtgctgagcaacataaccaagatgtgaattctttaggcttaatctcagcaagaaaaacagctgaagctattgacatattgaagctcatgtcttcaactttcttggttgccttatgccaagccattgatttgaggcatttggaagagaatttgaagaacactgtgaagaacacagttagccaagtggctaaaagagtcctaacaatgggatccaatggtgaactccacccgtcgagattctgcgaaaaggaccttctacgagtcgtcgatcgcgaatatctctatgcctacgccgacgacccttgcagtgcaaattaccccttaatacagaaactgagacaagtactagtagaccatgcattgatgaatggtgacagagaaaaagattccaccacttcaatcttccaaaagattggagtctttgaagaagagctgaaaacccatttgcctaaagaagtcgaaagcgcccgaaccgaattcgagaacgggagtccggctatcccgaacaagatcgaagaatgcaggtcctacccattgtacaagtttgtgagggaagttcttgggactcatttgttaacaggtgagaaagtgatttcaccaggagaagaatgtgacaaggttttcacagcaatgtgtgcagggaagttgattgatccgttgctggattgcttgaaagactggaatggtgctcctttgcccatatgctaaaaagggtgtttcttttctcaaagtttgagagcgacaacaaagccacactgttctataagttctttaacctgtgctcatatataaagacatatatatagcttgtttaagtttttcattcgaaaaatttgtgaaaaaccagaactgctgctgtttttagtgacttgttcttttcttttcttttcttttttggggaatttaattacttgcattaaatgtttctttgtataagacgttgattacagcaaaatgaaatgaatatataagatactgtttctactcaaaaaaaaaagggcggcg

SEQ ID NO: 6487 - DNA, 1189 bp, Gossypium hirsutum
  Clone ID: GOSHI-09MAY01-C3852_1
cggacgccccgcgcgtccccttttctttctccatttcctctgtcattcacttgcttcaactttccaatctatctctttccttatgatttgattcgtggacataagcgatgaagcctgtagatctcactcttcgttccatagctaccaccaccaccaccactgcgtgaacccccatctgagcccagaacctttgaagaaggatttcaatattccctaccctttaattctcacggcggacgaaaatgagcgcctcgagattcataaagtgcgtcaccgtcggcgatggagccgtcggaaagacctgcttgctgatttcctacaccagcaacactttccctacggactatgtcccgactgttttcgacaatttcagtgcaaatgtcgtcgtcgatggcagcactgtcaacttaggtttatgggacactgctggtcaggaggattacaatagactacgaccactgagctatcgtggggctgatgtgtttattcttgcattttctctcatcagcaaggccagttatgaaaacgttgccaagaagtggattcctgagctaaagcattatgcccctggtgttccgatagttcttgttggaactaagcttgatctccgagatgatcaacaattcttgacagaccatcctaacgcagtgcccatttctacagctcagggagaggaattaaagaaacagattgcggctcctgcatacattgagtgtagctcaaaaacacagcagaatgtgaaggcagtgtttgatgcagccattaaggtagtgctgcagcctccgaataaaaataagaagaaaaagtcaggtggttgctcaatattatgatcagatgaagattcttcaagtctgaaaaagatggaaccaactgccagcttctcgctgctcgtatctctatatcaattttcctctcttatttttttttctagttcaaggaaaacagcaagccatcatgtttagcatcaagtcttaacctgactttctatggactttctgtgaaagcatcaggtgattttgtttcgtgtttttacttagatgacaagtattcatgctcgcttcttctgcttttcatgtttaaacttcactcatgttttaaccagatgtgaggaagatcctagtagcaataactggtttcttgcattctttcttttttctttttttttaatttaaagcatttttatttaatc

SEQ ID NO: 6488 - DNA, 512 bp, Gossypium hirsutum
  unsure (1)..(512): unsure at all n locations
  Clone ID: uC-gsronu33B011c08b1
ggttctcaaaagtctttcaattctccatctccttcaaaaagttttcttcccaatggcttcaatttgcaacagattcatcagtagatcatcacccttcatcaaatcagctgttagatctaacggtccaaaatcctctttttccagatccgccgccgctccctccatttcctcacctctcccctccccttccatatctcctcttcgccgtttctcctccaggtgtccatcggagctgggatctgtgcagtcactgttgccgctacacagcgcagtggcagtggcgaggatgacttcatgcctgagcacaacatcgaggagttgccgggctctttctcagggtacactctgctgcacctatcccggcctctagtactngtttatctgttttctataatggaattgatgggtacgtgagaacatgtagctgtttcggtggtcgacctgtcatctattcttatttgagtttatagattgacactgttgaactacttagatgatctattcatatacta

SEQ ID NO: 6489 - DNA, 483 bp, Gossypium hirsutum
  Clone ID: uC-gsflnu33B064g05b1
tccacgcgtccggaaccgttcagattttggttcacccgattgaaccgtcaggtccagggttttttcaaccatgctgttctgctgttctccgtttcccagtttttgataatcgaatcggtgaaggaagcttcttttgtttttgatcgtcgactgagtttgtgcgtccttagaatctaaaacattctgaccccaaaaatgttgaagctctctttttcttcttcgtcgtcatcatcatcatcatcatcttcaagaattgtcgctgctttcctcaagctttacttaaaccgtcttcaagtcaaccccttttccttcttccaccaccaccaccaacttcctttaaatcccattttctcaaattccgctcttttccactttctttcttgttcttcccacccccacgctcgcactacccctttttttaacctttacattgcttagcccaatcatccctttttccctttgggtttagggttcttttcttta

SEQ ID NO: 6490 - DNA, 555 bp, Gossypium hirsutum
  unsure (1)..(555): unsure at all n locations
  Clone ID: uC-gsflmaxxa076c08b1
tttcagattttggttcacccgattgaaccgtcaggtccaggttttttcaaccatgctgttctgctgttctccgtttcccagtttttgataatcgaatcggtgaaggaagcttcttttgtttttgatcgtcgactgagtttgtgcgtccttagaatctaaaacattctgaccccaaaaatgttgaagctctcttcttcttcttcgtcgtcatcatcatcatcatcatcttcaagaattgcctgctgttctgaggttctcaaaagtttttcaattctccatctccttcaaaaagttttcttcccaatggcttcaatttgcaacagattcatcaccaccaccaccactgcgtgaacccccatctgagcccagaacctttgaagaaggatttcaatattccctaccctttaattctcacggcggacgaaaatgagcgcctcgagattcantaagtgcgtcaccgtcggcgatggagccgtcggaaagacctgcttgctgatttctacccagaacactttccctacgactatgtncgactgtttcgacatttcaggcaat

SEQ ID NO: 6491 - DNA, 540 bp, Gossypium hirsutum
  Clone ID: LIB3583-007-P1-K1-G1
gttctctttcttttgcctcatttttcccagttcttcgctttttcgtttctcttcactcactgccactttcctgtcaatcttccccctttagggtttgcttcgcgaagaaaaatgatgatctcattcttccttcaacaaacaactttagtgtgaagcaaatctgaccaagaaaatccccagattgttagtgaaaaaccaaaaagataaaagaatttcaagatttgtagaagtaaaggagaaaaagactcgagctataggaacgattgggtatattagtgcggcggcgaaggaaaatgagcgcctccagattcataaagtgtgttactgtcggcgatggtgctgtcggcaaaacttgcttgcttatttcctacaccagcaacactttccctacggattatgtccctactgttttcgacaatttcagtgcaaatgttgttgtggatggcagcactgtcaacttaggtttatgggatactgctggtcaagaggattacaatagattgagaccattaagctatcgtggggccgatgtctttattc

SEQ ID NO: 6492 - DNA, 269 bp, Gossypium hirsutum
  Clone ID: uC-gsflmaxxa069b01b1
cgtctgttccaggttttttcaaccatgctgttctggtggtctccttttaccagtttttgattatcgaatcggtgaaggaagcttcttttgtttttgatcgtcgactgagtttgtgcgttcttagaatctaaaacattctgaccccaaaaatgttgaagctcttttctttctttctgtcgtcttctccactcatctttactctccctctgctcgactctttttcctttctcctctctttctttcttctttcccatctctttccctttttc

SEQ ID NO: 6493 - DNA, 603 bp, Gossypium hirsutum
  Clone ID: GOSHI-09MAY01-C3842_1
cccacgcgtccgataataatttgtttgcaaggtgacgaggtccggcgttaggcaagaaaaagcctaactcgttcgagtgaactcgctcctttgcaggctcagtcctttaatctttgcaagtaatatcgtcgacattacaattttcaaagaggaaccagatccgacgttgtttcatcctccgatctccattctttcttgaggattcaatatagaaaagttaattcctctattctgcggagatttgaaaattcgggaaccctttttgtgtttttgttttcaattattgattgtatctagttgagctggtgaatttgttttcttcaacaatgagtttccgttttccgagggtcaagaatcggatttagagagtggatttccagtgcttattccggagaggcgtaccgtgcgtgtccatgcaggacgtcctgttaattccaactcttttgtgtttctcgttacagtacttttgctattcatgataatgaattcgcagcaagtgtcacctaattttctgctttggttggttcttggggtgtttttatggcaacaacgttaagaatgtatgcgacctgtcaacaacttcaagctcaagcacaagcccat

SEQ ID NO: 6494 - DNA, 1214 bp, Gossypium hirsutum
  Clone ID: GOSHI-09MAY01-C3862_1
cccacgcgtccgcccacgcgtccgaagaaagtgaagctcaaaatctaaaggcggtttacctcaatcgcaatcagtctccgcccggaatcgtcgccgtgattcaccgccgggaatggtgttactctctcttattttgccccctatcctcctcctcctcctcctctactttatcgtccggccccgcccagtcactatcccaataaagaaccgccacgtcttcataacaggtgggtcaagcgggatcgggctagccttagcccaacaagccgcttcccagggagctcgagtctcactcttagctcgatctcttaacaaactccaagaagccaaagaatcgattcgccgttcctccggcctcgacgttgcgatattttctgctgatgttcgtgaccacgacgctgtccagaaggcggctaacgatgccggaccgatcgatgtcctggtagttaaccagggggtttttgtgcctcaggagcttgagaagcagggattggatgagatcaagtttatgatagatgtgaatctcatggggagttttaatgtcatcaaagctgctttgccgctgatgaaggagaggaaggaccgtttgcccgcttccatctctcttatgtcttcccaagctggtcaggtgggaatttatggctacacagcatactctgccagtaaatttgggctcccgggcttagcagaagcattgcagcaggaggttattgcggataatatccatgtctctgttgtataccctcctgataccgacactcctggttttgagaaagaaaatgaagttagaccagagctcacaaaatcgctagcgggctcctctggttcaatgaaagctgatgaagttgccaagaaagctttagatggcatcaaatctggaagtttcacagtcccttgcaactttgaggggcacatgctggctatagctacagctggtttatcccctgaaagatctttcttaatggcattcattgaggtggcttccgtcggtgtcttacgtcttgtaggtttatttttccaatggaactggtatcagaccatacaaaattggcatgcaaagaaaaataggacatagccctctggtgctcgagatggatcatcattacttcttctggcttctgttgcttacttctacgatatcatggatgcggatatttgactaacaaatttcatcagtcgatattcagaactagagctctcccgaactttttgtc

SEQ ID NO: 6495 - DNA, 577 bp, Gossypium hirsutum
  Clone ID: LIB3585-066-P1-K1-F6
ggggagggggcacaccaaagacccaatcaagaacacttaagtgcttggaacggaacacttccctctcctgtgcgtagcagtgcattattatcgctgttgacaagctaaatattaccacatcagctctcttcagattcattgacttgggcaaatacccaacatctgccatgcatgtaaacaagctctctatggctcgtgcaaggcagtagagtgatatctcgatccgcctacttttcttctcaattgccaatgccagacccgttgggaactgcccaatgagacatgctaagtaaggaacaatcagagaacactgataaaatggtaagagttatttaccgttcccattgctacaattggtatgtcacattttccccaaaatctattcaccatgcaagtccacatcctgtttgaaagttactggtgttagcccaatgacaaaagtctgtctgttttagacgaagcacatcgtaacaactcaagtcacatataaatttgatttcacaatacgctacaaagtcgacagcatcattaaggaaataaaacctatctagtccattcaatgtcatacaccaatgtt

SEQ ID NO: 6496 - DNA, 476 bp, Gossypium hirsutum
  Clone ID: LIB3583-020-P1-K1-C10
cccacgcgtcgcccacgcgtccgattattgtctaacataataataacttggagcccgggaggtaggcaagattacggaagagtcttataggtacagtcagatcaagcttatttttgtctgcctataccgcatctgcttgggtgtggacttgcatggtgaatagattttggggaaaatgtgacataccaattgtagcaatgggaacgttcccaacgggtatggcattggcaattgagaagaaaagtaggcggatcgagatatcactctactgcgttgcacgagccatagagagcttgtttacatgcatggcagatgttgggtatttgccgaagtcaatgaatctgaagagggctgatgtggtaatatttagcttgtcaacagcgataataatgcactgctacgcacaggagagggaagtgttccgttccaagtacttaagtgttcttgattgggtctttggtgtgcccactccccca

SEQ ID NO: 6497 - DNA, 612 bp, Gossypium hirsutum
  Clone ID: GOSHI-09MAY01-C3822_1
gccaaaactttatcttcagcagaactctcccactccctctgccaaaatcttcaccttttaaagccttcaaactttccaaaggaagccatggaaaggcttctttactcctcttctccaactcctttggagatctctcgaaagccctctccttttctctctcgactcgccagattcgactctcctactctgggcttcgttccttcgctcactcgcccccaactcaggcgattcatttctatttcatgcaaggccgaaaataacccatctcacttctcttatcctctatccaatcccagcaatgaattgccttcactcggttctccgcgagtcgactcggcaaatgggtcaacacccacttccaattttctcaagctttttgcaattaaagcttctgcacaaagaaaggcaatcacagcagggacatatatagcactctctgccattatcatgttcttaatccaaccaatttttgtaccaacagcttttgcaacctttcaagctggtactaaagccagtggaactgcagctgctgcaagtcggggtggagttctccgtactgaattactaagtaatgcatcgactggtttccttgctggttggttacattcccta

SEQ ID NO: 6498 - DNA, 496 bp, Gossypium hirsutum
  Clone ID: LIB3585-066-P1-K1-E8
tgatgatcagtgtaattctgagatatcgatggattagaggaagcgtggcataaattatgaatacatgtaatttaatgtgaacatccatgtacaaagcatgcatcccatggcagtgggacacttttgtcatgcattttatcacattcagcatggcatttgcagtttataaggaataagattctatgtggaaactggaagtggtgtagtcctgtttattgacgaagagtaccaacagttttttttattctatacatgtttcaggcaatcacagcagggacatatatagcactctctgccattatcatgttcttaatccaaccaatttttgcaccagcagcttttgcaacctttcaagctggtgctaaagccggtggaactgcagctgctgcatgtaaggggtggagtactccgtactgaattactaagtaatgcatggactggtttctttgctggttgcttacataccctatcagggcctgaccaccttagctgtttg

SEQ ID NO: 6499 - DNA, 824 bp, Gossypium hirsutum
  Clone ID: GOSHI-09MAY01-C3512_1
ccccgcgtccgacgaatttggatccaattccatttatcatctcatcctcggatctcctaatctccgctaatttcccaaggccaccaaatctttatcttcttctccacttctccttttctttttccacttaggattttaatcggtacaatattcatggatcggattactaaggccgcacgtctcatgattgtatctgatcttgatcatacgatggttgatcatcatgatcccgagaacatgtctttacttaggtttaatgccctttgggaatcgaattaccgtcatgactctctgctggttttttccactgggaggtcacctacactctacaaacagctgaggaaagagaaacccatgctaactcctgatataactattatgtcagtgggaaccgagataacatatggcagctcgatgctgcctgatgatggctgggttaaaattctgaatcagaaatgggataggaacatagtcattgaagaaaccagcaagtgtcctgagctcactcttcaggcagaaacagagcagcgaccacacaaggttagcttttacgttgataagactaaggcccaagtagtgatgaaggaactctctagccgtttggaaaagcgagggttggatgttaaactaatttatagtgggggaatggatttggatgtattaccacaaggtgctggcaaaggacaggccctctcatatttactaaataagttgaagactgagggaacactacctgttaatactcttgcttgcggtgattcccgaaatgacgctgtactcttcagcattccagatgtgtatggagtcatggtcagcaatgccca

SEQ ID NO: 6500 - DNA, 697 bp, Gossypium hirsutum
  unsure (1)..(697): unsure at all n locations
  Clone ID: LIB3583-051-P1-K6-G9
gcagcgaccacacaggttagcttttacgtggggaggggtaaggcccaagtagtgatgaaggaactttctagccgtttgngaaaagcgaggggtaagattcaacttactaccaagcatgttatgcatccaatcatatgcacttttcccaagtaaatatacatangaaagatgtacaccggactacaatacattgttggatgttaaactaatttatagtgggggaatggatttggatgtattaccacaaggtgctggcaaaggacaggccctctcatatttactaaataagttgaagactgagggaacactacctgttaatactcttgcttgcggtgattccggaaatgacgctgaactcttcagcattccagatgtgtatggagtcatggtcagcaatgcccaagaagaattgttgcaatggcatgctgaaaatgcaaaaggtaatcctaatataatccatgcaaaagaaaggtgtgcagctggaatcatagaagccattggacattttaatcttggttcaaacacttctccaagagatgttgctgattttgtggaatgtaagctagaccgtgtcaatccaggttatgaagtagtgaaattttacttgttctatgagcgatggaggcgaggggaggctgccaactgcgagacttatatagcaagtctgaaagcttcttgtgatcccactgctactttt

SEQ ID NO: 6501 - DNA, 1022 bp, Gossypium hirsutum
  Clone ID: GOSHI-09MAY01-C3442_1
gttagagcacttgactaccttcaacagaagcattgaaacctgactcaagtatgcttctctctgtcggcagaatggaaggattagtcaggctaggtctaccttaattaagctattacagtatgatccacaaactgctcctgaaaatgtaagatatcatggccctcctaaagtaatgctggcttacttaaaatatcaatggtcacttggagatgatcttaaacgaacggaagcattttccaagctgcagaatatggctagagagctttcaatctctccaaatattcaatccattccatcaactgcttcaatgaatggtacaagtgcaaatgttccacttctggcccgtgtgtatcttaaacttggagcttggcaatggacactctcatcacctggattggatgacgattctatacaagagatcctttcagcatttaggaatgccactcagtttgcgccgaaatgggcaaaagcatggcacgcatgggcattgttcaatacagctgtcatgtctcattacgccagaggccttcaaaccatcgcctctcagttcgttgttgcagctgtcactggatatttccattcgatagcatgtgcagcatacgccaaaggtgtcgatgacagcctacaggatatacttcgccttcttaccttggggtttaaccatggagctaccgcagaagtgcaaatggccctacaggtaggatttgcccttgttaatatcaacacttggctggctgttttacctcaaataatcgccagaatccattcaaacaaccatgctgtgagagaactcatacaatcacttttggtgcgaattgggcaaagtcatccccaggctcttatgtaccctcttcttgttgcgtgcaagtccataagcaatttgcgcaaagcagcagctcaagaagtggttgacaaagcacatctggtatccaaggaactaatcagggttgcaatactttggcatgagtcatggcatgaggcactagaagaagctagtcgtctatacttcggtgaacataaca

SEQ ID NO: 6502 - DNA, 581 bp, Gossypium hirsutum
  Clone ID: LIB3543-034-Q1-K1-G5
gttttcatttccctaatatccaatctattgcatcaactgcttcaacgagtggtacaaatgcaaatgttccactcctggctcgtgtgtatcataaacttggagcttggcagtggtcactatcacctggattggatgacgattccatacaaggtagctaatagcttgatattacttcttttgcagtatattttcctcattttcatcagattacttgttatggaaccaaataaaagaagcattttttattggttcataaatgcttgaaatttttatctttttttttccctcttggtaaatgttttttttttggtcccatagagatcctgacagcatttaggaatgccactcaatgtgcgacaaaatgggcaaaagcatggcatgcatgggcgttgttcaatacagctgtcatgtctcattatactttaagaggttttccaactattgcctctcagttcgttgttgcagctgtcactggatatttccattcaatagcatgtgcagcaaacatccaattatatcctttgcttgtcgcaggattttaacgttgcttatagacagatatgttgaaagaatttcacgta

SEQ ID NO: 6503 - DNA, 769 bp, Gossypium hirsutum
  Clone ID: GOSHI-09MAY01-C3402_2
tccgcccagcgtccgcccagcgtccgcgggcgcgtggggtgaagatgaatctgagaggactattactaggaaggccccgaggggaaagcttgttgttcgtgaagttggagttcctattttagggttggtttcccactcaaaacccttggagtttgaggcttcttctcaagacagtaactgtaaaaccccaaccagaagaaaaagagttttggatacaacccttgacgacaatgcccttgtggttgaagccaaaggacctgttggcgttcgtcgaaggaagtggggcaaatgggctgccgagatcaggcacccactggagaaaaccaggatttggttgggaactttcgatacccttgaagatgccgctggggcatatgatgctaaaaagctcgaattcggggctttggctgttgctgctgctgctgctgcagctactgcttcctccgataaaacctatgacatttcttgttctgcttctacttctcacactagcaattctgttgcttcagtacctgaagagtctgtgagcccttcatcccatactacgccttcatcagtgctcgaattggatacttctgcgtctgttgcattctttaacagcaaccatgattctgggggatgcgaacacagaagggtttgatgctaactttgccaatttagtgattcccgatttatgtttccttgatgatccacttttgtctggatcagttggacaagagctgaacttagatgaagagccatccgattatctttttgtcaatgattctcg

SEQ ID NO: 6504 - DNA, 1872 bp, Gossypium hirsutum
  Clone ID: GOSHI-09MAY01-C3402_1
gtttgagagagaaaaatcagagccatagatttctaatcctttttttcttttcctctctttttttctgctagatctagcagtatctaagtctattttcttttgttctcgttttgggttctcttgagaaggcaaaacggcagagaggaggctttgttgagcgttgttttctctctgttggtggtttcggttgcgctttggaagagctaagggaggttgattagtgaatttatgtcggctgagtttgattttgctttgattggggctcagttgcagctctgtttttcatcttctacaacaactgtctgtgctcgcttgttcatcaccgctttgttggctgtttcttgcatgattctctgcttctataggcagagactgaatatcgtgttctcgactgtttcgatgcgtttgagacccaaaaagagttgttctggagttgagtgctttggaggttttcacataaaacaacgatttttttatcttttcttgtttctaagaggggctcatacttgatacagctttcatagttttcgactttgtcacccttttttgtcatttgattttgtttaaatagttgtctacagtttttccgggtattttgaggggggttttagttgagttttaccgagttttgcttccaaaaatgttagagcatcgaaaacaaaccatgaatctgagtaagtccggcaaaaagcctaaaaaacccgaatcaacgatgagtgaagaagaaacccaaatgactaggaaagttcgagtcatcttccatgatccatatgcaaccgattcatcttcaagtgaagatgaatccgagggaagtgctgctagaaaggctccaaggggagaggcgttttgttcgtgaaattagagttcctgttttaggcttggctcctcaggtaaagcctcttgaatccgagacatcttcacaagacagttactctaaaacccctactagcaggaaaagggttttgagtaacgcccgcgtgggcaaacctctggtggctaagaccaaaaaacctgttggggttcgtcaaaggaagtggggcaaatgggctgctgagatcaggcatccactcaagaaaaccaggatttggttgggaacttacgatacccttgaagaagcagccaaggcttatgaagctaagaagctcgagtttgaggctctcactgttgctgccgccgcctctgcttcatctgataaaaccaacgacctttcatgttctgcagctgcttctcacaacaacactgttccctctgcttcagaagagtctgagagccttgtatcgcatacttcaccatcctcggtgcatgaattggatacttccgcatctggttcagtctctaataacaatgatgattgcggtgatgccaacaaagaggtgttcgatgcgaactttgctgatataccgatacctgacctctgtttcattgatgatccattgctatctggctcagttggacaagagctgaacatagatgctgaggctgctgattacctgtttgtcaacgattttggtatgatgttggggggttattgcagcattgaggacctaagtatttgcgggatcggagccgatgagccaagcgatctaccagattgtgatttcagcactgatgattttgttttcgatgaagtagcccccctcaacattgcttgcccataaattttgcagttaggagaagttaatattataaagcgttattagctaagtgttgggtcaaatcatgaaagtagaaagtgatcacagggactctccaagacgagttgttagtgatgtgctttatttttgtgagtgcagagtctagtatgtgtaatgctggtgagttgaaaaggagaaatgagcggccttgattcccttggggtttcttgtgctatag

SEQ ID NO: 6505 - DNA, 410 bp, Gossypium hirsutum
  Clone ID: LIB3189-018-P1-K1-D7
cttattttttacactgtttttcacggtggtggtgttttctatattactgttcgaaacaaagcgataagaggctatttttgctgggtttttgttaggggtatagtgtttgagagagaaaaatcagagccatagatttctaatcctttctctcttttcctcttttcttttttccgctagatctagcagtatctaagtcgattttcttttcttctcgttttgggttctctggaaaaggcaaaacggcagagaggaggctttgttgagcgttgttttcggttgcgctttggaagagctaatggaggttgattagtgaatatatgtcggctgagtttgattttggctttgattggggcttaattgtcagttctgtttttcatcttctacaacaactgtctttgctcgctttgttc

SEQ ID NO: 6506 - DNA, 691 bp, Gossypium hirsutum
  Clone ID: LIB3583-050-P1-K6-H1
gcagttatgtgtttggcgcatagatggatggggagaaaaaaaaatcgaggttcatacaagctccggctggtcgtcaatctccgcttgcaggtagaaaccaaagtccagtttcacaatgaccaaactcatctattggttgcccacgagagccaaatagccatttatgacagcaagcttgaatgtttacgctcggtaagttgtttgcctcgcattattttccttgtattgtagtttatcatatttctttggggaactcttttacaagaacatgactaatgtgggaataaggtaacaaaaacatcagttattactattatcgggatctacccggtctgaaggtccgaacctgagttttggtcttttggtaaaattaccatagaggcctctatactaagagtcgggttgcattttgccccctctaaaatgggcaaattaatctctgttagatcaaagagcaaactgatctttctgttaaaaatctcatttaaaactactattaaaaattggtccttgtatggtagtatgaggtacgcgtggcaagccacatgtcattgtcctattatttcatcaaccatatcagttttcaacggtacaaagatgaaatttttaatagaaaggttgctttttgatttagtgtacatggactaatttgtctattttctgggtagagggggcaaaatgtaatcttgac

SEQ ID NO: 6507 - DNA, 277 bp, Gossypium hirsutum
  Clone ID: LIB3493-057-P1-M1-A5
gtccgcttgcaggagaaaccaaagccagtttcacaatgaccaaactcatctattggttgtccacgagagccaaatagccatttatgacagcaagcttgaatgtttacgctcgtggtctccaaaagagtcattaaatgctcccatttcgagtgcaatatattcttgcgatggctcactggtttatgccggtttttgtgacggcgccattggagtttttgattccgataacttgagactcagatgtcgaatagcaccttcggcttacataccttcgtta

SEQ ID NO: 6508 - DNA, 666 bp, Gossypium hirsutum
  Clone ID: GOSHI-09MAY01-C3782_1
ggacgaccacgcgtacttgatgcgttcgaattatttgacaactatatttccggaggttcgactgaagaggtacttggagatgaggggagctgatggagggccttggaggaggttatgtgctctgcctgcattttgggtaggtgggttatatgatgaggtctcgctccagagtattctagacatgacagcggattggacatgtgaagaaagagaaatgttgagaaacaaggttccaaagactggtcttaagacgccatttcgagatgggttgttgtggcacattgcggaagatgttctaaagttggccaaggatggtttggaaagaaggggcttcaaggaatccgggttcttgaatgaggtggcagaggtggttcgtacaggtgtaacaccagctgagaagcttttggaattgtataatgggaagtggggacaatctgttgaccctgttttcgaagaactcctctactgagggattttatgtattttcagggctctttttgaggagggaatcaaattcttaaaatcttagtgctgtcatgcaacatctttcgttgtaattcgctaaggaacctcggatcatctttagacttcaaaaacttcctactaccgaatgcttttttttcttttatgtgattttgttagaggaataaacgatgctgtaactga

SEQ ID NO: 6509 - DNA, 1025 bp, Gossypium hirsutum
  Clone ID: GOSHI-09MAY01-C3752_1
acaatgagggctgtccaacaacaatcgtatcctattaagggagtggtcaataatttggatttcatgcgaaagaggaagccatccgatgatttgaacatgatggaacacaagatctacacttgtgagttcctccagtgcccttatagtgaactccgcctgggttttcgtgacaggactgccagggacaatcatcaattaacttgtcctttcagaaactcttctgcgcagtttggcggttcaaattttaacgtgaatgaagtgaaaccagtcattttccctcaaccttttgcaccatccaagccagctgcaccatctattacatctgctccaacaccctatgaactatcaggactcggagttccagaagatgggcagaaaatgatcagtgagctcatgtcaatatatgataacaacattcaaggcaacaaaaacatgaatcccggtaacaatccaggtactgaaggtcaaaacctcctccagtcgaaaagccaacctcaacaagatgaattcttcaacggtcatcaaggagtcatgatggaggggaatttcttcgaggagtccagcatgcctcgtaatcatcagatgtttatgcaaggggaaggtcaatttgaccgttttaagggtttgaattctccgttcgaggctagccacaataacaacagcttccagttgatgtttggttctccgttcgatctggcttcttttgattacaaggaagatctacaagctgttggggtcgataccatgccaaagcaggatgtttcaatctggttttgagtaacaaaggtcaggtcacaagtggtaatccccactaaggcctgccgacacatgcattagctaaaaaccttatgtttttttttttttttcaacttggtggttgtatttatcttcatgcttgtagttgttagaagttggcaagttttatcaggtcttcatatgggctttcaataaaaacaaaaagtcccataatcttgcaactgatttacatagaatattactgtctcataaataagtttatatgtatt

SEQ ID NO: 6510 - DNA, 464 bp, Gossypium hirsutum
  Clone ID: uC-gsflnu33B113e12b1
cccacgcgtccgcccacgcgtccgcccacgcgtccgcccacgcgtccgcttttgcaccatccaagccagctgcaccatctattacatctgctccaacaccctatgaactatcaggactcggagttccagaagatgggcagaaaatgatcagtgagctcatgtcaatatatgataacaacattcaaggcaacaaaaacatgaatcccggtaacaatccaggtactgaaggtcaaaacctcctccagtcgaaaagccaacctcaacaagatgaattcttcaacggtcatcaaggagtcatgatggaggggaatttcttcgaggagtccagcatgcctcgtaatcatcagatgtttatgcaaggggaaggtcaatttgaccgttttaagggtttgaattctccgttcgaggctagccacaataacaacagcttccagttgatgtttggttctccgttcgatctggct

SEQ ID NO: 6511 - DNA, 814 bp, Gossypium hirsutum
  Clone ID: GOSHI-09MAY01-C3742_2
tgattaacttcgaattagagatcgtgggcgagaggatagtgatagagatgttatcaatgaacaagtggttcaacttcaacgagaattacaacttgctgaaacaacgatcactcaacagaaggatgcagattctcagaaagagatggatcgagaagcagctttaaaacattccatcgaagagctcgaagccaaaaacaaagaagcattacacctcaagaaacaagtcaaagagttggaagataaattgcaagaagctgaagctaaaatgaaggttgcgagcagtgcagccgaagcaaaggatactgtagaggtgaattccagagatactgatggattaacattttcaacaccaacaaaacgaaagagtaagaaaaagtcggaagccgcttccgtacaagttgcttcctcttcttcatcagctacccatactgaggcttctcctttgacgaacttaaagttcgttctcggagtagccctcgtgtcagcgatcattggtgttattcttggaaagcgttattaatttagggtttttttccccttcctttttgtgtttgattttactacgttgctgatttttgttttctttgcattttccttctttaagttatgaagcagaatagaaaagctttattgctcgggttttgaggttcggttggggaacttgttttcattctttcccttgcccgctttgtcagaaacagtcagttttatgcatatcgatatttaagtttgtatgctgtaaaattgaatcggattgatcatgtttctggtttatatctcctatcaaaactctataaaccataactatgtcggc

SEQ ID NO: 6512 - DNA, 1747 bp, Gossypium hirsutum
  Clone ID: GOSHI-09MAY01-C3742_1
caggcgacgagaggaacacgttagagtattagaggaagctaaggcgagaaactcagagctccagtcattgcatgaaactttaacaagggattcagaacttaaactccgagaagtaatggaaaatttcaacagcaaggattctgaaacaaaatctctgttcgagaaattgaaaacatttgaagatcagataaaggtgtatgaagaacaagttgctcaagcagctggacagtctgcgtcttcaaaagaagaaatggatcagagcttacagaaattggcttctctagaaagcacaaatgaacaactcaaaagcaagatatcggagttcgaaaataaagctcttcagtcttcctcagagaatgaacttttggttcagacaaacattcagttgaagggcagaattgatgagcttaaagaattgcttaattcagctctttctgagaaggaatcaactgatcaagagactgcttctcatatgagcacgattaaagaattatctgaccagcatacgaaggcctcagaacttcgagcagaagccgaatcacgaattgtggaagcagaagctcaattacacgaagctattgagaaatactcaaagaaagaatcagaatccaacaatctgattgaaaagttgaatgcgcttgaagtccaaattaaaacatacgaagaacaagctcatgaagcatccacaattgctgtatcccgacaagtagaggttgaagagactctttccaaattaaagcagcttgaaagctttgtcgaggaactgcaaaccaagtcggcacactttgaaaaggagagtggaggacttgctgaggcaaattttaagcttactcaggaactagccgaatacgagtcaaaactcggtgatttggaaggcaaattgaccgtagccttgaccgagaaggatgaaacagctgaacaacttcacatttcgaagaaagctatcgaagatttaacacagaagattacttctgaagggcagagtttacaatctcagatttcttcactaatggaggagaataacttgctcaacgaaacacatcagaacacaaagaaagaacttcaatctgtaatatcacagcttgaagaacaattgaaaaacgaaaaagaaaatgaagaatctctaaaatcagagattaacaatctcaaggctgagattgcggagagttccttactgcaaactcatgtcaaaaaacttgaagaacagttggtgacggttgaagctcaattgaaagaagaggttgaaagtgttaagacagccgcctctgtaagagaagctgaattaacttcgaaattagaggatcatgcacaaaagattagtgatagagatgttatcaatgaacaagtggttcaacttcaacgagaattacaacttgctgaaacaacgatcactcaacagaaggatgcagattctcagaaagagatggatcaagaagcagctttaaaacattccatcgaagagctcgaagccaaaaacaaagaagcattacacctcaagaaacaagtcaaagagttggaagattaattgcaagaagctgaagctaaaatgaaggttgcgagcagtgcagccggcaccgaagcaagatctttaaggaattccgagatctgtggatacatttacaccacaacgaagataaaaagtcgacccgtctgcagtggtctttttatagtaccaaaggggttcttggaaactaaatgtttgtgtcccttctaaataatgttgttaggagttatcagagttgtcttt

SEQ ID NO: 6513 - DNA, 330 bp, Gossypium hirsutum
  Clone ID: LIB3048-016-Q1-L1-F12
agacgataggatcacgttatagtattagaggaagctaatgcgacatactcatagctacagtcattgcatgaaactttaacaagggattcagaacttaaactccgagaagtaatggaaaatttcaacatcgaagatactgaaacaaattctacgctccagaaattgaaaacattttaaaatcaaattaaagtatttcaaaaaccatcttcctaaacaacttgtcaagcttcgttttcaaaaaaaggaattgatcaaaacctaccgaaatttgcttcttttaaaagcaccaattaaccacttaaaagccagatattcgaattccaaaattaa

SEQ ID NO: 6514 - DNA, 568 bp, Gossypium hirsutum
  Clone ID: GOSHI-09MAY01-C3712_2
cccacgcgtccgatcaaaactttgtttttgaaacaaagaaaggagagggaatttacaacagatattatggctcttcatgtctcttgggctttcgtttttggcattctgggaaacgttgtttcatttctggtttcccttgctcccctgcccacattttaccaaatatacaagaagagaacatcggaagggtaccaatcaatcccttacgtggtatcactcttcagtgcgatgctttggatttactatgcactccttaagaaggatgctatgcttctcatcaccatcaacactttctgcgttttcattcagactttttacattgttgtttacttttactatggcccaaagaaggaaaagttggtgacactgaaacttatcctcctcttcaatgttttcgggttcggagccatctgtttctcaactttcttccttaaaaaccctttgatccgtctccaaattcttggatacatttgcatgggattcgctttgtgtgtgttcgttgcacctctcggcattttgagaaaagtgataaaaaccaagagcgtggagtatatgccatttactttat

SEQ ID NO: 6515 - DNA, 1049 bp, Gossypium hirsutum
  Clone ID: GOSHI-09MAY01-C3712_1
gatagaaagagcttcttcactttgacaacaatactcactttctcttacagagattgagagaaaatcacaaacacacatttatatagcacagtgatcatcatggctcttcacttgtcttgggttttcgtttttggtattctaggcaacgctgtttcattcatggtttccttggctccactgccaacattttaccaaatattcaagaagaaaacatcggaaggtttccagtcgattccctacgtggtttcgctcttcagtgcgatgctttggatttactatgcactgcttaagaaagatgccattttcctcattaccatcaacactttctgcgttttcattcaaactttttacattgttacttacttttactacggcccaaagaaagaaaagatcgtcacggtgaagcttatgcttctcttcaacgttttcgggttcggagttatctttctcgcaacttacttcctaaaaaaacccttcccttcgtctcctgattttgggttacatttgcatggcattcgctttggctgtgttcgtcgcacctctcgccattgtgagaaaagtcataaaaaccaagagcgtggagtacatgccatttactttatcagttttcctcactttaggagcagtgatgtggttcttctacggccttttgttgaaggatatgaacgttgctgttcccaatgtacttgggtttatctttggaattcttcaaatgattctttacgccatatacaagaactaccccaagaaaatggtggaagatcccaagcttcaattatcggctcagcaagtagtcgtcgacgtcgtcaaactgggatcgacgacggtgtctctggaagtgaacgcggtgggtcctaaccccaacaatggtgacggaaccggtgaagctcaaaatatcaagactaacaacaccgcagatgcttcaaacgaagtctgaaagtggaattagaattattctaagcatgcaacgtcatatcgtgaggtttttggcatgggaaaatctgggtggaaacccatgcaaaaaaaaaatccccggatttatcttaatt

SEQ ID NO: 6516 - DNA, 544 bp, Gossypium hirsutum
  Clone ID: LIB3584-031-P1-K1-E9
aaaactatgtttttgaaacaaagaaaggagacgtattttacaacagactttatggctcttcagggcgctggggcttacgttaatggcattctggaaaacgttgtttcatttctggtacaccttgctcccctacccacattttaccaaatatacaaaaagacaacatcagaagggtaccaatcaatcccttacatggtatcactcttcacttcgatactttgcatttactatacactccttaagaaggatgctatgcttctcatcaccatcaacactttctgcgttatcattcatactttttacattttcatttactattactatggcccaaataatgaaaattatcttacactgaaacttatactcctcttcaatgttttctagtcccgagccatctttttatcaacttatttccttaaaaacactttgatccgtattacaaaattctttaatacattttccatgggaattcccttttgtttaatagttagttaacaaactcctatgacatttatgcagtaaaaactgattataaaaactcaat

SEQ ID NO: 6517 - DNA, 383 bp, Gossypium hirsutum
  Clone ID: LIB3165-058-P1-K1-B1
cccacgcgtccgtggaatcagccctagttgacaaatattcactttctctttcacagagagagagagagagagagagaaaaaagagagggtattctttacataatattcatctaatacaaataaaagatggctcttcacctttcttgggttttcgtttttggcatcctcggcaacgttgtttcatttatggtctccctttctcccttgccaacattttatcaaatctacaagaagaaaacatcagaagggttccaatcattaccctatgtggtatcactgttcagtgcgatgctttggatttactatgcacttcttaagaaggatgctatgctactaaattaccatcaacactttctgctgtttcattcaatctttttacattg

SEQ ID NO: 6518 - DNA, 853 bp, Gossypium hirsutum
  Clone ID: GOSHI-09MAY01-C3702_1
gaaactcaagaaacatgggacaagttctggttataacagtacttcagttctgcaactcatcaccattgtttcttgtctcgtggtgctctcctgttcaggatccgtcagtgcttacaagaactacacagtcggtggttcccttggttggtttgatgccctcgaaaagcctgatgttaattaccagaaatgggctgattccaagaacttcagcttgggagatttcctcatcttcaacacggataacaaccattcagtaatccaaacatacaatttcaccacatacaagttctgcgattacgacgacgctcttcaaaacgacacgatcgaatggtcagctgcagatccttcttccacggcgcctcattcaatctcagtagcggttcctctactgaaagaagggatgaactatttcttttccagtgactacgatggggagcaatgcaacaatggtcagcatttcaagataaacgtcacccacggccaagggctgccgaagagcttagatcagtcggatgatgcgccggcgcccaacagccctgattacaggggcgatgactccgcccctgaaaccatcgtgcctgccaacttcaatcaccccattgaagaggaaagcgataaggatgaagcttctggctcgggatcggtttattttaacacccaattctatgggtttttaatattcttacaaattgtttgcatatttttcaaaatttgatgctccagaattattatttttattactatattactatattctttttctccttatactttagggtttgcgagcgtgtgtttaggattatatatctggtttttgtaaaataacaaaagtagtaatataatataataattt

SEQ ID NO: 6519 - DNA, 765 bp, Gossypium hirsutum
  Clone ID: GOSHI-09MAY01-C3732_1
ctacttcttatcaacgcagaatatcttattttagatcgggatggctagtaattgctaagccgcgcgtcgccattgagcctctcgacaattccgttgtttccaaggtggtttctgattccgccaaggaatccgggaagcggactatctccactatgctagggattcttccatctgatcacttctccgtttcggtttccgtctccacccctcctcttcatcgccttctattctcttctatcatcactgggtatacgttgtggaacgcggagtatagggtttcactgatgaggaatctggaaagagcagcaccgggcgaggaggtggcgggggagacagaggaagctattaggaagcggcagggagaggtgtttgaggagaaaagggaggagagagcgagtcaaagtgatggctttcaagaattcgagaagattaggccgagggtttccggggaattgtcgccagaggctttgaagtatattgaaaaactgcaagcggagttatctgatgcggtggaggaactgaatgtggagaaggagaatgtgcaaatagaatgtgaaaaggaaaacaggaatgatttgttggagtatttaagatccttggatgccgacatggtcactgagttatcccaaccatcatcagtacaagtccaggaaacaatccaccagcttgttcaaaacatattgcaaaggccctttaagaatgagcttaagagggactcaggatagtgaacaaaggaaatcatcatcaagatgttgccgatgaaac

SEQ ID NO: 6520 - DNA, 425 bp, Gossypium hirsutum
  Clone ID: LIB3165-044-Q1-K1-E9
cccacgcgtccgcccacgcgtccgcccacgcgtccggaaattacgggtaagaaacggaaaacacaaaaaatcttgaagccctcaactctgagatggcatcgacgacagccaccgctcgagccgtcgtcttctcccgcatcaccaccttgtccgcaaaacctctcacaccttctctatctcgtttcttccgtaaccgtcacaaccgcgcattttccgccctaactgtcagctgcttaaacagtggcggagtctgcgacgatgactacttcgtatcaacgcagaaatcgaatttagatcgtggattgctagtaattgctaatatgttgaagaacattgagcctctcgacaattccgtagttccaagagggtttctgattccgccaaggaatccatgaagcggactatctccactatgctagggattc

SEQ ID NO: 6521 - DNA, 520 bp, Gossypium hirsutum
  Clone ID: GOSHI-09MAY01-C3692_3
ctcattaattttcaactgttttgtggattgtcttctacctatttacacaaccaataacacagtgagcaaacaaccttttcacaaacctcatcatcatcttcttctaaatctgtcgcctagaaaatgaataatcatcacggatttacggagaagaagcccaacactaagatcgtatgcaccttgggaccagcatcaagaccggtccctatgatcgagaagctgttgatggccggcatgaacgtcgctcggtttaacttctctcatggatctcatgcctatcatcaggagactcttgataatctcaggtccgccatggtcaataccggtgttctgtgcgctgtcatgctcgataccaacggtcctgagatccgtactggctttctgaaggagggaaaagttcagctgaaacagggtcaagaaattaccataactactgactatgatataaagggggatgaaaaactgatcagtatgagttataaaaagttggccgaagatgtcaaaccagggatggttatac

SEQ ID NO: 6522 - DNA, 657 bp, Gossypium hirsutum
  Clone ID: GOSHI-09MAY01-C3692_2
ggctaagtataggcctggaatgcccattttatccatggttgtccccgagatccagactgattcgttcgattggtcgtgcagcgatgaagctccagcaaggcacagcttagtgtatcggggtttgatcccagttttatatgctggatctgccagagcttctcatgaagagacaacagaggaagcattggagtttgctattcagcatgccaaggcaaagggattatgccaaaatggggattcgattgttgctctgcatcggattgggactgcatccgtgatcaagatcttgactgcaaagtgatttttggttcgcattttcaatgtcattttttgggtggttccctggtacaaggggtaagacactgctattcttatgcatcagctttttgatgttctctttttggatgagaaacaaaactcattaagatcacaaagtataatgtcacgactatttttggtgttccctggtaaaaagaaaaaaggaagtgtgatttttggttcacattttgaatgttttacgtaactatgtttttatggacattttgattcctttgaggcttgaaaacggctggtggcaacgcgtcgccccggccgctgtaactctgttggtaccccatgtttgatgcaaccgggggagtggctgtttaaaaagatttc

SEQ ID NO: 6523 - DNA, 1741 bp, Gossypium hirsutum
  Clone ID: GOSHI-09MAY01-C3692_1
ctaattttcaacctttactcttctgtgtgaggagaaaaaggaaaaacctttccacaaatctctatctgcatctgctttgaaactaaaaatggaaatcaataaccaccatgaaggaggtttcgaaatggagaagaagcccaagacgaagatcgtatgcactctgggtcctgcatccaggtccgtccctatgatcgagaagctgttgagggccggcatgaacgtcgctcgtttcaacttctctcatggatctcatgcctaccatcaggaaacccttgacaatctcagggcagctatgctcaacaccggtattctctgcgccgtcatgctcgataccaagggtcccgagatccgaactggttttcttaaggatggaaaaattcagctcaaacagggtcaagaaatcaccataacaactgactatagcataaagggtgatgagacactgataagtatgagttacaaaaagttggccgaggatgtcaaaccagggatggtcatactttgtgcagatgggacaatctcttttacagtcttatcttgtgacaaacaaaagggtttggttcactgtcgctgtgagaattctgcagttcttggtgagaggaagaacgttaatcttccaggggtcgttgttgacctcccaaccttgactgaaaaggacaaggaagatatcttggaatggggagttccgaaccaaattgacatgattgctctttcttttgttcgaaaaggatcagacctcgtggaggttcggaagctgcttggaaagcatgctaagaatattcttctcatgtcgaaggttgaaaatcaagaaggggtagcaaattttgatgacatccttacaaattcagatgcatttatggtggcacgaggtgaccttggaatggagattcccattgaaaagatatttctagcacagaaggtgatgatttacaagtgtaacatccaaggaaaacctgttgtcactgcaacacagatgttggaatccatgataaagtctccccggccaaccagggctgaggccactgacgttgccaatgcagttcttgatggcacagactgtgtgatgttaagtggtgaaaccgcagctggagcttacccggaacttgcagttcgaaccatggccaaaatatgcgtagaagcagaaagcacacttgattatggagatgtcttcaaaaggattatggaacactcaccggtgccaatgagtccattggaaagcctggcttcttcagctgttagaacagcaaattcagcaaaagcagctcttatattggtcttaaccaggggaggaagtaccgcaaagctggtggctaagtacaggcctggcatacccattttatccgtggttgtccctgagatccagactgattcgttcgattggtcgtgcagtgatgaaactccagcaaggcacagcttagtctttcgtggtttgatcccggttttatatgctggatctgcaagagcttctcatgaagagacaacaggggaagcattggagtttgctattcagcatgccaagacaaagggtctctgccaaaatggggattccattgttgcactgcatcggattggaactgcatctgtaattaagatcttgaatgtaaagtgaattgacttggtgatttccgcttcactttcagactttctgtccatggcactacttactttttcagttttagatgcaacaaacgtgattaacaagatgactaataaataaaatgggctgatgatttgcgttctt

SEQ ID NO: 6524 - DNA, 560 bp, Gossypium hirsutum
  Clone ID: GOSHI-09MAY01-C3112_9
caacaattggattctgaactggtccaaagccgcccacaggctggtggttcaagtttcaaatttgttcaaccaactatgatggcatattacggtgctctaaatggcagcatgaatcagtatgtttctagagaaaatccgagcgaagcccgtggtgttgaaattccccccctaaatccctcttatgcttttcccccagagcatgggaagaatactacccggtccgtaaaaatctattaacaccgaaggtgaggatgaataaaaatatggcctggatttcatttctccatctttttccctggtaaaagggaaggttaaaattgtattctgaaaattcggatttttctccatatgtatgtatgtatgtatgtaatgtatgtattagtttaccatctcagcttatctcaatcatgttgccaatcactgtttgtattaacttgggagtttgtacaaaagtggaacggatacaggtattatttttctcccaggaaaatgttgtaaaacaaattcttgaaatgatatttgtaagaatataatatatatgtattatccatcttgtggtt

SEQ ID NO: 6525 - DNA, 530 bp, Gossypium hirsutum
  Clone ID: GOSHI-09MAY01-C3112_6
ttggtgcgggtgttggtgaagtcgaaatgccgttctcttagccttgtgttctgggaattaagtaatatagtctgctttagtttcgttgatgatttctttgaatggggtttgattttctgcctcttaaacagctctggtttttttacttgtttcttgatgttgaatactattctttcctcgtctttttattctgtattgtgtgtcagtgtcatctgtatatgaatatctttttttcaagtactaatgtcgtaggcaaaaaacaagtactgctcttacagtccaaaattggaggagcatttctttgtaatagaatttgtaagattttcaaacaatatgaatggttgcttgcttggaacccctgttttgcttggaaaaaaaaaaaaaaaaaaaaaacaaataattaaatataagaacaccaaaaacaagtattgatagagaatctaaatccactatcggcataagagttcgctactagaaccctccatgtaaagggaaagactgtcaaggcacaagatttgggatacggaaag

SEQ ID NO: 6526 - DNA, 1040 bp, Gossypium hirsutum
  Clone ID: GOSHI-09MAY01-C3112_5
aagccctctcccggcttgtccctctttttattttcacaaaattatcgaattttcttccagtttttggaaaattttctcttctggatctatccacttcgggtttgagagggaagagatttatagagagtgatagagaggacgaaatggcgcatagagtagatcacgagtacgattaccttttcaagatcgtattgatcggcgattctggagttggaaaatcgaatattctctctaggttcacgagaaatgagttttgtttggaatctaaatccactatcggcgtcgagttctctacgagaactgtccaggtggagggaaagactgtcaaagcacacatatgggatacggctggtcaagagaggtatcgagctatcactagtgcttactacagaggagctgttggtgcacttcttgtctacgacataaccaagaggcaaacctttgataacgtccaaaggtggctgcgtgaattgagggaacacgccgattctaacattgtcgtcatgatggctggaaataaatctgacctgaatcatcttcgagctgtttctgaggtggatggtcatggtttggccgagaaggaaggtctttcatttctcgagacgtctgcgctggaagcaaccaacattgagaaggcattccaaactatattgactgagatttatcatatcatgtgtaaaaaggcattggcagcccaggaagcagcggctaccaccaagcttcccgtggcaaggaactaccattaatgtcgctgatgcatcaggaaacaccaagaaaggatgctgctctacataaataaataaataaggtgataggttatatttgctagcaagcaggccttatcatttctttattattcttctttctaaaccccttgttttttattctttcttttttctattcaaatgtttagctttgagagaggcttttagattacttatttttacgaaattgatttcatttttttgacaagtcacttgtactaaaagtgtgtctccttttatatttgctctccctatctttttcaacatgacaagatc

SEQ ID NO: 6527 - DNA, 1962 bp, Gossypium hirsutum
  Clone ID: GOSHI-09MAY01-C3112_3
cggccgcgtgggtcaaggcggagccttcaccgactactggttctcttatcaagcctcaagcagtacacgcctctgttgcttgtagtacatattcagcaaccactgcgtgttctaatgcttttgacgaaagaaatccaagcacctttgagtttagacctcatcctagatcaaatatggctcctgcagatttagacccgcagagaagtgagcaatctcggcagatccaaattcaatatcaggccgtatcattcaattcatcagcttcagttaagagtgagatggcaggctcctcgaatgtattgagcctttctgtacctgttcatacagctacttctgtggctagtgctcatgctggagtcgatgcagaggaattaaaccggcgcgggggcccccgcgggggcgggcccgcggggcagtctgatcatagaggagttgggcctgtgtcatctgaagatggatacaactggagaaagtatggacagaaacatgtgaaaggatgtgaatttccacgcagttattacaaatgtacacatcctaattgtgaagtgaaaaagctgtttgagcgatctcatgatggacagattactgagataatatacaaaggtacacatgatcatcctaaacctcagcctagccgccgatattcttctggtaatatcatgtctggccaagaagaaagatctgacaaggtctcatctttgaatggtagagatgacaagtcatattgcggttatggccagatggctcatagtattgagccaaatagtactgcagatatatctcctgtcacagctaatgatgataatttagatgaggttgaagatgatgatccattctcgaaacggaggaagatggatggtgggattgatatcactcctgtggtgaagccaatccgggaaccacgtgttgttgttcagactgtgagtgaagttgatatactggatgatgggtatcgttggcgcaaatatgggcaaaaagtagtgagaggaaatcctaatcctcggagttattataagtgcacaaatgccggttgtcctgttagaaaacacgttgagagggcatctcatgatccgaaagccgttataaccacatacgagggaaaacacaatcacgatgtgccaactgcaaaaactggtagtcatgatacagcaggaccagtagcaatgtgtgggccatcaagggttagatcagaagaaaatgatgccattagccttgatcttggtgttggtattagttccgttcccgaacatgcttcaaatgagcaacaacaattggattctgaactggtccaaagccgcccacaggctggtggttcaagtttcaaatttgttcaaccaactatgatggcatattacggtgctctaaatggcagcatgaatcagtatgtttctagagaaaatccgagcgaaggccgtggtgttgaaattacacccctaaatcactcttatgcatttccacagagcatgggaagaatactaaccggtccgtataaatctttttacaacgaaggtgaggttgaattcaaatatggactgggtttcatttctccttctttttactgggttaagggtagggtattatcggattttgcaatttcggttttctacatatgttggatgtatgatggaaaggatgttaagttaccatttcatctttcatataaggttttcattatttctgatttacttgtagtcttctatgattatctctattgtttttttctttctattattacatatattcctttttatgtattattaactttttctcctttttgatattttatatattaatattctttctatttttttaattttttttttatttttttctttatcaatatccttttatattgcacattaattttttttatttaccttatttttaatatcaattcatattccttttttattacatatattttttttcttttctttttttttatttcttaactttttttct

SEQ ID NO: 6528 - DNA, 1032 bp, Gossypium hirsutum
  Clone ID: GOSHI-09MAY01-C3112_2
cgtcattggtttttccgtctcctctcatttgattacactttttccttcttcttttttcagtctctctctctcctttttttccccctaaaattttattataataaatcctctaaaattatctgtttttcacattgataatcttctcttctcgatctatccgcttcgggtttgagagagaagggataaagaatatagagaaaaagagggtaaaatggcgcatagagtacatcacgagtacgattaccttttcaagatcgtgttgatcggcgattctggagttggaaaaacgaatattctctctaggttcaccagaaacgagttttgtttggaatctaaatccactatcggcgtcgagttcgctactagaaccctccaggtagagggaaagactgtcaaggcacagatttgggatacggcaggtcaggagagatatcgagccatcaccagtgcgtactacagaggggctgttggtgcacttatggtctatgacataacgaagaggcaaacctttgataatgttcagaggtggcttcgtgaattgagggaccatgcggattccagcatcgtccttatgatggctggtaacaagtccgacttgaaccatcttagatccgtttccgaagaagacggtcatgctgtggccgagaaggaagggctttctttcctcgaaacatcggcattggaagccaccaacatcgagaaagcattccaaaccatattgaacgagatctatcatattgtaagcaaaaaggcattggcggcacaggaagccgctgctagtgcctcgattcctggtcaaggaaccactattaacgtgggtgatgaatcggggaacactaagacagcatgctgttctacttaaaaaaaggtaattggttatatcatttcttgtacttactttttacttgattgtcatattttaaacaaaaccatgttgttagtagcttggaaaggtctgcatttttttttttggttatttttttaaattgacatgttttcttcaaaagtggaagattgaaagttgcgtttgga

SEQ ID NO: 6529 - DNA, 1048 bp, Gossypium hirsutum
  Clone ID: GOSHI-09MAY01-C3112_1
tttttctctcattcgtttaatctttttcagtatagtttctctaaaattatcaaattttttactttgagaaatttctcttctcgatctatccatttcgagtttgggaaaggagagacaagatagagagaaacagagagtgagaaatttggaatggcacatagagtagatcacgagtacgattaccttttcaagattgtgctgatcggcgattctggagttggaaaatcgaatattctctctagattcaccagaaacgagttttgtttggaatctaaatccactatcggcgtcgagttcgctaccagaactctccaggtggagggaaagactgtgaaggcacagatttgggacacggcaggtcaggagagatatcgagctataactagcgcttactacagaggagctgttggtgcacttcttgtctacgacataacaaagaggcaaacctttgataacgtccaaaggtggctgcgtgaattgagggaccacgccgattctaacattgtcgtcatgatggctggaaataaatccgacttgaatcatctcagagctgttactgaggaggatggtcaagctctggctgagagggaaggtctttcatttcttgagacatcagcgctggaagcaaccaacattgagaaggcattccaaactatattgactgagatctaccatatcataagcaaaaaggcattggcagcccaggaagcagctgctagtaccgcaattcccggccaaggaactaccattaatgtcactgatacatcaggaaacactaagagaggatgctgttctacttagaaaggtaataggttacatttgatgctgttctacttaaaaaggtgataggttacatttgagaaggtaaaaaatatttgctaggaagtaggcccttttcatgtttttgtcaatttttggctgagagagagacatgtaaaatacatatatatattttacttgaattgtgatatgaagcttgtgatgttttaaacaaccataaattgttggtagaaatagaatggaacgcctggttttactttgctctgtt

SEQ ID NO: 6530 - DNA, 558 bp, Gossypium hirsutum
  Clone ID: LIB3582-017-P1-K1-D9
cccacgcgtccgcccacgcgtccgcttttctctcattcgtttaatctttttcagtatagtttctctgaaattatcaaattttttactttgagaaatttctcttctcgatctatccatttcgagtttgggaaaggagagacaagatagagagaaacagagagtgagaaatttggaatggcacatagagtagatcacgagtacgattaccttttcaagattgtgctgatcggcgattctggagttggaaaatcgaatattctctctagattcaccagaaacgagttttgtttggaatctaaatccactatcggcgtcgagttcgctaccagaactctccaggttctcttggattcatcttcttatatgtttatttttcctgtcgaaaaatcaatagttatcgaagtttctaaaattttaccttatataattctctttacctttgatagtttaacgtgtgtttaaatacttctgatctgattcatatttggaattttttgcatgattaagttgactgcgagatcttttgttaattatctggataatttattagcctatgcc

SEQ ID NO: 6531 - DNA, 433 bp, Gossypium hirsutum
  Clone ID: LIB3584-032-P1-K1-D5
gttgatgatttctttgaatggggttggattttctgcctcttaaccagctctggtttttttacttgttgctggatgttgaatactattctttcctcgtcttttaattctgtattgtgtgtcagtgtcatctgtatatgaatatctttttttcaagtactaatgtcgtaggcaaaaaacaagtactgctcttacagtccaaaattggaggagcatttctttgtaatagaatttgtaagattttcaaacaatatgaatggttgcttgcttggcaaaaaaaaaaaataaaaaaagaaaaaacaataaaaaaacaaaaacaaaaaataatattaaatgccacctttgactggtagagatgacaagtcatccaacatgtatggccagatggctcatactattgaaccaaattattcatcatattcatcttctgttgcgg

SEQ ID NO: 6532 - DNA, 554 bp, Gossypium hirsutum
  Clone ID: LIB3584-032-P1-K1-D11
gacgaattaaaccagagtgggaactcaaatagtgggatgctgtcagggcagactgatcatagagtaagtggctcatccacgatatcagatgatggatacaactggagaaagtatggacagaaacatgttaaaggaagtgaatttccacgcagttattacaaatgtacacatcctaattgtgaagtgaaaaagctatttgagcgatctcatgatggacagattacggagataatatacaaaggtacacatgatcatcctaaacctcaacctagccgccggtattcttctggaaatacaatgtctgtacaagaggaaagatttgacaaggtgccacctttgactggtagagatgacaagtcatccaacatgtatggccagatggctcatagtattgaaccaaataatacagcagattcatctccggtcacagctaatgatgataatgtggatgatgttgatgatgatgatcctttctcaaagcgaaggaagatggatggggggatacttttgtatgcattaaccctaaaaaaaattacttaaatgattttcagcat

SEQ ID NO: 6533 - DNA, 354 bp, Gossypium hirsutum
  unsure (1)..(354): unsure at all n locations
  Clone ID: LIB3147-020-Q1-K1-E10
cggacgcgtgggcggactcgtgggaaaaatatggactggatttcatttctccatcttttgcactggtaaaagggaaggttaaaattgtattctgaaaattcggatttttctacatatgtatgtatgtatgtatgtaatgtatgtattagtttaccatctcagcttatctcaatcatgttgccaatcactgtttgtattaacttgggagtttgtacaaaagtggaacggatacaggtattattttctcacaggaaaatgttgtaaaacaaattcttgaaatgatatttgtnagaatataatatatatgtattatccatcttgtggttnanaaataaaacaaaatgggatttaaaa

SEQ ID NO: 6534 - DNA, 346 bp, Gossypium hirsutum
  Clone ID: uC-gsronu33B163b05b2
ccctcgcgtccgcaaaaactggtagtcatgatacagcaggagcagtagcaatgtgtgggccatcaaggattagatcagaagaaaatgatgccattagccttgatcttggtgttgggatcagttccgaccccgaacatgctttaaatgagcatcaacaattgcattctgaactggtccaaagccggccacggactggtggttcaagtttcaaatttgctcaaccatctatgatggcttattacggtgctctaaaaggcggcttgaatcaatttgtttttagagtaatttactgtgaaggccgtctgttttcctttttcacacttttaaccttttttttttcttttct

SEQ ID NO: 6535 - DNA, 662 bp, Gossypium hirsutum
  Clone ID: GOSHI-09MAY01-C3042_1
ggaactggatgcttcggaaaacagtaaagaattaagaattactcgactgcgttatgtggatgagcagctaaggcaacagagagctcttcagcagtttggtatgatgcaacaacatgcatggaggcctcagagagggctgcccgaaagctctgtttcaatacttcgtgcttggctatttgagcattttcttcatccctacccgaaggattctgataagatcatgctagcaagacagacaggcttaactagaagtcaggtttcgaattggtttataaatgctcgggtgcgtctttggaagcccatggtggaagagatgtacaaggaagaatttgatgcagaaatggactctaattcttcatctgataatgtagtcaaagcagcaacaaaaggcgatacaatgacctctgaggacagaggtgaagatttgcaacaaagtgggagttcatcagcgacagagagatgtagcaacggacagttgatggattccaaatccgagaatgttcacgatgcagatatctcagggtcaactattggagccggattcctgaatgcctcgtgtggagaagccgaaaccgaatacgtgttacagacgctaagggaggagcagaggcttactatggatgactctaatatcttccctgacgcaagtgttcatctggatg

SEQ ID NO: 6536 - DNA, 1063 bp, Gossypium hirsutum
  Clone ID: GOSHI-09MAY01-C3012_1
accttttaattttaaaaaagaaacagaacccttcactgtctttgggttcattaagcaaccgcccaaaccacatcaatttgatggctgacggagcacgaacgggggtcagatcttgctgaagaatgcctcgcccccgccgcgccggtaagagtactcctttccccctttttttttaaaaaaaaaactttaaaatcctatactattctgtcaaaaatgaggcgaaatccgacgaagagcaagagaaaacaaccctagcccgaatcaccatattcctgagacatgagggctttcatcggtgttgtttcaagtatccttttcgttttctatgctaaaataatgcaagcaaatcgatggaaaagagggaaagatttgaaatcacatttagataacttttttgatttcttttctactgtttagaatatgtattgtagtgtgcgtatctcatccccacaaaaaaagagagactttacaatcgaaatacacagggctttatagccaaaatcccaaaaagatcaaaacataaaaaataaaaaatacaacttttctttgtttttctatttgctactgctgtggtttgtctgttcttcgcaggtacggggtgcgttggcatcgtacggaggctgtgctggcgcgggcgtggctgctggagggtacggaggcggtacggaggctggggctgctgcggcgcaaacagattgctagggttctgccctatttttgaatcttgggccacttgggctgatataatttggactagttttattagttttgggctatgggtcatgtaactgggctatggggtattgggtttgtgacttgggtcttggattttaattttgggtttagggtcatgtactaattttaggttttggactgcaatgatttggtttgtaaaaggatactaaaatgggctgtttgtgttttaaactttttgtttattgatttattttatattttgttttggtcttttaaaaaaaaaaaaaaaaaaaaaaaaaaaaaaaaaaaaaaaaaaaaaaaaaaaaaaagggaggggagagaaaaaaaaaaaaaaaaaaaggggagg

SEQ ID NO: 6537 - DNA, 451 bp, Gossypium hirsutum
  Clone ID: LIB3146-056-Q1-K1-F12
ggaaaacccggcccgacccacgcgtccgatgcaagcaaatctatggaaaagttttatttatttgaaatcacatttagataacgggttggatttcttttctactgtttagaatatgtattgtagtgtgcgtatctcatccccaaaaaaaagagagactttacaatcgaaatacacagggctttatagccaaaatccgaaaagatcaaaacataaaaaataaaaaatacaacttttctttgtttttctatttgctactgctgcggtttgactgttcttcgcaggtacggtgtgcgttggcatcgtacggaggctgtgctggcacttgcgtagctgctggagggtactgaggcggtactgaagctggtgctgctgctgcgcaaacagattgctaaggttctgccttatttttaatcttgggccacttgggctgatataaattggactagtttta

SEQ ID NO: 6538 - DNA, 776 bp, Gossypium hirsutum
  Clone ID: GOSHI-09MAY01-C3332_2
cggacgcgtgggaaacaatcgtatgacccttttgattcaaaaaaaaaaaaaaatccatttcctcgaacgacactttgaccctggtctacctcgtctccgttctttgccgatcggacctttcgaccggtctgtgttaaagacagatcgagattttattgatggggacttcatctggttctaatattaaccaccagcatatgtgcgaagatgctacccccacgccaacaacaacaacaacaacaacaaccagggagcttgcaaacttcgttgtccttaatctccttagatcctcacacatcgtctaatgcccaagagcccagatttaactcggataacattcatgagtctccaactgagagtgctagctcacgagagacttggcctactgctgatgctatcacaacaaagaaaatggtaaatgggaaaactgaaaatgattgcactgagcagtctgtcattcgtcgtgtctctaatgctgaaaagataactcttcgagacattgctagagaaagagttggatgttatatctgaaaagatgcatcacctacctgatgagtttctagatgagctaaagaatcaactcaagattattctggaaggcatggggggttcgcaaaaccataggagttttaaattctaaaaaacttgttaaagcagatatgatttaccagcaaagacttgattagagcttaccgagcacacctggaaaaactcgttgcaaaaattatggaaatccaagacttacgtgcatcaaaattagtctatctcaatcttag

SEQ ID NO: 6539 - DNA, 1769 bp, Gossypium hirsutum
  Clone ID: GOSHI-09MAY01-C3332_1
cccacgcgtccgcccacgcgtccgcccactcgttcgcccacgcgtccggtgtcacagcaaagaagatggaaaatgggggaagtgaaaatgactgccctgagcagtctgtcattcgtcgtgtctctagtgctgataagataactcttcgagacatcgctagagaaagagttgatgttatctctgaaaagatgcatcgcctacctgatgagtttctagatgagctaaagaatcaactcaaggctattctggaaggcaatggagggtcacaaaacagggaagagtttttgattctgcagaagcttgttcaaagtagatctgatttgacagcaaagacattgattagagcacaccgggcacagctcgaaatcctcgttgcaataaatacaggaattcaggcattcctgcatccaaacatcagtttatcccaaacttccctcattgaggtttttgtgtacaaaagatgcagaaacattgcatgtcaaaaccagctacctgcagatgactgcacctgtgaactgtgcgccaataggaatggtttttgcaatctatgcatgtgtgtcatctgcaacaagtttgattttgaattaaatacctgccgctggattggttgtgatttatgctcccattggactcatactgattgtgctattcgtgatgggcaaatttgtatgggcccttctgttaaaagtggatcaggtcctactgaaatgctttttcgctgccgtgcttgcaatcgaacgtctgagctgtttggttgggtcaaagatgtcttccaacattgtgctccagcctgggatagggaggctcttatgagggaacttgattttgttagtaggatttttcgcggaagtgatgaccctagagggaagaaactcttctggaagtgtgaggatcttttggaaaaaatgaggggtggacaagcagaatccactgcttgcagatcgatattaatatttttccaagagcttgatatggattctccgacaagtctggaaaatggggaaggtggacgtctgatagcaccacaagaggcgtgcaatcgaattgcagatgtagtccaggaggccataagaaagatggaaatggtggctgatgagaagatgaggatgttcaagaaagctcgcttggctcttgatgcttgtgatcgggagcttgaggataaggccaaggaagtagcagaactgaagctggagagacaaaaaaagaagctgcaagtagaagagctggagaggattgtcaggcttaaacaggcagaggctgatatgttccagcttaaggccaatgaggcaaaacgagaggctgagaggcttcaaaggattgcacttgcaaagtctgataaatcggaagaagagtatgctagcagttacctgaaactacggttgagtgaggcagaggctgagaagcaatatttgtttgaaaaactaaagctgcaggagtcctcacgggcatcgcagagtagtagtggaggtgacccttcacttatgtattccaaaatccgtgatctgctccatgggtacaatatacatccccgctgaaacagagtctcagccaaatgagcgccatggctttagagcaaatccctgactgtctgatgtgcgagttagaatatgttcgctttgttggtcaattagtgtgttaaggtttgctgtttcattctaatgtatgaaaccttcaatgaattgtcagttaatagtttattatttgtcgtatgatatgttgtcttcatgtacgaacttcattctgtggcttcgaatgtgcaatgagaaatc

SEQ ID NO: 6540 - DNA, 562 bp, Gossypium hirsutum
  Clone ID: LIB3583-018-P1-K1-G9
cccacgcgtccgcccacgcgtccgcccacgcgtccgatctggttctaatattaaccaccagcattcatcgaagatgttgcccccacggcaacaaccacgaccagggagcttacaaacttcgttgtccttagtctcctctgaacatcgcttgtcgcctgatgctcaagaacctagatcgaactcagataacgttcacgaatccccaactgagagtgctagctcacaagagacttggcctactgctgatgctgtcacagcaaagaagatggaaaatgggaaaatagaaaatgactgccctgagcaatctgtcattcgtcgtgtttctagtgctgataagataactcttagagacatcgcaagagaaagagttgatgtgatctctgaaaagatgcatcgcctacctgatgaacttctagatgagctaaagaatcaactcaaggctattctggaaggcaatggagggtcacaaaacagggaagagtttttgattctgcagaagcttgttcaaagtagatctgatttgacagcaaagacattgattagagcacaacgggcacagctc

SEQ ID NO: 6541 - DNA, 423 bp, Gossypium hirsutum
  Clone ID: LIB3272-008-P1-K1-F4
gctccggtcattggtcaatctcttcttctctctctccgttctgaccgtttcgatccaatcttcgttaaagagtaatcaagattttatttatgggaacatcgtcgggttctaatattaaccaccagcattcatcgaagatgttgcccccacggcaacaaccacgaccagggagcttacaaacttcgttgtccttagtctcctctgaacatcgcttgtcacctgatgctcaagaacctagatcgaactcagataacgttcacgaatccccaactgagagtgctagctcacaagagacttggcctactgctgatgctgtcacagcaaagaagatggaaaatgggaaaatagaaaatgactgccctgagcaatctgtcattcgtcgtgtttctagtgctgataagataactcttagagacatcgcaa

SEQ ID NO: 6542 - DNA, 852 bp, Gossypium hirsutum
  Clone ID: GOSHI-09MAY01-C3282_1
cccacgcgtccgctctcaaaaaaaatctgaggaacagtgacactgaaaaaacagcaaaactaacgtcataatgttatgtttcagagcaaaccctcctacattgtttcttctttttcttctctctttgtttcttttccgacctgaagtagtttctgaagcctcaattttcccaacttcacacatccaagggtatcataaaagcttagtttctggggagaaagagcagggtgaagtgttgccatggaggaagatagaaaggaggaaccttgtagagggaaatgaaggagccaacaactcttctttgattttggctgaaaagaggactcagaggaaagaccctcttaatgattttaagaagtacactggtggctggaacatcagcaatcagcactattgggcttctgtgggttttacagcggctccattctttggcattgctggaatctggtttgtgttattcgcgctatgcttgttcgtcatatgcatccgtcattgttgttgtcaactagattcttatggctactctcgaatagcttatgctctatctcttattttcctcatactcttcaccattgctgcaattgtcggctgtattgtgctgtacatcggtcaaggaaaatttcatgccagtacaacgaacacactggattttgctgttcataaggcagatgttacggctgaaaaccttaggaatgtgtcggattatctttctgcagctaaaacaattagtgtggattcaactattctatcacctgatatccaaaaaagcattgatgatgttgtcaagaagatcaacgcttctgcttcgacactttccactcaaacaggtgataataaagacagaattcaaca

SEQ ID NO: 6543 - DNA, 603 bp, Gossypium hirsutum
  Clone ID: GOSHI-09MAY01-C3252_1
ggccaatcttgttcaaaacccacttggactacttttcggcatgctattgcttcagccgcaaaatcagaaaaaaaccccttgacgaatctccgagcaagataataatactgccccttcttcatttctgaccacaatacctgaagttgactagtggagagtcccatcatacgcgccatcgaagttaatctttacaaactccttagatggcccaaagtctgcaacagtaggggcgacgttggcttggtgtaaactgatcaaaggtccaggacattaacgaaaaatatggttaaaatttctgttctttctttacatcgggggcatctagtattgttgacgagaatgcatattaaccttcgtaggcaaatagttccatgagattctctagattgtaacatttattttagttggtagcttaagaagccaaagtgttttgtaaaaatttctgtaggcggtttgtaaagcataagctctaggattatctttcaaattttgtaatagtttatagatgctacgaaccgaaaaatctcctaagtattcgcctccctagacaataagatcgtcgtgaggcgtgcgtgccagagggatccgaaggattttgccagc

SEQ ID NO: 6544 - DNA, 1405 bp, Gossypium hirsutum
  Clone ID: GOSHI-09MAY01-C3242_1
atttagctaatcaataagaacagctagtgtgtattttcgatgggaagatcttcccccattcgcgtcatctcttctctcttttcatactctccgatctcattgactcacaaatgaatccttccattctatcaaacgttcctttagatctctatcccatgtttcagatctctcttctgtgattcagttttttgacgtttttagaaagaaaaagaattatcttttgattaaatctcacgatccctcgattttctctcacaaacccagttttttctttcatttttcgtaatgggtttcactccaattcgctttctcttcattgtttcctttttcttcttcgttttcgcttccgttactttttctcaggattcaggttttcaagctgagaaggaggaatctgatgggtcaattaaagatctcggccgccgcggcatgattgtttcaaagaactccgagaatggtgtactagaccagaaggtcggtaccgattccatagggtctaatcttggtttcgatccagctggtctcggcgtccttgatgcattctttgcaagtttttccatgataattgtcagtgagattggagatgaaacttttataatagcagctcttatggctatgcgacacccaaagtcaactgttttatccggtgcattagctgccctgtttgttatgacagtactttccacgggaagtcggcaaaatggatccgtaacctcgggaaaaggattgtaccgaatttgatatcaaggaagcacacaaatagtgcagctacagttctctatgcattttttgggcttcggttactttacattgcttggagagcagatacaaaggggtctcagaaaaaggaaatggaagaagtagaagagaaacttgagactggccaagggaagacatattaccggcgctttcttaccagattttgtacacctatctttttggagtcatttattttaacatttctagccgaatggggggatcgaagccaaattgccacaattgctctagcaacacataaaaatgcagtgggggtagcggtgggagccataataggacacaccatctgtacgtcactggccgtggtgggagggagcatgttggcggccaagatctcgcagcgaacagtggccgcaatcggcggctttctcttccttggcttttccctttcctcgtatttctatcctcccctatgatgatttgtaggttaaacatgattcttttgaagaacccaactcccgttgctcctttcaattcaatttttctcattgtttttgcctttatagtttatatatgcaacactgaaagtgttttatactaactggttaaaaaccagatcaatgtccttttccttttttttgtacacatgcatacatgtatggtttcttagggtaaggtgttatcaatc

SEQ ID NO: 6545 - DNA, 442 bp, Gossypium hirsutum
  Clone ID: LIB3197-031-Q1-M1-C9
cctttttcttcttcgttttcgcttccgtgtggttttctcaggattcaggttttcaagctgagaaggaggaatctgatgggtcaattaaagatctcggccgccgcggcatgattgtttcaaagaactccgagaatggtgtagtagacgagaaggtcggtaccgattccataggtactaatcttggtttcgatccagctggtcttggcgtccttgatgcattcgttgcaagtttttccatgataattgtcagtgagattggagatgaaacttttataatagccgctcttatggctatgcgacacccaaagtcaactgttttatccggcgcattagctgccctgtttgttatgactgtactttccactggactaggtaggattgtgccgaatttgatatcaaggaagcacacaaatagtgcagctaccagtctctattgcatttt

SEQ ID NO: 6546 - DNA, 659 bp, Gossypium hirsutum
  Clone ID: GOSHI-09MAY01-C3262_1
caatattgtgagagaaaatatggctcaggccactggaaaagtgtgtgtgacaggagccggcggctaccttggctcttgggttgtcaagcatcttctctccaacaactacacagtccacggcaccgttagacaacctggggatgccaaatatgcccatttgaatcaacttgagagagcatctcacaacctccaactcttcaaggctgatgttctggattacgattctctttgttccgccattacaggctgcaccggtgtcttccatgttgcctctcccgttccctccaccatcgttcctaatccccaggaggaagtgattgaaccggctgtaaagggcacacttactgtgctcaaagcatgtgttgaatccaatgttaaacgagttgttgttgtgtcttctgtgactgctgtttccttgaaccctaggtggccggtgggtcagatcaaggatgaggcttgctggtctgacaaggaatactgcgcagcaacaaagaattggtattgcctttcaaagacagaagcagagagtgaggcttttgagtttgcaaaaaagtctggacttgacgttgttactgtttgtcctactctcatatgggggccaactttgcagtccaccatcaatgctagtagcaagggttttattaatcttttaaaagagg

SEQ ID NO: 6547 - DNA, 557 bp, Gossypium hirsutum
  Clone ID: GOSHI-09MAY01-C3232_2
gcctttgaactctttggtctttggcttatctatcatttttgcttcacagattgttttgaaaaacaccatctttcttgtgaattctgcaacctttggagtaacttaagaagaaatgggggaaaagagtttaattgccaaggatgtcaccgaattgatcggtaacacgccactggtatatctcaacaatgttgtagatggatgtgtggctaaaattgctgccaagttggaggcaatggaaccctgctccagtgtcaaggacaggattggatatagtatgattgcagatgcagaggagaagggtctcattgtaccaggcgagagtgtgctgatcgagccaactagtggtaataccggaatagggttggcattcatggcagctgctaagggttacagactcataattacgatgccttcttcaatgagtttagaaagaagaatggtcctccgagcttttggagctgagctggttcttacggatccagcccggggcatgaagggggctgttcaaaaacctgaggaaattatgtcaaaaactcctaattcttacattcttcaca

SEQ ID NO: 6548 - DNA, 1347 bp, Gossypium hirsutum
  Clone ID: GOSHI-09MAY01-C3232_1
ttatatatctgtcaattatagtttttgtttgtgtttttaagattggatttatgggtttttttctaacttaagaagaatgggggaaaagatttaattgccaaggatgtcaccgaattgatcggtaacacgccactggtatatctcaacaatgttgtagatggatgtgtggctaaaattgctgccaagttggaggcaatggaaccctgctccagtgtcaaggacaggattggatatagtatgattgcagatgcagaggagaagggtctcattgtaccaggcgagagtgtgctgatcgagccaactagtggtaataccggaatagggttggcattcatggcagctgctaagggttacagactcataattacgatgccttcttcaatgagtttagaaagaagaatggtcctccgagcttttggagctgagctggttcttacggatccagcccggggcatgaagggggctgttcaaaaagctgaggaaattatgtcaaagactcctaattcttacattcttcagcaatttgaaaaccctgccaacccaaagatccattatctgacaaccggaccagagatatggaaaggcagtggaggaaaggtagatgtccttgtctctggtatcgggactggaggtactgtaacaggagccgggaagtatctgaaagagcagaatcctgacattaagctcgtcggtgtggaaccagttgagagtgcagtgctttctggagggaaacctggtccacataagatccaaggaattggtgctggcttcatccctggggttttagatgtcaatttaatcgatgaagttgttcaaatatcaagtgaagtagctattgaaactgcaaaacaacttgctctgaaagaaggattgttggtaggtatatcatctggtgctgccgccgctgccgcgattgagatagccaagaggccagaaaatgccgggaaactcattgttgtggtcttccccagctttggagagcgatacttgtcttccgtgctgttcgagtccgtgaaacgggaagcagagagtatggtgtttgagccttgagatgaaacatggagaaggtaacctattgatcaagcaacattaccaactttccccattgatggttcttgttttcttctagggttatataaaaaaaaaagaatgtgtttggacatggtgttgaaccctgtttgttgctgttcactgtatttcttttcaaagttttaacacatattaataaatatgttacattagaataaatattaatcgtgtttatggaggtgcagtcgctcaatgtttgaatttgattccagataaatgtgggattgtttgaaataataaataagattagttcaagct

SEQ ID NO: 6549 - DNA, 472 bp, Gossypium hirsutum
  Clone ID: LIB3189-039-P1-K1-A5
aaaatgtgataatatacaaacagctataaagtagctttcctgtctatcagctatctcgagcaacttaagaagaaatgggggaaaagagtttaattgccaaggatgtcaccgaattgatcggtaacacgccactggtatatctcaacaatgttgtagatggatgtgcggctaaaattgctgccaagttggaggcaatggaaccctgctccagtgtcaaggacaggattggatatagtatgatcgcagatgcagaggagaagggtctcattgtaccaggcgagagcgtgctgatcgagccaactagtggtaataccggaatagggttggcattcatggcagctgctaagggttacagactcataattacgatgccttcttcaatgagtttagaaagaagaatggtcctccgagcttttggagctgagctggttcttacggatccagcccggtgcatgaaaggggctgttcaaaa

SEQ ID NO: 6550 - DNA, 365 bp, Gossypium hirsutum
  Clone ID: uC-gsronu33B104b07b1
cccacgcgtccggtcttccccagctttggagagcgatacttgtcttccgtgctgttcgagtccgtgaaacgggaagcagagagtatggtgtttgagccttgagatgaaacatggagaaggtaacctattgatcaagcaacattaccaactttccccattgatggttcttgttttcttctagggttatataaaaaaaaaagaatgtgtttggacatggtgttgaaccctgtttgttgctgttcactgtatttcttttcaaagttttaacacatattaataaatatgttacattagactcaaaaacaaaatattataattatatctcatcatatttaaaaattaattttatatctcaataaaatttg

SEQ ID NO: 6551 - DNA, 2303 bp, Gossypium hirsutum
  Clone ID: GOSHI-09MAY01-C2_2
ctttcttctctcggacgcgtgggcttgagtagtttctttgcttcactgatttgttctctcgattcaaacactagggtttgatcgataattttattcatattttcctttacttcgattgcaattattcagatcttcaaaatccgagctattttctttcatttaatctgaaattggttggattttccttttaattttgtttaatttaatctaagaaagaagggggaaaaaatgccggcagtttacggatccagattgacgactttcgaggattcagagaaagagagcgaatacggttatgttcgtaaggtgtctggaccagtcgtcgttgctgatggaatggctggtgctgccatgtatgaattagtccgtgttggacatgataatctaattggtgaaattattcggttggaaggagactctgctacaatccaagtttatgaagaaacagctggcctgatggttaatgatccagttctgcggacacacaagcccctgtctgttgagttgggaccaggaatattgggaaacatttttgatggcattcagaggcctttgaaaactattgccaaaagatcgggtgatgtgtatatccctagaggagtttctgtcccggctcttgacaaagatgctctttgggactttcagcctaaaaaaatcggtgagggagaccttctaactggtggagacttgtatgctaccgtctttgaaaacagtttgatgcaacatcatgttgccctgcctcctgatgcaatggggaagataacttacattgctcctcctggtcaatattctttgaaggataccgtgctggaacttgagtttcaaggtgtcaaaaagcaattcaccatgcttcagacatggcctgtacgtacacctagacctgttgcgacaaaacttgctgcagatacccctctgcttactggccagcgtgttcttgatgctctattcccctcggttcttggtggaacttgtgctattcctggtgcttttggctgtggcaaaactgtgattagtcaagctctttctaagtactcgaattctgatgctgttgtctatgttggttgtggggagcgtggaaatgaaatggctgaggttcttatggatttccctcaattgacaatgacattgcctgatggtcgtgaagaatctgtcatgaagcgcacaacacttgtggctaacacttctaacatgcctgtggcagctcgtgaagcctcgatttacacggggatcactatagctgaatacttcagagatatgggctacaatgttagtatgatggcagactcaacatctcgatgggccgaagcattgcgtgaaatttctggacggctggcagaaatgcctgctgatagtggatatcctgcttatctggctgctagattagcctcattttatgaacgtgctggtaaagttaaatgccttggtgggccagaacgtacaggtagtgtgacaattgttggtgctgtttctcctcctggaggagatttctctgaccctgtgacatctgcgaccctcagtattgtccaggttttctggggtcttgacaagaaacttgctcagaggaagcatttcccttctgtcaactggcttatttcatactcaaagtactcaggggcactggaatctttctatgagaaatttgatcccgactttattagcattaggactaaggcccgagaagtgcttcagagggaagatgatttgaatgaaattgtccagcttgtaggaaaggatgctctagctgaaacggataagatcacactagaaactgctaaacttttaagggaagattatcttgctcagaatgcttttactccatatgacaagttctgtccgttctacaagtctgtttggatgatgcgcaatattgttcatttcaatgctttggccaaccaggcagtggagaaagctgccgggatggacggtcagaagataacatacagtcttatcaagcatcggctaggagatctcttttatcgtttagtgtcccaaaaatttgaagacccagcggaaggagaagaagccctggtggcaaaattcaaaatgcttaacgaggatcttacggctggtttccgtgcattggaggatgaaactaggtgaacaaaagtgttaaagattagactttctccctacctatcctagtccaggtttctctctcttgtgtcttgctagatgcatgtcgtgccggcgttgtacctttttgttggcatgatctctagagtggtatttgctgcgaatttggtatttattactttctggcctttccctttttgacagcatgaaactggatccttatttttatt

SEQ ID NO: 6552 - DNA, 2414 bp, Gossypium hirsutum
  Clone ID: GOSHI-09MAY01-C2_1
cggacgcgtgggtccgagagtagtcatttttctttgcatcactgcatttttctctcgattgagcctctagggttttgaaagatacttagtatcttttttttccttctctactacaatcgaatcgactctactagtttcatcagatcttgaaatatccaagctgaactccttcgctcgatcaaaacttgatcggattagtttcattcttgtctaatttcttttgagtaagaaagggacaaaaaaaatgccggcagtttacggagccagattgacgacgtttgaggattcacagaaagagagtgaattcggttatgttcggaaggcgtcaggaccagtcggtgttgcagatggaatggctggtgctgccatgtatgaattagtccgcgttggtcatgacaatctgattggtgaaattattcgcgtccgcccacgcggccgggagactctgctacaatccaagtttacgaagaaacggctggtctgatggtgaatgatccagttctgcggacacacaagcctctgtcagttgagttgggaccaggaatattgggaaatatttttgatggaattcagaggcctttgaaaactattgctaaaagatcaggtgatgtatatatccctcgtggagtctctgtcccggctctcgacaaagatactctttgggaatttcagccgaaaaaaataggtgagggggaccttttaactggtggcgacctttatgctaccgtctttgagaacagtttgatgcaacatcatgttgcccttcctcctgatgcaatgggaaaaatcacttacatagctccccctggtcaatattcattgaaggatactgtgctggaacttgagtttcaaggtgtcaaaaagcaattcaccatgcttcagacatggcctgtccgtacacctagacctgttgcaacaaagcttgctgcagatactcctctgcttaccggacagcgtgtacttgatgccctattcccttcggttcttggtggaacttgtgccattcctggtgcatttggctgtgggaaaactgtgattagtcaagctctttccaagtactcgaattctgatgctgttgtctatgttggttgtggggagcgtggaaatgaaatggctgaggttcttatggatttccctcaattgacaatgacattgcctgatggtcgtgaagaatctgtcatgaagcgcacaacacttgtggctaacacttctaacatgcctgtggcagctcgtgaagcctcgatttacacggggatcactatagctgaatacttcagagatatgggctacaatgttagtatgatggcagactcaacatctcgatgggccgaagcattgcgtgaaatttctggacggctggcagaaatgcctgctgatagtggatatcccgcgtatctggctgctagattagcctcattttatgaacgtgctggtaaagttaaatgccttggtgggccagaacgtacaggtagtgtgacaattgttggtgctgtttctcctcctggaggagatttctctgaccctgtgacatctgcgaccctcagtattgtccaggttttctggggtcttgacaagaaacttgctcagaggaagcatttcccttctgtcaactggcttatttcatactcaaagtactcaggggcactggaatctttctatgagaaatttgatcccgactttattagcattaggactaaggcccgagaagtgcttcagagggaagatgatttgaatgaaattgtccagcttgtaggaaaggatgctctagctgaaaccgataagatcacactagaaactgctaaacttttaagggaagattatcttgctcagaatgcttttactccatatgacaagttctgtccattctacaagtctgtttggatgatgcgcaatattgttcatttcaatgctttggccaaccaggcagtggagaaagctgccgggatggacggtcagaagataacatacagtcttatcaagcatcgtctaggagatctcttttatcgtttagtgtcgcaaaaatttgaagacccggcagaaggagaagaagctctcgtggcaaaattcaaaaagcttaacgaggatctgactgctggtttccgtgcactggaggatgagactaggtgaacggaagtttaaagatttgactttcctggccccaatgtttaaattgtccggctaaaatcactaggctctcgctttctttgtttccgtgtccttgtttatctgggtagatgcatgttgtgcacgcgttttagcttctgttggcctgaattctagagtgctctagctttgaattcgttattatgtattattattgtttgcacttttcctttttgacagcaggagattggaaccgtaatttattatttcatgtactttttgcaataaaaatgttcatttattatttaaac

SEQ ID NO: 6553 - DNA, 953 bp, Gossypium hirsutum
  unsure (1)..(953): unsure at all n locations
  Clone ID: AI726015.1
agaatttgttctctcgattcaaacactagggtttgatcgataattttatttataatttcctttacttcaattgcaattattcagatattcaaaatccaagctattttctttcatttaatctgaaattgattggattttccttttaattttgtttaatttaatctaagaaagaagggggaaaaatgccggcagtttacggatccagattgacgactttcgaggattcagaaaaagagagcgaatacggttatgttcgtaaggtgtctggaccagtcgtcgttgctgatggaatggctggtgctgccatgtatgaattantccgtgttggacatgataatctaattggtgaaattattcggttggaaggagactctgctacaatccaagtttatgaagaaacagctggcctgatggttaatgatccatttctgcggacacacaagcccctgtctgttgagtttgggacaagaatattgggaaacatttttgatggcattcagaggcctttgaaaactattgccaaaaaaatcggtgatgtgtatatccctaaaagaatttctgtcccagctcttgaaaaagatgctctttgggaatttcaacctaaaaaaatccgtgaaggagaacttcttactggtggagacttgtatgctaccgtctttgaanacagttttgatgcaacatcatgtttgccctgccctcctgaatgccattgggaaaagaatnacttacatttggctccctcctcggtttccagatttcctttttgaaagggaataccggtgcgtgggaaaactttgaaatttttccaagggtgttttcgaaaaaccaaatttcccccatgggcttttccaaaacatggggcccctgttaccttttcaccccttaaaaaacctgttttgcccaaaagaaaaacttttgcgttgcgcagaaattccccccctctgtgccgtctc

SEQ ID NO: 6554 - DNA, 427 bp, Gossypium hirsutum
  Clone ID: LIB3197-010-P1-M1-A6
cgagagtagtcatttttctttgcatcattgcatttttctctcgattgagcctctagggttttgaaagatacttaatatctttttttctttctctactacaatcgaatcgactctactagttttatcagatcttgaaatatccaagctgaactccttggctcgatcaaaacttgatcggattagtttcattcttgtctaatttcttttgagtaagaaagggaaaaaaatgccggcagtttacggagccagattgacgacgtttgaggattcagagaaagaaagtgaattcggttatgttcgtaaggtgtcaagaccaagtcgttgtgcagatggaatggctggtgctgccatgtatgaattagtccgtgttgggcatgacaatctgattggggaattattcggttggaaggagactctgctacaatcc

SEQ ID NO: 6555 - DNA, 376 bp, Gossypium hirsutum
  Clone ID: LIB3146-034-Q1-K1-A7
cccacgcgtccggatacatttgttagtgctatggccttccctaggtggaagaggcttgtagaaactcaaaaaaatcaaagactatcaaaagatcctatgagaaatttgatccagattttattagcatcatgacaaaagcccgagaggttctttatagataagatgatcttaatgaaattgtccagcttgtctgaaaggatgctctatcttaaacagacaaaattacacttgaaactgccaaacttttaagggaagattatcttgctcagaatgcttttactccatatgataagttatgcccatttctacaagttcgtttggatgatgcgcaacattgttcatttcaatgctttggccaaccagtcagttgagaaag

SEQ ID NO: 6556 - DNA, 179 bp, Gossypium hirsutum
  Clone ID: LIB3120-046-P1-K1-H1
cccacgcgtccgcccacgcgtccgcccacgcgtccgcccacgcgtccgcccacgcgtccgggctgtggtaaaactgtgattagtcaagctctttccaagtactctaattctgatgctgttgtctatgttggttgtggagagcgaggaaccgaaatggctggggttctaatggatttcct

SEQ ID NO: 6557 - DNA, 623 bp, Gossypium hirsutum
  Clone ID: GOSHI-09MAY01-C92_1
aaaaaaaggcattcttccaatcaaacgatttcgatctctgatctgagatggtgcgcatgagcgatgaaagacccttacagcgcctaaatgccattgcggagtaccgaaagaaactccttcaacacaaggagtacgagtccagggttcgtgcaggtagggagaatctgagagctgctaagaaggagttcaacaaaacagaagatgatttgaagtctcttcagagtgttgggcagatcattggtgaagttctcaggcctcttgataatgaacgcttgattgttaaagcaagcagtggccctcgttatgttgttggttgccgcagtaaagttgataaggagaaactgacttcaggaactagagtgggtcttgacatgacaacacttactatcatgccggcccttcctcgtgaagttgatccagttgtttacaacatgttgcacgagggatccctggtaatgttagctactcggcttgttggtggtttatctgatcaaaattcgagagctggagggaatctattgagctccctctcatgaatcctgagcttttccttagagtagggattaaacctcccaagggtgtccttctttatgggccttctggtactggcaagacattgttag

SEQ ID NO: 6558 - DNA, 1158 bp, Gossypium hirsutum
  Clone ID: GOSHI-09MAY01-C82_1
cgataaataaaaaatgagctttcttcaggccttgtcagttttccttttgtttttgtcgtatgtagtcgtaggatcagctgagcagtgtggaaggcaagcaggcggtgctctttgccccggtggtctatgttgtagccaatttggctggtgtggcagtactgctgactactgcacagttcctggttgccaaagtcagtgcagcggtagtggccctgcccctgggcctggtgggctaaccaatcttatatcaagagagacgtttaatcggatgcttttgcataggaacgatggggcttgtcctgcccgtggcttctatacatatgatgctttcattgctgctgcccgttcttttcctgcatttgctacaactggtgaccaagctactcgcaagagggaaatagctgccttcttagcccaaacttcccatgaaactactggtggggcagggtgggctgcaccggatggtccttatgcatggggatactgctacaatagggaattgaatcccccttcatcttattgcgcttcggatccaaattacccttgtgctcctggtaaacaatattttggccggggtcccatgcaactttcttggaactacaactacgggcagtgtggaagggccataggggtcgacttgttaaacaacccagacctgctatcaagtgatcccacaatttccttcaagtctgcgttttggttttggatgactccacaatcaccgaagccatcttgccacaatgtgatcatcggagcatggtcaccctccagtagcgatcgggcagcaggtcgggttccagggtatggtgtgatcacaaatattatcaatggaggccttgaatgtggtaagggttggaatgcacaggtagaagaccgcattgggttctataagaggtattgtgacattcttggagttagctatggtaacaatcttgactgctacaaccagaggcctttcgggaatggagtctcggtggactcaatgtagcttttttggctcaaatgaaatcagtaaacgtgcaaataaagatgtttgaccttcttctgtatgcatcacaacagtgaactgatctaactttgttgggtttgttatgacactgtttctttatttagtccttgatgatttgtgaaagaataataaaatgggtggttttcttt

SEQ ID NO: 6559 - DNA, 389 bp, Gossypium hirsutum
  Clone ID: GOSHI-09MAY01-C42_5
cccacgcgtccgcccgcgcctccgcccaaattcccattttgaccatgcctaatgatgatataacacatcctacaccagatctgactggttatattactgaagggcagatctacattgatagacaacttcacaatcgacagatatacccaccaattaatgtactcccttcactctctcgattaatgaagagtgctattggtgaggggatgactcgtagagatcatgctgatgtgtccaaccagctctatgcaaattatgctatcggaaaagatgttcaagcaatgaaagctgtggttggagaggaagcactttcttctgaggatctgctttatctggagttcctagacaaatttgagagaaaattcgtgactcaaggtgcttatgatact

SEQ ID NO: 6560 - DNA, 934 bp, Gossypium hirsutum
  Clone ID: GOSHI-09MAY01-C42_3
ctttactttatttgtcgtttactgtttctatttttgatttttacacattcttctcccctcctatcctctgctcaatcgatctgttcacatcaactttactatatcttctcatttttggatcaatttctcctttcgcgctttgaagttgatttcttgaagatgggagcggaaaagaacttcattgacatggaggagggaactctggagatcgggatggagtatagaactgtatctggtgttgcgggaccattggtcattcttgacaaagttaagggtccaaagtatcaggagattgtcaatattcggttgggggatggaacaactcgacgtggtcaagtcctggaagttgatggggagaaagcagttgtgcaggtctttgaaggaacatctggaattgacaacaaatacacaactgtgcaatttacaggggaggtattgaaaactcctgtgtcgttggatatgctagggcgcatatttaatggctctggaaaacccattgacaatggccctcctattttacctgaggcatacctagatatttctgggagctctattaatcctagcgagagaacttatcctgaagagatgattcagacagggatttcaacgattgatgtcatgaactctattgctcgtggacagaagattcctcttttttctgctgctggtcttcctcataatgagatagctgctcaaaattgtcgtcaagcaggtctcgtaaagcgattggaaagtctgatatctccttgtgatcaggaaaaaattatttgccatgggttgctggcttgggggacatgggaccgctcattttaagaagatttgtgaaatggtcttggaagatgactttttgactgcaatgccctcttgacgatttaccttgattgctaaatgcgaattgtttaatggacatgtcgttttcatatgtcttccattt

SEQ ID NO: 6561 - DNA, 1926 bp, Gossypium hirsutum
  Clone ID: GOSHI-09MAY01-C42_2
cccacgcgtccgctttttctctacttcgcagttttctcgtgaatacagaacgtcgctttcagacttaccagatgggcaaggcagaaaacaaccataacatggaggagggaacgctagagatcggcatggaatatagaactgtttccggagtggctgggccattggtaatccttgataaagtgaagggacccaagtatcaagaaattgttaatattcgtttaggggatggaacaaccagacgtggtcaagtcctagaagttgatggagaaaaggccgttgttcaggtatttgaaggaacatctggaattgacaacaaatatacgactgtgcaatttacaggagaggttttgaaaactcctgtttctttggatatgcttgggcgcattttcaatggctctggaaagccaatcgataacgggccacctatcttgcctgaagcatatttggatatttctgggagttctattaatcctagtgagagaacctaccctgaagagatgattcagacaggcatttcaacaattgatgtgatgaactcaattgctcgtggacagaagattcctcttttttctgctgctggtcttcctcataatgagatagctgctcaaatttgtcgtcaagcaggtctcgtaaagcgattggaaaagtctgataatctccttgatgatcaggaagaagataattttgccattgtgtttgctgccatgggggtgaacatggagacagctcaattttttaagagagattttgaggaaaatggatctatggagagagtgacgcttttcttgaacctggccaatgaccccactattgaacgaattattacacctcgaattgccctcacaactgcagagtatttggcttatgaatgtgggaagcatgttctggttatattgacagatatgagttcttatgcagatgctcttcgtgaggtatctgctgcccgtgaaaaattccctggaaggcgtgggtatcctggttacatgtatactgatctggccacaatttatgaacgtgcagggcgtatcgaaggaagaaaaggttccatcacccaaattcccattttgaccatgcctaatgacgatattacccatcctactccggatcttactggctatatcactgaggggcagatatacattgacagacagctccacaaccgacagatatacccaccaatcaatgtgctcccttcgctctctcgtctgatgaagagtgccattggtgaggggatgactcgcagggatcatgctgacgtgtccaaccagctgtatgcaaattatgccattgggaaggatgttcaggctatgaaagctgtggttggcgaggaagctctttcgtccgaggatctgctttacttggagttcttggataaattcgagaggaaatttgtgacgcaaggagcatatgacactcgcaacatctttcagtcacttgatttggcgtggacactgcttcgtatatttcctcgcgaacttcttcaccgtatacctgcgaaaactctcgaccagtactacagtcgagatgcagctaattaaaggtgacacaaattcctgtcctaaattgccattgcctctatctccataatggttggtctagttttacaagttgcttgtttgcccttttttttttcttctcctgttttaattcataagttgcctgccatctgctcagataataatggttgaataccagcgagaatttgcagctcttctgcttgtaagcagagataccaaataaatattcttttggaacggtaaaatatggggataggaatttttttgttatttacttttggcaaccaaaccgatttggggttttactttacattgatgagaaaatacagtccatcaccagtgaattttagctgtttttcttttggggttttactttacattgatgagaaaatacagtccattaccagtg

SEQ ID NO: 6562 - DNA, 2047 bp, Gossypium hirsutum
  Clone ID: GOSHI-09MAY01-C42_1
gggtttaccaaacaaaaaaaaatcatatttgattttatggttcgcaaatcgcagtagatctcactttgtagtttatccccttctgtctctttctttccctgcttcttgtgaaacagaaaaacacaaaaaataactacaaaatgggtatggcagaaaacactaacggaatggaggagggaacactggagattggcatggaatatagaactgtttctggagttgctgggcctttagtaatccttgataaagtgaagggacccaaatatcaagaaattgttaatattcgattaggggatgggacaaccagacgtggtcaagtccttgaagttgatggagaaaaagctgttgttcaggtttttgaaggaacatccggaattgacaacaaatatacaactgtgcaatttacaggcgaggtgttgaaaactcctgtctctttggatatgcttgggcgcatttttaatggctctggaaagccaatagataatggtccacctatcttgcctgaggcatatttggatatctctgggagttctattaatcctagtgagagaacctatcctgaggaaatgatacagacggggatttcaacaattgatgtcatgaattcaattgctagagggcaaaaaatccctctcttctcagctgctggtcttccccataatgaaatcgctgctcagatttgtcgtcaggctggtttggtgaaacgtttggagaagactggagatctgcttgaggatggtgaagaagataattttgcaattgtgtttgcggctatgggtgtaaacatggagactgcacagtttttcaaacgtgactttgaggaaaatggctcaatggagagggtgacccttttcctaaacctggctaatgatcccacaattgaacgtattattactcctcgtatagctctcactactgcagaatacttggcatatgaatgcgggaagcatgttcttgtgatccttacagacatgagttcttatgctgatgctctccgtgaggtgtctgctgcccgagaagaagtacctggaagacgtggatatcctgggtacatgtatacagatttggccacaatatacgagcgtgctggacgaattgaagggagaaagggttctatcacacagattccaattcttactatgccaaatgatgatattacacatcccactccagatcttactggatatatcacagaggggcaaatatacattgacagacagctccacaatcgacagatatacccaccaatcaatgtgctcccttcgctctctcgtttgatgaagagtgccattggtgagggcatgactcgcagggatcatgctgatgtgtccaaccagctgtatgcaaattatgctatcggtaaggatgtgcaggccatgaaagctgtggttggagaagaagcactttcttctgaggatctgctatacctggagttcctggataaatttgagaggaaatttgttacccaaggagcatatgacacccgcaacatcttccagtcactcgatctggcgtggactctcctccgcatatttcctcgtgaacttctccaccgtataccagcgaaaactcttgaccagtactacagtcgagatgcaggtaattgaaggaggcaaagtgatgcccttagattgcctcctccttggtagtgtttaaaagaagtttatttaccatccgcttcatctgctcgaataataatggttgaattccagttaggtttccccatgatagctcttgggctagtaaaacaagtgatcaaatatgacttcttttatctagaggaaaccagggggggataagaggaggaactataaagcccaccttgtgttacttgttattctatattcctatttattttttcaatatttgtaattcagtagatttggatttctatatccatatccaaacactgaccgagaccagtgcatcccaactgcattagctgcttttcttctcttcaatttattttcagagttttgctttgtatttgtattggtttttatgtgaagatgaaaataagggagacggtggacgacttgtgcctgtt

SEQ ID NO: 6563 - DNA, 664 bp, Gossypium hirsutum
  Clone ID: AI054950.1
gtggatatcctgggtacatgtttaccgatttggcccccattttcaagcgtgctggacgaattgaagggagaaagggttctatcacacagattccaattcttactatgccaaatgatgatattacacatcccactccggatcttactggatatatcacagaggggcaaatatacattgacagacagctccataatagacagatatacccaccaatcaatgtgcttccatcgctgtctcgtttgatgaatagtgccattggtgatggcatgacacgcatggatcatgctgatgtgtttaacctgctgtatgcatattatgctatcggtaaagatgttcatgccatgaatgcttcggttggatattattcactttcttttgaagatctgttatacttggtatttttggatcattatgtatgtattattgttctccttgactttttacattcttaatattttttttttatcttatcttgcttgtattgtgatttttatattattttaattaattatttttgttttctattgatattattttatcttcttttgtattatttgttatttattgattgttgtttatgtttttcttatatgtctttgtattgtcagtgttaatatagtgttcttctatctcttgtttatttattttacttattgatcttttt

SEQ ID NO: 6564 - DNA, 559 bp, Gossypium hirsutum
  Clone ID: LIB3583-004-P1-K1-D1
cggacgcgtgggcagacgcgtgggcggaccctggggtgcctggaagacgtgggtatcctgggtcctgtatgcgtgatttggccacaatatatgagcgagctggaagaattgaagggcgaaagggttccatcacgcaaattccaattcttactatgccaaatgacgatattacccatccaactccggatcttactggatatatcacagaggggcaaatatacattgacagacagctccataatagacagatatacccaccaatcaatgtgcttccatcgctttctcgtctgatgaagagtgccattggtgaggggatgacacgcagggatcatgctgatgtgtctaaccagttgtatgcaaattatgccatcgggaaggatgttcaggctatgaaagctgtggttggagaagaagctctttcgtccgaggatctgctatacttggagttcttggataaattcgagaggaaatttgtgacgcaaggagcatacgacactcgcaacatctttcagtcacttgatttggcgtggacactgcttcgtgtatttcctcgagaact

SEQ ID NO: 6565 - DNA, 411 bp, Gossypium hirsutum
  Clone ID: LIB3272-005-P1-K1-B12
acttgctcaaatagaactgtccaactcaaactagagatatcttgtcattttgggtaattttctctcattcgcattttccaaaacataatcgagctttgaacttgaagatgggtgctgaaaagaatttcattgacatggaggagggaactctggagatcggaatggagtatagaactgtgtccggtgttgctggaccattggtcattcttgacaaagttaagggtccaaagtatcaggagattgtcaatattcgtttgggtgatggaacaactcgacgaggtcaagtcttggaagttgatggagagaaagcagttgtgcaggtttttgaaggaacatctggaattgacaacaaatacacaactgtgcaatttacaggagaggttttgaaaacctctgtgtcattagatatgc

SEQ ID NO: 6566 - DNA, 935 bp, Gossypium hirsutum
  Clone ID: GOSHI-09MAY01-C72_1
gatttgctgaatatttccgccttgctacaccagagttggagtatggtagaatgaatattggaagccgaccatcaaagcggaagccaagtgggggtatcgaatctcttcgtgcaatcccatggatctttgcgtggacacagacaagattccatctccctgtttggctcggatttggagctgcatttaaacatgtcattcagaaggacattaagaatctccttatgctgcaggagatgtacaatgaatggcctttcttcagagtgacaattgatttggttgaaatggtctttgcaaaaggagatcccgggattgcagccttatacgataagcttcttgtttctgaggaactctggtctttcggagagcggttgagaaccaactttgaagaaactaaaagccttctcctccagattgctgggcacaaggatcttctcgaaggggatccctacctgaagcaaagactccggctacgtgattcatacatcaccactctaaatgtctgccaggcctacacactcaaacgtatccgtgacccaaattacagcgtgaagttgcggccacatatctctagagagatcatggaatcaagcaaacctgctgatgaacttgtcaaactgaacccaacaagcgagtatgcccctggtttggaggacaccctcatcttgaccatgaagggtattgctgccggcatgcaaaacaccggttaaacaccgacctactacacgaggtgtgcttatagtcttttaagtccagagaagatgaattattcatcaaagactgatgtcatttcggcaaaaacctttcttataggtaaacaaaagaggcggatatatatataaatgctctttaaagctgtatgattatgctgttatgcctttaagactcggtttattttttatatatatgtgtattgcggcaagtgtttattattgccc

SEQ ID NO: 6567 - DNA, 138 bp, Gossypium hirsutum
  Clone ID: GOSHI-09MAY01-C62_22
acgaaaggtgcctttgtacagcctgcattgtatgaagcctttggattgacagttgtggaggcaatgacttgcggtttgccaacattcgcaacctgtaacggtggacaataatctcggctggtccaccgactggaaaaa

SEQ ID NO: 6568 - DNA, 397 bp, Gossypium hirsutum
  Clone ID: GOSHI-09MAY01-C62_18
agcagttactgtgtgtcctttgtttgcatttgcagctttcttcttctataaatgcgggctgaaactccagcttctctcattccattctcattcgttttgttaaacccctccctttgttggaaaaatggcagagcgtgtgatcacccgagtacacagcctccgggagcgtctggatgacacccttattgcccatagaaacgaggttttggccttgctcacaaggatcgagggtaagggaaaagggattctgcaacaccatcaaattatcctagagtttgaagccatccctgaagaaaccagaaagaagctcgctgatggagcattttctgaaatattgagatccagtcaggaagcgatcgtgttgccaccatgggttgcacttgcagttcgtccaagg

SEQ ID NO: 6569 - DNA, 462 bp, Gossypium hirsutum
  Clone ID: GOSHI-09MAY01-C62_16
cccacgcgtccggttacatgcatgcctttcttttcttactgcacgaatggtaatatcgaggacggctctctgtaacataagatggggagtctcacattgtacgattgcccatgctttggagaatacaaagtatccatattccgacatctactggaagaagctcgtggataaatatcatttctcctgccgatttacagctgatcttttcgctatgaaccatacggatttcatcatcaccagtaccttccaagaaattgccggaagcaaggacactgttggtcaatacgagagtcacactgttttcactctttctggtcttttcccttttcttcccggttctgttgttttttccttctctcttcttttctcttttttttcttttacactcttatttttttctttttttttcctctttttatctttttttttctctattatatctctttttttattacttttttt

SEQ ID NO: 6570 - DNA, 713 bp, Gossypium hirsutum
  Clone ID: GOSHI-09MAY01-C62_11
ctgaattcccttcaacatgtattgaggaaggcagaagaatatcttggtacaccgccagctgagacaccgtacgctgaacccggacacaagttccaggaaatcggtttggagagaggttggggtgataccgcggggcgtgtgctggagatgatccaactccttttggatcttctcgaggcccctgatccttgcacccttgagaagttcctcgggagagtccccatggtgttcaatgttgtcatccttactcctcacggatactttgctcaagacaacgttttggggtaccccgacaccggtggccaggttgtatacatcttggatcaagtccgtgccttggagaacgagatgctcctccgtatcaagcagcaaggactcaacattacccctcgaatcttaattattaccagacttctccctgacgctgttggaacaacttgtggtcaacgagttgaaaaggtatacggaacggaatactccgacatcctccgagtaccctttagaacagagaagggaattgtacgtagatggatctcgagattcgtagtctggccctacttggaaacttacactgaggatgttgctcacgaaatttccaaagagttgcaaggcaagcccgatctcatcatcggaaactatagtgacggcaacattgttgcctcgttgctggctcacaaattgggagtcacacagtgtaccattgcccatgcttt

SEQ ID NO: 6571 - DNA, 456 bp, Gossypium hirsutum
  Clone ID: GOSHI-09MAY01-C62_10
cccacgcgtccggttcatttgattttctgggttttttccccccgttatttttagtatcagcattgtctttttttcttctttagttttgccttgttgaaagctcaagttcgaagaaatggctgagcgtgctctcactcgcgtccacagtctccgtgagcgtttggattccacacttaccgcccacaggaacgagattttggctttgctctcaaggattgaaggtaaaggaaaaggaatccttcttcaccatcaaatcattcttgagtttgaagctatccctgaagagaaccgaaagaaattagctgatggtgcattttttgaaatactgaaagccagtcaggaagccatcgtgttgccgccgtgggtggcgctggccgtccgaccaagacctggtgtttgggagtacattagagttaatgttcatgctcttgttgttgaaggactcactgttgctga

SEQ ID NO: 6572 - DNA, 547 bp, Gossypium hirsutum
  Clone ID: GOSHI-09MAY01-C62_6
gttaggtcagcttctcttcttagaggttcatcactggtggttgggttcaggcttctcttttttgaaggtgtataaaccggtggcttaggttcatatggtggtggtttcaccttagaaggcttgaaacgtatcgagaaaaagtatacatgaaatttactcgaagagactattgaccctgaccggagtgtatggattctggaagcatgtttccaaccttgaacgccgtgagagtcgtcgttaccttgagatgttttatgctcttaagtaccgcaagctggctgaatcagttccattggcagaggagtaaatttaagctgttaaataacattgggccggtttttcttggagaataatattctgttttgtaatttcaattggagaagctcttttgtatttcatcttgtcttttccttttccttttttcgccggcattgtttgaacatggggttgtgcgcccgtcaattccagttaaatatggtgacttttgtttttcaaaaaaaaaaataaaaaaaaaaattattatacaaaaatataaaaaaaaactaat

SEQ ID NO: 6573 - DNA, 1587 bp, Gossypium hirsutum
  Clone ID: GOSHI-09MAY01-C62_5
cagaattcaaaacctgaattcccttcaacatgtattgaggaaggcagaagaatatgtgggtgcactgccagctgagacaccgtacgctgaactcgaacacaagttccaggaaatcggtttagagagaggttggggtgataccgcggggcgtgtgctggagatgatccaactccttttggatcttctcgaggcccctgatccttgcacccttgagaagttcctcgggagagtccccatggtgttcaatgttgtcatccttactcctcacggatactttgctcaagacaacgttttggggtaccccgacaccggtggccaggttgtatacatcttggatcaagtccgtgccttggagaacgagatgctcctccgtatcaagcagcaaggactcaacattacccctcgaatcttaattattaccagacttctccctggtgccgttggaacaacttgtggtcaacgagtcgagaaggtatacggaacggaatactcagacatcctccgagtacccttttggacccacgagggagtcctcccgtccgccatctcgagatgcgtagtctggccctacttggaaacttacactgaggatgttgctcacgaaatttccaaagagttgcaaggcaagcccgatctcatcatcggaaactatagtgacggcaacattgttgcctcgttgctggctcacaaattgggagtcacacagggtaccattgcccatgctttggagaaaacaaagtacccagattccgatatttactggaagaagctcgaggataaataccatttctcctgccaatttacagctgatcttattgcaatgaaccatacagatttcatcatcactagtactttccaagaaattgcaggaagcaaggacactgttggtcaatatgagagtcacactgctttcactcttcctggtttataccgagtcgtacacggtatcgatgtatttgatcccaaattcaacatcgtgtctcccggtgctgacatgagcatatacttcccttacaccgagaagaagaggaggttgaagcatttccaccccgagattgaagacctcctttatagcaaagtcgagaacgaagaacacttatgtgtgctaaatgaccgcaacaagccgatcctattcacgatggcaaggctagaccgtgttaagaacttaaccggactcgtcgagtggtacggcaagaatgcaaagctgcgcgagttggttaacctcgtagtcgtaggtggagacaggagaaaggaatccaaagatttagaagagaaggccgaaatgaagaagatgtttgagctgataaaaacatacaaattgaacggtcaattcagatggatatcatcgcaaatgaaccgagttaggaatggtgagttgtaccgctacatttgcgacacaaaaggtgccttcgtacaaccagcattgtacgaagcctttggattaacggttgttgaagccatgacttgcggattgccaacatttgctacctgcaaaggtggaccactgaaatcattgtccacggtaaatctgggttcaacattgatccttaccatggtgatcaagctgcagaaatccttgttgatttc

SEQ ID NO: 6574 - DNA, 918 bp, Gossypium hirsutum
  Clone ID: GOSHI-09MAY01-C62_4
tcgccgcacgcgtccggaagaatgctaagttgcgtgaattggttaaccttgtagttgtcggtggagatcggagaaaagagtccaaggatttggaagagaaggctgagatgaagaagatgttcgagctcattgagaagtacaagctgaacggtcagttcagatggatatcatcccaaatgaacagagttaggaacggtgaactttaccgttacatttgtgacacatagggtgcctttgtgcaacccgcattatatgaagcctttgggttgactgtcgttgaggccatgacttgtggtttgccgacattcgcaacttgcaatggtggacctgccgagattatcgttcatggtaaatccggcttcaacattgatccttaccacggcgaccaagctgctgagatccttgtcgacttcttcgagaaatgcaagacagactccatcttactggaccaaaatctctgagggaggtttgaaacgtatcgaagagaagtacacatggaaaatttactctgagagactattaaccttgaccggtgtctacgggttctggaagcatgtgtccaacctcgaccgcctcgagagccgtcgttaccttgagatgttttacgctcttaagtaccgtaagctggccgaatcggtacctttggcagttgaagagtaaattgaagttgccggggaaagaattgggagggatttccgagttcttgagaataatctttgttgttttggcattttgatccaactcttttgttttctctgttcttttatgtgtatttgtctttgttcatgttttgggcattgtttcaacatctgggcgttgagcccatcaattctagtaaagtaaaacatggcaacttttgcttcaaaaaaaaaaaaaaaaaaaaatgacgggcgcccgaatcccttcgagaaggaagag

SEQ ID NO: 6575 - DNA, 999 bp, Gossypium hirsutum
  Clone ID: GOSHI-09MAY01-C62_3
cggacgcctggcttggaaacttacaccgaggatgttgctcatgagatttcaaaagagttgcaaggcaggcgccgatttaatcatcggaaactacagtgatggtaatatcgttgcctccttgctggcacataagttgggagttacacagtgtacgattgctcacgcttgggagaagacaaagtatccagattccgacatctactggaagaagctcgaggataaatatcatttctcctgccaatttacagctgatcttttcgctatgaaccatacggatttcatcatcaccagtaccttccaagaaattgctggaagcaaggacactgttggtcaatacgagagtcacactgctttcactcttcccggtctctaccgtgttgttcacggaattgatgtgtttgatcctaaattcaacattgtgtcccctggtgccgacatgagcatatactacccttacaccgaggagaagaagaggttgaagcatttccattccgagattgaagaacttctttacagcaaagttgaaaatgaagagcactggtgtgtgctaaacgaccacaacaagccaattctatttacaatggcaaggctggatcgtgttaagaatttaagtggacttgttgaatggtacgggaagaatgctaagttgcgtgaattggttaaccttgtagttgtcggtggagatcggagaaaagagtccaaggatttggaagagaaggctgagatgaagaagatgttcgagctcattgagaagtacaagctgaacggtcagttcagatggatatcatcccaaatgaacagagttaggaacggtgaactttaccgttacatttgtgacacaaagggtgccttcgtacaacccgcattatatgaagcctttgggttgactgtcgttgaggccatgacttgtggttgccccactgtcgctgcttgctgtcggccgaattttgtcaggaataccggttacatgtcctttccggagccaatgtgtatctttca

SEQ ID NO: 6576 - DNA, 2890 bp, Gossypium hirsutum
  Clone ID: GOSHI-09MAY01-C62_1
gttatttttagtatcagcattgtcttttgttaaacccctccattcattatttacgttaagttcaaagaaatggctgatcctgtgatcactcgcgtccacagtctccgtgagcgtttggatgagacccttcttgcccacaggaacgagattttggccttgctctcaaggatcgagggcaaaggaaaaggaattctgcaacaccatcaaattattctagagtttgaagctatccctgaagagaacagaaagaagctcgctgatggtgcattttttgaagtattgaaggctagtcaggaagcgatcgtgttgcctccatgggttgcacttgctgttcgtccaaggcctggtgtttgggagtacattagagtgaatgttcacgcccttgttgttgaggaactcactgttgctgagtatctccacttcaaggaagagcttgttgatggaagttcaaatggaaactttgttttggaattggattttgagcccttcaactcatcattcccccgcccaactctttcaaaatccattggtaatggtgtggagttcctaaatcgtcacctttcggcaaaattgttccatgacaaggagagcatgcaccctttgctcgaattcctcagagtccattgtcacaagggcaagaacatgatgttgaatgacagaattcagaacttgaatgctcttcaacatgttttgaggaaagcagaggagtatcttggtaccctacctcctgagacaccatgtgccgaattcgaacaccggttccaggaaatcggtttggaaagaggttggggtgacaccgcagaacgcgtgctcgagatgatccaactccttttggatcttcttgaggcacctgatccttgcacccttgagaagttccttgggagaatccccatggtgttcaatgttgtgattctcactccccacggatacttcgctcaagacaatgttttggggtatcccgacaccggtggccaggttgtttacatcttggatcaagtccgagctttggagaacgagatgctcaaccgtatcaagcaacaaggactcaacattacccctcgtattctcattattactcgacttctccctgatgccgtgggaacaacttgcggtcaacggctcgagaaagtatacgggacagagtactcggatattcttcgagtacccttcagaacagagaagggaatcgttcgtaaatggatctcaagatttgaagtctggccatacttggaaacctacacagaggatgttgctcatgaaatctccaaagagttgcaaggcaagccagatctgatcatcggaaactacagtgatggcaatatcgtcgcctccttgctcgcacataaattgggtgtcacacagtgcaccatcgcccatgctttggagaagacaaaatatccagattcagatatctactggaagaagcttgaagacaaataccatttctcttgccaatttacagctgatctttttgcaatgaaccatacagatttcatcatcaccagtactttccaggaaattgcaggaagcaaggacactgttggtcaatacgagagccacactgctttcactcttcctggtctctaccgtgttgtacatggtatcgatgtgtttgatcccaaattcaacattgtttcccctggtgctgatatggagatatacttcccttacaccgaagagaagcggaggttgaagcatttccatactgagatcgaagaccttctttacagcaaagttgagaatgaagaacacttatgtgtgctcaatgaccgcaacaagccaattctgttcacaatggcaaggcttgatcgtgtcaagaacttaaccggactcgtcgagtggtacggcaagaacgcaaagttgcgtgagttggctaacctcgtagttgtaggtggtgataggcgaaaggaatctaaagatttggaagagaaggccgaaatgaagaaaatgtttgagctgatcgagaagtacaacttgaacggccaattcagatggatatcatctcaaatgaacagaatccgaaatggtgaactttaccgatacatttgcgacacgaaaggtgcctttgtacagcctgcattgtatgaagcctttggattgacagttgtggaggcaatgacttgcggtttgccaacattcgcaacctgcaacggtggaccagccgagattattgtccatgggaaatctggtttcaacattgatccttaccatggtgatcaagctgctgacatactggtcgatttctttgaaaagtgtaagaaagatccatctcactgggataagatctcccaaggaggcttgaaacgtatcgaggagaagtatacatggaagatttactcggagagactattgaccctgaccggagtgtatggattctggaagcatgtttccaaccttgaacgccgtgagagtcgtcgttaccttgagatgttttatgctcttaagtaccgcaagctggctgaatcagttccattggcagaggagtaaatttaagctgttaaataacattgggccggtttttcttggagaataatattctgttttgtaatttcaattggagaagctcctttgtatttcatcttgtcttttccttttccttttttcgccggcattgtttgaacatggggttgtgcgcccgtcaattccagttaaatatggtgacttttgtttttcaagttcctatcttttttatttttatttttttaaacgcttatagccattagcgatgctttcagatgtacaaataaaaaaataaaaaaattgagtatttctaaataaaaaacaaaaaaaaaacaaaaacgcgactgaagcaagcaacaaatacaactaaatcatgaaaggcatgcactgcaagtcaatgacgctgtcatggctggagtgttccaaagga

SEQ ID NO: 6577 - DNA, 914 bp, Gossypium hirsutum
  Clone ID: uC-gsronu33B032f04b1
cccacgctctcgccagccgagattattgtccatgggaaatctggtttcaacattgatccttaccatggtgatcaagctgctgacatactcgtcgatttctttgaaaagtgtcagaaagatccattttactgggataagatcttccaaggtggcttgattcgtattgaggtgttgtatacattgttgactgtcttatcccggccttttttcatttcatatgtttttttattatttttttttttttttttttttattatttatttatattgtctttattctattgtctttatcattctatttttttcctttatcgtttttatgttttactcctttgtttctttttcttatattcctcttttctttgtttgtttttttttctttttcttatttttctttctcttttttcattttccctttcattaccttttttttattcttcctctcatccctttattcttttttatcttttattctttatatttcttttttcctctattttttccaatattattcttttacactctattttttattattgattatgctcttgttattgtttctctttatttcctctttttattctttccttttttttccttctctatttgtttattttcatcttttcttttctatttcatttaaaattttcgtttaatatcttttttattatttttatattatatcttctttttttttttattttcattcttttctttttaatttatttttattatttttttttttttttctttattcttaataatttttttattatttttttttattattatattcttctttatttaattctttttttttcttgttttttctttcctttactcatcttttttttttatttttctttttttactttttctctcattttttttttttttttacttttttactttttt

SEQ ID NO: 6578 - DNA, 592 bp, Gossypium hirsutum
  unsure (1)..(592): unsure at all n locations
  Clone ID: AI054891.1
gaaatgctcaaccgtatcaagcaacaaggactcaacattacccctcgtattctcattattactcgacttctccctgatgccgtgggaacaacttgcggtcaacggctcgagaaagtatatgggactgagtactcggatattctccgaatacccttcagaacagagaaaggaatcgtacgtagatggatctcaagatttgaagtctggccttacttggaaacttacaccggngatgttgctcatgaagatttcaaaagagttgcaaggcaagcccgatttaatcatcggaactacagtgatggtaatatcgttgcctccttgctgcacataagtgnnngagtacacnagtgtacgattgctcacgctttggagagacanagtatccagaatccgacatctactggaaggaagctcgaggataaatatcatttctctgcccattacngcttgatcttttcgctatgacatacngatttcatatnaacagtaccttcaagaaatgctggaagcagacctgntggtcatcnagaatacactgtttcacttttcggcttacggttgtcacgatgatggtgatctaatcacatngtcc

SEQ ID NO: 6579 - DNA, 518 bp, Gossypium hirsutum
  unsure (1)..(518): unsure at all n locations
  Clone ID: uC-gsronu33B061g03b1
gtttctgttgaagaagttggaggaaaaaaatagttctaatgatccacagggagaaggagtaggtgtctttgttacaggtgttaattgtatcttttttttaccttttngccgggttttcttggacaatcatattctgctttgtaatttcacttggataagctcctttgtatttcatcttgtcttttccttttccttttttcgccggcattgtttgaacatggggttgtgcgcccttcatttccagtttattattgtgacttttgtttttcaagttcctatcttttttatttttatttttttaaacgcttattgccattatcgattctttcagatttccacattatatattaatatccttgagttttttcttccttcatgctttcttctcttttcattcctttcttttctcttcttttggtcgtcctctttattattttctgtcttcctctcccttccttcttcattttttttttttttttgttttccccttattcaatttcttttcccttcttttccat

SEQ ID NO: 6580 - DNA, 404 bp, Gossypium hirsutum
  Clone ID: LIB3148-023-Q1-K1-G1
gctatgttatcgatacatgttagttccacatcaacagcgggccagacctctgctactaaggggttttgaacgcacgggattgatgtgcgaaaaccgctacagacccaactgactggtccatggtcttcgagggaggctagaaacaatttttatataaggtcgcatagtaagttcactatgagagactcactaccttgaccatatattacggggactggaagcaagtttcctacctttaccgactatagagccgatattaccttgcgatgttacttgctcttaagtaccgtaagctggccgaatcggtacctttggcagtcgaagagtaaattgaaattgaagttgccggggaaacaattgggagggatttccgagttcttgagaataatatttgttggtttggc

SEQ ID NO: 6581 - DNA, 528 bp, Gossypium hirsutum
  unsure (1)..(528): unsure at all n locations
  Clone ID: LIB3585-029-P1-K1-E10
cccacgcgtccgcccacgcgtccgcccacgcgtccgcccacgcgtccgtatcctagagtttgaagccatccctgaagaaaccagaaagaagctcgctgatggagcattttctgaaatattgagagccagtcaggaagcgatcgtgttgccaccatgggttgcacttgcagttcgtccaaggcctggtgtttgggagtatattaaagtgaatgtccacgcccttgttgttgaggaactcactgttgcagagtatcttcacttcaaggaggagcttgttgatggaagtgcaaatggcaatttcgttttggaattggattttgagcccttcaatgcatctttccctcgctcaactctttccaagtctatcggtaatggtgttgagttcctcaatcgccacctttcggctaaattgttccatgacaaggagagtatgcaccctttgcttgaattcctcaaagtccattgccacaaaggaaagaacatgatgttgaatgacagaattcanaacctgaattccctttcatatgt

SEQ ID NO: 6582 - DNA, 578 bp, Gossypium hirsutum
  Clone ID: LIB3828-021-Q1-N6-E2
ataaattcttcatttttactataaatatattcgcccatcggaaacctcgttataggctccccatccttttaaaaaaaccagtacacttgatggtaacctgtaaaacaaaagtcaccatattaaactggaatggaccgccgcacaaccccatgttgaaacaatgccggggaaaaaaggccgaggccatgacggatgcacatacataggagcttctacaattgaattacaaaacaggaatattattgtccaagaaaaacccggccaaagatatttaacagcttcaatttactcccctgccactggaactgattcaaccaggttacggctcttaagaccataaaacatatcaagtaacaacgactcttacggggttcaaggctggaaacatgcttgcaaaatccatacactcctgtcatggacaatagtctctccgagcaaatctagcatgtatacttctcctctatccgggtcaagcctccttgggagatcttatcccagagagatggatctttcttacacttttgaaacaaatcaaagagtatgtcagcagcttgatcaccatggtcaggatcaatgat

SEQ ID NO: 6583 - DNA, 513 bp, Gossypium hirsutum
  Clone ID: uC-gsflnu33B016e02b1
tcttctcgtccgcgaaaatatatccaaagccaaaggaaaaagaagaggttgaatgttcgtcaatgtccggtttatggttcatcaaaactagtcgtccctcctaagttttggatatacttaagagcatgctcttgttgttgaagaactcactgttgctgagtatcttcgtttcaaggaagagcttgttgatggaagttcaaatgcaaactttgttttggaactgtattttgagtccttcaacgcgtggttccctagcccgactctatcgaaatatatcgggaacattgtacatttccataacctgcaactttcggacttactgtttcatggcaaggttaggctgccctccttgctatattgacgggtgctcttaagttaggcgtctgcacagccattaaatgctggaacatattttcattaaattttaagatttagatacttttgctaactggccttcacggcctattgcctcctcaatgactctggaacttttaacactggtatcatgggagg

SEQ ID NO: 6584 - DNA, 567 bp, Gossypium hirsutum
  Clone ID: uC-gsronu33B156e09b1
attgatccttaccatggtgatcaagctgctgacatactcgtcgatttctttgaaaagtgtaagaaagatccatctcactgggataagatctcccaaggaggcttgaaacgaatagaggagaagtatacatggaagatttactcggagagactattgaccctgacaggagtgtatggattctggaagcatgtttccaaccttgaacgccgtgagagtcgtcgttaccttgagatgttttatgctcttaagtaccgtaagctggctgaatcagttccattggcagaggagtaaattgaagctgttaaataacattgggccggtttttcttggagaataatattctgttttgtaatttcaattggagaagctcctttgtatttcatcttgtcttttccttttccttttttcgccggcatttgttgaacatggcgtttgtgcgcccgtctatttcagttaaatatggtgcctttgtctttttcgattatgtaattcttctttctattaccccactcctatcttctgtctgctttgtgatccctattttcttacattttttgtatattatac

SEQ ID NO: 6585 - DNA, 484 bp, Gossypium hirsutum
  unsure (1)..(484): unsure at all n locations
  Clone ID: uC-gsronu33B172a04b1
ccccgtacggaattgctgggtttacccattcgcacgcccacgcttcngattttcttcaagaacaaagaaanggctaatcctgtgttcactcgcgtccacagtctccgcgcgcgttcagatgagacccttcttgcccacaggaacgagattttggccttgctctcaaggatcgagggcaaaggaaaaggaattctgcaacaccatcaaattattctagagtttgaagctatccctgaagagaacagaaagaagctcgctgatggtgcattttttgaagtattgaaggctagtcaggaagcgatcgtgttgcctccatgggttgcacttgctgttcgtccaaggcctggggtttgggagtacattagagtgaatgttcacgcccttgttgttgaggaacttactgttgctgagtatctccacttcaaggaagagctttgtgatggaagttcaaatggaaactttggtttggattggattttgagcc

SEQ ID NO: 6586 - DNA, 389 bp, Gossypium hirsutum
  Clone ID: uC-gsflnu33B055b06b1
cctactctctcgctctctctctatctctcgcttgaatatttttttctatattcaacaatctgttcaacacctgtatgtcaactgatgtggaaacattcgcatttggatccacttgaagagctagatgcgaagcaaagctatatctatggatagagtcatccgtttgcatttccggctgcatgaagtgctggaagaagtggtgcgaggaaggacatcatccgtcaacgacttgagaaaagttaccgaacagagtactcggatattcctcgagttcccctcagaacaaaaaagggaattgttcgtaaatggatcccaagatttgaaatctgtgccctacttggaaacctacacagaggatgtttgctcatgaaatctccaaagaatttgca

SEQ ID NO: 6587 - DNA, 396 bp, Gossypium hirsutum
  unsure (1)..(396): unsure at all n locations
  Clone ID: LIB3135-037-Q1-K1-H3
cccacgcgtccgcccacgcgtccgtggccgattcggtacctttggcagttgaagagtaaattgaagttgccggggaaagaattgggagggatttccgagttcttgagaataatctttgttgctttggcattttgatccaactcttttgttttctctgctcttttatgtgtatttgtctttgttcatgttttgggcattgtttcaacatctgggcgttgagcccatcaattctagtaaagtaaaacatggcaacttttgcttcanaaaaaaaaaaccaccaaacaatgatgctttaacggattttaaacccgacattggctactatagacttcgatgaacccatggtacaccgacggcgaatcctacaacagtttacatcgttaaaaggggggcctt

SEQ ID NO: 6588 - DNA, 307 bp, Gossypium hirsutum
  Clone ID: LIB3083-074-Q1-L1-F2
gcaaaccgcatgtcattgcctccacaactgtcgcgacctgcaacggtggacaataatctcggctggaccaccgttgcaggttgcgaatgttggcaaaccgcaagtcattgcctccacaactgtcaatccaaaggcttcatacaatgcaggctgtgcaaaggcacctttcgtgtcggaaatgtatctgaggaccccaccgagattattgtgcatgggaaatttgattgcaccattgatccttaccatggtgatcaagcactttgacattcttggtcgattggtttgaaaaatttaagatagatccatc

SEQ ID NO: 6589 - DNA, 225 bp, Gossypium hirsutum
  Clone ID: uC-gsflmaxxa093h09b1
catgttttcgagggcaaaggaaaaggaattctgcaacaccatcaaattattctagagtttgaagctatccctgaagagaacagaaagaagctcgctgatggtgcattttttgaagtattgaaggctagtcaggaagcgatcgtgttgcctccatgggttgcacttgctgttatcccaagtacaggtgtaagtgatttttctcccgtgattctctcttactttctt

SEQ ID NO: 6590 - DNA, 888 bp, Gossypium hirsutum
  Clone ID: GOSHI-09MAY01-C32_2
ttttctctctcttcctgtcttcgtctacttgggctctttctctatggatccctacaaggtccaattctccttgaggactatcatctggtggaaaagcttgccaactttgacagggagcggattccagaacgtgttgtccatgctaggggagcaagcgcaaagggtttcatcgaggttacccaggacatttctcacctttcatgtgctgattttctgcgagcacctggagttcaaacccctgttatcgcccccccctcaaccgtcatccatgagcgtggaagccctgaaaccctcagggatcctcgtggttttgcagtgaagttctacacccgagagggtaattttgatcttgtgggaaacaatttcccagtcttctttattcgtgatggaatgaaattccctgatatggtccatgctcttaagcccaaccctaagtcccatattcaggagaattggaggatccttgatttcttctcacaccatcctgagagcttgcatatgtttactttcctctttgatgattggggtgttccacaagattacagacacatgggaaggttctgtgtgtaaacacatacactctgattaacaaggctggcaaagcacactatgtgaaattccactggaagcccacttgttggggtcaaatgcttgctgaagatgaggcatccaaggttgaggagctaatcacagccatgccactcaggatctctatgactcattgctgctggcactatctgagtggagcttttctcagacattgtcctgacatgaggataattgacttgaccctctgatggctagacttgcctgagacattgcccgtcaccggtggcccttgttgatagaccttgcactctgctgatgaacactgcttgccccgccctg

SEQ ID NO: 6591 - DNA, 1940 bp, Gossypium hirsutum
  Clone ID: GOSHI-09MAY01-C32_1
tctcctttctatcgacacacgacccttccgttacgtctcaagctctctcttcctgtcttcgtctacttcgcctctttctctatggatccctacaagcaccgtccatcaagtgctttcaattcaccattctggactaccaattctggcgctccagtttggaataacaattcatctctcactgttggacccagaggtccaattctccttgaggactatcatctggtggaaaagcttgccaactttgacagggagcggattccagaacgtgttgtccatgctaggggagcaagcgcaaagggtttcttcgaggttacccatgacatttctcaccttacatgtgctgattttctgcgagcacctggagttcaaacccctgttatcgtgcgattttcaaccgtcatccatgagcgtggaagccctgaaaccctcagggatcctcgtggttttgcagtgaagttctacacccgagagggtaattttgatcttgtgggaaacaatttcccagtcttctttattcgtgatggaatgaaattccctgatatggtccatgctcttaagcccaaccctaagtcccatattcaggagaattggaggatccttgatttcttctcacaccatcctgagagcttgcatatgtttactttcctctttgatgatttgggtgttccacaagattacagacacatggaaggttctggtgtaaacacatacactctgattaacaaggctggcaaagcacactatgtgaaattccactggaagcccacttgtggggtcaaatgcttgctggaagatgaggcaatcaaggttggaggagctaatcacagccatgccactcaggatctctatgactcaattgctgctggcaactatcctgagtggaagctcttcatccagacaattgatcctgaccatgaagataaatttgactttgaccctcttgatgtgactaagacctggcctgaggacatcttgcccctgcagcctgttggccgcttggttttgaataagaacattgacaacttcttcgctgaaaatgaacagcttgcattttgccctgccattgtggttcctggaatctactactcagatgataagttgctccagactcgtatattctcctactctgatacccagaggcacagacttgggccaaactatctgcaactcccagccaatgctcccaagtgtgctcatcacaacaatcaccacgaaggttttatgaatttcatgcacagggatgaggagataaattacttcccttcaaggtacgatcctgttcgtcatgcagagatgttccctatcccacctgctgtttgcactggaaggcgtgagaagtgcatcattgagaaggagaacaacttcaaacagcccggagagagataccggtcctgggcagcagacaggcaagagcgattcatctgccgctgggttgatgccttgtctgatccacgtgtgactcatgaaattcgcagcatatggatctcatactggtctcaggctgataaatcactgggtcagaagttagcatctcgcctcaatgtgagacccagcatttagacatggagttgcggaggatgagtaaaggactgaaatgtagaaaggccatcatctagttgtttcggaagcataaacttattgttgatccttttgatctgtgtgccataactgaaataaagtctcatatactataagttttacgcttatggtcctaattaataaatgccgttttatgtgtactagtctatttctttcttaaaaaaaaaaaaaaaaaaaaaaaaaaaaaaaaaaaaaaaaaaaagaaagaaaaaataaaaaaaaaaaggggccgtgcgtctacgggataaccgctttagatacgctatcttgcgaccaaaattaatattatatggaacacttaaataaaattaattgggcgaaatttttaaacgtactcactt

SEQ ID NO: 6592 - DNA, 589 bp, Gossypium hirsutum
  Clone ID: AI731093.1
gagaagtgcattattgagaaggagaacaacttcaaacagcctggagagagataccggtcctgggcaccagacaggcaagagcgattcatcaaccgctgggttgatgccttgtctgatccacgtgtcactcatgaaatccgcagcatatggatcacatactggtctcaggctgataaatcgttgggtcagaagctagcatctcgtttaaatgtgaggccaagcatttgaaaggactatttacctggatgctttggagttccgcagggtaaggactgaatgtagaaacgtccatctgtttctttggaagcataaacttattgatccttttgttcttgtgccatattgtaataccgaacaagcttgtaataatattgtctttgtcgtgtcttgctgcatgctccgactagaaatatgttctgaaaagattatagcaatggtaatgggaaatggcaaaccttagattccccgcagcaccaaaactgggaatatagtaacatcacttgtaaattgtaatatctttcaacgttcaagcttacttttactggctttgtttattaaaaaaaaaaaaaaaaaattctgcggccgccac

SEQ ID NO: 6593 - DNA, 441 bp, Gossypium hirsutum
  Clone ID: LIB3493-038-P1-M1-H2
aagttgtactccgtcaaaaccacgacatttcacttcctgcggctcctttacctgctctgctcttcctttgcttatggatccctacaagcaccgtccttcaagtgctttcaattccccattctggacaaccaattctggtgctccaatttggaacaacaactcgtcacttactgttggacccagaggtccaatcctccttgaggactatcatctggtggaaaagcttgccaactttgacagagagagaattccagaacgtgttgtccatgctaggggagccagtgcaaagggtttctttgaggtcacccatgacatttctcagcttacatgtgcagattttctgcgagcccctggagttcagacccctgtaattgtacgtttctcaactgtcatccatgagcgtggaagccctgaaaccctgagggatccacgtggttttgc

SEQ ID NO: 6594 - DNA, 407 bp, Gossypium hirsutum
  Clone ID: LIB3166-005-P1-K1-A8
gggacgcgtgtgcgaaccaatcttgacagggttgagactacttagatgtctagacacaggagccttcgggcggcggaggaggagggctttcaattcaccattctggactaccaattctggcgctccagtttggaataacaattcatctttcactgttggacccagaggtccaattcttcttgaggactatcatctggtggaaaagcttgtcaactttgacagggagcggatttcataacgtgtttgtcatgctaggggagcttgcgcaaagggtttctttgaggttacccatgacattttttaccttacatgtgctgattttctgggagcacctggagtttaaaccctctgtatcgtgcgatttttaacctgtattcatgagcgtggaagccctgtaacccttaggg

SEQ ID NO: 6595 - DNA, 308 bp, Gossypium hirsutum
  Clone ID: LIB3189-049-P1-K1-H11
acggttcactttcctccgtctcctttacctgctctgtctctttctttgcttatggatccctacaagcaccgtgcttcttagtgctttcaattccccattctggacaaccaattctggtgctccaatttggaacaacaactcgtcacttactgttggacccagaggtccaatcctccttgaggactatcatttggtggtaaagctcgccaactttgacagatagaggattcctaatcttgttgaccattctaggttagcctgctccctatgttttctcttgatggtcatccatgaacattttttcatat

SEQ ID NO: 6596 - DNA, 831 bp, Gossypium hirsutum
  Clone ID: GOSHI-09MAY01-C992_1
cccacgcgtccgtaagaaacccaccattcacccaaaattttccttccacccctcccttctttccatccaaccaagaaagaaagaagaaaaactcaaaaacccatttcccttcttctctccataattcatgtcctagttttccttttttgttgatcgagtttaaaaagaatccaattttgtttatgctatagctgatctgggattttatttcagtttttttacagtttacaattgaatcttcctttgcaatcatagtatttgagaaagacgtagtacagtatgtggtagcctaattgtattgaattaatacgcaggtaagcgttccatgcagcagcctattcgatagtgtgacagtccggtgtgggcactgcaccaacctatggtcggtgaacatggcggctgcatttcagtcactgtcatggcaagatgctcaggcagccagttatgcaacacaagattacaggaccgatctgggctcctcttccaaatgcaacaccaagttctcaatgcgagctccttccaaaaatgctactgaggaaaggggtggtaatcgacctcccgagaagaggcagcgagtgccttctgcatacaaccagttcataaaagaggagatacaaaggatcaaggccaacaatcctgatatcagccacagggaagcattcagcactgctgctaagaattgggcgcacttccctcatattcattttgggctcatgctggaaaaccaaaaatcaaactaagatggatgatgcagtcatggaaaaggagctgacggacaaatatgattatgttacaagtaccctaattcccagtaaagctatggttggacat

SEQ ID NO: 6597 - DNA, 654 bp, Gossypium hirsutum
  Clone ID: LIB3583-052-P1-K6-F3
tgttaaagcttttttttggggggttccaagtgttgctttcttcttgtggtttttactagtttgttatctagagagaggaactatttggttatctttcttgcttggtgttccttctaggggttggggttgaggagaggttgcttaaagcttttaagctttgaaagacatgtcgagctgcattgaagttgtgtctgagcaactctgctatatcccttgcaacttttgcaacatagttcttgcggtgagcgtgccatgcagcagtctgtttgatatagtgacagtccgatgcgggcactgcaccaatctatggtccgttaacatggcagccgccgcatctcagtcactgtcatggcaagatattcaggcacccaataatgcaatagaggattataggagggatttgggttcctcatcgaaatgcagccacaacaagttgtcaatgcgacctcctctgcctaacaatgcgactgaggaaagggtagtgaaccgacctcctgagaagagcagcgagtaccttctgcatacaaccgcttcattaaagagtagattcaaaggatcaaggccaacaatccagatatcagccacagagaagcattcagcactgctgctaagaattgggcacacttttctcatatcattttgggctgatgctgg

SEQ ID NO: 6598 - DNA, 529 bp, Gossypium hirsutum
  unsure (1)..(529): unsure at all n locations
  Clone ID: LIB3583-055-P1-K1-E8
atttcccagaaaacacccatctcaaacacattaagaaacccaccattcacccaaaattttactattactactatcttctttccatccaaccaaaaaaaaaagaagaaaaactcaaaaacccatttctcttcttctctccataattaatgtcctagttttccttttttgttgatcgagtataaaaagaatccaattttttttatgctatagctgatctgggattttatttcagtttttttacagtttacaattgaatcttcctttgcaatcatagtatttgagaaagacatagtacagtatgtggtagcttaattgtattgaattaatacgcaggtaagcgttccatgcagcagcctattcgatagtgtgacagtccggtgtgggcactgcaccaacctatggtcggtgaacatggcggctgcatttcagtcactgtcatggcaagatgctcaggtgatatgaatcctgtttgtatttatgcctnccaaactaggggctatgggttcctccacattatcttcttttccat

SEQ ID NO: 6599 - DNA, 450 bp, Gossypium hirsutum
  Clone ID: GOSHI-09MAY01-C962_4
ctttctacaactgggctatagcaatctctgtttgtgcaaaaatgcgtggtcggaccaaagacccgcgcgtccgttgggagcaggcgccaaaaaactatgaaaaagctgtccagctcacctggaatagcccccaggctctaaacattgggggactggctcttcaggacctcagggctattgttccagctcgggagaagcaaaaaatggtcaggactgcaattagtaagtttcgtgctgcaatacagttgcaatttgatttccatcgagcattatacaaccttggaactgttctgtatggactagctgaggataccttaagacatggttcgccgaatctgaaagaagtttccccagatgagctgtatagccagtctgctatctatattgcggctgctcatgcacttgaaaccaaattactccgttttcagcagtgccttgaggcttgttcgt

SEQ ID NO: 6600 - DNA, 681 bp, Gossypium hirsutum
  Clone ID: GOSHI-09MAY01-C962_2
ctcattctcttttgatcttcttggtttctgtgtttggcgttgtacggaaatactttctccatagcaatgcccgaagcgactgaggaatccgaacttcacaatggacaccaaccacaagcagaaccggaaccggaatcaaaagcggaatctcaacccgaatcgaaaacggagccaggaccggaaaacaaaccggaggaggcactgaagctggaacctgttgtaaccggtgcggatccgaacacgaaggaggaggacaaagagagctcgatccaatccaatgacgcggccacgccgtcatccactgaccaaaatgctcggccgcagctgcgaaaagatgaagggaatcggactttcacgatgagagagttgctaactgaatttaaaagtgacgaagaggaagtaggctctccttacactcgagaaagcacgcagagacaatccaaccaaaacagtgctgcaatggagttggtcagtagtgtcaccggtgctgatgaggagggccagtctcgccaacgggttcttgtgtatgctgccaagaggtatgctgctgctctagagaaaaacccagaagattatgatgctctttacaactgggcattggttcttcaggaaagtgctgataatgttagtccagattctacttcaccttctaaaaatgacttgctagaggaggcttgtaaa

SEQ ID NO: 6601 - DNA, 1038 bp, Gossypium hirsutum
  Clone ID: GOSHI-09MAY01-C962_1
cggacttggggtcggctttggcgttgcacgcaaatctctcgctcaacgctatgtccgaaacgactgagggatccgaacttcaaaatggtttccagccacaaccccgacccgaacccgaaccggaatcggaattgaaagtagaatctcaacctgaacaacaaccggaagaggaactgaaaccggaacctgtagtaactgatgccgatccgaagccggagccgaacaatgagagctcgatccaatcgaatgagacgaccaaacaagcttcaaccgaccaagttgctcctccagggcggcgtaaagatgaggagaaccggactttcacgatgagagaattgctaagtgagttgaaaagcgacgaagatgatgcagggtctccttacagtcaagaaaacaagcaacgtcagtcctaccaaaataatgctgcaatggagttgatcaatagtgtcactggtactgatgaggaaggcaggtctcgtcaacggattcttgtatatgctgccaggaggtatgctactgcactggagagaaacccagaagattatgatgctctctacaattgggcattggttcttcaggaaagtgcagataatgttagtccagattctacttcaccttctaaagatgccttgctagaggaggcttgtaaaaagtatgacgaggctactcgtctttgcccaacacttcatgatgctttctacaactgggctatagcaatctctgatcgagcaaaaatgcgtggtcggaccaaagaggctgaagaactatgggagcaggcaacaaaaaactatgaaaaagctgtccagctcaactggaatagcccccaggctctaaacaattggggacttgctcttcaggaactcagtgctattgttccagctcgggagaagcaaaaaattgtcagggctgcaattagtaagtttcgtgccgcaatacagttgcaatttgatttccatcgagcaatatacaaccttggaactgttctgtatgggcctactgaagatacacagaactggaggctcgacaatccaaaagaac

SEQ ID NO: 6602 - DNA, 424 bp, Gossypium hirsutum
  Clone ID: LIB3083-065-Q1-L1-F3
tatgggtccgaaagcggtgaaggacaaagcgagctcgatgcgattgagtgaggcagccaagccagcatccatctcccacattgctcgtccggaagtgctaaaagaagaagacaaccggacctccaccatcagacggctaagtgatttgaaaagcgacgatgatgatgcaggctctcctaatagtcaagaaagcacccaacaacaatcctaccaaaataatgctgcaattgagttgatcaatagtgtcacaggtgctgatgaggagggcaggtctcgccaacgggttctcgtatatgctgccaggaggtatgctagtgctctggagagaaacccagaagattatgatgctctttacaactgggcattggttcttcaggaaagtgcagataatgttagtccagattctacatcaccttctaaagat

SEQ ID NO: 6603 - DNA, 882 bp, Gossypium hirsutum
  Clone ID: GOSHI-09MAY01-C902_1
cccacgcgtccgagagtgtataaactaaaggaggtattggagaaaaatgggcagttaaaggcgtgtgggcaattacaaggggagggtttaaccagaaatttttcaacttgcccaaaaccctctctcgccctctcatggctacctctaaccttattagggtttcttctccttcttactccacttcctcccctaaccacgctccttttaagcgcgtcggcactcacaatggaagcttccactgcgacgaggccctcggctgcttcatgattcgtctcactgacaagttctccaactccgagattatccgtacccgagatcccaaggtattggaggggcttgatgctgtgcttgatgttggaggcgtctatgatcctaatcatgaccggtatgatcatcaccagaagggatttgaggaggtttttggacatggatttaatacaaagcttagcagtgctggacttgtttataagcattttggcaaggagataatagctaaagagcttcagcttggagaagaccacccggatgtgcatagattatttctggccatttacaaaagcttcatggaggcaattgatgcgattgacaatggaatcaaccagtttgatactgacaagccaccaaaatatgtgaacaatacacacatatcttctagagttggaagattaaatctagactggacagatcctgatcaatcacctgagaaggagaatgaggctttccaacgagcaatggctctagctggtagtgagttcttagaaagtgtccgatttcatgcaagatcatggctaccagcaaggtcaattgtattggagtgcttggcggaaggatttgacttaaatcctagggggaaattttgggtttggaaaaggtttggccctg

SEQ ID NO: 6604 - DNA, 370 bp, Gossypium hirsutum
  Clone ID: LIB3196-043-P1-M1-H2
cccacgcgtccgatggatttaatacaaagcttagcagtgctggacttgtttataagcattttggcaaggagataatagctaaagagcttcagcttggagaagaccacccggatgtgcatagattatttctggccttttacaaaagcttaatggaggcaatggatgcgatggacattggattcaaccagttggatactgccaggccaccaaatttggtgaccattccaaacttttctctaaaagtgggaggataaatttaggcctgacaaattccggtccattaacttgaaaaggaaatggaggttttcaaccaggcatgggtttaactggtagtgaggtcttagaaagggtcccatttcatgcaagatca

SEQ ID NO: 6605 - DNA, 699 bp, Gossypium hirsutum
  Clone ID: GOSHI-09MAY01-C582_1
caaatgtgtagttgcattgaaaatgaaagtcaaatcacttcaggttcctatacaagtgaataagtacttggcatatagtgatggaatgcgagtgattgaatcagggaagctgtccgtacagtccacagcttcatatgttttaccacatgccgaactggaccagccaagtggtcagctttgtctcgattcagaggagttcaaaattgtcggcgacttaaatgaggctatttctcaggaacgctacaaggatgctgctgatttgagagacaaacttgataagttctgggcagcaaggaacttgaggaaattcaagtgacagttgtttatgctagagttttcaagtgtaaacagcagttattgttgaagctgacatctatcgatccggcggcaagcgattgtttctcatccttttttattaattcatatcaatttatatgaaataggaaagtcccgtgaatatatatgtatataaataatttttgtacagatatagttagaatattggtaacaattattattattattattattattattattatatgttaaagcacgttggtttatgatgacgcttaacaaaatatgtttcttgtttcacctgctgccattaagtccaattttaaattacagatataataaagccgagttgtttaatattaatgaactaacaagaaatatatataatgttttcgatttttt

SEQ ID NO: 6606 - DNA, 626 bp, Gossypium hirsutum
  Clone ID: AW187811.1
gttttttattttaaatctctctgcaacatatatcagttgaagcttcaacctttatacccaaatacaagatttggagtttaaaaaagcatcagtctttgttcttttgtgtataaatcatgagatttgtttggtttctaagaaaatattttattcgtgtttggaagattttcttcaccacctctttgtttcattttcccgagaaaatgttggacttgacggaaattcccaagttggatttggcatcttccaatgagatttcaacacaaaaaatctcagtttcggatcatataggtgggtttcaatacacagttgataaacacgacagcttcgttatcgacatggatagtttctcttatggaggactcaataaaggaatcaatcaaaacccaagaatcacagttcctatacaagtgaataagtacttggcatatagtgatggaatgcgagtgattgaatcagggaagctgtccgtacagtccacagcttcagatgttttaccacatgccgaactggaccagccaagtggtcagccttgtctcgattcagaggagttcaaaattgtcagcaacttaaatgaggctatttctcacgaacgctacaaggatgctgctgatttgagagacaac

SEQ ID NO: 6607 - DNA, 583 bp, Gossypium hirsutum
  unsure (1)..(583): unsure at all n locations
  Clone ID: AW187214.1
aatttccttccttcattgatttttatgtgtttttttattttaaatctctatctctctgcaacatatatcagttaaagctttaacttttatacccaaatacaagattttgattttaaaaagcatcagtcttcttttgtgtataaatcacgagatttgtttggtttctaagaaaatattttattcgtgtttgatttgaagagttacccaattgatacgcgatcgttgacactctataaagtcttaattccacctcttcgtttcattttcctgagaaaatgttggacttgatggaaaatcccaagttggtgtggaaccagagcaaagaggaaaaggggaactaaattttataataatggaagcagcctcgtgcagtctcgagctttgtgaggaattgagaaggaaagaggatgcaatancacgagaggacaaaaattgttagggatgcatgggacatggctgttgaaatttgcctttctcagcttccattgttggttgaagatcgtaatgcagagttccaggtatggtcatgggtgcagcagcttcaactgaaaagtacttgtgcaggtctggagtaagtcaatca

SEQ ID NO: 6608 - DNA, 725 bp, Gossypium hirsutum
  unsure (1)..(725): unsure at all n locations
  Clone ID: AI055106.1
atatataaagcctccacaattccaaatcctatatctttcatttgcatgtatttgattacatttttttcccttcatcttaaccaaattcccatttcaaatttccttccttcattgatttttatgtttttttttttaatctctctgcaacatatatcagttaaagcttcaacctttatacccaaatacaagattttgattttaaaaaacatcagtctttgttcttttgtgtataaatcacgagatttgtttggtttctaagaaaatatttannttcgtgttggaagattttcttcactatttgaggggtgtctctgttnttcgtcttttcgttntatcttccaatcaagtggttttgaatttttgattaaaagagttacccaattggatacgcaatctttgacgctctataaaagtcttaattcaccttttcgtttcattntcccgagaaaatgttggacctgacggaaaatccaaagttggatttggcatcttccaatgagatttcaacacanaaaatctaatttcgaatcatatagtggtttcatacacagctgataacccgatagcttgtaatcgacatgatgtctctcaggagactcataagaatcatcanaccagaatccgaaagccctctgtaagtcttgaaggacaaanattacttcatggcatctagggaagccttaggcctacccaggttaccggaggcccaaggttttgggtcacca

SEQ ID NO: 6609 - DNA, 585 bp, Gossypium hirsutum
  Clone ID: LIB3583-046-P1-K1-H8
tttgtcacttttttccccttcggcttacgaattccctttcaatttccttccttcattgatttttatgtgttttttttttaaatctctctgcaacatatatcagttaaagcttcaacctttatacccaaatacaagattttgattttaaaaaggcatcagtctttgttcttttgggtgtaaatcacgagatttgtttggtttataagaaaatttttattcctgtttggaagattttcttcaccattttaaagggtgtctctgtttttctttctttcgttttatctaccaatcaagtggttttgaaattttgatttaaagagttgcccaattggatacgcaatcgttgacgctctataaagtcttgatttcacctcttcgtttcattttcccgagaaaatgttggacttgacggaaaatcccaagttggatttggcatcttccaatgagatttcaacacaaaaaatctcagtttcggatcatataagtgggtttcaatacacagctgataaacctgttagctttgttatcgacatggatagtttctctcatggggggcctcattaaagaaatcaatcaaaaacccca

SEQ ID NO: 6610 - DNA, 556 bp, Gossypium hirsutum
  Clone ID: LIB3582-045-P1-K1-E5
cccacgcgtccgcccacgcgtaggcccacgcgtccgccaacacgtccgccaaattccaatttcaaattggcttcggtcattgattttaatgggttgtttaatttaaaatctctgtgcaacatatatcagttaaagcttcaacctttatacccaaatacaatattttgaatttaaaaaagcatcagtctttgttcttttgtgtataaatcacgagatttgtttggtttctaagaaaatattttattcgtgtttggaagattttcttcaccattttagagggtgtctctgtttttctttctttcattctatctacaatcaagtggttttgaaatattgatttaaagagttacccaattggatacgcaatcgttgacgctctataaagtcttaattctacctcttcatttcattttcctgagaaaatgttggacttgacggaaaatcccaagttggtaagtataatatctctaggagatcttcatttttttccccttatttactgttcaataggctgtttttttttcatcatcataatcaatcgtttcatttctaatat

SEQ ID NO: 6611 - DNA, 426 bp, Gossypium hirsutum
  Clone ID: uC-gsflnu33B140b04b1
tttaaaattttctcccgtgaaacccctaattttcccccctaaaatcatttttttcccttcatcttaacccatttcaactttccttccttcgttgatttttatgtgttttttattttaaatctctctgcaacatatatcagttaaagcttcaacctttatacccaaatacaagattttgagtttaaaaaagcatcagtctttgttcttttgtgtataaatcacgagatttgtttagtttctaagaaaatattttattcgtgtttggaagattttcttcaccattttagagggtgactttgtttttcttttctttgacgctctataaagtcttaattccacctcttcgtttcattttcccgagaaaatgctggacttgaaggataatcccaagttggatttggcatcttccaatgagatgtccacaca

SEQ ID NO: 6612 - DNA, 855 bp, Gossypium hirsutum
  Clone ID: GOSHI-09MAY01-C552_1
tcttttacgcgtgggtgatgctggtattttccttcaatctcttcatctccaccacccaccaccacttctttccctttccctaaattttcaatctttacactttgcttcttcagtcctcaagccaaagccagccaagaaaattatatagaatagaaaagaaaagtgatgatagttgcttcctaccatccaaaatctttccttcaatccaactctacgtagacatcaaatctttacatcccattgttccattaagtccttccaaagaaacccatttttccataaagaaaaattgtttcttggctctaaatcgttgaccccaataaaggaaaaacattatgactgaagtactccaatcatccccatctcatttcccttcattttcaagctccacctgcactccacacgcccttactaactctaacgtaagcactgtggaggatataataacccaagagagtgaccaagaagaagaggatcggcaagaagaggaagagaggaaagaaagggattgagaaggggaaggggatcagctgtctttattgacgcttttggtggctgcttttaggaagtctttgattgggtgtagcctttctggaagtaaagagctttgttcaatggaaattgggttgcctaccaatgttagacatgttgctcatgtgacttttgataggttccatggatttcttggtttgccggttgaatttgagcctgaggtccccaggagagctccaagtgccagtgcgagtgtatttggggtttcaacagaatctatgcagctctcactggactctagagggaacagtgttccaacaatactactcctgatgcaaagtcatttatacgcccggggaggcc

SEQ ID NO: 6613 - DNA, 430 bp, Gossypium hirsutum
  Clone ID: LIB3585-003-P1-K1-H10
cggacgcgtgggagagaacaggcaagtgggagaaaggagaggaagggataaaggaggtgaacagcagctgcctttggtaacgattttggtgactgcttttaggaagtctgtgattggttgtagcatttctggaagtaaagagctttgtgcaatggaaattggattgcccaccaatgttaagcatgttgctcatgtgacttttgataggttccatggttttcttggtttgccggttgagtttgaacctgaggtccccaggaaagcccctagtgctagtgcgaatgtgttcggtgtttcgacagagtctatgcagctttcgatcgattgtagaggaaatagtgtgccaacaatcctactattgatgcaaaggcatttatatgacaaaggtggcctccaggccgaagggattttccgaattaatgccgagaac

SEQ ID NO: 6614 - DNA, 984 bp, Gossypium hirsutum
  Clone ID: GOSHI-09MAY01-C542_1
cacaaaaaaaaatgaatttgaactgaagagcttttaaacaaagtctcgtgaagtggtttggaggaggaggtggggctatcagattttcagattcagctttgatttcaatccactgaaataccaggattttgaggtttaaagtttaaactgtatctgcatgcaaggaaaaggtctgggaccttgatgaagtcagtttacttgtatattcttgtgcattaaaaaaagagaagatgctaccaaattggaagaagtcccgcattagaatgacagtccaatctttagctaaaagtgtgtctttgttaatcggaacatctagaagtaaagagagtggcaatagtatgcagtaaaagggaaccatggagcatactttggagaaacgatatccagtcaatccaaaagattacaagttatatgaagaaattggagaaggtgtcagtgccactgtgtcccgcgcgtccggcattccacttaatgagattgttgctatcaaggttcttgatttggaaaagtgcaatagtgatctggatggcatccgaagagaggtacagaccatgagcttgattgatcacccaaatttactatgggcactttgctcgttcaccactggtcacagcctttggattgtgatgccatacatggctgggggatcctgcttgcatataatgaaatccgcttatccagaaggttttgaagagcctgttattgctactttattgcgtgaagtccttaaagctcttgtttatcttcatgcccatgggcacattcacagagacgtgaaggctgggaatatcttaattgattctgatggttctgtcaagttggcagactttggagtgtcagcaagcatgtttgatgctggagacagacagcgttccagaaatacttttgttggaactccttgctggatggctccagaagttatgcagcaattgcatggttatgacttcaaagccgacatctggtcttttggaataacagcactcg

SEQ ID NO: 6615 - DNA, 670 bp, Gossypium hirsutum
  Clone ID: GOSHI-09MAY01-C512_1
cgaatcccaatctgacacaccgaatttcgaggatgaatgcaattcggagagcacggaggatagtactggcttgtttaactcggaaagaatatatttggatggccaaaaacgagcgagctatgatcagatgttgcattgtcataatggtacatcgggccaagaatacgaagcaattgtgtttcctccagttcctgagcatcaaacaaacagagatgtcatcgacgaagcgaacatcgataagtatttcccggacagattgttcagaactgtcagtgatttaagtttatctatgttagagaccgaagacacaagccggttagaactacaacaagtccagctctttgaacacatagcaccgaactatagaaggagtaaaagctcaactcgtatgaagcaagaaaggactgctagaagggaaaaactggactcacattgcaagggtgagttaatgggaataattcagaatgcggtttcgaaactctgtttctcggacggattagagatgtctgggaaagattatgcagtcgaaatcactgcaatttaccgaatgttaaacaataaacatggtgtgaagtacacaatgttgaaagatgtgattctggagcagttgttgatagcttgttcgacttccgaagaggaaatggtaatacgagcatcaggtactgtctta

SEQ ID NO: 6616 - DNA, 257 bp, Gossypium hirsutum
  Clone ID: LIB3189-003-P1-K1-G1
aacagagatgtcatcgacgaagcgaacatcgataagtatttcccggacagattgttcagaactgtcagtgatttaagtttatctatgttagagaccgaagacactagccggttagaactacaacatgtccagctctttgaacacatattaccgatctatttaatgagttaatgcttttcttgctttaatcaagaataggacttgcttgtatgttatagcttgactcacatttttagggtaagtttttagtgatttat

SEQ ID NO: 6617 - DNA, 1008 bp, Gossypium hirsutum
  Clone ID: GOSHI-09MAY01-C502_1
gtgaaagtggagttggaaaagacccaactaatgaggagttaaagaagcgggcaaagcaaattgatttaaagaagttggaacaggaaccacgtgaagcccaagtttctaaggctcttgtagaggctaaggacctcgtttctgccattgaagatagaaggttgaagcttgggaatgcaatgtatagagaacttaccggattaaggaagccggtcgggcgcgtgggtggaattcttcattggcctgttttgctactctatgcggagtttatgtccagtgattttatagaggacttctgcgaaaccgacatgttttcagctcaccttgatatcatgttttcagaaagttgcccacctttaccatgggataaggaaaaccattactcccgtgacgcgattgaactctactatgaggctggttctgggatttgcctgtctaagagcaaaattctccgatatctcctagaagggactgcagctgctaatgtggaaagcattggagaggaagaaaaggatgcagctgatggttctccatacgacagttctgcaggttcatacaaatgggtcaaagtgaatgaaaaaagaacacttcacgacgtgttgaacgaaccaaacttcattattccaatgataccagtcttttacgtcgtttcaaaaagatctggcttttataaggacttcataaccggaaaatggagacctcctgcatgaatagaatgcacatgctagacagcaagcttggggtttgtacaccgtatacgatggtcatgatgttcttcaagtgagcttaaagtttccaagccattgatttgttcttgtattagttagttggcatttcatgttttcacaacaaagacaaaactggactaggtctaggtctaggagggaggagtttcttttacatctttataacttgagtgataatgtccatttttgagttgctctctcaaaaatgcatcattggtttatctataaagcacgtgaagggcattacaagtcctgtttttgaaaa

SEQ ID NO: 6618 - DNA, 708 bp, Gossypium hirsutum
  Clone ID: GOSHI-09MAY01-C522_1
gaaaaacgaaaaaaaaaaaaaaaaggaaagaaaggaagagaactccctaaacagagcctcactgtttttgcagctctcgaaaatggacgtcccaaaggagcaaatcactgctcttctcgacaatgctctctttaactccgctcagcttcttggttctttccttgtttcatcatctactgttaatgccgaaactagtccacatctcaaggctgaaaatctggttctacttggcgatgctttgtttcgggagagagagtatcgtagagcgattcatacgtacaagcaagccttgcagtattataagattattcccaagcaaaattctacatcttctagaagtgcattgtctgcctcaaacaggtcctcttctccaaattcttttaacatttgtgctataaatgaaaacgaggtgaagttcaaaattgcttcttgtcattttgctctaagtgaaaacaaagtggcccttgttgagatggagggaattcctagcaaagcaagaaatttgcagatgagtttattgatggcaaagctttatcgaaatactaaacatacccgtggtgctgttacttgttacagggaatgtttaaggcaatgcccttatgtcattgaggctatcatagccttggctgaattaggggccagtgccaaagacataatttcgttgtccctcagacaccaaatagaggtgggagggctcaattagatcat

SEQ ID NO: 6619 - DNA, 993 bp, Gossypium hirsutum
  Clone ID: GOSHI-09MAY01-C452_3
cgatgtacaaaaatgatgatcggagaaccaacacgaccaaatcccaccgttaaaatcccggcgtgggacccactcaatgatccgacgtctaattattcttccgttaattataactgcaatgcgccgtccagtccttgtcccgtcgattacctctcatcgctccaccgttacctcccgtcaaacgatttcgagtcgtccgactctctgagtgaggattcggattttcctgttgacgcgttctcgtgtgaccatttccgtatgtatgagttcaaagtgaggaggtgtgctcgtggcaggtcacatgactggactgagtgtccgtacgctcaccccggggagaaagcccggaggagagacccgaggaagtttcattactcgggtacagcttgccctgatttccgtaaaggaatctgcaaaaaaggcgattcgtgtgagttcgctcatggtgttttcgagtgttggctccacccagcacggtaccgaactcagccgtgtaaggatggtaccagttgtaaaaggagggtctgttttttcgctcacacaccagaacagctccggttgttaccacaacagagtccgagaggaaacgggtcgagttcgggagatttggattacgttgggtccccaatacgtcaccgtttcgacatagtttcttcgccgacttccattttagcttcacctccgttatccccaccttccgattcaccgcctttatccccaagcggctcgttttactcggtgagtgaactcgctgcttccatgcgtagcatgcagctcggtaagtccaaaatgaacggcgccggcgcttgttcatggggtatgcaaatgggatcgggttacggttcccttcggggctccacgcttcgacccgggttttgcaggtctccttcaaccccgacccgttctgggttaggccagttcgatctctgggaatgcaacaacggtttcgaagaagaaccagcaatggaaagggttgaatccggtagagattta

SEQ ID NO: 6620 - DNA, 1118 bp, Gossypium hirsutum
  Clone ID: GOSHI-09MAY01-C452_2
cccagcgtccgccccgcgtgcgggggggggggggccacgcgtccgcagaacgaaggatgtccaaaatatgatgatcagaaaacccattacacgacccttccccaccgtcaatatccccgactgggaaccgttaaatgattcggcggataactttctggctgtcggctttaactgcaatgcaccctgcagcccttgtcccgtagaataccttacggcgctccgccgttacctcccctcgaacgatctcgagcccgacacccttagtgacgactccgacgtacacatcatcgatgcattctcgtgcgatcatttccgtatgtacgagttcaaggtgaggaggtgtgctcgtggcaggtcacatgactggaccgagtgtccgtacgcccaccctggggagaaggctcggcggagggatccgaggaagttccattactctggatccgcttgcccggatttccgcaaaggaaactgtaaaaaaggcgattcgtgtgagttcgctcatggcgtgtttgagtgttggctccacccaactcgttaccggactcagccatgcaaggacggtacttgttgtaaacggagggtttgtttttttgctcacacgccggagcaactacgggtcttaccgcagcagagtccgagagggaatgggtccgggtccgggtccgggtcaagtgatatggattactttggctcgcctatccgctatcgtttagactatgtttcttcaccaacttccattttggcttcgcctccaatatccccaccttctgactcaccacctacgtcgccgagcggctcatttaactcggtaagtgaactcacctcttccgtacgtaatctacagtttggtaaagctaaaatgggaactacttgttctcggggatcatgttttgtttctccaaggagctccatgctccgacccggctctcctctcactccaactcgtacaccgactcggtccggactcagtaagtttgagctctgggaaagcaataatgcgtttgacgaacctgcaatggagagagtggaatccgggagagacttgaggacaaggatgttcgctaagctgagtgaggaaaattctcttgacctacttgatcctaccgggtcgggtcctg

SEQ ID NO: 6621 - DNA, 1586 bp, Gossypium hirsutum
  Clone ID: GOSHI-09MAY01-C452_1
cgcccgcgcgggtccaaaaatgatgatcggagaatcaatccaaccaaatcccaccatcaaaatccccgtaggggacccattcaacgatccgacggctagctttcactccgttaactttaactacaacaatgcagtcagtagtccttgccccgtcgattacctcgggtctctccaccgttacctaccgtcaaacgactacgagtccgattcgctgagtgatgattcggacttacctgttgatgcattctcatgcgaccatttccggatgtacgagttcaaggtgaggaggtgtgctcgtggaaggtcacatgactggactgagtgtccgtacgctcaccctggtgagaaggcccgaagaagggacccgcaaaagtttcattactctggaactgcttgccccgattttcgcaagggaagctgtaagaaaggcgattcatgtgaattcgctcacggcgtttttgagtgttggctccaccctgctcgttaccgtactcagccttgcaaagacggtaccagttgtcaaagaagggtttgttttttcgctcacacaccggagcagcttcgcgtgttgccgcagcagagtccgagaggaaatgggtccgcttcagctgatttggattatgttggttcgcccatgcgccatcgtctagagtttgtttcttcaccaacttctattctggcttcacctccaatatccccaccttctgagtcacctcctatgtcacccagtggctcatttaactcggtgagtgaacttgctgcttctatgcgaagtttgcagctgggtaagtctaaaatgaatggtgcttgttcctggggcctgcaaatgggatcgggtttcagttctccacgtggttccacactccgacccggtttttgcagctctccttcaactccaactcgtacgccgactcggtctagcctcggtcagtttgacatctgggaattcaacgctgtccaagaggaacctgcaatggagagagtggagtctgggagaaacctgagggcaaggatgtacgcaaaactgagcaaagaaaattctcccgcccgtccggaaccaaccgggtcgggtcctgatgttggttgggtatctgagttggtgaaatgaagctagttcttcataatgggttgggtaatcagcatttattttgatttattttgcggaatttaaacaaaaatcggtggcctttgattcttcttgactttttgtgaatattgatgatgtatctgatattctggtttggatatttggcattgtaaatagacgagaaggaaagagagatcagagaagtctctattttgtggtgctactgcctcttttcttcgatattgttcatggcaaaaaggaaaaaaaaaggaactacaacttttgtatagacaagaaggatttattagggctctgccgaagaaggggtagcggtttgcttctttttcattttcttcttccattatgaatcacgtaatttcctatccagattttctctgtaatttctcctatcatggataatcaatgtaatatatttcttatttctgtccttaaaaaaaaaaaaaaaaacaaaaaaaaaaaaataaaaaaaaaaaatata

SEQ ID NO: 6622 - DNA, 435 bp, Gossypium hirsutum
  Clone ID: uC-gsronu33B113d08b1
tcgcccacgcgtccggttctcggaacccggcacccaatcgtcattaacgaggctgttgatcttgcgaaacgattctgtgatggggcggctccacgaataatcaacgggtgcccacggctcagacctcaaactcaaaactggaagtgccacttcaagtatgaaagttagttcatttaaggctatttcttgttttttatagatctctgggttgccacatcacaatggtttagtctctgagtaatgtaatcttcagctcatttgagtgcttataaaggactgagttatagcatagaaagatgcagagaattaaaaaaacagataaattgtggcaacgatcaaaatatttgacagctgaagaattttgtatctgatattctggtttggatatttggcattgtaaatagacgagaaggaaagagagatcagagaagtctc

SEQ ID NO: 6623 - DNA, 448 bp, Gossypium hirsutum
  Clone ID: LIB3493-028-P1-M1-H1
caaaaatgatgatcggagaatcaatccagccaaagcccaccatcaaaatccccgtaggggacccattcaacgatccgacggctagctttcactcctttaactttaactacaacaatgcagtcagtagtccttgccccgtcgattacctcgggtctctccaccgttacctaccgtcaaacgactacgagtccgattcgctgagtgatgcattctcatgcgaccatttccggatgtacgagttcaaggtgaggaggtgtgctcgtggaaggtcacatgactggactgagtgtccgtacgctcaccctggtgagaaggcccgaagaagggacccgagaaagttccattactctggaactgcttgccccgattttcgcaagggaagctgtaagaaaggcgattcatgtgaattcgctcacggcgtttttgagtgttggctccaccctgctcg

SEQ ID NO: 6624 - DNA, 456 bp, Gossypium hirsutum
  Clone ID: uC-gsronu33B044f09b1
ttcattcgtccgcaaaaatgatgatcggagaatcaatccaaccaaatcccaccatcaaaatccccgtaggggacccattcaacgatccgacggctagctttccctccgttaactttaactacaacaatgcagtcagtagtccttgccccgtcgattacctcgggtctctccaccgttacctaccgtcaaacgactacgagtccgattcgtttagtgatgattcggacttgcctgttgatgcattctcatgcgaccatttccggatgtacgagttcaaggtgaggaggtgtgctcgtggaaggtcacatgactggactgagtgtccgtacgctcaccctggtgagaaggcccgaagaagggaccccgaaaagtttcagttcttcacgtggttccacactgcgaaccggtttttgcagcttttctttaacttcaactcgtacgccgacttcgttctag

SEQ ID NO: 6625 - DNA, 392 bp, Gossypium hirsutum
  Clone ID: uC-gsronu33B111f08b1
gctggttcgcccatgcgccatcggctagagttcgggtcttcaccaacttgtattggggcttcacctccaatatccccaccttgtgcggcacctgctctgtgaccccctgggtcattgaactggcagagtgaacttgctgcttctatgcgacagctgcagctggggcagtgtaaaacgaatggtgcttgctcctggggcctgcaaatgggatcgggtttcagttctccacgtggttccacactccggcccggtttttgcacatgtcctgtaactacaactggtgcgccgactcagcctaccctgagtcactttgacctctgggaatatacacctgggccgaggcacctgcgatggagagagagggtgctcgaagcgacctcagggcaacggtg

SEQ ID NO: 6626 - DNA, 1077 bp, Gossypium hirsutum
  Clone ID: GOSHI-09MAY01-C462_1
cttcatgttggaagctggggcttgaattaacctgcaattgattcttgctttgtgctgtatgttgtttacttcaaatagattaagaatctagcttttcttaccaacaagtcttcctgtatgtaaatttctttccttaagaatctagcttttcttattacgaaatcgatccctggctgcttctttgttgaacattgacccaatttccggtcccttatagctatataagcccccgtacgagcctccttttttgaaaccatatttcatttcaatccatcccttccatagccatgactgctgtctttattctcatcggcgtacttctacaactcttcacggccaccaccagcattggagtgaactatggcatgactgcagacaaccttccacctccatctgtcgttgccaatttccttagaacccaaactattttcgacagtgtcaagttgtttgacgctaatcctgatgtccttcgagcttttgcaaacactggaatttcagtttctgtcacggttggcaatggggatattcctggtcttaccaacactgttacagcgcgaagatgggttgctgatcatattagcccgtttcatcctcaaacgaagatcaaatacatatgcgttggcaccgaagtcttgttctccaaaaacgatgattggattaataaccttgtgccggctatgcggagccttcattatgccttgaataaagctggatttcaagacattaaggtcacgagtgctcatgcacttaacatattccgacgggatacaataccaagtttgatgcggttcatggtcggatatgatcaaagtttctttgcacccttactccaattccatcaacggaccaaatcacctttcatggtcaacccctatccttactttagcccggacataacgagaagattgaattatgcacttttcaagccaaacagcggaatctatgacaaatattctaagaaaaattacaccaatatgtttgattctatcatggactcgacttatactgccatgaaagcccttggctatggaaatgtggagattgccattggtgagactggttggccgacacaaggtg

SEQ ID NO: 6627 - DNA, 1489 bp, Gossypium hirsutum
  Clone ID: GOSHI-09MAY01-C412_1
ctgaagctgttgatctcttgatggaggttgaggatcttgaccttttagttgagcatgttgacaagacaaatgtcaagagaacttgtctatacctcaccagtgctgctagataccttcctggaccagatgacatgttagttttggatattgcatacacaatatatcttaagttcgaggaattcgcgagtgcacttcaaattgcactttcccttgacaacatgcagcatgtgagacaggtgtttacgtcttgtgataatcagctaaagaagatgcaattttgctacattcttgctcgacatgggatcacctttgagcttgatgatgagatggttgcagatgatgaagaaagagagactttacaggatatcatcaacaatactaaattaagtgaaagttatctcagtcttgctcgtgatatcgaggtcatggagcctaaatctcccgaccatatctgtggggctcacttgcttgagggccgtgctagtgctcgtgcaagtgttgattcaactagacagaatttggctgctacgttcgtcaatgcatttgttaatgctggttttggccaggataagttaatgacggcgccagcagactcttcaattggtggttcatctggaaattggcttttcaaaaacaaagaacatgggaagaccagtgccgcagcaagtctgggtatgattctattgtgggatgtcgactctgggcttgctcagatcgacaagtatttccatagcaacgataaccatgtgattgctggagcattattaggagttgggattgtcaattgtggtgttaagaatgattgcgaccctgcactggctctattgagtgattatattagtaaagaggattcttcagtccgtattggtgcaattatgggtttgggaattgcatatgctggtgcccagaatgagcagatccgtagcagcttgactctgatacttaatgatgcaaaggctccccttgatgtgatagcatttactgcaatttcgttgggtttgatatacgtgggttcctgcaatgaggaggttgcacaggctattatatttgctttaatggaccgaagtgagtcagagttgggggagcccctcactcgtcttctgccacttgctcttggtcttttataccttgggaagcaggaaagagtggaggcgactgcagaggtctcaaagacgttcaatgaaaaaataagaaaatattgtgatatgacactactttcttgtgcttatgctggaactgggaatgttctgaaggtccaaaaccttcttggtcattgtgctcagcatcttgagaagggcgaaacccaccaaggtccagctgtgcttggtatcgccatggtagcaatggctgaggaattgggtcttgatatgtcaattcgttcactagagcatcttttgcagtatggtgagcagaatatccgtcgtgcaggttctttggctcttggtcttctttggatatcaaacccaaaggttaacgttatggacacatt

SEQ ID NO: 6628 - DNA, 349 bp, Gossypium hirsutum
  Clone ID: LIB3272-009-P1-K1-B3
ggagcattattaggagttgggattgtcaattgtggtggtaagaatgattgcgacgctgcactggctctattgagtgattatattagtaaagaggattctaacatccgaattgatgcataaattaggcgtggaaaattgcatatgctggtgcccagaatgagcagattcgtagcagcttgactctgatacttaatgatgcaaaggctccccttgatgtgatagcattcactgaaatgtgctcgggtttgacatacgtaggtgcaccaactgatgagggtgcacatcttccatgagtactctaatggaccgatattagtcagagtttgtggagccccctatttcgatcttt

SEQ ID NO: 6629 - DNA, 714 bp, Gossypium hirsutum
  Clone ID: GOSHI-09MAY01-C432_1
cggacgcgtggggccgcccttttttttttttttttactcgaggagagggaaatattgaaacttgaaagaaataataattgcagccagaaaatgttaatcaaatcatcatcaaaaggattgatgttcagacaaaacacttaaaacatcaacattaaaaaaaagtctttcactagtgctgctgctccttctcctctgcagatttgttgtattgttccatttgtttcttgtatacttccatggcttcacttgctttcgcattccaaacatccctttcttctccactaagctccttccatttcactgaaatcagggcattaagtgtagagttgttgattccttgtcgttcttgtaccagagttttccttgcttctttgctgaacaaaaggaaagaagatgcaggctttttaggtttattaggatctgaattctgctgcttcttttgttgacgtttctctttggtttttttaatgatatgatcagttttctctttctttttaagcaattgaagtgcttcttgttcctgtagtgtcatcatctcttcgtcttgttttttaacattcaatgcttcttcttcctttttccgcttgtaaacctccatttcttccatgttttttccttgttcttctttgctatctcttcataaggcttttttgttcttcagtcatgtcttccttcttcgcccgcgttttcgccgctccaaaacgtctgctcaga

SEQ ID NO: 6630 - DNA, 306 bp, Gossypium hirsutum
  Clone ID: LIB3146-041-Q1-K1-A2
cggacgcgtgggcggacccgtgggccgacgcgtggggtagaagcattggatgttaaaaaaacaggagaagagatgatgaaactacagaaacaagaagcacttcaattgcttaaaaagaaagagaaaactgatcatatcattaaaaaaacccaagagaaacgtcaacaaaagaagcagcagaattcagatcctaataaacctaaaaagcctgcatcttctttccttttgttcagcaaagaagccaggaaaactctggtacaagaacgacaaggaatcaacaactctacacttaatgccctgatttca

SEQ ID NO: 6631 - DNA, 994 bp, Gossypium hirsutum
  Clone ID: GOSHI-09MAY01-C782_1
cccagcgtccgctctactcatcaagttcttcccttttggggtcctttctctgatatctccattctttagctttgcttttctttctcatggcgcaggttttagacgacgctgagttttggcttccacctcagtttttaaccgacgacgacttgggcatcgacaatagtaaggctaagagcaatcccaagtatgttgatggtggttttggattagagcttggcggttctaagtctttgtttccctacgagttcccttatgggtttgggtctttgggtttctcttcggatccaagttctccggttgagtcagtggtgggttctactgagacagagagtgacgaagaagattatcttgctgggttaactcgtcaaatggctcactctaccctcgaagacggtattcgcagaaacggccgtgccttttcttctgaaaaccctaagggtcgggtcatgtccagttcgccgcaatcaaccttatgtgtgtcaaggagcgggtgcagttgcatgcaagggtgtagccgtggaagccctacttgccaatcccgagttccgccaccgccgggaacatgggatttgctgtatgcggcggcagaggaagttgcaaggatgcgaatgagtgaagaatcatatggtgggctcaacaacagaggcctcctaggttattcggcaaggaagttctcaccgaacgccgatgttactggcttttacctgcctacccagtctcttgctcaccagaaactacagaccgctcaatttcagatgctgaagcaacagcagctaatgaaacaacaaaatgcatcggtttgggcaggacaaaagcagcagctgcattcgcaccaccataaccatgtggtccaaagcagagtgaggagtaataatagtagcaataggcctatgggtttgtcccaatctgcatggccccctctgcagcagcaaacccagacgccaaacgggtcgggtatgagggcagttttcttgggcaatccaactggaaa

SEQ ID NO: 6632 - DNA, 602 bp, Gossypium hirsutum
  Clone ID: LIB3582-047-P1-K1-G1
cggacgcgtgggttttgtggtcttcttcttcgtccaactttgtgtctgtaagaaaattcccttgttcatgtttttttctattctaaacggtaccctcacagtttgcagagatgcagctggaatcgctgggaacatctttgctttcgggctgttcatatcacccatacccacatttaaaagaattatcagaaaccaatccaccgagaatttttcgggattgccttacatatatgcccttttgaactgcttgatctgcacgtggtatggcacgcccctggtatctcatgacaacgtactggttatgacggtcaattcaatcggtgctgtttttcagattacctacattgtcaccttcattgtatatgccgataaagagaaaaaggttgtctaaaattttcaaatttatatgcatttgttgttctggctacaatgatcatacccttatattatgtttgtatgtgtgtcggaataagaacttcaagaaaaacgaaggctccagctaatataggtgttgttttcaactgttggtcatatgatttgtgttgatgaccgatgagaatgcttggaatgctactcggagtttttggcctactggcgaacat

SEQ ID NO: 6633 - DNA, 435 bp, Gossypium hirsutum
  unsure (1)..(435): unsure at all n locations
  Clone ID: LIB3145-011-Q1-K1-C6
cccacgcgtccgcttcttcttcgtccaactttgtgtctgtaagaaaattcccttgttcatgtttttttctattctaaacggtaccctcacagtttgcagagatgcagctggaatcgctgggaacatctttgctttcgggctgttcatatcacccatacccacatttaaaagaattatcagaaaccaatccaccgagaatttttcgggattgccttacatatatgcccttttgaactgcttgatctgcacgtggtatggcacgcccctggtatctcatgacaacgtactggttatgacggtcaattcaatcggtgctgtttttcagattacctacattgtcaccttcattgtatatgccgataaagagaaaaagatgagaatgctnggaatgctactcggagtttttggcctactggcgatcatagttgctggtag

SEQ ID NO: 6634 - DNA, 1052 bp, Gossypium hirsutum
  Clone ID: GOSHI-09MAY01-C742_1
gctaccggtacgggtccggagttcggcacgcgtctcgcgctcgcctccccgcttttttaacattattctctttttttttaatgttcatttcgcaatattttagatctcggagttttcttttattctgatttatgccatttctttcttgttacttatctctctcaatttattaattcagtggtggagtttttttctaaatagttaattttttttatactcggtagtcgggactgataactgcaattgctgaagtttagtatggattcctcggcttcgctgttaaacaagctcatgggtgcggatccatttttcttgttagcgggtcccaatgtgattgaatctgaagatcacattctaaggatggctggctacatcaagactatcactaccaagcatgaatttctttgttcttcccccccccaccccgcctttttttcttttttggaatcacttgtgcaaaactacttgagattgatcatagtatcatagtagaacatgtacaaagctatgtttttttttttttttctgatctatatctgcgcgttctgtattttgtagacttgggttgcctttggttttcaaatcaagctttgataaagctaaccgaacatcatcaaaatcatttcggggtcctggaatggctgaaggcttgcagatccttgagaaagttaaagtagcatatgacattccaattgtaactgatgtccatgaaactattcagtgtgaagcagttggaagagtcgctgatgttattcagattccagcattcttatgtcgtcagacggatcttctagttgaggcggccaagactggaagaattatcaatattaaaaaaggccagttctgtgctccttctgttatggtaaattctgctgagaagattagattggctgggaatccgaatgtgatggtttgtgaaagaggcaccatgtttggctataatgatcttattggtgatccacgtaacttggagtggatgagggaagcgaattgtcctggtggtgctgatatcacacattcactgcaacagccagctggaagaaagttggatg

SEQ ID NO: 6635 - DNA, 441 bp, Gossypium hirsutum
  Clone ID: LIB3145-008-Q1-K1-E12
aaaaccgggccgaccgcacgcgtccgcccacgcctccgcccactcgtccgcaatttctgaagtttagtatggattcctcggcttcgctgttaaacaagctcatgggtgcggatccatttttcttgttagcgggtcccaatgtgattgaatctgaagatcacattctaaggatggctggctacatcaagactatcactaccaaacttgggttgcctttggttttcaaatcaagctttgataaagctaaccgaacatcatcaaaatcatttcggggtcctggaatggctgaaggcttgcagatccttgagaaagttaaagtagcatatgacattccaattgtaactgatgtccatgaaactattcagtgtgaagcagttggaagagtcgctgatgttattcagattccagcattcttatgtcgtcagacggatcttctagttg

SEQ ID NO: 6636 - DNA, 685 bp, Gossypium hirsutum
  Clone ID: GOSHI-09MAY01-C702_2
atagctacttaagcatggcttctaaaccaggaatcctcactgactggccatggaagcctcttggaagctttaagtatatactcctacttcctttgacaacggtacacatatactcgtttatggagaaggatgatgatatagacgtgtccatgctggtattattcccatttatgttatggcgaatgcttcatcaccagctatggagtagcctttctcgttatctaacgtgccaaaggcaccaacatgattgtggacaagggcattgaatttgaccaagtggacagggagagagactgggatgatcaaataatgttcaatgcaatcctgttttactggggcaacaaatacgttccaggaggttcacacttacccttttggagattggatggtgtgattataaccatgttgctccatgccggccctgtggagttcctttattactggcttcatagagcactgcatcaccattatctttactctcgataccattctcatcatcattcctccattgtcactgagcctattacttctgtgattcatccatttgcagagcacattgcatacttcctcctgtttgcaatacccatcttgacaacggtgctaactggtactgtctccattgtttgcctactgcttacattacttacctgaactttatgaacaatatgggccactgcaatttcca

SEQ ID NO: 6637 - DNA, 2182 bp, Gossypium hirsutum
  Clone ID: GOSHI-09MAY01-C702_1
aacgtggacgaatgtaaggttgtaggtttacagtacagcttgaatgcaccatatataccacccctccctccacatacaaagcaactcaacctcgtaatagtaattttattcccttccaaagccatttgcagctagctcaccagaccatggcttctaaaccaggaattctcacagactggccatggacacctcttgaaagctttaagtacataatcctgggtccttgggttacggagaccatatactcaattatggttaaggatccaaaggaatgggacctgaccaacttttcggtaatcccattcatgttatggagaatgttgcacaaccagctatggattagcctttctcgttatcgaactgccaaaggcactaacaggattgtggacaagggtatcgaatttgaccaagtcgacagggaaaggaactgggatgatcaaatattgttcaatggaatcctgtttttcttggctaacaaatacgttcccggggcttcacacttacccctatggagaacagatggtgtgattataaccatgttgctccatgtcggtcctgtggagttcctttactactggcttcatagagctctgcaccatcattatctttactctcgttaccattctcatcaccattcctccattgtcactgagcctatcacttctgtgatacatccatttgcagaaaacatagtatattttgcactgttcgcaataccaatgttgacagttgtgcttactggaactggatctatcatcgccattgctggctacatcacttacatcgacttgatgaacaacatggggcattgcaacttcgagctcatccccaactgggtcttctccattttccctcctctcaagtacctaatgtacactccatcgtttcactcgctgcatcacacacagttcagaaccaactactcattattcatgccattctacgattatatctatgatacaatggataaatcttcggataccttgtacgaaaattcactcaaaagaaaagaggaaacgcccaacgtggtgcatctaacgcacttaaccacaccagaatccatctatcatctccgctttggatttgcctccttggcctctaaaccttactcgtcagcttggtacttgtggttgctctggcctgttacattgtggtccatggtgcttaccaggatttatcgtcgaacttttgttgttgaaaggaaccgcttccatcagctcagattacaaacatgggccattcccaagtacggaatacagtaccgcttgaaatggcaaaaggaatccgtcaataacatgattgaggaagctgtattagaggctgaggaaaaaggtgctagtgtgttgagtctaggcctcatgaatcagggtgaagagctaaacaggtacggtgaggtgtatgtgaagaagcatcctcagttgaaagtgaagttagtggatgggagtagcttggcagttgcagttcttctaaatagcataccaaagggaacaacccaagtactccttagaggcaacttgactaaagttgcttttgcagtcgcctttgccctgtgcgaaaagggcattcaggtcactgtattgcgtgaggatgaatatgagaagcttgataagtcacttggcaccaaatctgagggtaaattggttacctctaagagttatagctcttgcaaggtatggttagttggagatgacttgaccgaagaagagcaaagaaaggcaaataaaggaacactatttattcccttttcgcaacttccaccaaaaaaattgcgcaaggactgcttctatcacacaacaccagcgatgcagactccgacggcccttgagaatgtggattcttgcgagaactggttgccaaggagagtgatgagcgtatggcgcatagctgggatactgcatgctctggaaggatgggaagagcacgaatgtggttacaccatgtctaacattgacaaagtttgggaagcatgtctcaagcatggatttcagcctctgaaggtcccaactcaatcaaagtcctagaagatatttggcgatttatctaattaatctacttgatatctatgtttaatgtataagcatttacctaaataacattatccttatcctggattcatcatgtgactctatcgggtcataggttgctctcagagttaaactatatattatatattatactcttt

SEQ ID NO: 6638 - DNA, 612 bp, Gossypium hirsutum
  Clone ID: LIB3828-006-Q1-K6-F5
cctgcagtaccgtccgattccggtcgaccccgtccgctaaaacatacaaggaaaacagtatccttaaggcattgactaagttgcttttgcagtcgcctttgccctgtgcgaaaagggcattcaggtcactgtattgcgtgaggatgaatatgagaagcttgataagtcacttggcaccaaatctgagggtaaattggttacctctaagagttatagctcttgcaaggtatggttagttggagatgacttgaccgaagaagagcaaagaaaggcaaataaaggaacactatttattcccttttcgcaacttccaccaaaaaaattgcgcaaggactgcttctatcacacaacaccagcgatgcagactccgacggcccttgagaatgtggattcttgcgagaactggttgccaaggagagtgatgagcgtatggcgcatagctgggatactgcatgctctggaaggatgggaagagcacgaatgtggttacaccatgtctaacattgacaaagtttgggaagcatgtctcaagcatggatttcagcctctgaaggtcccaactcaatcaaagtcctagaagatatttggcgatttatctaattaatctacttg

SEQ ID NO: 6639 - DNA, 1021 bp, Gossypium hirsutum
  Clone ID: GOSHI-09MAY01-C722_1
aaaaagtagaaatcaaccctcgctccgccttatatttcagtttgctttgctttgctgcatctcattctcacttcacctttttttttttaattgtctggatcatcggaaagaaattaaagaaccaatcatgaagcttgacaccagcggactagaatcggctgctcctgtctggggtgctcccagtgaacttgttgacgggttttcggctgctccgtcgttcgatctcccaaacactactgattttgatgggtttcaaaaagaagctatccagatggtaaaacctgctaagggtaccaccacgctagctttcatctttaaggaaggggtcatggttgccgctgattctagagctagcatgggaggctatatctcttcacaatcagtgaagaaaattattgaaatcaatccttacatgcttggaacaatggctggaggagctgctgactgccagttttggcacagaaatttaggcatcaagtgccggctgcatgaattagcaaacaagcgtagaatttcagttacaggggcatcaaaactgttggcaaacattctctattcttaccgaggaatgggactttcggttggaaccatgattgctggatgggatgaaacgggccctggactatactatgtggacagtgaagggggaaggttaaaaggaatgcgtttctctgttggatctggttcaccatatgcttatggtgtgctggataatggctatcggtatgatatgtctgttgaagaggctgcagagttggccagaagagctatttatcatgccacattccgagatggagccagtggtggtgttgccagcgtttactacgtgggaccaaatgggtggaagaagctatctggtgatgatgttggagaacttcactataaatactatccagtgatgccaagcacagtggaacaggaaatggttgaaggaggtggggcataaatgggatctactcaacctaggccaagttgataagatggattaaatgggatttattcttatttacaatgaatactt

SEQ ID NO: 6640 - DNA, 606 bp, Gossypium hirsutum
  Clone ID: LIB3582-049-P1-K1-H6
gtaccggtactgcctggttggacccacgcgtgcgcccacgcgtccgcggacgcgtgggaaaaaaacgaacatgaagcttgacaccaccggtatggaatcggcggcgccggtttggggttctcataatgaacttgttgatgggttttcggctgctccgtcattcgagctcccaaatactactgattttgatgggtttcaaaaagaagctattcaaatggtgaaacctgctaaaggaaccaccacacttgcctttattttcaaggaaggtgtaatggttgctgctgattctagagctagcatgggaggctatatatcatcacagtcagtgaagaaaattattgaaatcaatccatacatgcttggaacaatggctggtggagctgctgactgccagttttggcacagaaatctgggaatcaaggtatgaattcctgccatccaagtccttttccgtgttagctttgtttagcttgttttgtatggaattgtatagtatatccatggcttttatgcagaatgtttcattttggcattgtttctttatgtttttttgttggttctttcacatttctgtttttctaaaaccttgaaagtgcaagtatgata

SEQ ID NO: 6641 - DNA, 499 bp, Gossypium hirsutum
  Clone ID: uC-gsflmaxxa089h02b1
ctgctgcgcctgctggtgccgccgcggcatacccgggtggacccaccccgccgcttattatgacttcacctctctttatcttttttgagggggatgtatcatcggaaagaagttaaagaaccaatcatgaaacttgacaccacacgactaaaatcggctgcgcctggctcgggtgctcccatcgaactcgttgatgggttttcggctgctccgtggatagatctcccaaacactactgattgtgatgggtttcaaaaagaagctctccagatggtgataacctgattagggtaccaccacgctagctctcatctttaatgaactgagtgatggttgccgctgactctagagctagcatgggaggctatatctcttcacagtcagtgaacaaaactattgagatcaatgcttacatgcttggaacaatcgctggaggagctgctgactgccaattatggcgccgagatttcagcatcaagtgccggctacatgaattagc

SEQ ID NO: 6642 - DNA, 357 bp, Gossypium hirsutum
  Clone ID: uC-gsflnu33B051f03b1
ctggatctcattagatttctctgtctcttcccgccgatcatctgcaatctgattgaaagttttgtttaaagaagaaaaaaacgaacatgaagcttgacaccaccggtatggaatcggcggtgccggtttggggttctcataatgaatttgttgatgagcttgcggttgctgcgacattcgagctcccaaatactactgattttgatgggcttcaaaaagaagctattcatatggtgaaacctgttaaaggaaccaccacacttgcctttattttcaaggaaggtgtaatggttgctgctgattttagagcttgcatgggaggttatatattatcacagttagtgaagaaaattattg

SEQ ID NO: 6643 - DNA, 2008 bp, Gossypium hirsutum
  Clone ID: GOSHI-09MAY01-C692_1
cccacgcgtccgaaggccttcattttccccgttcatttctgtcacgctcaaaaaatccaatggcggaaacagatcaggcgccgccgccgtcggaccaactcgccgcgctgaacttgaccgacaccgttgagaaacacgcattttctgaccgtgtcctgatccgttccatcgtgggccggccagatggcggggctggccttgctgggcaacgagtccgggccggtggttgggtaaagacagggagagagcaagggaaaggaactttcgccttcttggaattgaatgatgggtcgtgcccggcgaacttgcaggtgattgtggacgccggactggctgttctgagcaagctggtggcgaccggcacctgcgtggtggtggatgggatattgaaggtgccacctgaaggcacgaggcagaagattgagcttcgggtcgaaaaagttgtttctgtaggcgaggtggatcctgctaagtacccgattccaaaaacgaagctcacgcttgaatttttgagagatcatcttcatcttcgagctaggaccaacacgattgcagccattgctcgaattaggaacgcacttgcctttgctacgcattcattcttccaagagcataatttcctttatgtgcacactccaattttaactactagtgattgtgagggtgctggtgagatgtttcaagtcacaactttgattagtgaatctgaaaagctggagaaggaactgattaaaaaccctcctccatcggaggttgacatagaagcagctaggcaagttgtgagcgagagaggagaggctgttaaacagcttaaagctgccaaagcaagcaaatcggaaatcactgcttctgtggctgcgcttaacaaagcaaaggagaatctctctaagctggaggagagatctaaattgaaacctgggattcccaagaaggatgggaagattgactacactcaagacttctttgcccgccaagcttttttgacagtttctgggcaactgcaggttgaaacatatgcttgtgctgttagtaacgtgtatacatttgggccaacttttcgggctgaacactctcacacttcaaggcatttggcagaattttggatggtagagcctgaaatagcatttgcagatctacaggatgacatgaactgtgccgaggcttatgtgaagtatatgtgcaattggttgcttgataaatgccttgacgatatgctattcatggctaaaagttatgataaaggttgcattgatcggttgagaatggttgcttcaattccctttgtacggatatcatacacagaagcggtggagcttttagaggaagctgtgagaggtggtaagaaatttgagaatgaagtgaagtgggggattgatttggcttctgagcatgaaagatacttgactgaagttaaatttcagaagcccgttattgtttataactacccaaagggaataaaagcattctacatgaggctcaatgatgacttgaagactgttgctgctatggttgtccttgtgcccaaggttggagaactaatcgggggaagccaaagggaagaacgttatgaggtcattcgggaaagaattttggaggtggggttgcctcttgagccatatgagtggtatcttgacctgcggcgatacggaactgttaaacattgtggattcgggctaggctttgaacgaatgattctctttgccactggcatcgagaacattagagatgttattcccttcccaagatatccgggaagagctgatctctgattggatttttctaagatgacgtgagaaaatggtcttggttttcaggttaatactcatgggttttagtaaatttttgcgcattggcaatcatattacgtactttgaaaagaattgtaaaagtataactgtttcttaatttttgttctttctctgttcatccttaacagcaccacatgtttgttatatattgatgttagtgttatcatctaatgcaataatatatacgtcttctttacctc

SEQ ID NO: 6644 - DNA, 601 bp, Gossypium hirsutum
  unsure (1)..(601): unsure at all n locations
  Clone ID: LIB3828-010-Q1-K6-A4
caggnatgacatgaactgtgccgaggcttatgtgaagtatatgtgcaattggttgcttgataaatgccttgacgatatgctattcatggctaaaagttatgataaaggttgcattgatcggttgagaatggttgcttcagttccctttgtacggatatcatacacagaagcagtggagcttttagaggaagctgtgagaggtggtaagaaatttgagaatgaagtgaagtgggggattgatttggcttctgagcatgaaaggtatgcaagtcttttttattatttttgacctgctttaaatgttgagcatgaaaggtatgcaagtctttcttattgtttcttctacctgctttatgtggatgcttaaatcctatgctttatgtggatgcttaaatcctattttgcgttggccttgcagatacttgactgaagttaaatttcagaagccccttattgtttataactacccaaagggaataaaagcattctacatgaggctcaatgatgacttgaagactgttgctgctatggatgtccttgtgcccaaggttggagaactaatcgggggaagccaaagggaagaacgttatgaggtcattcg

SEQ ID NO: 6645 - DNA, 479 bp, Gossypium hirsutum
  Clone ID: LIB3828-010-Q1-N6-A4
gaggtaaagaagacgtatatattattgcattagatgataacactaacatccatatataacaaacatgtgctgttaaggatgaacagagaaagaacaaaaatgaagaaacagttttacttttacaattcttttcaaggtacgtaatatgattgccaatgcgcaaaaattactaaaacccacaagtattaaactgaaaatcaagaccattttctcaggtcatcttagaaaaatccaatcacagatcagctcttcctggatatcttgggaagggaataacatctctaatgttctcgatgccagtggcaaagagaatcattcgttcaaagcctagcccgaatccacaatgcttaacagttccgtatcgccgcaggtcaagataccactcatatggctcaagaggcaaccccacctccaaaattctgcgaggaatagcaacaaaccatgacaggtcagcagtacaaaacaaaaataccatcatg

SEQ ID NO: 6646 - DNA, 1381 bp, Gossypium hirsutum
  Clone ID: GOSHI-09MAY01-C632_2
ctgtggaagacggtactacatttgcagcagatgctgttatcgttgctgttcctctaggtgtactaaaagccaagacaatcaagttcgaaccaaggcttcctgaatggaaggaagcagcaattgatgaacttggagtgggaattgagaataaaattatattgcactttgacaaggtgttttggcctaatgtggagtttttgggagttgttgctgacacatcttatcattgcagctactttctaaaccttcataaggcgacaggtcattctgtcctcgtttatatgcctgctgggcagctggccagagacattgagaaaatgtctgatgaagctgctgtggagtttgcttttatgcagctcaagaagatccttccagaggcatgggccccgattcagtatcttgtttctcgatggggcacagatgtgaacacactaggctcctatagctatgatgcagtaggcatgtcccatgacctgtatgagaggctaagggtgccagtggataacatattctttgcgggggaggcaaccagtatgagctacccagggtccattcatggtgcattttcaactgggcagatggctgctgaggactgtaggatgcgtgtactggagcgatatggagagttgaacttgctccaaccagttatgggcgaggaagcagggttgtgcgtcccgcttttaataacgcgcttgtaaacaacctacctgtctaggcaatgtacccggttccaaagtatgtatttgtagatatgttggggtgtgatttgagtgacacattgatcccaatttcaagggctacttgcattggtttgatgtgtcgtatattgtcacttttaagcatagttatactgaactgagatccggacaagaatatcttgtatggtgatcttaatgtgttggggtggtgaagtatttaattaagaatagtatggttgagatggtgcaggcatgggggcatgcctatgttaaagtgaagtatgttttggatatgaaaggtgcaagttgcgtcatccactacatgagtgggaaggacaccgatgaaatggtgatataattttattagggaaatgaaacagtcgcgttttttgttctaaaaaaaaaaaaaaaaaaaaaaaaaaaaaaaaaaaaaaaaaaaaaaaaaaaaaaaaaaaaaaaaaaaaaaaaaatgatataaaaatatataataaaaaaaaaatacaaacaataataatattttaagaaaatatataatcaacttcatatttaaaaattaaaactgagaatgggcgccctgtttataagattaaagttcttttatgttgtgttgcggatttgagttttttttcaatgggggtctatgtggaattgcgaacgctacgatacacaacttttttttcctt

SEQ ID NO: 6647 - DNA, 773 bp, Gossypium hirsutum
  unsure (1)..(773): unsure at all n locations
  Clone ID: AI055130.1
gttgttgtctttgtacatgatgaatgaaaatctttcaataaaaaataggaatagatcctagtttgactcactaacaaccccccccacaaaaaaaaaaaaaacaacattttcatgtattttgccaaattcttacttgttctacttccatttactatgatgctcctcaactacattgactttctgtacctacaactttctgtttttattttctatctttaggaagagctattacctggtggtcacggactcatggtcaggggctatcttcctgtcataaacactctggccaaaggtattgacatccgcttgagccacagggttacaaacatagtgagggcgttacactggagtgaaggttactgtggaagatggtactacatttgcggcggatgcctgttatcgtgctgttcctctaagcgtactaaaagccaagaatatcaagttcgaaccaaggctttctgaatggaaggaagcagcaattgatgaacttggagtgggaattgagaataaaattatattgcactttgacaaggtgtnttggcctaaatgtggagttttttgggatgtttgctgacacatcttatcattgcagctactttctaaacttcataaggcgaaggncatctgtgctcggtatatgcctgctggcanctgccagagacttgagaaatggctgatgaactgnctgtgagtgcgttaatcacactagagaacttacgagcatgtccccataaatatgtttcgatggggaaatgaccatatgtctatttttt

SEQ ID NO: 6648 - DNA, 420 bp, Gossypium hirsutum
  Clone ID: LIB3135-053-Q1-K1-H12
gcgtgcggttgcttgggacgaggtcaggaggtagtcagctgaggctgatcttaggcttagacttgaaatagaatataatgatcctttcgtgtctaaaccgccaagaaagcgacgggactgaatagcgtcagatatatgcctgctgggcagctggccagaaacattgagaaaatgtctgatgaagctgctgtggagattgcttttatgcaactcaagaagatccttccagaggcatgtgccccgattcagaatcttgtttctcgatggggcacatatgtgaacacactatgctcctatagctatgattgagtaggcatgtcccatgatcttgatgatatgctaagaaagccctgggtaacatattctttgcgggggaggccacccagatgagctatccacggtccattcatggtggcattt

SEQ ID NO: 6649 - DNA, 508 bp, Gossypium hirsutum
  Clone ID: GOSHI-09MAY01-C182_1
acgcgtccgagctggtaaggactgtatcaatacaggatcaatcaaattagtaatggctggaagggggtgttaaagtgcggaggaagttgaacaggttttgttacaagtagatggtgacgttgatgctgctatagagtttctgatagcagaacaaggggctgaagaatgtacagctgcaaatgattcacttacttgtcatgcaaatggttcttatggtaatggccggtaatgatgaaaatggaaacagtgaacaacacaaggaagaaaatgtagggaagacctgcgaacaggatccatatagtgatggcactaaaacccttggtggtaacactcctcggctggatgaaaagaagattccaagaaacaagttatgcccctgtggatcaaagaaaaaatacaaggcttgttgtggatctgtctcagggaggtcctcgactaagatcatggttaaccagccaatggaggccagaaagggtagaaaggagcggaaacagaacaataagggagt

SEQ ID NO: 6650 - DNA, 716 bp, Gossypium hirsutum
  Clone ID: GOSHI-09MAY01-C142_5
ttacacatcattttcttggtggataacatccccattagagtcttcaaaaatgctgaatccattggtgtatccgttccccaagagccaacccatgaggatttactctagtttatggaatgctgatgattgggccacaaggggtgggttagtgaaaactgattgggcaaacgcacctttcacagcttattacaggaacttcattgacaatgcttgtgtctggtcaggaagaagctcatcatgcgctaaaactaactcggtctacgacggtgcatgggaaacatacgaacttgatgcaccaggaagaagaggattaatatgggatcaaaaatatttcatgatttataactattgtactgatttgaaacgtttccctcagggtgttccaccagagtgtaaacgcccaaggttctaaaatcaaacctctcctcctttccatgtaatatattctttttttcactactttcttactatgtattcaagttgcactcaacttgatgcttggggatggatggaataagtggctattattattattcttttttttatgtatttttatttcgttccgttgcttcttaaatcatcttgaaaatagaggtcgatcccctgcttctgataataaaattttcctcttttttagtaacgcgcagcgtgaccgcttcacaaaaaaaaaaaaaaaacataacaaataaaccaaaaaaaataatataaaaatattg

SEQ ID NO: 6651 - DNA, 907 bp, Gossypium hirsutum
  Clone ID: GOSHI-09MAY01-C142_4
gtttttaatgtatttctttgtgtatgttttgcagctgtcatctcaagggccaacccatgatgagatagactttgaattcttagggaatctgagtggtgacccttacattttacacaccaatgtcttcacacaaggcaaaggcaacagagaacaacagttttatctttggtttgaccctacaagaaacttccacacctattccatcatttggaaaccccaacacatcatgtaagaacccatcaaataatgtcttctactttgtcttttgccttaataacattagctactttttgtctttttctcagtttcttggtggataacatccccattagagtcttcaaaaatgctgaatccattggtgtaccgttccccaagagccaacccatgaggatttactctagtttatggaatgctgatgattgggccacaaggggtggggttagtgaaaactgattgggcaaaagcacctttcacagcttattacaggaacttcattgccaatgcttgtgtctggtcaggaagaagttcatcatgcgctaaaactaactcggtctccgccggtgcatgggaaacaacccacccggccgcccccgcgtccggaagattaagatgggttcaaaaatatttcatgatttataactattgtactgatttgaaacgtttccctcaaggtgttccaccagagtgtaaacgcccaaggttctaaaatcaaacctctcctcctttccatgtaatatattctttttttcactactttcttactatgtattcaagttgcactcaacttgatgcttggggatggatggaatacagttgctattattattattcttttttttatgtaaaaaaaaaaaacaaataaaaaaacaataatttatattctcaacaaaaaaaaaaaataaatatc

SEQ ID NO: 6652 - DNA, 959 bp, Gossypium hirsutum
  Clone ID: GOSHI-09MAY01-C142_3
cttcttttttatacagggttttaggttctgtttttcaatctaagaaagctcgggggggggtttctaaattcctacacctcttcttttcacaaatcacttggcacctttcaccgcttattatccgtcatctcaagggccaacccatgatgagatagactttgaattcttagggaatctgagcggtgacccttacattttacacaccaatgtctttacacaaggcaaaggcaacagagaacaacagttctatctttggtttgaccctacaagaaacttccacacctattccatcatttggaaaccccaacacatcattttcttggtggataacacccccattagagtcttcaaaaatgctgaatccattggtgtaccattccccaagagccaacccatgaggatttactctagtttatggaatgctgatgattgggccacaaggggtggattagtgaaaactgattgggcaaaagcacctttcacagcttattacaggaacttcaatgccaatgcttgtgtctggtcaggaacaagttcatcatgtgctaaaactaactcggtctccgccggtgcatgggaaacaaacgaacttgatgcaccaggaagaagaagattaagatgggttcaaaaatatttcatgatttataactattgcactgatttgaaacgtttccctcaaggtgttccaccagagtgtaaacgcccaaggttctaaaatcaaacctgttccaccagagtgtaaacgcccagggttctaaaatcaaacctctcctcttttccatgtaatatattctttttttcactactttcttactatgtattcaagttgaataagttattattattattattattctttttatgtatttttatttctctttgttgcttcttaaatcatcttgaaaatagatgtaaattccctgtttctgataataaaattttcctctttttgagtattt

SEQ ID NO: 6653 - DNA, 1029 bp, Gossypium hirsutum
  Clone ID: GOSHI-09MAY01-C142_1
cccgcgtctcttcttctctctttttctcattcattctttagtttcaatatcaaagcaaaaatgggttcttcttgtaatgttgtttcaatggccttactggcttgtttggtgttgaactccttggtttttgttgcccacggtggtgacttttaccaggatttcgacctaacatggggtgacagaagaggcaagattttcaatggtggcaagctcttgtctttgtctttagacagggtttcagggtctggttttcaatctaagaaagagtatttgtttggaaggatcgatatgcaactcaagcttgttgctggcaactcagctggcactgtcactgcttattatctgtcatctcaagggccaacccatgatgagatagactttgaattcttagggaatctgagcggtgacccttacattttacacaccaatgtctttacacaaggcaaaggcaacagagaacaacagttctatctttggtttgaccctacaagaaacttccacacctattccatcatttggaaaccccaacacatcattttcttggtggataacacccccattagagtcttcaaaaatgctgaatccattggtgtaccattccccaagagccaacccatgaggatttactctagtttatggaatgctgatgattgggccacaaggggtggattagtgaaaactgattgggcaaaagcacctttcacagcttattacaggaacttcaatgccaatgcttgtgtctggtcaggaacaagttcatcatgtgctaaaactaactcggtctccgccggtgcatgggaaacaaacgaactttgttgcaccaggaagaagaatgattagaatgggttcaaaaatttttcatggattataactattgactgatgaaaagtttccaagggtgtccacaagtgtaaacgccaagttctaaataaacctgtccacatgtaaccccaggtctaaatcaaccttctttttcagtataatccttttcatacttctacatgatcagtgatagtatatatatatatt

SEQ ID NO: 6654 - DNA, 674 bp, Gossypium hirsutum
  Clone ID: AI728990.1
ctttttctcattcattctttagtttcaatatcaaagcaaaaatgggttcttcttgtaatgttgtttcaatggccttactggcttgtttggtgttgaactccttggtttttgttgcccacggtggtgacttttaccatgatttcgacctaacatggggtgacagaataggcaacattttcaatggtggcaagctcttgtctttgtctttaaacagggtttcagggtctggtttccaatctaataaacagtattcgtctggaacgatccatatgcaactcaagcttgttgctggcaactcagctggcactgtcactgcttattatctgtcatctcaagggccaacccttgatgatatacactctgaattctcagggaatctcaacggtgacccttatcttttacacacccatgttcttttccaacgctcatgcctcatataactaccctcctatctttggtttgacccttctataaacttccccccctatttccctcatttggaaacccccacctttccttttccttgttgaaaacccccccctttacaattctccaacatttcctaatccctcttgtttttctcttccccctctaagccacccctctaggaatcacctcctctttacttcaaactcccaaatcattggggtccctaggggttcaatttattcaac

SEQ ID NO: 6655 - DNA, 412 bp, Gossypium hirsutum
  Clone ID: uC-gsronu33B049f04b1
gttttcctcaaggtgttccaccagagtgtaaacgcccaaggttctaaaatcaaacctctcctcctttccatgtaatatattctttttttcactactttcttactatgtattcaagttgcactcaacttgatgcttggggatggatggaataagttgctattattattattcttttttttatgtatttttatttcgttttgttgcttcttaaatcatcttgaaaatagatgtaaattccctgtttctgataataaaattttcctcttttttagtacttactgacaaacaaacaattgataaactgcagactagctagaacttaccatcctggaaaagagaataaagtttgagaggctatctggtactacaaaaggaccttaacaaaaagggggggcccttttaaaggacccaa

SEQ ID NO: 6656 - DNA, 401 bp, Gossypium hirsutum
  Clone ID: GOSHI-09MAY01-C162_6
aagtttaatgtggccaaggtgctgcagtcccttattcctactgttcatccatctgtggtggagaagacaatccgtccatgcttagttgaattgagtgaggatcctgatgtggatgtgaggtttttcgccacccaagccctagagtcatgcggtcgcgtcgggatgtcttagctttttcttacaagattctcttttaactctttttttcttttcctttcctgttcccctctctgctgctaagatccttttcagacttgctcctcttcattgctaagaaaattgtgtaggcttatatctggattatcccatcacatggcttttacttttactgttattattctaatgatcgaagtaaagaaattcttgatgtggtactggtattattacacatacaagattgg

SEQ ID NO: 6657 - DNA, 538 bp, Gossypium hirsutum
  Clone ID: GOSHI-09MAY01-C162_2
gtcgacctgtcacggctatgatcgatgagccgttgtatccctgtccggcgtcgattgatgagctcaagaatgaagatatccagcttcgtttgaactcgatccgcaggctctctacgattgcacgtgcccttggggaagaaaggactcggaaagagttgattccgtttctgagtgagaacaatgatgacgatgatgaagttctccttgccatggcggaagaaattggagtttttattccttatgttggaggtgtgcaatatgctaatgtattgttacctccattggagactctatgcactgttgaggaaacttgtgtcagggagaaggctgaggaatcatcgtgcagaattggtgcccacatgatggagcaagactcggttgaatcctttattccatcagtgaacagatagactgctgccgagtgagctacacgatcacgtttatttgtgtgacgcgatgaatatcggatagagaccacacaccgatgaaatagcacacaatttgtgtgcaaattgcgaaggttctagcatgtatgcaa

SEQ ID NO: 6658 - DNA, 2115 bp, Gossypium hirsutum
  Clone ID: GOSHI-09MAY01-C162_1
tcgggtttcgaacagttgcgctcttgactcgaaccctcgagaggtgttagatctcgcgagttaacatggcaatgatcgacgagcctttgtatcccattgcggtgttgatcgatgagctcaagaacgaagatatccagcttcgtttgaactcgatccgtaggctttctacgattgcacgtgcccttggggaagaaaggactcggaaggaattgattccgtttctgagtgagaacaatgatgacgacgatgaagttctccttgccatggctgaagaattgggagtttttattccttatgttggaggtgtggaacatgctaatgttttgttgcctccgttggagactctttgcattgttgaggaaacttgtgtgagggataaggctgttgagtcgttgtgtagaattggtgctcaaatgagagagcaggacttggttgagttctttattccactgttgaagagattggctgctggtgagtggtttacagctcgagtttcctcttgtggattgtttcatattgcatacccaagtgccccagaggcactgaaaactgaattaagaacattatacggtcaactttgccaagatgacatgcccatggttaggagatctgctgcgaccaatcttggaaaatttgctgctactgtagaagcacctcatttgaaggtggacatcatgtctatgtttgatgatttgacgcaggatgatcaagattctgttcgcctattggctgttgagggttgtgcagcacttggaaagttgttggaaccccaagattgtgtcgctcacattctccctgttatagttaatttctcacaggacaaatcttggcgtgtccgttacatggtcgcaaatcagttgtacgagctgtgtgaagctgtcggtcctgagcctactaggtcggacctagtacctgcttatgttcgcctacttcgtgataatgaagctgaagtccggatagctgctgctgggaaagtaactaagttttgccgaattctgaattcagaattagctattcagcacattcttccttgtgtcaaggaactatcaacagattcatcccagcatgttcgatctgctttggcctcagttataatgggaatggcacctgttttagggaaggatgcgaccatagagcaattgcttccaatatttctttctcttctgaaagatgaatttccagatgtccgactgaacatcattagcaagcttgatcaagtcaaccaggtaattggaattgatctgctgtcccagtccctattaccagcaattgtggagcttgcagaggatagacactggagggttcggcttgcgataatagaatacatccctttattggcaagtcagttgggtgttggctttttcgatgacaaacttggtgcactctgcatgcaatggttgaaagataaggtttattccattcgtgatgctgctgctaataacgtgaagcgcctggctgaagaatttggaccagattgggcaatgcagcatatagttccacaggttttggacatgattaacaacccgcattatctatatcggatgaccattctacatgcagtttctctacttgcccctgttatgggaaaggatattacttgttcaaaacttctgcccgtggttattaatgcttctaaagatagggttccgaacatcaagtttaatgtcgccaaggtgctgcagtcacttatccctattgttgatcaatctgtggtggagaagacaatccggccatgcctagttgaattgagtgaggatcctgatgttgatgtcaggtatttcgccacccaagctctacaatcaagtgatcagcaaatgatgatgtctagctagaaccctacattacttctatcacacttctacatcctttcctttttcctttttgaatttattttaccttaaagcttttgttttgtttttccccttattttaattgtatatcttttttccagattgaaacactcctttgctatataaatatgtaatttgtctaaaattgagttgttgaagttcttttgtctaacaattttaggtctaattatggtctagtctcgtattattctaaaaaaaaaaaaactcgaggggggcccgtacccatcgcctatatgagtcgatt

SEQ ID NO: 6659 - DNA, 523 bp, Gossypium hirsutum
  Clone ID: LIB3825-023-Q6-K6-B3
ccggtttcgacccacgcgttcgttttaattgtcaaaatgaagttattggtcctttctctgctgctaagatccttttcagacttgctgctcttcattgctaagaaaattgtgtaggcttatatctggattatcccatcacatggcttttacttatactgttattattctaatgatggaaattaaagaaattcttgatgtggtgctggtattattacacatacaagattagaaaaaagggcaacaaataattaaacttagccgccatacctgattggggatgatgcacatcagcaatgcatgaacttggggtatttcacattggatttttgaaagtaacttaaccatcggaaatcgtaatggcgctgaggatattattcagaccagacgttagtatagttgatttacatagttacttttatgggatggtacaattttgaagctataatttcagtatttgtgtaattcattaactattatgacttttaattgtcaaaatgaagttattgttccccttgggtgcatc

SEQ ID NO: 6660 - DNA, 374 bp, Gossypium hirsutum
  Clone ID: LIB3196-058-P1-M1-E8
cttgcccctgttatgggaaaggatattacttgttcaaaacttctgcccgtggttattaatgcttctaaagatagggttccgaacatcaaatttaatgtcgccaaggtgttgcagtcacttatccctattgttgatcaatctgtaagtaaatttattttcgttttaaagggaaaatcatatattcggagtatattctaccctcttgttcgaaaatgcgtcggatattgatatagaaaaaaggggttgagtttgctactagcatgcaaaattttcatatgcaatgcctattttgtttcattaggtgtctttttggcttttgcttagactctaggctaaagtatgtttcaagttcttgtatctttttatttatcgct

SEQ ID NO: 6661 - DNA, 369 bp, Gossypium hirsutum
  Clone ID: LIB3149-053-Q1-K1-E2
gacaattcggccatgcctagttgaacttattgtttatccacatgttgatgtcagggattggggcacccaagctctacaatcaacttatcagcaaatgatgatgtctagctagaaccctacattacttgtatcacacttctacatcctttcctttttcctttttaaatttattttaccttaaagctttcgttttgtttttttccttattttaattgtatatctttttttcacattgaaacactcctttgctatatatgtaacttatctaaaattgacaaaaaaataaaacattaaattaagataaataaatatatttaaaaaaataaaacaaacactaaaaaatttctattggggcgccccttttaaaga

SEQ ID NO: 6662 - DNA, 342 bp, Gossypium hirsutum
  Clone ID: LIB3149-053-Q1-K1-E1
gacaattcggccatgcctagttgaactaagtgaggatccagatgttgatgtcaggtgtttcgccacccaagctctacaatcaagtgatcagcaaatgatgatgtctagctagaaccctacattacttgtatcacacttctacatcctttcctttttcctttttaaatttattttaccttaaagcttttgttttgtttttttccttattttaattgtatatctttttttcagattgaaacactcctttgctatatatgtaatttttctaaaattggggaaaaaaaaaaaaataaaccaaaaaaaaaaaaaaaaaaaaaaaaaactaacaaaaaacaaaataaa

SEQ ID NO: 6663 - DNA, 442 bp, Gossypium hirsutum
  Clone ID: GOSHI-09MAY01-C112_6
tccgccattttttcggaccaggggttggcccacacatcgggtggttcccaaggagccaaaatgctctaatcgccaccattaaaaccaaccgcaccataaagttcgtcgatcggcgcccgtctggattcaagtgcgggatcaactacgcaaccacccactgttgtccctggtggtgatctcgccaaggtccagagagctgtttgcatgattgctaactccaccagtgttgctgaagtcttccctcgcattgaccatatgtttgatcttatgtactccaaacgtgccttcattcactggtatgttttgtatgttttttaattatgttaattttcatattctcttttttttttttcttaattttatttttatttttttatttattttcttttttttattttttataatttttctttttattatttttttattttttaatattttt

SEQ ID NO: 6664 - DNA, 677 bp, Gossypium hirsutum
  Clone ID: GOSHI-09MAY01-C112_2
tttcgtacgcgttggagtcgacttcattaaaaccaagtgctccctctatctctcacctatggggccctactgcattcaagtgcggtatcaactaccaaccacccactgttgcccctggtggtgatctccccaaggtccagagagctgcttgcatgatgtctaactccaccagcgttgctgaagtcttctctcgcattgaccataagtgcgatcttatgtatgccaaacgcgccttcattcactggtatgttggtgagggtatcgaagacggagaattctcagaggctcgtgaggatcttgctgcattggagaaggattatgaagaacgtggtgctgagtccgctgtgggtgctgagggtgatgtatgatgagtactaagaagtacccgggatcgagtgtgcggatgatggctttgattgcccgtcgcttccgtgttatgcaagcttttattttttgaagcttgttaaagaattgaaatggtttactgtatgttatgctttttcatgttttatttgtgtttgggttgaaaattgaaatttttgttttttgtattggaagtaaattgttaagggaaattgtaaaaaaaaaaaaaaaaaaaaaaaaaaaaaaaaaaaaaaaaaaaaaaaaaaaaaaaaaaaaaaaaaaaaaaaaaaaaaaaaaaaaagtcgacgcggccg

SEQ ID NO: 6665 - DNA, 1113 bp, Gossypium hirsutum
  Clone ID: GOSHI-09MAY01-C112_1
ctatatactagctggatgcgcatccgcccggccatccacggcattcgcgggcgttctcttgtcattgtgcggcccacctacaccaatcttaaccgtcttgtctcccaggtcatttcctccttgactgcctcactgaggtttgatggtgccttgaatgtcgatgtgactgaattccaaaccaacttggttccctacccaagaatccacttcatgctttcctcgtatgctccagtcatctctgctgagaaggcttaccacgagcagctctcagttgctgaaatcaccaatagtgcctttgagccctcatctatgatggctaagtgcgatccacgccatggaaagtacatggcttgctgtttgatgtaccgtggtgatgttgttcccaaggacgtcaatgctgcagtcgcctccattaagaccaagcgcaccattcagtttgtcgattggtgtcctactggattcaagtgcggtatcaactaccaaccacccactgttgtccctggtggtgatctcgccaaggtccagagagctgtttgcatgatttctaactccaccagtgttgctgaagtcttctctcgcattgaccataagtttgatcttatgtatgccaaacgtgccttcattcactggtatgttggtgagggtatggaagaaggagaattctcagaggctcgtgaggatcttgctgcattggagaaggattatgaagaagttggtgctgagtcggctgagggtgatgagggtgaagatgatgagtactaagaagtacctgtgattgagtgtgcgtatgatgtcttttattacctgttgcttccgtgttatgcaagcttctattctttgaagcttgttaaagacttgaaatggtttactgtatgttatgctttttcatgttttatttgtgtttgggttgaaacttgatatttttgttgtctgtattggaagtaaattgttaagggaacttgtaaatgcccaacaggtataatggattcatgtggttatttgaccctaggtgtggaccaatcaattgggcaatttcaacggttaattcttctaccaatttgcccgggttttgagatgaaaaaataataaacacagtttgtaactttgtacatt

SEQ ID NO: 6666 - DNA, 444 bp, Gossypium hirsutum
  Clone ID: LIB3493-038-P1-M1-F1
cggacgcgtgggaaaaaaacagcataacatacagtaaaccggggcaagtctttaacaagcttcaaagaatagaagcttgcataacacggaagcaacaggtaataaaagacatcgtaagcacactcaatcacacgtacttcttagtactcatcatcttcaccctcatcaccctcagctgactcagcaccaacttcttcataatccttctccaatgcagcaagatcctcacgagcctctgagaattctccttcttccataccctcaccaacataccattaagaccaagcgcaccattcagtttgtcgatcggtgtcctactggatgcaagtgcggaatcaactaccaaccacccactgttgtacctggcggtgatctcgccaaggtccagagagctgattgcatgattcataactgcaccagtgttgctgaagtcttctctcgcat

SEQ ID NO: 6667 - DNA, 539 bp, Gossypium hirsutum
  Clone ID: LIB3584-008-P1-K1-E11
cagttgggtttcactgggtgggcggcgggtggggtctccacttctgttgttgagccttacaacagtgttctctcaactcactcccttttggagcacactgatgtggctgttctccttgacaatgaagctatctacgacatttgcaggcgttctcttgacattgagcgggcgggggggggggtcttttttttttgtctcccaggtcatttcctccttgactgcctcactgaggtttgatggtgccttgaatgtcgatgtgactgaattccaaaccaacttggttccctacccaagaatccacttcatgctttcctcgtatgccccagtcatctctgctgagaaggcttaccacgagcagctctcagttgctgaaatcaccaatagtgcctttgagccctcatctatgatggctaagtgcgatccacgccatggaaagtacatggcttgctgtttgatgtaccgtggtgatgttgttcccaaggacgtaatgctgcagtcgccaccattaagaccaagcgcaccattcagtttgtcgattg

SEQ ID NO: 6668 - DNA, 454 bp, Gossypium hirsutum
  Clone ID: LIB3189-049-P1-K1-B6
ctgccattttcacaaaaaacaaatcagatccctaatgttagggcttcaacttggagacaccgctgaaccgtcttgtctcccaggtcatttcctccttgactgcctcactgaggtttgatggtgccttgaatgtcgatgtgactgaattccaaaccaacttggttccctacccaagaatccacttcatgctttcctcgtatgctccagtcatctctgctgagaaggcttaccacgagcagctctcagttgctgaaatcaccaatagtgcctttgagccctcatctatgatggctaagtgcgatccacgccatggaaagtacatggcttgctgtttgatgtaccgtggtgatgttggtcccaaggacgtcaatgctgcagtcggctccattaaaaccaagcgcaccattcagtttgtcgattggtgtcctactggattcaagtgccggatcaacta

SEQ ID NO: 6669 - DNA, 613 bp, Gossypium hirsutum
  Clone ID: GOSHI-09MAY01-C102_5
cttcgcccaacccttccgcccacgcgtccgcccacgcgtccgcccacgcgtccccacgcgtccggaaagtttcaatggcaaccctcaaagttccagttcacgttccttctccttctgaggatgctgagcaacttcggaaagcttttgaaggctggggtacgaacgagcaattgattatcgacatattggctcacaggaatgcagcacagcgcaattcaattcggaaagtttatggtgaagcttatggggaagatcttctcaagtgtttggagaaggaacttacaagtgatttcgagcgggctgtgctgctttttacgttggaccctgcagagcgagatgctcatctggctaatgaagctacaaagaagttcacatcaagcaattggattctcatggagatagcttgcagtaggtcttcgcatgaactactcaatgtgaaaaaaggcctatcatgctcggtattaagaaatccctttgatgaagatgtcggtcaccacactaccggagagtactgcgagcttttggtcccttttgttagtgcattccgatttgagggagaggaggtgaacatgacattggcaaatctgaggctaaaaactgatgataaaatctc

SEQ ID NO: 6670 - DNA, 1013 bp, Gossypium hirsutum
  Clone ID: GOSHI-09MAY01-C102_4
cggactctttttcggacacttgggccgtctcgtgggttttgttccccttatgcccccgccggcccgtctggggggctgtttacttttggacccctgcagagcgtgatgcatttctggctcatgaagctacaaagaaggttcacatcaagccattgggttctcatggaaattgcttgcactaggtcttcacatgaaactgttcaatgtgaggaaggcgtatcacgatctttacaagaaaatcccttgaagaagaatgttgcgcaccataccaagggagacgtaccgcaagcttttggtcccactttgttagtgcattccgatacccagggagaaggaggtgaacatgacactggcaaggtcggaggggcaaagataccttcgtgagaaagaatatcagacaagcagtaccagtgatgaaggaggtcatcaggaattgtaaccaacacggagtaagggcacagttaaatggctacctctgaatcattaccaatactgcatttgggaaaatggctatcaacaaggaatttgaagggccgcccctgaagaacacgaattcctcaaattgctgagaaggccgcaatcaagggcttgcctgtccctgagaaatattttgaaaaggtggtacgtcaagcaatcaataagctgggacacagatgaatgggctcttactagaggggtcccccctcgggcggaggtagacatggggggtattaagggggaatctcagcgaagaaccagtgtgcccctggaaaaagcgattgctggagacccctctggagcctatgagaaaatcccgcctgcgttgattggagctggagacgtttgacccgctttcctatattgagtggtgggtatgaaaatttagtttgcaatttgaggtgtgagttatgtttgtttggttgggccccccccccatggcttttgtatccccccgcccccgggttagcacgttcaaaaatgatgggtttgtggatattttcccccataacacgaaagataagggttgccgcggt

SEQ ID NO: 6671 - DNA, 839 bp, Gossypium hirsutum
  Clone ID: GOSHI-09MAY01-C102_3
attcttcacaaaaaaaaaaccaggggggggggggggggggcaaccactaaaagttccagctcatgtacctgccccttctgaggatgctgagcaacttcgtaaagcttttgaaggatggggtacaaatgagcaattgattatcgaccctcgcgcccgcaggaatgcagctcagcgcggggggaggcgttaatcctatcgtgaagcttatggggaagatctccttaagtctttggatgaggaactcccccgtgactttgagcgagctgtggtgctgtttactttggaccctgcagagcgtgatgcatttctggctcatgaagctacaaagaggttcacatcaagccattgggttctcatggaaattgcttgcactaggtcttcacatgaactgttcaatgtgaggaaggcgtatcacgatctttacaagaaatcccttgaagaagatgttgcgcaccataccaagggaggctaccgcaagcttttggtcccacttgttagtgcattccgataccagggagaggaggtgaacatgacactggcaaggtcggaggcaaagatacttcgtgaggagatctcagacaagcagtacagtgatgaggaggtcatcaggattgtaacaacacggagtaaggcacagttaaatgctactctgaatcattacaatactgcatttgggaatgctatcaacaaggtatatattttggttttcttctgaaattgcattaaagtttaaatttgtatcatttatcagcctccttgcaataatgtgaagacagggttgttcatcatatccttttaaccccataacagtggcagtaaaggaaactccgaaggaagac

SEQ ID NO: 6672 - DNA, 914 bp, Gossypium hirsutum
  Clone ID: GOSHI-09MAY01-C102_2
gcttttggtcccacttgtttgtgcatgccgtttcccgtgtgtggaggtgttcttgtctctggctaggtcggagagcttagattcttcgtgagatgatctctgacaagctgttctgtgatgtggtggtcatcaggattgtaacaacacggagtaaggcacagttaaatgctactctgaatcattacaatactgcatttgggaatgctatcaacaaggatttgaaggccgaccctgaagacgaattcctcaaattgctgagagctgcaatcaagtgcttgactgtccctgagaaatattttgagaaggtgctacgtcaagcaatcaataagctgggaacagatgaatgggctcttactagagtggtcgccactcgggcggaggtagacatggtgcgtattaaggaggaatatcagcgaagaaacagtgtgaccctggaaaaagcgattgctggagatacctctggagactatgagaaaatgctgcttgcgttgattggagctggagacgtctgagctgctttcctatattgagttgttggtatgaaaatttagtttgcaatttgaggtgtgagttatgtttgtttggttgtgggttgtgtgaacatggcttttgtatgccgctgcttccgtgttagaacgttcaaagatgatgtgtttgtggatatatttcccaataatacgagagataagtgttgctgcggtacttgattagtatcagatatgttgagttagtcgaactaattttgaaataaaaagaagaaaaagaaaaagggataaagtgagcacttcatggaaaaagaaagagatgtgttatggtaacaatttaagatgggtgtcaaacgctacataacgccagttttgaaacatgaacacggatacagacaattgaaaatttttatgtataaatattaataa

SEQ ID NO: 6673 - DNA, 1288 bp, Gossypium hirsutum
  Clone ID: GOSHI-09MAY01-C102_1
tttcacgcgtccggtgattagtactttattttttgccaataaaattattttctatgcactatgcgcacccacgcggccatttttcctcatcaccatcgtctgctattcttcacaaaaaagaaaagaaaaattacagtgaaaatggcaacccttaaagttccagctcatgtacctgccccttctgaggatgctgagcaacttcgtaaagcttttgaaggatggggtacaaatgagcaattgattatcgacatattggctcacaggaatgcagctcagcgcaatttgattcgtaaaacttatcgtgaagcttatggggaagatctccttaagtctttggatgaggaactttcaagtgactttgagcgagctgtggtgctgtttactttggaccctgcagagcgtgatgcatttctggctcatgaagctacaaagaggttcacatcaagccattgggttctcatggaaattgcttgcactaggtcttcacatgaactgttcaatgtgaggaaggcgtatcacgatctttacaagaaatcccttgaagaagatgttgcgcaccataccaagggagactaccgcaagcttttggtcccacttgttagtgcattccgataccagggagaggaggtgaacatgacactggcaaggtcggaggcaaagatacttcgtgagaagatctcagacaagcagtacagtgatgaggaggtcatcaggattgtaacaacacggagtaaggcacagttaaatgctactctgaatcattacaatactgcatttgggaatgctatcaacaaggatttgaaggccgaccccgaagacgaattcctcaaattactaagagctgtgatcaagtgcttgaccaccccagagcaatatttcgagaaggttctacgtcaagccatcaataagttgggatccgatgaatgggctcttacccgagtcgtcacaactcgtgcagaggtcgacatggtacgtattaaggaggcatatcaacgaagaaacagcatccctctcgaacaagcaattgctaaagatacttcgggtgactatgagaagtttcttcttgccttgatcggagctggagatgcatgaaccgtcttcggtattaagttcctctgtatgaatgtctagtttgccttatccgctatgacttaataatttatgcttggtttttcatcgttttcattatctaaagcattgcttgcttccatgatagaacattcaaaataaaatgattgagttcgtttacaggtttaaaaaaaaaaaaaaaggaaaaaaaaaaaaaaaa

SEQ ID NO: 6674 - DNA, 365 bp, Gossypium hirsutum
  unsure (1)..(365): unsure at all n locations
  Clone ID: LIB3166-052-P1-K1-C3
attnnngggggggccgacgcgtccggggcaaatgacattgattacttggtcagtgatgagtttacgtcacctttgcgctgagcacatatttaatctgagaaactgctccatctccctcattgcacactgtgaatgattataagcagaaaaatcgtgatgagatgcatccacattgtcagcacaagcgatctgactatggtcttcctgaagataaatttatttttgcatgtttcaaccaattgtataaaatggatccagcgatctgtgctgctttttacgttggaccctgcagagcgagatgctcatctggctaatgaagctacaaagaaattcacatcaagccattggattctcattgagatagc

SEQ ID NO: 6675 - DNA, 394 bp, Gossypium hirsutum
  Clone ID: LIB3083-089-Q1-L1-B3
ttttaatgtactataaagcgttttaaggctatagacattggccacaatcactgaaaacaaaccaaagaaagtttcaatggcaaccctcaaagttccagttcacgttccttctccttctgatgatgctgagcaacttcggaaagcttttgaaggctggggtacgaacgagcaattgattatcgacatattggctcacaggaatgcagcacagcgcaattcaattcggaaagtttatggtgaagcttatggggaagatcttctcaagtgtttggagaaagaacttacaagtgatttcgagcgggctgtgctgctttttacgttggaccctgcagagcgagatgctcatctggctaatgaagctacaaaaaatttcacatcaagcaattggattctt

SEQ ID NO: 6676 - DNA, 426 bp, Gossypium hirsutum
  unsure (1)..(426): unsure at all n locations
  Clone ID: LIB3165-032-P1-K1-A2
gggaaggaatcgggtgggaccgaccgcagtccggaaaggtttcaaatggcaancccttcaaaggttctcagttcaagcgttccttctnnccttctgagggagtgctgangtcaacttgcggaaagggctttnnngaaggctgtgggtaccgaaccganngcaatnntgattattcganccatattggcttcacagnnngaatgcagcnnacagcgcaattcaaattcggaaaggtttaatgcgtgaagctnntatggggaaagatcttctcaagggtgtttggaggaaaggacactttacaaagtgatttcgaggccgggctgtgcattgctttttacccgttgggaccctgcaagagccgaggattgctcaatcttggcttaaatgaaagcttacaaaagaaagttcaacaatcaaggcaattgg

SEQ ID NO: 6677 - DNA, 345 bp, Gossypium hirsutum
  Clone ID: LIB3145-047-Q1-K1-F10
acgtggacgcgtgggcggacgcgtggttctagctcaatttgattcgtaaaacttatcgtgaagcttatggggaagatctccttaagtctttggatgacgaactttcaagtgactttgagcgagctgtggagctgtttactttggaccctgcagagcgtgatgcatttctggctcatgaagctacaaagaggttcacatcaagccattgggttctcatggaaattgcttgcactatgtcttcacatgaactgttcaatgtgaggaaggcgtatcacgatctttacaagaaattccttgaagaagatgttgcgcaccataccaagggagactaccgtaagctttttg

SEQ ID NO: 6678 - DNA, 315 bp, Gossypium hirsutum
  unsure (1)..(315): unsure at all n locations
  Clone ID: LIB3135-047-Q1-K1-B5
ctctggagactatgagaaaatgctgcttgcgttgattggagctggagacgtctgagctgctttcctatattgagttgttggtatgaaaatttagtttgcaatttgaggtgtgagttatgtttgtttggttgggttgtgtgaacatggcttttgtatgccgctgcttccgtgttagaacgttcaaagatgatgtgtttgtggatatatttcccaataatacgagagataagtgttgctgcggttnaaaaaataaaaaaatctagtatttctttttaatttaattttatattattaatattattataaaaatttatg

SEQ ID NO: 6679 - DNA, 482 bp, Gossypium hirsutum
  Clone ID: GOSHI-09MAY01-C132_11
cccacgcgcccgtaacaatttcacagttgttttcttcactctctctctcagccgtggctgcggccatctccaccgtcgccgccgctgccgccgccaaccgagctctgggagtgtcagtcccaacctcagctttcatggggaagaaagtgagctcgagattcaacaacaccaggcaggttccttcgggaagttttaaggtgatggcggccgaaaaagagatagacgaagagacacagaccgaaaaggaccgatggaaagggttggcttacgatatttcggacgaccaacaagacattactcgagggaaagggatggtggattccttgttccaagctcccatgaatgatggaactcactatgctgtcatgagttcctatgaatacatcagccaaggtcttaaaacgtacaatttggacaacaacatggatggtttctacatcgctcctgcattcatggacaagcttgttgttcacatcagcaag

SEQ ID NO: 6680 - DNA, 630 bp, Gossypium hirsutum
  Clone ID: GOSHI-09MAY01-C132_8
ggcacccaccagggaagataggatcggtgtttgcacaggtattttcaggaccgacaatgttcccgttgatgaccttgttaagcttgttgacaccttcccgggccaatccattgactttttcggtgctctgagggccagagtttacgatgacgaagtgaggaaatggatcggagaggtcggagtcaatggtgtcgggaaaaagctcgtgaactcgagggaagggaagacgatcagataccgtcctagtctcaaccgaagatgaccattgagcagctgttggaatatggatacatgcttggtgctgagcaagagaatgtgaacagggttcaattggctgacaaatatttgagtgcagcctgcccttggaaatgctaatgccgatgctatcaagagaggagctttctaaaggggcaattcagctctaaggtaagaaaaaaatctacattgggcccaaacaaagctaatcccccctttgtgtcttaattaaaagttgtttaccttttgtgttttaagtggatttgcatcatattctctcgtgtcagaaaatgaccaagttgttgttgttgaaagagatataaacaatggcggcgctcgcgggacgggtcgctcggcccggcccttccgttccgg

SEQ ID NO: 6681 - DNA, 994 bp, Gossypium hirsutum
  Clone ID: GOSHI-09MAY01-C132_7
gtagaagtttataggaaatcatagggtattagccaaagacaattcattacaggaaatattaaacagacacacaggttggaaaaaagactcatagcatagtagcatctgagagcttatatggttcaggtccgcttgacagggtcgaagttggacacaccaattacagctccaacaatggcaacaagcacaacaccaccagccacaatgctaagcaaaaagttcttgagagaaggggaaactccatcagcagcttgagccacctcagggatcaccatggatgttgtgattgcagaagctgtcaatcctgtgattgccttgtccttgagtgaagaagcagcagccttgacttgaagccttccattggatgttgtagttgggattgcccccgatggcttgagtggcaatggcttaaagaaagcttcagaggcaggcaccctgttttgggtagcacgagttagtggcagagccattgaaactgctgaagtggaagccattgatttctctcttctcactctgagttgcggacccgcggcgctgcaacttcttctgtgagtgtttttagtatgaagggaaatggagggaggaagttagtgaactcaaggtacggacctccaacatttgagcaaccgaaaatgaccatttgagaagctgttggaatatggatacatgcttgttgctgagcaagagaatgtgaagaggggtcaaattggctgccaaatactggtgtgaagcctgcccttggaaaagctaatgacgatgctatcaagataggagcttttataatgggaaattgaatgcttaaggaaccaagaattcattttttgccacaacaaaggaaatcccccctttgtgtcttaaatgaaagtgtgttttccctttgtgttttaagtggaattgggcaccctatttttgtgtgacacaaacccccctgtgatcccccccccaaaaaaaaaaaaaaaagggcggcaaaaacgatcttaaaacacgagtgggt

SEQ ID NO: 6682 - DNA, 732 bp, Gossypium hirsutum
  Clone ID: GOSHI-09MAY01-C132_6
aaaaagatgttcagcatctgagagcacaatatgagctcagctcaggtccgcttgacagggtcgaagttggacacgccaatcacagctccaacaatggcgaccagaaccacacccccagccgctatgctgagcaagaagttcttgagagatgctgtacatcttttttcacaagttgacagggtctcagccgaagtacagctacggtagtttatagctgcaaaaacattattaaacaggtaacatgagaaaaaagatgtacagcatgagagagaattatatgagctcagctcaggtccgcttgacagggtcgaagttggacacaccaattacggctccaacaatggcgaccagaaccacacccccggccgctatgctgagcaagaagttcttgagagatggggtgactccatcagctgcttgagccacctctgggatcatcatcgatgtcgtcagtgctgctgctgtcaaccctgtcaccgccttttccttgaacgaagaagaaccagccttgacttggagccttccgttgggtcttttaacaccgcccattgatctccatggcttcaccggaagtggcttaaagaatgcctcagaacttggcatcctgttttgggtagctccagctaagggcagagccattgaagcagctgaactggaagccattgactctttttttctggcctgctctccctaccctgcaagtccaaaaaccaaaagaaacggacgcgtggg

SEQ ID NO: 6683 - DNA, 566 bp, Gossypium hirsutum
  Clone ID: GOSHI-09MAY01-C132_5
cccacgcgttgaagactcgtgggcggacgcgtggagcgacttgttaggtgctgtccgggcccggggggcctatgagcaagtgatgtaatgggtccgataagtaggacgcaatagtgtcgggaaaaagctcgtgaactcgagggaagggccaccatctttcgagcaaccgaagatgaccattgagaagctgttggaatatggatacatgcttgttgctgagcaagagaatgtgaagagggttcaattggctgacaaatatttgagtgaagctgcccttggaaatgctaatgacgatgctatcaagagaggagctttctaaatgggaaattaagctctaagggaagaaaaaaatctatattgggcacaaacaaaggaaatcccccctttgtgtcttaattgaatgttgttttccttttgtgttttaagtggatttgcatcctctatttttgtgttataaaatctccactttgttcttgtcttaaatgtttcactttatttgttccaatcaacttttttttttacatgattagttttgaataaaagaccggacgcgttggtcccccccg

SEQ ID NO: 6684 - DNA, 566 bp, Gossypium hirsutum
  Clone ID: GOSHI-09MAY01-C132_4
cccacgcgtccgcccacgcgtccgcccacgcgtccgcccacgcgtccgcccaacctcagctttcatggggaagaaagtgagctcaagattcaacagcaccaggcaggttccttcgggaagttttaaggtgatggcggcggagaaagagatagacgaagagacacagaccgaaaaggaccgatggaaagggttggcttacgatatttcggacgaccaacaggacattactcgagggaaagggatggtggattccttgttccaagctcccatgaatgatggaactcactatgctgtcatgagttcctatgaatacctcagccaaggtcttaaaacgtacaatttggacaacaacatggatggtttctacattgctcctgcattcatggacaagcttgttgttcacatcaccaagaacttcatgtccctccctaacattaaagttcctctaatcttgggtatttggggaggcaaaggtcaaggaaaatctttccaatgtgagcttgtgtttgccaagatgggtatcaaccccatcatgatgagtgccggagaactggaaagtggaaacg

SEQ ID NO: 6685 - DNA, 1065 bp, Gossypium hirsutum
  Clone ID: GOSHI-09MAY01-C132_3
cccacgcgtccgcccacgcgtccgcccactctttcggttgttccaaaaaaaggcaaacgatagttttggaacaatctcacatcattacataaaatagaaaaagggttttctttttcaacccaatactactataatacaaggttaaaattggtaagtgcaagttccaccctcaggaacacccggcccgataaccccacgcgtccgctccagctccccggtatgtacaacaaggaagagaacccccgtgtccccattatcggcactggtaacgatttctccacactgtatcctcctctcatccgtgacggtcgtatggagaaattttactgggcaccaactagggacgaccgcgtcggtgtttgcaaaggtattttcaggaccgacggcatccgagatgaagacattgttaagctcgtcgacaccttccccggccaatccatcgatttcttcggtgccttgagggctcgggtttacgatgacgaagtgaggaaatggatcagtgaggtcggagtcgcaagcgtagggaagaagttagtgaactcaagggaaggacctccaacatttgagcagccaaaaatgaccattgaaaagctattggaatatggaaacatgcttgttgctgagcaagagaatgttaagagagtccaattggctgacaaatacttgagtgaagctgccctcggtgaagctaatgaagattccatcaatagaggaactttctatggcaaagcagcacaacaagttggggttccagttcccgaagggtgcactgatccaaatgctgataactttgatccaacggctagaagtgatgatggaacttgcacttacaaattctagacctcgtattatagtagtattgggttgaaaaagaaaaccctttttctattttatgtaatgatgtgagattgttccaaaactatcgtttgccttttgttgttccaattatatgattttgctttctcaattcttaatattttctcttcaaaaaaaaaaaaaaaaaaaaaaaaaaaaaatataaaaaaataaatataaaaaaaaaaaatattaaaataaaaataaatt

SEQ ID NO: 6686 - DNA, 855 bp, Gossypium hirsutum
  Clone ID: GOSHI-09MAY01-C132_2
cccacgcgtcccgcccacgcgtccgccccaaagtccaatcactcccaatactttcataacatttcacgaacttcactctccagtctccaatggcggctgccgtctccaccatcggtgctgtcaaccgagcaccgttgagtttgaatggatcaggtgccggagcttctgctccaagctcagctttcatggggaacagcttgaagaaagtgagcgctaggttcaacaacaacggcaaggctccagtgggaagtttcatgattgtggctgccaaagaaatcgacgaagacacacagaccgaccaggaccgatggaagggtcttgcttatgatatctccgatgaccaacaagacattaccagagggaaaggtatggtcgactcattgttccaagctcccatgaacgatggtactcactatgctgtcatgagctcctatgagtacattagccaaggccttcgcacatacgacttggacaacaacatggatggattctacattgccccagctttcatggacaagcttgttgttcacatcaccaagaactacatgacccttcctaacattaaggttcctcttatcttgggtatttggggaggcaaaggtcaaggaaaatctttccaatgtgagcttgtctttgccaagatgggaatcaaccccattatgatgagtgccggagaattggaaagtgggaacgccggagaaccagccaagtggatcaggcaaaggtaccgtgaggccgccgacattatcaagaaagggaaaatgtgttgcctctttatcaacgatctcgacgctggagccggtcgtatgggaggaaccacacaatacacagtgtacaaccaaatggtgaacgcca

SEQ ID NO: 6687 - DNA, 1606 bp, Gossypium hirsutum
  Clone ID: GOSHI-09MAY01-C132_1
cccacgcgtccgcccacgcgtccgcccacgcgcacactctcaaattcagttaacaatttcacagttgttttcttcagtctctctctcagccatggctgcagccatctccaccgtcgctgccgctgccgccgccaaccgagctctgggagtgtcagtcccaacctcagctttcatggggaagaaagtgagctcaagattcaacagcaccaggcaggttccttcgggaagttttaaggtgatggcggcggagaaagagatagacgaagagacacagaccgaaaaggaccgatggaaagggttggcttacgatatttcggacgaccaacaggacattactcgagggaaagggatggtggattccttgttccaagctcccatgaatgatggaactcactatgctgtcatgagttcctatgaatacatcagccaaggtcttaaaacgtacaatttggacaacaacatggatggtttctacattgctcctgcattcatggacaagcttgttgttcacatcaccaagaacttcatgacccttcctaacattaaggttcctcttatcttgggtatttggggaggcaaaggtcaaggaaaatctttccaatgtgagcttgtctttgccaagatgggaatcaaccccattatgatgagtgccggagaattggaaagtgggaacgccggagaaccagccaagttgatcaggcaaaggtaccgtgaggccgccgacattatcaagaaagggaaaatgtgttgcctcttcatcaacgatctcgacgctggagccggtcgtatgggaggaaccacacaatacacagtgaacaaccaaatggtgaacgccacactcatgaacatcgctgataaccccaccaacgttcagctccccggtatgtacaacaaggaagagaaccctcgtgttccgatcattgtcaccggtaacgatttctcgacgctgtacgcgccgctcatccgtgacggtcgtatggagaagttttactgggcacccaccagggaagataggatcggtgtttgcacaggtattttcaggaccgacaatgttcccgttgatgacattgttaagcttgttgacaccttcccgggccaatccattgactttttcggtgctctgagggccagagtttacgatgacgaagtgaggaaatggatcggagaggtcggagtcaatggtgtcgggaaaaagctcgtgaactcgagggaagggccaccatctttcgagcaaccgaagatgaccattgagaagctgttggaatatggatacatgcttgttgctgagcaagagaatgtgaagagggttcaattggctgacaaatatttgagtgaagctgcccttggaaatgctaatgacgatgctatcaagagaggagctttctaaatgggaaattaagctctaagggaagaaaaaaatctatattgggcacaaacaaaggaaatcccccctttgtgtcttaattgaatgttgttttccttttgtgttttaagtggatttgcatcctctatttttgtgttataaaatctccactttgttcttgtcttaaaaaaaaaaaaaaaaaagccccaagcggggcgcgtgcgcgcgggattagttttgaat

SEQ ID NO: 6688 - DNA, 428 bp, Gossypium hirsutum
  Clone ID: LIB3165-021-P1-K1-H5
taccgaatcggaagtgccggcgctagaccgtacccgtaccgctgtaactctccgatcatccatgacggttttatgtagaagatttactgggcacgcaccagggaagataggatcggtgtttgcacaggtattttcaggaccgacaatgttcccgttgatgacattgttaagcttgttgacaccttcccgggccaatccattgactttttcggtgctctgagggccagagtttacgatgacgaagtgaggaaatggatcggagaggtaggagtcaatagtgtcgggaaaaagctcgtgaactcgagggaagggccaccatctttcgagcaacctacgatgaccattgagaagctgttggagtattggaacatgcttgttgcagaacaagaaaacgtgaagagggttcaattgctgcaaatatttgagtg

SEQ ID NO: 6689 - DNA, 403 bp, Gossypium hirsutum
  Clone ID: LIB3165-036-P1-K1-G6
agcgtccgcccacgcgtccgcccacgcgtccgtttacgcgtccgggtattgtcgactcattgttccaagctcccatgagcgatggtactcactatgctgtcatgagctcctatgaataccttagccaaggccttcgcacatacgacttggacaacaacatggatggattctacattgccccagctttcatggacaagcttgttgttcacatcaccaagaacttcatgacccttcctaacattaaggttcctcttatcttgggtgtttggggaggcaaaggtcaaggaaaatctttccaatgtgagcttgtctttgccaagatgggaatcaaccccattatgatgagtgccggagaattggaaagtgggaacgccggagaaccagccaagttgatcaggcaaag

SEQ ID NO: 6690 - DNA, 390 bp, Gossypium hirsutum
  Clone ID: LIB3120-017-Q1-K1-G5
gccacgcgtcctctcacaccatccgtgatgtccaccaaataccgtctatatagaatgcatgagggatactataacttatgttccaatactatcgtacctgcataacacatatgtataacatgcacaatcaattatacaacatcaatatagttacaaagtatatgcaaatgattgaggctgccaaagaaatcgacgaagacacacagaccgaccaggaccgatggaagggtcttgcttatgatatctccgatgaccaacaagacattaccagatggaaaggtgtgggcgactcattgatgcaagctcccatgaacgatggtactcactatgctgtcatgatctcctatgaccacattagccaaggccttggcacattctacttggacaaca

SEQ ID NO: 6691 - DNA, 399 bp, Gossypium hirsutum
  unsure (1)..(399): unsure at all n locations
  Clone ID: LIB3165-036-P1-K1-A4
caggtgccggagcttctgttccaagtctcagctttcatggggaacagcttgaagagggtgagcgctaggtgcaacaacaacggcaaggctccagcgggaagtttcaagattgtggctgccaaagaaatcgacgaagacacgcagaccgaccaggaccgatggaagggtcttgcttatgatatctccgatgaccaacaagacattaccagagggaaaggtatggtcgactcattgttccaagctcccatgaacgatggtactcactatgctgtcatgagctcctatgaataccttagccaaggccttcgcacatacgacttggacaattttgcctctnttgtcacaggtcaaacctccaagcagcttcacccctgaagaaacggaatacctaacaaatcg

SEQ ID NO: 6692 - DNA, 367 bp, Gossypium hirsutum
  Clone ID: LIB3165-019-P1-K1-H6
ggaatgcccggggcgaccgatgcgaacggcaagacacaattcaacagctggtttattgactctgtctataacacatggctgcagccatggccaccgtcgacgccgttgccgacaacaaccgagctctgtgagtgtcagcaccaacctgagctttcatggggaagaaagtgagctcgagattcaacaacaccaggcaggttccttcgggaagttttaaggtgatggcggccgaaaaagagatcgacgaagagacacagaccgaaaaggaccgatggaaagggttggcttaccgatattgggacgaccaacaagacattactcgagggaaaggggatggtggattccttgtttcaagctcccatgaatg

SEQ ID NO: 6693 - DNA, 466 bp, Gossypium hirsutum
  Clone ID: GOSHI-09MAY01-C122_15
ttcgttttgaaatagtaaatgttgagttttttaagggcatatgccagttatttgagatgtttttctattttgtatttgaaacatttggtctgcaaaacatgaattcgagtggaaagacctcgacggactctcttaattatcggttaaagactgccttatcacaagtaacgcaagattgtgaagagtgggataaaaacttcatcaggacccttatcatcttcaaccgcacatgcagatttgacacccactgctcctcaaaatacaaattttggttctccagcaggcacctcctttggtctaaaggaaagatgtgcaggtgctgatactgtagcttttgtagctcggatattgcatagatctagaactaatcttcaatcattgctattaaagagtaatacagctatagttgaggctttctttgtgcacctggtgggtgctgtgccagatcttgtagagcacatacata

SEQ ID NO: 6694 - DNA, 724 bp, Gossypium hirsutum
  Clone ID: GOSHI-09MAY01-C122_13
gcgtttctgcgaagaaaaacctctgcttttttcactggtccttttatcgtttctcctttttgcggtgaaaaggcagagcctgcaacagcaacacaagcagcagcaccagtagtggctctgctgaaagagagctcgacattgttataccaaccataaggaacttggactttcttgagatgtggggggcattctttcagccttaccatctcatcattgttcaagatggtgatccttcaaagaccatcaaggtccctgagggctttgactatgagctttacaacaggaacgatattcgcaggatcctcggtcctaaggcttcttgcatttccttcaaggactctgcttgtcgttgctttggttacatggtatccaagaagaagtatatcttcaccattgacgacgactgctttgttgctaaggacccatctggcaaagcgatcaatgcacttgagcagcacatcaagaatctgctatcaccatccactcccttcttcttcaacaccttgtatgaccctttccgagagggtgcagattttgtccgtggatacccatttagtcttcgcgagggcgttccaactgctgcttctcatggactttggctaaacatcccggattatgatgctccaacccaactggtgaagcctcttgagaagaacactaggtatgtggatgcggttcttacaatttccaagggcacctttgttcccatgtgtggtatgaattt

SEQ ID NO: 6695 - DNA, 997 bp, Gossypium hirsutum
  Clone ID: GOSHI-09MAY01-C122_9
ctatttgctcagagagtaatggatcttgctgagtatcgaaagaatctttatgattacttagtgactaagatgaacgacattgcaccaaatttggcatcgttgattggggaagttgttggggctcggttgatctctcatgctggtagtctcacaaatttggccaaatgtccctcttccactcttcagattcttggtgctgagaaggcccttttcagggcactgaaaacacgagggaacacacctaagtatggtctaattttccattcatctttcattggtcgagcatctgcgaagaacaagggccgaatggcacgctatcttgcaaacaagtgttccattgcatctcgcatagattgttttgcggagcggggcaccactgtctttggggagaaactgcgggaacaggtggaggaacgacttgaattctgtgacaaaggtgttgcacctcgtaaaaacatcgatgtaatgaaatctgcaattgaaagtactcagaacaaagatactgaaatggaagaagtggaacctgaagaagcttccgcaaagaaaagcaagaaaaagaagtcaaaaaccgaagatgctccagctgctgctacaaatggagatgccttggaggacggtaaatcggagaagaaaaagaagaaagagaaacgaaagaaggagcaagaggcgcatgaagaagatgggaaaacaaatggcgtaaacgagcaggatgggacagccaagaaaaagaaaaagaagagtaaagatgaagcagctacaaatgaaaatacgaagaagaagaagaagaagaagaagagccatgagtgaaatttaatcactaattgctaaatttcagcaaatggaaaaaaggctaatagtgttttaagcattttagttgtagaaaatggttagcttccttttcggtttaaactttgttctggatttttggaaatctattttgttgtgaaattggtttttttttggtaatttgagattaaatttaatgagttggatcatt

SEQ ID NO: 6696 - DNA, 581 bp, Gossypium hirsutum
  Clone ID: GOSHI-09MAY01-C122_8
aacttcccaggccatacccgttccctttctattcagcaagtcctttctcctattaccctttcccctctccctttctctccggcccctgcacctaaccctatcaaaggaacccagctttccatcgcgctaccagacgacgatgtctcgaactccttcttcaccgttttctctactccccttcttcttctgctctccaatggctatccccgccgcaaacgtttaacaaaaaacacctttttgtttatacccaatgccagtatatccacgcacgttatgtctttttaatttgtaaccaagactatcaaggtccctgaaggcttcgattatgagctttacaataggaacgacatcaacaggattttgggtcctaaggattcttctatctctttcaaggattctgcttgtaggtgcttttggtacatggtttccaagaagaaatacatctataccattgatgatgactgctttgcttcttgtggttctccttgtagcatgctgctcatttgttgttattggtggtttcctgttcttcaactttaggtgctattggctggggtttacaaggagctacgtcaggcatg

SEQ ID NO: 6697 - DNA, 642 bp, Gossypium hirsutum
  Clone ID: GOSHI-09MAY01-C122_7
cccgttccctttctattcaccaagtcctttctcctattaccctgtcccctctccctttctctctttcctcttcacctgaccctatcaaagaaacccagctttccatctcggtaccagacgacgatgttttgaactccttcttcatcattttctctacttccccttcttcttctgctctccaatggctatccccgccgcaaacgtttaacaaaaaaacacccttttgtttatacccaatgccagtgtatccacgcgcgttatgtctttttaatttgtaaccaagattatcaaggtccctaaaggcttcgattatgagctttacaatagaacgacatcaacaggattttgggtcctaagtcttcttatatctctttcaaggattctgcttgtaggtgctttgggtacatggtttccaaaaagaaatacatctatatataccattgatgatgactgctttgaaagatgtgcaggtgctgatactgtagctcttgtagctcggatattgcatagatctagaactaatctccaatcattgctattaaagagtaatacagctgtagttgaagatttctttgtgcacctggctccgggctgccccctcccgcctgaaaaggggccctctgttatcaattattgatgagt

SEQ ID NO: 6698 - DNA, 1111 bp, Gossypium hirsutum
  Clone ID: GOSHI-09MAY01-C122_6
tttccctcgcgcacactcgcccctcccttcctctctgcttttactttgctaagtccaagccttcgacaatggccgaaccctctaccatttcaccagctcccctcttgaaagatgagctcgacatagtcattccaaccattcggaacttggactttttggagatgtggaggccctttttccagccttaccatctcatcattgttcaagatggcgatccttccaagaccatcaaggttccggagggcttcgactatgagctttacaataggaacgatatcaacaggattttgggtcctaagtcttcttgtatctctttcaaggattctgcttgtcgctgctttggttacatggtttccaagaagaagtacatttataccattgatgatgattgctttgttgcgaaagatccgtccggcaaagacattaacgcactggagcagcacataaagaaccttctttgtccatctactccgtttttcttcaacactctctatgacccgtaccgagctggtgcagatttcgttcgtgggtacccattcagtctccgtgaaggtgttcccactgccgtctctcacggcctctggctcaacatcccggattatgatgctcccactcagcttgtcaagcctctcgagaggaaccccaggtccgttgacgctataatgacgattccgaagggaaccttgttccccatgtgcggaatgaatctggcatttaaccgagaattgatcggccctgcaatgtactttggactcatgggagatggtcaaccaattggacgatacgatgatatgtgggctggctggtgcacgaaggttatttgcgatcaccttggtatgggaattgagacccgtccttccttattttggtccatcaatgctagcaacccgttgtgaacctattgatggattcaaaggattttctggtatatgagttgattccggtcttccaatccgttgactttcctaggactgttccatcgtttagaattgtccttgagagttcttgcaacgtattgcatataggctgggtaagactacttaatatcttgtgatgccatttgactggtttggcctgatatgactgattcttagggcaattattgcatttt

SEQ ID NO: 6699 - DNA, 1181 bp, Gossypium hirsutum
  Clone ID: GOSHI-09MAY01-C122_5
gcgtccgcccacgcgtccgcccacgcgtccgatccattgttaatttttttatttgatcgtaattcctggtcgggaaaaaaaaaaaagaagggtgaggggagccgcccgcgtggcctcttatcgctgcagtaggagcttaactgggatttcaggtgcgaggcaaggtgttagcaagttgcgagagatcaagggaaccgtaacgtacatattcactaggaaggtcattagtactacacgcgtagggcgctcaggatagatttgtctatgttgcaggagggtgaaagtggagtagagtttattccttttttattcaattgacctaatatttgcttcacaagaaaggatacaaggttggtgcttcttaggtgataacttcaagtaccagagaagaaacttaattccgagtgcttttcattgttgatatggttatatagagtgacactcgtaggaaggttgtaaaatggcttttgtttcagaggaagaaaaaactgaggattaccttttcaagatcgtactagttggtgattcagctgttgggaaatcgaatttacttgcaagatttgctaggaatgaattctacccaaattccaagtcaaccataggagtggagtttcaaactcagaagttggatataaatgggaaggaagttaaggcacagatctgggatacggctggtcaggagcgcttcagggccgttacatctgcatattaccgagggccagttggagctcttcttgtgtatgacatcagcagacgacagactttcgatagcattggtagatggttaaatgaacttcaaactcactcagacatgaacgtagtcaccattttagtaggcaacaagtcggacctccgggatgccagggaagtatccacagccgaagggaaggccttagcagaggcacagggtttatttttcatggagacttctgcacttgattcctccaatgtagcggctgcatttcagactgtcgttaaagagatctacaacatattgagccggaaagttatgatgtctcatgagctcaagaagcaggacgcaccattggatgggaagaccgtggttttacaaggggatgagaaccaagaacgtgctactgagtcacccaaatcgggtggttgctgttcatcctgatgcttatccattttaacgattctccatcaagtttccactgaagttc

SEQ ID NO: 6700 - DNA, 1374 bp, Gossypium hirsutum
  Clone ID: GOSHI-09MAY01-C122_4
ccccgcccccgcgtccgcattacttcgttttggtttttttgctttgctctgaaactccaagctctcatcaatggcggatccagcgactatctcaccagccacgctgttgaaagatgagcttgacatcgtgattcccaccattaggaacttggatttcttggagatgtggagaccctttttccaaccttaccatctcatcatagttcaagatggcgatccttcaaaggccatcaaagttcctgaaggctttgattacgagctttacaacaggaacgatatcaataggattttgggtcctaaagcttcttgcatctctttcaaggactctgcttgtcggtgctttggatacatggtttccaagaagaagtacatctataccattgacgacgattgtttcgttgctaaagatccatctggaaaagacattaatgcattggagcagcacataaagaaccttctgagtccctctactccgtttttcttcaacaccctttacgatccataccgagctggtgccgattttgttcgcgggtacccatttagtctccgcgagggtgttcccaccgccgtgtctcacggtctctggctcaacatcccagattatgacgcaccaactcagcttgtcaagcctcttgagaggaacaccaggtacgttgatgctgttatgacaatacctaagcccacccggccgcccatgtgtggtatgaatcttgcattcgaccgtgagttgagcggcccggcaatgtactttggactcatgggcgatggccaacctattggacgatacgatgatatgtgggctggctggtgcaccaaggttatatgcgatcacctcggatggggagtgaagaccggattgccatacatttggcacagcaaagcaagcaacccattcgtgaatcttaggaaagaatacaaagggatctactggcaagaagagttgatcccattcttccaatcggttacccttccgaaggactgcaccagcgttcaaaaatgctacactgaaatcgccaagcaggtgaaggcgaaactcggcaaggtcgatgactactttaacaagcttgcagatgctatggtgacatggattgaagcatgggatgagctgaaccccatcaggtgcctcaaaatcttctgatttgcctaatggtccctcgaaataagcttacttcgcgttaagtttagctgctattggctcgtatcgctgatcatccatttttgttcaagctcttccattaaagcttggaatgattatttttgcaggggggatatagatctatttatttaccgtattacttagcatgactaagagattattacatctatttatttaccatattacttagcatgattggaagattattaggtctattt

SEQ ID NO: 6701 - DNA, 1008 bp, Gossypium hirsutum
  Clone ID: GOSHI-09MAY01-C122_3
aaaaaagaagggtgaggggagcctcctgaaattcttcttatagctgtagaaggagcttaagtgggatttcaggtgcgaggcaaggtgttagcaagttggagagatcaaggatacaaggttggtgcttcttaggtgataacttcaagtaccagagaagaaacttaattccgagtgcttttcattgttgatatggttatatagagtgacacttgtaggaaggttgtaaaatggcttttgtttcagaggaagaaaaaactgaggattaccttttcaagattgtactagatggtgattcagctgttgggaaatcgaatttacttgcaagatttgctaggaatgaattctacccagattccaagtcaaccataggagtggagcttcaaactcagaaattggatataaatgggaaggaagttaaggcacagatctgggatacggctggtcaggagcgcttcagggccgttacatctgcatattaccgaggtgcagttggagctcttcttgtgtatgacatcagcagacgacagactttcgatagcattggtagatggttaaatgaacttcaaaactcactcagacatgaacgtagtcaccattttagtaggcaacaagtcggacctccgggatgccagggaagtatccacagccgaagggaaggccttagcagaggcacagggtttatttttcatggagacttctgcacttgattcctccaatgtagcggctgcatttcagactgtcgttaaagagatctacaacatattgagccggaaagttatgatgtctcatgagctcaagaagcaggacgcaccattggatgggaagaccgtggttttacaaggggatgagaaccaagaacctgctactgaggcacccaaatcgggtggttgctgttcatcctgatgcttatccattttaacgattctccatcaagtttccactgaagttcctgatatttcttcttctccatgtcttcatttgtttgaataacatttgtttttactcgtt

SEQ ID NO: 6702 - DNA, 615 bp, Gossypium hirsutum
  Clone ID: GOSHI-09MAY01-C122_2
ccacggtcgcgtgggcgcaccccgggccgggcgcgtgggcaggattgccttacatttggcacagcaaagcgagcaacccgttcgtgaatcttaagaaagaatacaaaggaatttactggcaagaagagttgatcccgttcttccagtctgttacccttcctaaggactgcacctcggttcagaaatgctacatcgaaatctccaagcaggtcaaggcaaaactaggcaaggtagatgactacttcaacaagctggctgatgctatggtgacctggatcgaagcatgggatgagctgaatccatctggtgcaaaatccgccgagctgtccaatggtgcttcgaagtaggcttgttcagtaagcagctaacatattgtttagcagccctaggcttgtttggggatcaccgacacttgccaaagctccattgcttggagtgcttattttgcaggttggaggaggatggacacattgttattttatcatattattactgagtttagaacaataaaaaaatggatggctttatggcttcttatgtatttggcactagaaattgatggcttatatcttaaattatttttatttatacaatgattgggattgtttctttttg

SEQ ID NO: 6703 - DNA, 1359 bp, Gossypium hirsutum
  Clone ID: GOSHI-09MAY01-C122_1
gtccgctcgaccttccatcccctctccctgtttgcttctgaaaagtccaagtttttctccaatggcgaccgtctctccaactcctctgttgaaagatgagctcgacatcgtgattcccacgattaggaacttggactttttggagatgtggagaccctttttccagccttaccatctcatcattgttcaagatggtgatcctaccaagaccatcaaggtccctgaaggcttcgattatgagctttacaataggaacgacatcaacaggattttgggtcctaaggcttcttgtatctctttcaaggattctgcttgtaggtgctttgggtacatggtttccaagaagaaatacatctataccattgatgatgactgctttgttgctaaagatccatctggcaaagacatcaatgcattggaacagcacatacagaacctactgagtccatccactccatttttctttaacactctttatgacccataccgatccggtgctgacttcgttcgtggctaccctttcagtctccgtgagggtgttcccactgccgtctcacacggtctctggctcaacatcccggattatgatgctcccacacagcttgtcaagccactcgagaggaacaccaggtatgtcgacgctataatgacgattccgaagggaaccttgttccccatgtgcggaatgaatctggcatttaaccgagaattgatcggccctgcaatgtactttggactcatgggagatggtcaaccaattggacgatacgatgatatgtgggctggctggtgcaccaaggttatttgtgatcacctcggatggggagtgaagaccggacttccctacatttggcacagcaaagcgagcaacccgtttgtgaaccttaagaaagaatacaaaggaatttactggcaagaagagttgattcctttcttccaatccgttgcccttccgaaggactgcaccaccgtacagaaatgctacatcgagatctccaagcaagtgaaggcgaaactcggcaaggtcgatgactacttcaataagctggcggatgctatggtgacatggattgaagcttgggatgaactgaacccatcgggcgatatatccgccaagattcctaatggtgcttccaagtgaaaacacatcattgtgtggtattttgcaggttggagggagatacatttatatatgttactacatatctcatagttatattttatcatatttactgagcttagatgaacaataagaaatttatggttttatgtattgtattagactttgagagttagcttctacagttcttaattcagattattgcatttcaattaattaaaatctcttttgttggtttt

SEQ ID NO: 6704 - DNA, 425 bp, Gossypium hirsutum
  Clone ID: LIB3146-005-Q1-K1-C4
gtggatattcgcttatctcccaacctcacttttttcgctaggataaactacgatttactcggttcgacttatctcccgatctcgcctcccttatgataacttcctaatgttgtcaagcctagggtttaggaacgtttaatctataccaactaatcctattatgaactcttgttcttttgttaattaactgacgtaataaattaattagttcaataaacaaatcatgcacgatatgaataaagtgctagatttattctaacattcatacaaatattagttgatcatgctaacgaaatataaataaaagaataaaatagaagagtaaagagaatgctcatgaatatatattggctcgtatcgctgatcatccatttttgttcaagctcttccattaaagcttggaatgattatttttgcagggggga

SEQ ID NO: 6705 - DNA, 613 bp, Gossypium hirsutum
  unsure (1)..(613): unsure at all n locations
  Clone ID: AI728951.1
attcaccaagtcctttctcctattaccctttcccctctccctttctctctttcctcttcacctgaccctatcaaaggaacccagctttccatctcggtaccagacgatgatgttttgaactccttcttcatcgttttctgtacttcctcttcttattctgctttccaatggctatccccgccgcaaacgtttaacaaaaaaacacccttttgtttatacccaatgccaatgtatccacgcgcgttatgtctttttaatttgtaaccaagattatcaaggtccctgaaggcttcgattatgagctttacaataggaacgacatcaacaggattttgggtcctaaggcttcttgtatctctttcaaggattctgcttgtaggtgctttgggtacatggtttccaaaaagaaatacatctatatataccactgatgatgactgctttaggatgccacttgattttctgcaaggagacaagttttgtgaagcagcagttagttacattcagcctcttctaacaaagggggttccatctttattttcagatctttctcctttgtacaaccactatggcaagggaactgctggagttgcacttgctggattgttangat

SEQ ID NO: 6706 - DNA, 631 bp, Gossypium hirsutum
  Clone ID: AI730967.1
ggccgacaatattttctcatagaaaatatttgattctccctccatcttccaatctttttagttcccttcccattacaaatcagttttccattccaaagcataacaaacgtttaacaaaaaaacaccccttcttcatcgttttgaactcctccatcgttttctctacttcccctccttcttctgctctccaatggctatccccgccgcaaacgtttaacaaaaaaacacccttttgtttatacccaatgccagtgtatccacgcgcgttccattttcccgtgtcaagacactccctcaacgagaatccgttactctgctttgctcaatgtccctcggaagttatccgccgtttcaaatgttggggctgctgcagggataagacgaggtcatcgaggaagaatcaagcgtcgtcaagcagcggaggtggaggaggtgaagggaatcaaaacgggattacggatgaagaagctctttccaatatcaccaaacaaaaagccgctgctgccaagcagtatattgagaatcattacaaggagcagatgaagaatcttcaagacagaaaagagaggtataaaaatgaaccaagtattatgaagtacataaagattgcagctaccttgcctgataaaag

SEQ ID NO: 6707 - DNA, 589 bp, Gossypium hirsutum
  Clone ID: LIB3828-003-Q1-K6-E8
cttaagtgggatttcaggtgcgagtcaaggttttagcaagaaggtatactcaaggaactatgacgtacatattcactaggaaggtgattagtactacatgcgtagggcgctcaggatagatttgtctatgttgtaagagggtgaaagcggagtagagtttattccttttttattcaattgacctaatatttgcttcacaagaaaggtgataacttcgagtaccagggaagaaacttaattccgagtgctttccactgttgatatggttatatagagtgacactcgtaagaaggttggaaaatggcttttgtttcaaaggaagaaaaaattgaggattaccttttcaagattgtacttgttagtgattcaactgatgggatattgaatttacttgcaagatttgctaagaatgagttctacccaaattcaaagtcaaccataggagtagagtttcaaactcagaagttagatataaatgggaacgaagttaaggcacagatgtggataatgcttacaagaaccaagtggatataccttaaatatgttcgtatctgagttaggctcatcaagcatgattgagaggtgaaaa

SEQ ID NO: 6708 - DNA, 424 bp, Gossypium hirsutum
  Clone ID: LIB3149-033-Q1-K1-C3
aaagttgggacttgtttaatccaaacctttttttttgtccgccccctgtacaatttcagcaggtttcttctcgaaagatgggctctacatcatcatatcaaccattctgaactaggacttactggagatgtggaggctcttttctcagccttaccatctgattattgttcaagatggtgatccttccaagaccatcaaggttccggagggcttctactatgagctttacaatatgaacgatatcaacaggattttgggtcctaagtcttcttgtatctctttcaaggatttctgcttgtcgctgctttggttacatggtttccaagaatatgtacatttataccattgatgatgattgcttttgtgctaaagatccggtcggcaaatacattaacgcacttgtacagcacataaagaacctttt

SEQ ID NO: 6709 - DNA, 575 bp, Gossypium hirsutum
  Clone ID: LIB3584-036-P1-K1-G11
cccacgcgtccggagcttctaaaatctaagcagtagaaggagcttaagtgggatttcaggtgcgaggcaaggttttagcaagatggagagatcaaggaatcgtaacgtacatattcactaggaaggtgattagtactacatgcgtagggcgctcaggatagatttgtctatgttgcaggagggtgaaagcggaatagagtttattccttttttattcaattgacctaatatttgcttcacaataaaggtattttcatgtaagcaattgctgaatgacacatttgtactctttattcctattttagcttccttttccagcgtgcctttattcttttcttcgataaacccgtttctgttcttaaacatgatacaaggttggtgcttcttaggtgataacttcgagtaccagagaagaaacttaatttcgagtgcttttcactgttgatatggttatataaagtgacactcgtaggaaggttggaaaatggcttttgtttcataggaagaaaaaactgaggattaccttttcaagattgtactaattagtgattcagctgttgggatatcgaatttac

SEQ ID NO: 6710 - DNA, 509 bp, Gossypium hirsutum
  Clone ID: uC-gsflmaxxa048g05b1
tccacgcgtccgcttcgttttggtttttttgctttgctctgaaactccaagctctcatcaatggcggatccagcgactatctcaccagccacgctgttgaaagatgagcttgacatcgtgattcccaccattaggaacttggatttcttggagatgtggagaccctttttccaaccttaccatctcatcatagttcaagatggcgatccttcaaaggccatcaaagttcctgaaggctttgattacgagctttacaacaggaacgatatcaataggattttgggtcctaaagcttcttgcatctctttcaaggactctgcttgtcggtgctttggatacatggtttccaagaagaagtacatctataccattgacgacgattgtttcgtaagctcaatattcatctctcatgttgctaaagatccatctggaaaagacattaatgcattggagcagcacataaagaaccttctgagttcctctacttcgttttttttcacaccctttac

SEQ ID NO: 6711 - DNA, 501 bp, Gossypium hirsutum
  Clone ID: uC-gsflmaxxa067c01b1
gggacccacgcggccgccgtttttactgctatgctcggctatgaccaagctggtagccattggccaccgtatttccaacggctctggggaaagaggagctggccatggaggctcccacggttaggaacttggactttttggagatgtggagaccctttttccagcctgaccatctcatcattgttcaggatggtgatcctaccatgaccatcaaggtccctgaaggcttcgattatgagcttctacaataggaacgacttgaattctatgacaaaggtgttgcacctcgtaaaaacatcgatgtaatgaaatctgcgattgaaagtcctcagaagaagcatactgaattggcagaagttgaacctgaagaagcttgcgcaaagaaaagcacgagaccgaagtcaaaaaccgatgatgctccagctgctgctacaaatggagatgcatcggtggatggtcaatcggagaagaaaaagaagaaagagaaacgaatgaaggagc

SEQ ID NO: 6712 - DNA, 480 bp, Gossypium hirsutum
  Clone ID: uC-gsflmaxxa091a03b1
ctcctatattctctttcctctgcacctgaccctatcagggggacctatttaaccatcttgctaccagacgaccatgttttgaactccttcttcatcgttttctctacttccccttcttcttctgctctccaatggctatccccgccacaaacgtttaacaaaaaaacacccttttgtttatgcccaatgccagtgtatccacgcgcgttccattttcccatgtcaaaacactcccgcggcgggaatccgctactctgctctgctttgctcaatgtccattttgggtcctaaggcttcttgtatctctttcaaggattctacttgtaggtgctttgggtacatggtttccaagaagaaatacatctataccattgatgatgactgctttgtaagctcaaccctcgtctcttccctcttctattttttatttttgaattttgcgttttagtgggtttcccaaaaaaaggctttcatttaaag

SEQ ID NO: 6713 - DNA, 361 bp, Gossypium hirsutum
  Clone ID: LIB3196-003-P1-M1-F7
cccacgcgtccgcccacgcgtccgcggacgcgtggggtttttctccaatggcgaccgtctctccaactcctctgttgaaagatgagctcgacatcgtgattcccacgattaggaacttggactttttggagatgtggagaccctttttccagccttaccatctcatcattgttcaagatggtgatcctaccaagactatcaaggtccctgaaggcttcgattatgagctttacaataggaacgacatcaacaggattttgggtcctaaggcttcttgtatctctttcaaggattctgcttgtaggtgctttgggtacatggtttccaagaagaaatacatctataccattgatgatgactg

SEQ ID NO: 6714 - DNA, 387 bp, Gossypium hirsutum
  Clone ID: LIB3146-001-P1-K2-C5
cccacgcgtccgcccacgcgttcgcccacgctttcgcccacgcgttcgaccacgcgtccgcgcacgcgttcgctttcagtctccgtgagggtgttaccactgccgtctcacacggtctctggctcaacatcccggattatgatgctcccacacagcttgtcaagccactcgagaggaacaccacgtatgtcgacgctataatgacgattccgaagggaaccttgttccccatgtgcggaatgaatctggcatttaaccgagaattgatcggccctgcaatgtactttggactcatgggagatggtcaaccaattggacgatacgatgatatgtgggctggctggtgcaccaaggttatttgtgatcaccttggatggtgagtgaaga

SEQ ID NO: 6715 - DNA, 326 bp, Gossypium hirsutum
  Clone ID: LIB3149-003-P1-K1-F9
gtttcaaactcagaagttggatataaatgggaaggaagttaaggcacacatctgggatacggctggtcaggagcgcttcagggccgttacacctcggttcagaaatgctacatcgaaatctccaagcaggtcaaggcaaaactaggcaaggtagatgactacttcaacaagctggctgatgctatggggacctggatcgaaacatgggatgagctgaatccatctggtgcaaaatcccgcgagctgtccaatggtgcttcgaagtaagcttggtcaagtagcaacttacatattggttagcaaccctaggcttggttggggatcac

SEQ ID NO: 6716 - DNA, 1416 bp, Gossypium hirsutum
  Clone ID: GOSHI-09MAY01-C382_1
tgttttctctcgcccgcgcggaaaaaaacgaaaaaaaaatgtcagtcaccttgaaatctccgccttcttcatttctttcatcttctttacctaaatcaagattgggatttgcaaatgggtcatcttcttcaactctactcttcaaattcaacagatcttttccagttcttcgtgcctcttctggttcctcttcttctgttgacactggtttgagtactgaattggatgctgtgtctactttcagtgagatagttcctgatactgtgatctttgatgattttgaaaagtttccaccaactgctgcaactgttagctcttcattgttgttgggcattttgagccttccagatactatttttagaaatgccgtggatatggctttggcggattcgacatgttctccgctggacaatcctgaactgaggttgtcttgttttgttaacaaggctttagtaaatgttggtggtgacttggcaaagctagttcctggtcgagtttcaactgaagtggatgcacgcttggcttacgatacacatggaattattaggagggtgcatgacttgctgaggctgtatgatgagattgccgttcctccagaacgcttgttgtttaaaattccttcaacttggcaaggaatagaagcttcaagattgctcgaatctgagggtatacaaacacatttgacttttgtttatagctttgctcaagctgcagctgcagcccaagctggtgcttctgttattcagatttttgtcggccgtgttagggactgggcacgcaatcattccggtgaccctgagatcgaagctgctattcaaagaggagaggaccctggattggctctggtgacaaaagcttataactacattcataaatatggacataaatcaaagcttatggcagcagctgttcggaacaagcaggatatatttagtttgctgggggttgactatatcattgcaccattgaaggtattgcagtcactcaaagaatcaattacttctcccgacgagaagtactcttacgttaggaggttgtccccacagtctgctgccagatatgatttcaccgccgaagagctcacaaagtgggatcaactaagccttgcatcagccatgggacctgcatcggtggagcttctggctgcaggactggatggatacgttaatcaagcaaagcgagttgaggaattgctcgacaagatttggccacctccaaatgtctaaagtggctcgtctccgtttcaaagtatctctcgtgtggcatagaataagaaggtggtggtaccctgctccattatgttgttttaacaaaccttgcttcatttgctgagaactttagctggttttaaattattgaatgctaatcctttatattctctgttatcaatgaacatgatgttgttgatgtttgccc

SEQ ID NO: 6717 - DNA, 445 bp, Gossypium hirsutum
  Clone ID: GOSHI-09MAY01-C352_23
acgccacgcgttctaccacgcgtgcgctcacgctttcggttttctttatcaagtcgggatttgggcttctggggtgaaaaaaatgttgggagtatttagcactgcgatagtgtctccgccggacgagctggtggcggccggtatgccgaactccatcacctatgataacggccgacgctctggtgaaacggttccttgagacgaactcctccggcgtgtccatgcacatcggagaccatgtccaagccgcttattctcaccataaagagtctcctttacagcccaggtcatttgctgtgaaagaaaatcatatatggtattggctgctggatgatctcaatcgttgaaaattaattatgaatcaaacttcagttgatcaaaacgtttatctcttacagaattttgatcctggccctaacataattcgtgaaatgggggcggccgc

SEQ ID NO: 6718 - DNA, 640 bp, Gossypium hirsutum
  Clone ID: GOSHI-09MAY01-C352_17
tttttttttggtgaaaactgggaaagacaattatcaaattatcacaatcggaggcgaatctgagtttgttcaactgcattggagcaaatgtttgaataaaaatatccaaccatttaccaccctgcagtatgtgaaaattccaaacaaatttaaactagcataatcttattgtgaagattgttcaaattatctcttggggtgctaaattcaaggtggaagggccaacagttgttgctgccacagagtagtcctttgctttctccttctaaatccccgcgcccccgggaatataggagctgcaaatgcatagcatatggatcagtctccatgtgaataactgagtcccagtacttgtagaatgggaaatgaaatgaagaataaaataatgaagaataagaactgtttggttatgagaaatggcagtaactttctgtttaggtagctttatgttaaaactagcttttattcctgtttcgtcctttgtacatcataatgtcagcttcaacttctagtctaataaaagcttgtttgagggtcccatatcgcttgatattgtaaattgcaaaaacatgtcgatttcatatttgttacgcatgaaatatgctttaacaaatattttttactaaggggctgccttttt

SEQ ID NO: 6719 - DNA, 822 bp, Gossypium hirsutum
  Clone ID: GOSHI-09MAY01-C352_16
gagtaaatgaacaagttttttttatcaaagaaagggagcattgaacaaacacatggtgaaaactgggaaagacaattatcaaattatcacaatcggaggcgaatctgagtttgttcaactgcattggagcaaatgtttgaataaaaatatccaaccatttaccaccctgcagtatgtgaaaattccaaacaaatttaaactagcataatcttattgtgaagattgttcaaattatctcttggggagtctcaatgcttaagatgaagctggtgttttggtataggagcggacaccgaaggccaatcccaagattagcaggggaacaaggaattggagaagctttatggcaaattctgaggtcttgtcttgttcgtagtgaggctgctttggaggagtgtacttcctcttagaggggatggtcgatgtatcgatgtcacccacataaaactcatccatcattgctcgagcactgctactatgaccaacatcttcaaaatcatcagttgcatccttccctgtggaagacagcaagacatcatcccccccagggtggtcctccaagaatttagtcacatcaaataccttgccctcaatgacaagccaacagtctttagcatggttgtgttgagaaacctcagccaaagtgtagacctttctttctccacccatttttttcctcttgtttttttgcttgtttgaagaagaagaagaagaagaagggcagcccagaatagctgatcaaaccccacgcgtccgcccacgcgtccgaagaaaacatgttcttcgtttgttgtttttaatttttaagtccaaggttgattc

SEQ ID NO: 6720 - DNA, 1140 bp, Gossypium hirsutum
  Clone ID: GOSHI-09MAY01-C352_13
atacaaagcttcatattatctttttgagggccgtcttaagaatactttttgggtctaacaactacaatcgttttctttttgaagtcgggttttagtttttggggagaaaaaaatgttgggagtatctagcagtgcgatagtgtctccgtcggacgagctggtggcggccggttgccgaactccatcacctaagataacggcggatgctctggtgaaacggttccttgagacgaactcctacggcgtgtccatgcagatcggagaccatgtccaattcgcttattctcaccataaagagtctgctttacggaccagatcatttgctgtgaaagatgaaatcttctgcttgtttgcgggagcccttgataacttggggagtttaaagcagcaatttggtcttggccatgagcccccacagtgagagtgatttgtggtcatttgaagctttacagaggcccgtgtcgtgaccgagcactcttattcctccaaaccatgtggttggcccatctaattgggagcctttgctttttcattggtctttgaccaaatccacctccacttttgtttggtggctttctggtaagtatttaaaatagggtctcaacctacttttaaaaaaaatggtattattgactttaagtgcttgcttggttggtgtataacaaacaagtgagggtggaatgatattgacaggatcaatttggtaaggttcctctctattggggaatcaccgccgacggacatgtggcctttgctgataatgctgatttgctgaaaggtgcctgtggcaaatctcttgcttctttccctcaaggctgtttcttctccacagcagttggagaactaatgagctatgaaaaccctaagaacaaaatcactgctgttcctgcagaagacgaggagatgtggggtgctacatataaggtggaagggccaacagttgcaggcaccgagtctcctatgctcagtttctaaatccatgtgagaaatggtagtaactctgtttggaacatatatatatatatatataggttttgatcttctgtacagctctaacttgtagtgtaatacaagtttgagggtcctaaatttgatatagaccttattaaataagaagactacaaaaggacttcatttcct

SEQ ID NO: 6721 - DNA, 692 bp, Gossypium hirsutum
  Clone ID: GOSHI-09MAY01-C352_12
acaaggatcaaaaagatcataagtaaagatctaaccaaaagattggttttgacttttgatcctcaagttgatttatattgaatctgagttatcagtccaggaataacaaggacactgaagatttgtttaagattcagttacattttcaaagagagatccatccactgggattcaaaatttttctcacgatcagaatcaaaattaacaaaaatcaaacagacaagggagaaaaaaaaagaggcaatagggttccctaaatccaagaacactcaaacaaaacatgcaacttcagaaatgaattaaaacacccaactttggcaaaaaataaggaaaagtcgaaagaagccaatttttaccaaaaaaacataaaggcaaccccagcgtggatcatccaagaaatttttaccaacaaaaagatgtacctttccctcaatgataagccaacagcctttggcattgttgtgttgagaaacctcagccaaagtatagacctttccttctccacccataattttttttttttgcttgtttaaggaagaagaagagcagagagttgctgatcaaactaaactctagtggcgttgtgttttgttgaataatacaggaaacttcaaaaacaaagcaaagctaagataaactgagtgagagagtttaattgggtggtgaggtcaatccaaaatcggacgcgtggg

SEQ ID NO: 6722 - DNA, 1202 bp, Gossypium hirsutum
  Clone ID: GOSHI-09MAY01-C352_11
gtgggggcttttttttttttcccccggctgggtaaaaaagactgcgccgcaattttttttatttgggcaaaaaaaaaggatttcccagtcccgaaggtggaagaattaatgtctgtttattaaaaaacggcccccctatattatttttttttattttgcaggcatgagtatgtttttttttgttcctttttattttttgcccttttttttttttttttttttttttttttttttttttttttttttttttttggaaaatcatagtaataggaatttatttcattaacaaagcaagcttttacaagataatttattctctcagcacataatataaaactccatataaagaactcttttctctttttttcttttctgagagagagagagttctatataggcactcttgataaccgggaaaggtagcttaagtaggcacataatataacacatagtaggacaaaacattagagttttgatccttggatgggcaaatatacagcagcaacatttccttaagcatccaaatgaatcatgcatctcagacctataccctggagcatgtagtcgaatgccttgttaatatcggcaaaaggcacagagtgtgtgatgaacttgtccatatccagccccagctcctgcaacaatatcatcaaaaccatcatcgaaatgaactatattctgtaatctgtatagagccacccccccttaccttgttcaaatatttgtcgacaaccatgggaatatcagtgcgtggtttatagttgccataaaaagcacccttaagggtcctctcccttagtagattcattggatgagttttgaatgcatcgtctttttttggcacaccccccagcacccgaaccccccaacctgcatggaggcattcaaaagcggaaatcatggcttggacgctccctgtacactccccactgcgatccactcctccgccggtcatttccccaatccccttttgaacaggtttgtggtagtcttttggattcccaaattctgtaatcccaaaccttttagctttttcaaatcttttggggttcccatcaccagcgatgatccgagaagcttgtttttgccccaaaggaaggtttaaatttcgaggccgagccggaggaggagaaaaagaaaaaggaggaaaaaaagaagtcttttgaagacctctgcaagccaatcaaagaacttttggtggc

SEQ ID NO: 6723 - DNA, 1112 bp, Gossypium hirsutum
  Clone ID: GOSHI-09MAY01-C352_10
caaagcttcatattatcttttttagttccgcaaagaaaacgaaaaaatagaagaaatacaatcgttttctttttgaagtcgggttttagtttttggggagaaaaaaatgttgggagtatttagcagtgcgatagtgtctccgccggacgagctggtggcggccggttgccgaactccatcacctaagataacggcggatgctctggtgaaacggttccttgagacgaactcctccggcgtgtccatgcagatcggagaccatgtccaattcgcttattctcaccataaagagtctcctttacggcccagatcatttgctgtgaaagatgaaatcttctgcttgtttgagggagcccttgataacttggggagtttaaagcagcaatatggtctggcaaagtcggcaaatgaagtgaaagatgaaatcttctgcttgtttgagggagcccttgataacttggggagtttaaagcagcaatatggtctggcaaagtcggcaaatgaagtgattttggtcattgaagcttacaggcccttcgtgaccgagcaccttatcctcaaaccatgtggttggccatctaattgggagctttgctttcattgtctttgacaaatccacctccactttgtttgtggcttctgatcaatttggtaaggttcctctctattggggaatcaccgccgacggatatgtggcctttgctgataatgctgaattgctgaaaggtgcctgtggcaaatctcttgcttcttttcctcaaggtgcattccccttatacagttttactgatgtttttttaaagtggaatcgtgaacttgaattgaggagcttcatatttcaattatgcaggctgtttctactccacagcagtaggaggattaagaagctatgagaatcctaagaacaagatcactgcagtgcctgctgaagaagaggagatatggggtgctaaattcaaggtggaagggccaacagttgttgctgccacagagtagtcctttgctttctccttctaaatctatggatccatgggaatataggagctgcaaatgcatagcatatggatcagtctcccatgtgaataactgagtcccagtacttgtagaatggg

SEQ ID NO: 6724 - DNA, 396 bp, Gossypium hirsutum
  Clone ID: GOSHI-09MAY01-C352_9
ataccctgaggcttcatgaccaagtatcggaggaacaagaggagtgtaaccctgccaaattaaaggaaaacagtgacaatacttgtagaaaataaatgttgtaatattcatgtatatcgaggaaacactaggagtgaaacccttacactcccagtagtatgcatcagtgtgacataaagcagtgaagacaatcttgaatacggacttcatgcttttggggtggtgccacttccacttcttctatcgatagtggcttccccgcctcccatgccaccgcagctttgcagcgcataacctgaccagcagtgctccctgcgtatgattttttttcggatacgcgtcaacaaacggacgcgtgggcggacgcgtgggcggacgcgtgggcggacgcgtggg

SEQ ID NO: 6725 - DNA, 464 bp, Gossypium hirsutum
  Clone ID: GOSHI-09MAY01-C352_8
agttccgacaaaagaaaacgaaaaaaatagaagaaatacaatcgttttctttttgaagtcgggttttagtttttggggagaaaaaaatgttgggagtatttagcagtgcgatagtgtctccgccggacgagctggtggcggccggttgccgaactccatcacctaagataacggcggatgctctggtgaaacggttccttgagacgaactcctccggcgtgtccatgcagatcggagaccatgtccaattcgcttattctcaccataaagagtctcctttacggcccaggtaaaaaaaaaatcatatatggtattggctgttggatgatctcaatcgttgaaaattaattatgaattcaaacttcagttgatcatcgagtgctttcgaacgaacctaggaattactataatttgtttaatcgaataatttacgattttttggccgatgattttttattatcata

SEQ ID NO: 6726 - DNA, 909 bp, Gossypium hirsutum
  Clone ID: GOSHI-09MAY01-C352_7
ccccgcgtcctgattgagcttacaggcccttcgtgaccgagcaccttatcctccaaaccatgttggttggccatctaattgggagctttgctttcattgtctttgataaatccacctccactttgtttgtggcttctgatcaatttggtaaggttcctctctattggggaatcaccgccgacggatatgtggcctttgctgataatgctgaattgctgaaaggtgcctgtggcaaatctcttgcttctttccctcaaggctgtttctactccacagcagtaggaggattaagaagctatgagaatcctaagaacaagatcactgcagtgcctgctgaagaagaggagatatggggtgctaaattcaaggtggaagggccagctgttgttgctgccacagagtagtcctttgctttctccttctaaatctatggatccatggaattataggagctgcaaatgcatagcatatggatcagtctccatatgaaagtacttgtagagtgggaaatgaaaagaagaaaaagaactgtttggttatgagaaatggtagtaactttctgtttaggtagctttatgttaaaactagcttttattcctgtttcgtcctttgtacatcataatgtcagcttcaacttcgagtctaataaaagcttgttcatctaaaaaaaaaaaaaaaaaaaaaaaaaaaaaaaaaaaaaaaaaaaaaaaaaaaaaaaaaaaaaaaaaaaaaaaagggcggcccccctttttttttttttttaaaaaggaaagcttgatctgaatttggaaaggaaccctctaaaattacactaaaatttgttattttgaaacaaaataagacaaaactcaccaatgcattggggtttataatttgcctatcatgtctaatacagatgtttaagtccca

SEQ ID NO: 6727 - DNA, 830 bp, Gossypium hirsutum
  Clone ID: GOSHI-09MAY01-C352_6
cggtaccggacaattcccgggttcgaccccacgcgtccgtggtcattgaagcttacaaggcccttcgtgaccgagcaccttatcctccaaaccatgtggttggccatctaattgggagctttgctttcattgtctttgacaaatccacctccactttgtttgtggcttctgatcaatttggtaaggttcctctctattggggaatcaccgccgacggatatgtggcctttgctgataatgctgaattgctgaaaggtgcctgtggcaaatctcttgcttcttttcctcaaggctgtttctactccacagcagtaggaggattaagaagctatgagaatcctaagaacaagatcactgcagtgcctgctgaagaagaggagatatggggtgctaaattcaaggtggaagggccaacagttgttgctgccacagagtagtcctttgctttctccttctaaatctatggatccatgggaatataggagctgcaaatgcatagcatatggatcagtctccatgtgaataactgagtcccagtacttgtagaatgggaaatgaaaagaagaaaaaaaaaaagaagaaaaagaactgtttggttatgagaaatggcaggaactttctgtttaggtagctttatgttaaaactagcttttattcctgtttcgtcctttgtacatcataatgtcagcttcaacttctagtctaataaaagcttgtttgagggtcccttatctcatctaaaaatttttttaaatatatatattattactttaaaaaattaaaaaaaaactcggggggccgtcccattgcctatagggcgtttaattacg

SEQ ID NO: 6728 - DNA, 832 bp, Gossypium hirsutum
  Clone ID: GOSHI-09MAY01-C352_5
aaaagacagattttgaagattaccaaaccagaaagaaagggtagttttactgggtacatgccatagaggacgagtttagatattacattgaaaatggggcaccgggaactggtcaataaacagaacgagtaaatatagtatttcgaaccatccctcaatatgtaacagttccaaacaaacgtttaaactaacataataataatattgagaagtttttccattctgggttgtggtcttgatgcttaagcaggtgatttggtatagaagcggactccgaaggccaatcccaagatcagcaggggaacgaggaattggagaagctttataacaaagtccgaggtcttgtcctgctcatagtgaggctgcttgggaggggtgtacttggtcttagttgggatagttgatgtatcgacgtcacccacgtaaaactcatccatcattgcccgagcactgctactatgaccaacatcctcaaaatcatcacttgcatctttccctgttgcagacaacaggacctcatcaccaccaggatgatcctccaagaatttagtcacatcatataccttgccctcaatgataagccaacagtctttggcattgttgtgttgagaaacctcagccaaagtatagacctttccttcgccacccataatttttttttttttgttttgcttgtttaaggaagaagaagagcagagggttgctgatcaaactaaactctagtggcgttgtgttttgttgaataagacaccacgcgtccgccctcgcgcccggctaagataaactgagtgagagagtttaattgggtggtgaggtcaatccaaaataattt

SEQ ID NO: 6729 - DNA, 974 bp, Gossypium hirsutum
  Clone ID: GOSHI-09MAY01-C352_4
cgaaaattgttttttttttttttttttgaggaatggaccagtttttttatccaaagaaagggagcattgaacaaacacatggtgaaaactgggaaagacaattatcaaattatcacaatcggaggcgaatctgagtttgttcaactgcattggagcaaatgtttgaataaaaatatccaaccatttaccaccctgcagtatgtgaaaattccaaacaaatttaaactagcataatcttattgtgaagattgttcaaattatctcttggggagtctcaatgcttaagatgaagctggtgttttggtataggagcggacaccgaaggccaatcccaagattagcaggggaacaaggaattggagaagctttatgacaaattctgaggtcttgtcttgttcgtagtgaggctgctttggaggagtgtacttcctcttagaggggatggtcgatgtatcgatgtcacccacataaaactcatccatcattgctcgagcactgctactatgaccaacatcttcaaaatcatcagttgcatccttccctgtggaagacagcaagacatcatcaccaccagggtggtcctccaagaatttagtcacatcaaataccttgccctcaatgacaagccaacagtctttagcatggttgtgttgagaaacctcagccaaagtgtagacctttctttctccacccatttttttcctcttgtttttttgcttgtttgaagaagaagaagaagaagaagggcagcacagaatagctgatcaaactgaacccaaaacttaatattgttgtcttgtggttgccactaaccaaccacaaactctgtgtgctggggttgaacctaaaaataccaaacaaataaaaataaagggaaaccaaagaagagtaggtttggttggtaaggtcaaatgtgagccatcccccccaccaagttgtggggggtgcggggggggttggtgcggaaacgtggg

SEQ ID NO: 6730 - DNA, 923 bp, Gossypium hirsutum
  Clone ID: GOSHI-09MAY01-C352_3
attttattgatcaaagtgggccgccatttgcttgggtttttttcgtatttggaaaatcatagtcataggaatttatttcattatacaaagcaagctcttacaaggagcacttattctctctatcacctcatgtaaaactccatataaagaactctctttttgttctttacagcgagagagtgctctgtgggcactcttgagaaccgggaacggcagctgaaggtggcgcatacctatagcacatactaggacaacacattatgagctccgatccctggttgggcaaatatacagcagcacactctcttaagcatccaaatgaatcatgcatctcagacctataccctggagcatgtagtcgaatgccttgtttatatcggcaaaaggcacagagtgtgtgatgaacttgtccatatccagccccagctccttgttcaaatatttgccgacaaccatgggaatatcagtgcgtggtttatagctgccataaaaagcacccttaagggtcctctcacttagtagattcattggatgagttttgaatgcatcgtctttctttggcacacccacgcagcacacaaacaccccaaccatcatggcacgcattcaaaagccgaaatcatggcttggacgctccctgtacactccacactgcgatccactcctccgccggtcatctccacaatcacctcttgaactggcttatcgtagtcttttggattcacaaattctgtaatcccaaacctcttagcttcttcaaatcttctggggttcacatcaacagcgatgatccgagaagccccacaaacccttgcaccttcagcggcggcaagaccaacggcacccagtccaaaaactgcaacagtttgacccttttgggtttagcacccacgcgtccgcccacgcgtccgcccacgcgtccg

SEQ ID NO: 6731 - DNA, 1160 bp, Gossypium hirsutum
  Clone ID: GOSHI-09MAY01-C352_2
cccgcgcgcccgcccacgcgtccgcgcgctttccaatacaaagcttcatattatcttttttagttccgacaaaagaaaacgaaaaaaatagaagaaatacaatcgttttctttttgaagtcgggttttagtttttggggagaaaaaaatgttgggagtatttagcagtgcgatagtgtctccgccggacgagctggtggcggccggttgccgaactccatcacctaagataacggcggatgctctggtgaaacggttccttgagacgaactcctccggcgtgtccatgcagatcggagaccatgtccaattcgcttattctcaccataaagagtctcctttacggcccagatcatttgctgtgaaagatgaaatcttctgcttgtttgagggagcccttgataacttggggagtttaaagcagcaatatggtctggcaaagtcggcaaatgaagtgattttggtcattgaagcttacaaggcccttcgtgaccgagcaccttatcctccaaaccatgtggttggccatctaattgggagctttgctttcattgtctttgacaaatccacctccactttgtttgtggcttctgatcaatttggtaaggttcctctctattggggaatcaccgccgacggatatgtggcctttgctgataatgctgaattgctgaaaggtgcctgtggcaaatctcttgcttcttttcctcaaggctgtttctactccacagcagtaggaggattaagaagctatgagaatcctaagaacaagatcactgcagtgcctgctgaagaagaggagatatggggtgctaaattcaaggtggaagggccaacagttgttgctgccacagagtagtcctttgctttctccttctaaatctatggatccatgggaatataggagctgcaaatgcatagcatatggatcagtctccatgtgaataactgagtcccagtacttgtagaatgggaaatgaaaagaagaaaaaaaaaaagaagaaaaagaactgtttggttatgagaaatggcagtaactttctgtttaggtagctttatgttaaaactagcttttattcctgtttcgtcctttgtacatcataatgtcagcttcaacttctagtctaataaaagcttgtttgagggtcccaaatttcatct

SEQ ID NO: 6732 - DNA, 1667 bp, Gossypium hirsutum
  Clone ID: GOSHI-09MAY01-C352_1
ggcccccaaaaaaaaagttttttctttttcaaaccacgggaaggaaaatttggtttttttattcgggggcccccccgcccccctttttttttttttttttttttttttttttttttttttttttttgtttttttttttttttttttttttttttttttttttttttttttttttttttttttttttttttggacaatcatagtaatagaaatttatttcattaacaaagcaagcttttacaagataatttattctctcagcatataatataaaactccatataaagaactcttttctcttttttttttttttgagagagagagagttctatataggcactcttgataaccgggaaaggtagcttaagtaggcacataatataacacatagtaggacaaaacattagagttttgatccttggatgggcaaatatacagcagcaacatttccttaagcatccaaatgaatcatgcatctcagacctataccctggagcatgtagtcgaatgccttgttaatatcggcaaaaggcacagagtgtgtgatgaacttgtccatatccagccccagctccttgttcaaatatttgtcgacaaccatgggaatatcagtgcgtggtttatagttgccataaaaagcacccttaagggtcctctcacttagtagattcattggatgagttttgaatgcatcgtctttctttggcacacccaccagcacacaaacaccccaaccatcatggacgcattcaaaagcggaaatcatggcttggacgctccctgtacactccacactgcgatccactcctccgccggtcatctccacaatcacctcttgaactggcttatcgtagtcttttggattcacaaattctgtaatcccaaacctcttagcttcttcaaatcttctggggttcacatcaacagcgatgatccgagaagccccacaaacccttgcaccttcagcggcggcaagaccaacggcacccagtccaaaaactgcaacagtttgaccctttttgggtttagcaacattcacagtggccccaaaacctgtacatatcccacagctaatgggacagactttatcaagaggggcggttggactgatcttggcaacctggccaacatggacgacagtatattggctaaaggtcgaggttccaacaaagtggtagataggcttgccgttgatggaaaatctggttttcccatcagcaagcataacacctcggtcgcagttgatcctaagcagttcgcacatgttattgctttcttctgacagacagtggcgacattctttgcattctccggtgaagatagggagcacatgatctccaggtttcaaatcattcacaccctcacccacactctccacgatccctgaggcttcatgaccaagtatacgaggaaacagaggagtgtaacccttacactcccagtagtatacatcagtgtgacataaagcagtgaagagaatcttaatacggacttcatgcttttggggtggtgccacttccacttcttctatcgatagtggcttccccgcctcccatgccaccgcagctttgcaacgaataacctgaccagcagtgctcattgcgtatgattttttttcttatattttaaacaagatttgcggcgtggggtcccccgtgcggtcggacc

SEQ ID NO: 6733 - DNA, 381 bp, Gossypium hirsutum
  unsure (1)..(381): unsure at all n locations
  Clone ID: LIB3585-063-P1-K2-F12
gatcactgccgcgcctgctgaagaagaggagtatatggtgtgctaaattcaaggtggaaggggcagctgttgttgctgccacagagtagtcctttgctttctccttctaaatctatggatccatggaattataggagctgcaaatgcatagcatatggatcagtctccatatgaaagtacttgtagagtgggaaatgaaaagaagaaaaagaactgtttggttatgagaaatggtagtaactttctgtttaggtagctctatgttaaaactagcttttattcctgtttngcccctttctacataataatgttaggttgaacttcnaatttaattaaaactttgttatttaaaaaaaaaaaaaaaaaaagggtttgcctttt

SEQ ID NO: 6734 - DNA, 410 bp, Gossypium hirsutum
  Clone ID: uC-gsronu33B108e12b1
ctgatgcgtgggtcgcccacccgtccatcgcatcatgtttcttgatgaaaaccccaggggatttgaacaagctaacaggtttgggattacagaatttgcgaatccaaaagactactataagccaattcaagaggtgattgtcgagatcaccgactgaggagtggatcgcagtgtggagtgtacagggagcatccaagccatgatttccgcttttgaatgcgtacatgatggctggggtgtttgcgtgctaattggtgtgccaaagaaagacgatgcattcaaaactcatccaatgaatctactacatgagaggacccttaagggtgctttatatggcaactataaaccacgcactgatattcccatggttgtcgacaaatatttgaataatgagagctcatttggttctt

SEQ ID NO: 6735 - DNA, 616 bp, Gossypium hirsutum
  unsure (1)..(616): unsure at all n locations
  Clone ID: AI729158.1
gggggaagacacgatagggaagaattgtggaaaatttgacccaaataaccttattggagagaatatagccagattataaaatgatgtagatggataagctggtgatttggtattgaaggagatacggaatgccaatcccaagattaggagcggaacaaggaattggagaagcttaacaacgaattccgaggtcttatgttgatcatagtggggctggttcggaggagtgtagtttgtcttggtgggaatggttgatgcatcgatatcacccacgtacaactcatccaacattggtctagcactgctgctatgaccaacatcctcgaaatcatcggtagcatccttcccacttgcagacaacaagacttcatcaccaccaggatggtcctccaagaatttagtcacattgtataccttgcccccaatgagaagccaacagtctttagcattgttgtgttgagaaaactgtgntaaagtatagacctttccttctccacccattttcatttttctttttgcttgttggaggaaaaaagagcagagatttgctgatatgactgctgtcgtgtggttgccagtgccactgtccgtgtgtattgggttttgaacccagtag

SEQ ID NO: 6736 - DNA, 356 bp, Gossypium hirsutum
  Clone ID: LIB3829-036-Q1-N6-C6
aaaggaacagaccaccattatactcgaagacgcatcctgaattctgatcgtcaaaggacgacacgggactaagacctagttatcacatggggctacctgaccagagagttactaccacttctcaccaccaaacagttctttagcttctatgaatttcccactctacacgctcttcaatctgtgagacggatccatatgctatgcatttgcggcccctataataccatggatccatagattcagaaggagaacgcaaaggactactctgtggcagcaacagcagatggcccttccaccttgaatgcagcaccccatatctgctcttgttcagcaggcactgctaagaactggatctt

SEQ ID NO: 6737 - DNA, 640 bp, Gossypium hirsutum
  unsure (1)..(640): unsure at all n locations
  Clone ID: LIB3831-001-Q1-K6-G9
atgggactcagttattcacatgnagactgatccatatgctatgcatttgcagctcctatattcccatggatccatagatttagaaggagaaagcaaaggactactctgtggcagcaacaactgttggcccttccaccttgaatttagcaccccatatctcctcttcttcagcaggcactgcagtgatcttgttcttaggattctcatagcttcttaatcctcctactgctgtggagtagaaacagccttgaggaaaagaagcaagagatttgccacaggcacctttcagcaattcagcattatcagcaaaggccacatatgtgcgaactgcttaggatcaactgcgaccgaggtgttatgcttgctgatgggaaaaccagattttccatcaacggcaagcctatctaccactttgttggaacctcgacctttagccaatatactgtcgtccatgttggccaggttgccaagatcagtccaaccgcccctcttgataaagtctgtcccattagctgtgggatatgtacaggttttggggccactgtgaatgttgctaaacccaaaaagggtcaaactgttgcagtttttggactgggtgccgttggtcttgccgccgctgaaggtgcaaggggttgtgggg

SEQ ID NO: 6738 - DNA, 416 bp, Gossypium hirsutum
  Clone ID: LIB3145-030-Q1-K1-H9
ggccgaccacgcgtccgcccacgcgtccgcccacgcgtccgggttgtcttcaaatatttgaacaaggagctggggctggatatggacaagttcatcacacactctgtgccttttgccgatataaacaaggcattcgactacatgctccagggtataggtctgagatgcatgattcatttggatgcttaagagagagttgctgctgtatatttgcccaaccaaggatcaaaactctaatgttttgtcctactatgtgttatatttatgtgcctacttaagctacctttcccggatatcaagagtgcccatatagaactctctctctctaaaaaaaaaaaagagagttctttatatggagttttatattatgtgatgagagaataaattatctttgtaaagcttgctttgttaatgaa

SEQ ID NO: 6739 - DNA, 390 bp, Gossypium hirsutum
  Clone ID: LIB3147-031-Q1-K1-E5
gctaatcttgggattggccttcggtgtccgttcctataccaaaacaccagcttcatcttaagcattgacactccccaagagataatttgaacaatcttcacaataagattatgctagcttaaatttgtttggaattttcacatactgcagggtggtaaatggttggatatttttattcaaacatttgctccaatgcagttgaacaaactcagattcgcctccgattgtgataatttgataattgtctttcccagttgataaaagtaaaatatcgaccgacactgtacttacgatgttcaataaagggacagaacatgttgtgacatggtattgcaaatacacaatgaagcgtgcacttatcgcactaaaaactgcataggggggggcctt

SEQ ID NO: 6740 - DNA, 428 bp, Gossypium hirsutum
  Clone ID: LIB3145-021-Q1-K1-C4
cttgccgtgagtttattcttgtttcacctaaagtttttctctaggctatttgttaaatgtgtttgattcacttttatccatataaattaggccgctgaaggtgcaagggtttgtggggcttctcggatcatcgctgttgatgtgaaccccagaagatttgaagaagctaagaggtttgggattacagaatttgtgaatccaaaagactacgataagccagttcaagaggtgattgtggagatgaccggcggaggagtggatcgcagtgtggagtgtacagggagcgtccaagccatgatttccgcttttgaatgcgtccatgatggttggggtgtttgtgtgctggtgggtgtgccaaagaaagacgatgcattcaaaactcatccaatgaatctactaagtgagaggacccttaaaggtgcttttta

SEQ ID NO: 6741 - DNA, 255 bp, Gossypium hirsutum
  Clone ID: uC-gsronu33B047b06b1
tgttgtatcgtttctgagggaacccttgatcttgatgaggtttttctttggttgaggtttctcaacacaaccatgctaaagactgttgtcttttctctcttttttaaataatttctatagtatttatctttttggaggacccaccctggtggtgatgatgtcttgctgtcttccacagggatatgtgcatctgatgattttgaagatgttggccatagtattagtgctcgagcaatgatggatgagttttatgtg

SEQ ID NO: 6742 - DNA, 359 bp, Gossypium hirsutum
  unsure (1)..(359): unsure at all n locations
  Clone ID: uC-gsronu33B144a07b1
ttgtatttgtcataaagcttctccaattccttggggctctgttaatcttgggattggccttcggtatccgctcctataccaaaacaccagcttcatcttaagcattgagactcccaagagataatttgagcaatcttcacaataagattatgctagtttaaatttctttggaattttcacatactgcaggttggtaaatggttggatatttttattcaaacatttgctccaatgcagttgaaaaaactcagattcgcctccgattgtgataatttgataattgtctttcccagttttcaaaannnaaaaaaaaaaaaaaaaaaaaaaaaaaaaaaaccataaccagggggcggccgctc

SEQ ID NO: 6743 - DNA, 294 bp, Gossypium hirsutum
  Clone ID: LIB3584-039-P1-K1-F7
cccacgcgtccgagaactgtttggttatgagaaatggtagtaactttcttcttttcatttcccactctacaagtactttcatatggagactgatccatatgctatgcatttgcagctcctataattccatggatccatagatttagaaggagaaagcaaaggactactctgtggcagcaacaacagctggcccttccacctgcactttgtgtgcggatcttgatcaatctggtgcggctcctctctataggggaatcacaggcgacggatatgtggcctacgctgatacatgct

SEQ ID NO: 6744 - DNA, 202 bp, Gossypium hirsutum
  Clone ID: LIB3189-008-P1-K1-D8
tccacgcgtccgttcttcttcttcaaactagcttaaaaacaagaggaaaaaaatgggtggagaaagaaaggtctacactttggctgaggtctctcaacacaaccatgctaaagactgttggcttgtcattgagggcaaggtacaatttcttctattctgtagaaatatcatggataagtatatccccaatctcggactgagt

SEQ ID NO: 6745 - DNA, 207 bp, Gossypium hirsutum
  Clone ID: LIB3148-034-Q1-K1-H11
cccacgcgtccgcccacgcgtccgcccacgcgtccgcccacgcgtccgaaaaagaactgttgggttgtgagaaatggcagtaactttctgtttaggtagctttatgttaaaactagcttttattcctgtttcgtcctttgtacatcataatgtcagcttcaacttctagtctaataaaagcttgtttgagggtcccaaatttcatct

SEQ ID NO: 6746 - DNA, 249 bp, Gossypium hirsutum
  Clone ID: LIB3146-013-Q1-K1-B4
cccacgcgttcgaccacgcgtgcgcccacgcgttcggctgttgttgctgccacagagtagtcctttgctttctccttctaaaactaaggatccatggaattataggagctgcaaatgcatagcatatggatcagtctgcatatgaaagtacttgttgagtgggaaacgaaaagaagaaaaagaactgattggttatgagaaatggtagacactcactgatatgtagctttatgttaaaactagcttaaa

SEQ ID NO: 6747 - DNA, 259 bp, Gossypium hirsutum
  Clone ID: uC-gsronu33B029d04b1
ggtatatctcttgcttcttttcctcaaggctgtttctactccacagcagtaggaggattaagacgctatgagaatcctaagaacaagatcactgcatttgccttttgtccaagagtactactttcccttctctatcctattctcccttcattttttatatactttatcactttcttttactcatctattaattttccatcttcttcttcttattacttttacttctttttcacttcttcaattttttttttttttttct

SEQ ID NO: 6748 - DNA, 208 bp, Gossypium hirsutum
  Clone ID: LIB3120-039-P1-K1-C7
atccgcatgcagcccggaggcgtaaacagctatttaaacacttggaacagcttgactgctggtggtgctaaagactaggagatgtggggtgctacatataacgtggaagggccaacagctgttgcaggcaccgagtctcctatgctcagtatctaaatccatgtgagaaatggtagtaactctgtttggcactatactgactatatcg

SEQ ID NO: 6749 - DNA, 226 bp, Gossypium hirsutum
  Clone ID: LIB3166-040-P1-K1-C6
tttccgggtcggaccacagccttcccgattttatttcctaaaagaataaatatcttcatataaagaacccttgccaatggagaagtttttttgaaagaaaaagttctatataagcactcttgataaccgggaaaggtagcttaagtaggcacataatataacacatatgttgacaaaacaaaaaaaaaaagagaaaagagttctttatttggagttttatattctc

SEQ ID NO: 6750 - DNA, 159 bp, Gossypium hirsutum
  Clone ID: uC-gsflnu33B022a02b1
acgcgtccgcccacgcgtccgcccacgcgtccggaaatggcagtaactttctgtttaggtagctttatgttaaaactagcttttattcctgtttcgtcctttgtacatcataatgtcagcttcaacttctagtctaataaaagcttgtttgagggtccc

SEQ ID NO: 6751 - DNA, 623 bp, Gossypium hirsutum
  Clone ID: GOSHI-09MAY01-C312_3
ccggtacggaatggctcggacccacgcgtccgcccacgcgtccgcccacgcgtccgcccacgcgtccggcaagttttgggggttctaacattgatccgactgcttgggaagacaaaaagtgtaaaggcgagtcaagatttcctgctcaggtgagaatccgtattaggaaactctgcaaagcattggaagaggatgcttttcggccagtcttgcaccactatgatggtcccaagtttcgtcttgagctctcgattcctgagactttggacctactagacctctgtgaacaagctggctctccataagcaaaaatgttagctgagtgcaaatgtagcaagggttatgcaattcagctgcctgcttctcaaagatttttaatggagcacaagctatggcttgtaagtccaggtggtgaaatcatctttgaaaaaaagtagtaggaaatgacatttgccagctgaataaatgcattagtatcttgttagctttgtaaaacctttttacattattatatcttatgaattaaaaccctataaaattagacttgcaagatgtgaaagagaatgatgactgtgtaatattagaagtcctcaagaaatgaaggtcatttgtgctttataact

SEQ ID NO: 6752 - DNA, 1296 bp, Gossypium hirsutum
  Clone ID: GOSHI-09MAY01-C312_2
cccctgccgcccctgacgggtttcacttgcatagctagcaaagctaaagagtttgcaagatggggagcatggatagcttttggcagctgggggattatcttcgaggacaatcaaaagcctcagaggataaccaatggctgatggttgcctctaaactggctgagcagacgaggacaaagggtgaacgcctgagcaatcttgatctttcgaagggtccagccgaaataaggacaagggataaatttggtttccgggaagacaacaaattcgagaaccttaacttcaatatgttaaacttggactccaagattggagataatgtaagcaaaagctcattccgaaatggtacctacaatataaatgctgtttaccagaaaaataatagcaatagcctggaagacctggctggcaacaaatatagcggcaataatcatagcaacaaagatgtcaataataacagcagtaccagcaataacaacagcaatgagaacagtgcaaacaatgctgttgacaaacggttcaagacattgcctgcagctgaggcactcccgagaaatgaggtgcttggaggatacatttttgtttgtaacaatgatacaatgcaggaagatctaaagcggcagctatttggtttaccaccaagatatagggactctgttatggcaataacacctggcttacctctatttctctataactatactactcatccggccccgggggtttttgaggcagcaacttttgggggttctaacatcgatccaactgcttgggaagacaaaaaatgcaaaggcgagtcaaggtttcctgctcaggtgagaatccgtattaggaaactctgcaaggcattggaagaggatgcatttaggccagtcttgcaccactatgatggccccaagtttcgtctcgagctttcagttcctgagacgttggatctattagacctttgtgaacaagcaggctctccataagccaaaagttatctgagtgcaaatgtgctagggttaagggcataaggctgcctgcttttcacagattttccatagagcgcaagctgtgggttaaagaccagttggtgaatcaactcaggaaaagtgggaaatggcgttagccagctgaataaaattgcgtttgtgtcttgtgaaagatacttttgtaaacttttgcattatattcttatgtattaaaaatcctatatagatagacttgcaaaatgtgaaagacaatgactactatgtgtaatgtttaaagtcctcaagaaatgaaggccttgaatttgatgtctgttttgtgctt

SEQ ID NO: 6753 - DNA, 1416 bp, Gossypium hirsutum
  Clone ID: GOSHI-09MAY01-C312_1
caaatctggtgttcttagcttctaaaatacttttaaacccctctgtgccgtgtcttgcgggtttcacttcacagctagcaaaggatctgcaagatggaaagcatgaatagcttttggcagttaggagatgatctccggggacaatctaaagcctcagaggatcacaaatggttgatggttgcctccaaactggctgaacagacgaggataaagggtgagcgaatgaacaatctcgatctttcaaagggtccagctgaagtaaggacaagggataaatttgggttccatgaagacaacaaattcgagaaccttaacttcaatatgttgaacttggactccaagatcggagatagtgtaagcaaaagtaccttccgaaatggtatttacaacaccgatgctgtttaccagaaaaataacagccacaacattgggaacctgtctgccaacaaatatagcggcaacaaccatagcaacaaagatattaataataacagcaacaccaactccaacaacaacgagaacagcaatgcaaacaatgctgtcgataaaaggttcaagactttgcctgccaccgagacactccctagaaatgaggtgcttggtggatacatctttgtttgcaataatgacacaatgcaagaagatcttaagcgtcagctatttggtttaccgccaagatacagggactctgttcgggcaatcacacctggcctgccattgtttctctataactacaccactcatcaattgcatggtatttttgaggcagcaagttttgggggttctaacattgatccaactgcttgggaagacaaaaagtgtaaaggcgagtcgaggtttcctgctcaggtgagaatccgtataaggaaggtatgcaaggcattggaagaggatgcttttaggccagtcttgcaccactatgacggtcccaagttccgtctcgagctctcagttcctgagactttggatctaatggacctttgtgaacaagcaggctccccataaacaaaatgctagccgagtgcaaatgtagtagcagtagggtttgtgatgcacgtttccggagatttttccatagagcgcaagctgtggtgggtgttaaatccagttggggaaaaagtaggaaatggcattagccacatatgaataaatgcgttcatgtcatgtgaaagatgcattgtaaaacttttgcattaatatgctatgaattaaaatcctatcaaagatatatttgcaagatgtcaaaaggaaatggcaacgacgtgtaatgttcaagtccccaacaactgaaggctttgatgtctatttttgtgcttataatatgaaccttctcctgtcttcttcaattaaaaaaaaaaatttctaaattttgtttactattcttttttttttctcaaaatttttaatctataattt

SEQ ID NO: 6754 - DNA, 508 bp, Gossypium hirsutum
  Clone ID: LIB3585-043-P1-K1-F5
gaccacgcgtccgccaacccttccgccaacgcttccgcccacccttccgcccacgcttccgtgaaattgaattgggcttagtgggatctgcaagatggaaagcatgaatagcttttggcagttaggaaatgatctccggggacaatctaaagcctcagaggatcacaaatggttgatggttgcctccaaactggctgaacagacgaggataaagggtgagcgaatgaacaatctcgatctttcaaagggtccagctgaagtaaggacaagggataaatttgggttccatgaagacaacaaattcgagaaccttaacttcaatatgttgaacttggactccaagatcggagatagtgtaagcaaaagtaccttccgaaatggtatttacaacaccgatgctgtttaccagaaaaataacagccacaacattgggaacctgtctgccaacaaatatagcggcaacaaccatagcaacaaagatattaataataacagcaacaccaacttc

SEQ ID NO: 6755 - DNA, 395 bp, Gossypium hirsutum
  Clone ID: LIB3585-001-P2-M1-A5
ttctaaaatacttttaaatctgcatctttaatgctaaacattgaaattgtattttgcttagttggatctgcaagatggaaagcatgaatagcttttggcagttaggagatgatctccggggacaatctaaagcctcagaggatcacaaatggttgatggttgcctccaaactggctgaacagacgaggataaagggtgagcgaatgaacaatctcgatctttcaaagggtccagctgaagtaaggacaagggataaatttgggttccatgaagacaacaaattcgagaaccttaacttcaatatgttgaacttggactccaagatcggagatagtgtaagcaaaagtaccttccgaaatggtatttacaacaccgatgctgtttaccagaaaaat

SEQ ID NO: 6756 - DNA, 338 bp, Gossypium hirsutum
  Clone ID: LIB3493-009-P1-M1-H10
gaggtgtcgaggctacgacctcacgcgtagcggtataagcaaaagtaccttccgaaatggtatttacaacaccgatgctgtttaccagaaaaataacagccacaacattgggaacctgtctgccaacaaatatagtggcaacaaccattgcaacaaagatattaataataacagcaacaccaacttcaacttcaacaacaacgagaacagcaacgcaaacaatgctgccgataaaaggttcaagactttgcctgccgccgagacacttccgagaaatgaggtgcttggtggatacatctttgtttgcaacaatgacacaatgcaagaagatcttaagc

SEQ ID NO: 6757 - DNA, 264 bp, Gossypium hirsutum
  unsure (1)..(264): unsure at all n locations
  Clone ID: LIB3147-006-Q1-K1-H2
cccacgcgtncgcaagctgtggtgggtggtaagtccaggtggggaaaaagtaggaaatggccttagccacatatgaataaatgcgttcatgtcatgtgaaagatgcattggaaaacttttgcattaatatgctatgaattaaaatcctatcagatatatttgcaagatgtcaaaaggaaatggcaacgacgtgtaatggtcaagtccccaacaaanaanaaagagcttgatgatgggcttatattaaatatttgaccctttatt

SEQ ID NO: 6758 - DNA, 667 bp, Gossypium hirsutum
  Clone ID: GOSHI-09MAY01-C302_2
gtagaaattggcaattgctgtgtgtgagagagaaagtgagagtaatagtagtatcaataatttggcttaggttgcatctctgtgtctgatgcaacagagaggaagaactaacaaccgtagatcaaggtctttctccagatctcggcttgctgtcgaaggattttagttccccttttcactccccattaaaaaaaaaaaaaaaatcaattcctctcagagctcactagagatcttctctgttaaccatggcggctaacggatttgtaggagatgaacgcaaagttcaaaagaattactggattgaacactcggttgatctgacggtggaggctatgatgctcgactccaaagccgctgatattgacaaagaagaacgtcccgaagtgctctccttactccctccatatgaagggaaaaccattttggaactaggagctggcattggccgatttactggtgacttagctaagaaggctggtcatgttatagcattagacttcattgagaatgttataaagaagaatgaaaccatcaatgggcattataagaacgtcaaattcctctgtgcggatgtcactttccctgatttggcttttacagaaggatcattggacttgattttactaaactggctgttgatgtatctctcagataaagaggttgagaa

SEQ ID NO: 6759 - DNA, 1398 bp, Gossypium hirsutum
  Clone ID: GOSHI-09MAY01-C302_1
tccacgcgtgcgcccacgcgtccgcccacgcgtccgcccacgcgtcgggcttgcgctcgcggacccgtgggcttgattttctcaaactggctgttgatgtatctctcagataaagaggttgagaatttggccgaaaggatgctcaagtggttgaaggttggtgggcatattttcttcagggagtcttgctttcatcaatctggtgattgcaagagaaagaacaacccaactcactatcgcgagcccagattttacactaaggtctttaaagaatgccaagcaactgatgattctggaaattcatttgaactttctcttgttggctgcaagtgcattggagcttatgttaagaacaaaaagaatcagaatcagatttgctggatcttccaaaaagttgtttcagataatgataagggattccagcgcttcttggattctgttcagtacaaatctaatagcattctccgttatgagcgtgtctttggaccaggatatgtgagcacaggaggaattgaaacaacaaaagaatttgtggggaagttagatcttaagcctggccaaaaggtcctagatgttggctgtggcattggtggaggtgacatttatatggctgaggaatttgatgttcatgttgtgggcatcgacctctccgtaaacatgatatcctttgctcttgaacgagctactggactgaaatgctcagtggaatttgaagttgctgattgccccaagaaggtttatccggacaacagttttgatgttatctacagccgtgacactattctacacattcatgacaaacctgcactgtttagatctttctacaaatggttgaagccaggaggcaaactcctcataagtgattactgcaaaagttccaagactccatccagggagtttgctgagtatatcaagcagagaggctatgatcttcatgatgtaaaatcatatggacagatgcttgaggatgctggttttgatgtgattcttgcagaggatcgaaccgatcagttcttacaagttctgcggcgtgaattgaaccaagtggagaaagagaaggatgcattcatctctgacttctctaaggaagactatgatgaaatagttggtggatggaaggcaaagctgataagaagctcatcaggggagcagagatgggcccttttccttgccaagaagaagaagaattaaatcctgctgcctgctcatctttatgttaaataagtaaataaataaatgcagttaggcatatgtgtgcaagaaactatttcctgcttgcaattatcagttgttattgtagtttgatattttggtatttagtgtgaagtttgtggtttgaataaattatccttttccagtagtaatttggatggtctgaatccaaatagttccgatgtc

SEQ ID NO: 6760 - DNA, 416 bp, Gossypium hirsutum
  unsure (1)..(416): unsure at all n locations
  Clone ID: LIB3165-042-Q1-K1-G2
cccacgcgtccgcccacgcgtccgcccacgcgtacgaattatcagttgttattgtagttgatgttggcaagcaggaaatagtttcttgcacacatatgcctaactgcatttatttattcacttctttaacataaagatgagcaggcagcaggatttagttcttcttcttggcaaggaaaaggccccatctctgctcccctgatgagctgtttatcagctttgccttccatcctccaactatttcatcatagtcttccttagagaagtcagagatgaatgcatccttctctttctccactgggctcaattcacgctgcatagacttgctagaactgatcggttcgatcctctgcaagaatcacatcaaaaccagcatcctcaagcatctgtncatatgatttacatcatgaagatca

SEQ ID NO: 6761 - DNA, 1953 bp, Gossypium hirsutum
  Clone ID: GOSHI-09MAY01-C332_1
gtttttctgcagcgggtacgaagcaagtaatggggaaaatgaacgaaacctccgagttccgttccccgcgagtaacggacggtcatgggactcacactgcttccattgctgctgggaggtacgtatttccggcttctacattaggttatgctaaaggagtggctgccgggatggcgcctaaagcgagacttgctgcttacaaagtttgctggactgccggttgttttgattctgatattctcgccgcatttgacgccgccgtagctgatggggttgatgtgatttcgttgagtgttggtggtgtcgtggtaccctatcaccttgacgccattgctatcggtgctttcagtgctgctgatcagggggtatttgtgtctgcctcagctggaaacggtggtcctggtggattgaccgtcactaacgtggctccttgggtggctacgatcggtgcagggacgattgatagggattttccagctgatgtcaagcttggaaacgggaaagtcgtgcctggagtcagtgtgtacaatgggctgggtttatctccgggccggatgtacccgttggtatatggcgggaccggcggtggtgatggctattcatcttctttatgcttagaaggttcactggatcctgtgtttgtcaaaggtaaaatcgttgtgtgtgatagagggattaattccagagctgctaaaggggaagttgtcaaaaagccggcggaattggaatgattttagctaatggtgttttcgacggtgaagggttagtcgccgattgccatgtcttgccagcgactgccgttggtgcatcaaatggggatgagattagggggtacattgtttccgcctctaaatccaagtcaccagccaccgccaccatcctctttaaaggaactcgattaggtgtacgaccagcacccgtcgtggcttcattttcagctcgagggcctaaccctgaaactcccgaaattctgaaacctgatgtcattgctccaggattgaacatcctcgccgcctggcccgaccaagttggtccatctggtgtttcatcagacagtcgaaacactgagttcaacattctttcgggcacatcaatggcttgtccccatgtttccgggttggccgcattgttgaaggcggctcaccccgaatggagccccgcggccataaaatccgctttgatgacctctgcttatacagtcgacaaccgtggcgaaaccatgctcgatgaatccaatgggaatacttccaccgtgttagattttggatccggtcacgttcacccctctaaagctatggatccaggactggtttacgatatcaccacaatggattacatagatttcttatgcaattccaattacacgatcaacaacatccgagtactcaccaggaagaatgccgattgcagcggcgcaaaacgagccggccatgttgggaacctgaattacccatcactctccgccgttttccaacagtatggcaggcgtaacatgtctacacatttcatcagacgagtcactaatgtcggtgaaccgaattcgatctataaagttacaattcgaccaccgagcggcacggtggttacggttgaaccggaacagcttgtatttagaagagttggccaaaaactcaacttccttgtaagggttcaaaccatggcagtgaagctctcccctggtggcactagcatgcaagctggttcaatagtttggagtgatgggaagcatgaagtcactagtcccttaactgtgaccatgcagcaacctatataactctgtctgtatgttaaattgtcagtgtttttgagatttaggattttcggtcaccttgttttttatatagggctttattaagaattttctgtgtaacgaaattatgctggcgtttttctatatcagaaaagctggtggagttggcttgtaatgcaattatgaagcaaagaatgttttgt

SEQ ID NO: 6762 - DNA, 402 bp, Gossypium hirsutum
  unsure (1)..(402): unsure at all n locations
  Clone ID: LIB3583-033-Q6-K7-B3
cggtaccggcccntcccgggttcgnacccacgcgtcctgccccgnncgtccgcccacgcgtccgccgagcggcacnnggtggttacggtcaaaccagnaacagnncttgtatttagnaagagtnntggccaaaaactnncaacttcnncttgtaagnnggttcaaannncatggcagtgaagctctttcccctggtggcactttagcatgaaaactnnggttcaatagtatggagtgagtgggaagcatngaagtcacttagtccctttaactttgtgaccatgcagcaacncgtatataactttgtcatttatgttaaattgtcagtgttttntgagatttaggattttcggtcaccttgttttttatataggctttattaagaattttctgtgtnaaaaa

SEQ ID NO: 6763 - DNA, 506 bp, Gossypium hirsutum
  Clone ID: GOSHI-09MAY01-C322_2
gccgcggcataactgggtggacccacgcggccttttttttaatgcaagcagtgtggaatctttgaacctcgaaatggaagaagtgagtcaaaccacaacgaagaagaaaacaaagatgacaaccgtcaggagcctcacttccccatctattgttaaagctgcaaccccaaaccgatttacaagtcccatcgccaaggccccaacatctcttggatctgttaaaaccatctctagatcttttggcttgaaatgttcctcaaatcaccgaacatcgatggcaatgtacaagattaagcttgtagggccgaagggtgaagtgaatgagttcgaagtccccgataaccagtacatcttagaggcagccgaggcagcaggagtagagctgccttattgttgcagagctggagcttgctctatatgtaccgcgaaggtcgtttcgggtacggtacatcaaccagaagccatctacctcgaggacgatcaaattaaggatgggtatatgttga

SEQ ID NO: 6764 - DNA, 902 bp, Gossypium hirsutum
  Clone ID: GOSHI-09MAY01-C322_1
cccacgcgtccgcggacgcgtcgctgtcactgtgtcactgtttagtgcttatttagggtttaaaggcttttaaagcttagatctcttgttttctccgcttcccaaattccttctgagtcaaaccacaacgaaggaagaaaacaaagatgacaaccgtcaggagcctcacttccccatctattgttaaagctccaaccccaaaccgatttacaagtcccatcgtcagggccccaacatctcttggatctgttaaaaccatctctagatctttcggcttgaaatgttcctcaaatcaacgaacatcaatggcaatgtacaagattaagctcgtagggccgaacggtgaagtgaatgagttcgaagtccccgataaccagtacatcttagaggcagccgaggcagcaggagtagagctgccttattgttgcagagctggagcttgctctatatgtaccgcgaaggtcgtttcgggtacggtacatcaaccagaagccatctacctcgaggacgatcaaattaaggatgggtatatgttgacttgtgtttcaaagccaacctcagattgtgagattcacactcacaaagaacttgatctttactctccatcaaaataaaaagttaaatattgttattagtattttggggtaccaaaaaaactgaaattagggtctggggagttgtctgaaacttctttttttgtccgagtttagggtttgggaagttgagggtattgtaggggctctcatgggcaataagtttggctagtgttcgtttgtaattttctgtttatgaatgccattttccttgttgattgactgattggttcgaaaaaggacattcagttaaattgagaatcgtttgttgagttagattttttttatttttcatgaattttttaattg

SEQ ID NO: 6765 - DNA, 1118 bp, Gossypium hirsutum
  Clone ID: GOSHI-09MAY01-C292_1
cccacgcgtccggcattttggctgagctaatttctgggaagccaataatgccaggaaggacagaggttgaacaactgcataagatattcaagttatgtggatccccttctgagcaatattggaagaaatccaaattgccaaatgcaacgctctttaagccacagcagccatacaaacgctgtatagctgacactttcaaggattttccaccttcttctttacctcttattgaaactcttctttcaatagaccctgaagaacgaagtactgccactgcagcccttaacagcgaattctttaccactgaaccatatgcttgtgagccctcgcgtccgccgaagtatcccccgagcaaagaaatggatgtaaaattgagagacgaacaagccagaaggcaaagaggtctagccagcaaggttaatgcagttgatggtgctaggaaagttaaagttagtgaacgtgctaatcgagcagttcctgcccccgaagcaaatgcagagattcaagcaaacttagataaatggagagtaatgacacaaacaaatgcaaaaagcaagagtgagaaattcccacctccccatcaagatggagctgttgggcatccattagatgcttcacataaagggcctctatctttttccgcaactgacactactttcggctcatcaattttcaactctaagtcatccgaatctgctaaaaatcctggacctgtcgtcggttcttcgagaagaaagaaaaccaataaagacccccaaagggctccgtctagaaagttcattcgcggtttcaaaccatcctcgataggcctatcgatggatttcctgttccgaggtaagtctgaggtgattcgtagctagaattagaatagttttccaggttcataaaccttttttttaagggacttaaaatgcggttttcccatttattctgcccccctctattttgtatctgatcatataaatatctggtgtataatccatgccaagatcccacattatttggtgcataatcttcctatgcaatcccactttttgttgtacagttcttttggatgacaatgcaaaatgttcaatattttcatcagctttgaataaaaatctaagattaattgcttc

SEQ ID NO: 6766 - DNA, 624 bp, Gossypium hirsutum
  unsure (1)..(624): unsure at all n locations
  Clone ID: AI727974.1
gctgaaaccttcaaggatgttccatcttcttcattacctttaattgaaactctgctttcgatagaccctgaagagcggaatactgctactgcagctcttaataatgaattctttatgactgaaccatatgcttgtaatccatcaagtttaccaaaatatcctcccagtaaagaaattgatgtaaaattgagagacgaagaagcaagacgacnaagaaatatagccggcaaagttaatgcagttgatggtaccaggagaagtaagggtcatgaacgccctactcgagcagttccagcccctgaagcaaatgcagagattcaagcaaacttagataaatggagagtgttgacgcaaagaaatgctaagtgcaagagtgagaaattcccgcctcctcatcaagatggagctgttgggcatccagttgatgcatcaaacaaagggcctgtatcttttggtgcaagtgactcttctttcaactcatcgattttcaactctaaatcatccggatcctccaaatgttccagacaggcaggtggtccttcaanaagganaacnaataaaaaccgccgaagtgctgtcacnaaagttcatccgcggtttcaaaccatcctcaataagtatatt

SEQ ID NO: 6767 - DNA, 613 bp, Gossypium hirsutum
  Clone ID: GOSHI-09MAY01-C252_2
tgtttctagtgcacaatccactgcaaagcagatattagatgatgcggacgcgtgcgcggacaacattgcctgggttcagtaactcctcggtgcaattcagttctccaacctttggccgggttaatattttcaatcaagtggaaagggagttacatggcggccttcctaagtcgtcgtttaaagggggaactccttcatccggttcttttcgatctggctgtagcaaggatgatgctgggacttgttctcaaactacttctctttatgggtctcaaatcagttcattggttgagctgggtcatactacaaggcacaatagcagtctctcgaccgcatattcaaagaggaatgatgaaacaagcaaaccgaatcgcaaaaggctaaaacctggagaaaaccctagaccgaggcccaaagatcggcagatgatacaagatcgagtgaaagagttgagagaaattgtgccaaatggagccaaatgtagcatagatgctttgctagaaaagacaatcaagcacatgcttttcatgcaaagtgtaacaaagcatgcagacaagataaaacacatgggcgagtctaagattaaggagaacttcaagggaggaaccacatg

SEQ ID NO: 6768 - DNA, 696 bp, Gossypium hirsutum
  Clone ID: LIB3582-040-P1-K1-E5
cccacgcgtccgcccacgcgtccgcccacgcgtccgcaattttgttaatgacctccctttaatgtgatttaacagtgtagcatagatgctttgctagaaaagacaatcaagcacatgcttttcatgcaaagtgtaacaaagcatgcagacaagctaaaacacatgggcgagtctaagattaaggagaacttcaagggaggaacaacatgggcatttgaggtcgggtcacgatcaatgatctgccctattatagttgaggatctgaatccacctcgtcaaatgcttgtggagatgctttgtgaggaacagggtttctttctggaaatagcggacttaatccggggaatgggattgaccatcttgaagggagttatggaaactaggaatgacaagatatgggcgcgttttgcggtggaggtatccaaaagctactgaattttaggcattagttgaaaatcttattctatagtttaagttcatgcatttgccgtcgatcaggaaagaaaacaatgcatttagagtttagtctgtacgcgcaccaataatgaagaattttgatgtgtattttcttcataatgatttgtttccactttgcagtaagatatttctttaaaatagatagtttggtgtgcaggcaaacagggatgttacgagggtggagatatttatgtcgcttgttcgccttttggagcaaac

SEQ ID NO: 6769 - DNA, 2240 bp, Gossypium hirsutum
  Clone ID: GOSHI-09MAY01-C242_1
taaagaagtcgaggatccaaaactccggcctcaccgatatgtaggggtcactgacaaacctttcttgggaatgatgatttccctgatgggccggcttagtcgcacacatcaatactgggaaaaccaagatagagaaacatggagggacagtctccaactcagtcattggtgtaacttgcttggttgcttctcctgctgaacgagagcgtgggggctcatccaaactggtagaagcaatggaaagagaggtacgagtggtgagtgaagcttggttacttgacagcattgagaagcaagaagcacagccattagaagcttatgacatagttacagatcttgctgttgatggcaaaggaattccatgggataaacaagttcctgaagaacatgcaatcgaatcactttcagctgaactcaagttgtatggaaaaagaggagtctacaaggataccagattgcaagagcaaggtggccaaatatttgaggaagatgggatattatacaactgtgtcttttcgctttgcgaccaaggaggagccattaatgagtattgcattatgcaactggtcaaagtaccagatagtaacctccacttgtactacaagaaagggagagtaggggatgatcctaatgcccaggagcggctcgaggaatggaaggacgtagatggtgctgtgaaggagtttgttaggctgtttgaggaagtaacaggaaatgaatttgagccatgggaaagggagaagaagtttcagaagaagccactgaaattttatcccatagacattgatgatggggttgatgtgagatgtggaggacttggcctgcgacagctaggggttgcagcagcacattgtaaacttgaaccgatggttgcgaacttcatgaaggttctttgcggtcaggagatttacaagtatgcgctgatggagatggatttagatgcccctgatttaccaatggggatgctctctaatgttcatttggaaagatgtgaagaggttctacaagagtttatagaaaaagtgaaatcaatgaaagaatctggacctaaagcagaggcagtttggtcagactttagccaaagatggttcaccctgatgcattcttccaggcccttcatcttcagggactatcaagagcttgcagatcatgctgcagcatcattcgagtgtgttcgagacattgttgtggcatcccatatgattggacacatgggtgatgatactcttgatgacccattgtctgatagatacaagaaaataggatgctcaatttctccactggataaagattccgaggactacaagatgatcctcaattatgtggaaaaaacttatgaacctgtcaagcttgcagacattgaatatgggatctcagttgagaacatcttcaatgtggaaactaaggaaggcccctcgtttgatgaagtaaaaaagctgccaaacaagagactcctgtggtgcggtactcggagctcgaacctgttaaggcatttgcataaaggcttcctgccagcaagctgttctctaccagttccaggatatatgttcgggaagggcatagtttgttctgatgctgcagcagaagctgccaggtatggcttcactgctgtagaccggcctgaagggttcttggttctcgctgtgttttcacaaggtgaagaaattatggagctcaagaacccaccggaggatactaagccattggaagagaagaaagtgtgtgtgaagggactggggagaaagaaaccagatgaatcagaatatatagattggaaagatgatatcaaagtcccttgtggccgtttgatcccctcagaacaccaggatagccctctcgagtataatgaatacacagtctatgatcccaaacaggtgagcatgaggttcttggtcggagtgaagtttgaagaaaaggatacagtgatggacgcccaggattgaaggaggggaattcgagatagggttttctgatcgtttttgtatagtttcactggacttttggaatatgggatggtggggaagatggttgttaaagtatggggggacgtggtcatgtaaagggatgttcatgtcttttgttgtacataatcatctcaaacatctctgatgataagaggcagataaagatacagtaaaaacttcccctatatttgaatctgttttcacagttaaaccacttttgtgcctacaatcaagaaacagatgattgcttacaattcaagtttaaatcccttctag

SEQ ID NO: 6770 - DNA, 568 bp, Gossypium hirsutum
  unsure (1)..(568): unsure at all n locations
  Clone ID: LIB3825-021-Q1-N6-B7
aactgtgaaaacagattcaaatataggnggaagtttttactgtatctttatctgcctcttatcatcagagatgtttgaggtgattatgtacaacaaaagacatgaacatccatttacatgatcacgtccccccatactataacaaccatctttcccaccatcccatattccaaaagtccagtgaaactatacaaaaacgatcagaaaaccctttcttgatattcccctccttcaatcctgggcgtccatcactgtatccttctcttcaaacttcactcccaccaagaacctcatgctcacctgttgtcaggaaaacataattttagcggggttccaaacagttttcactgataaaaaagaatctcccgagacacacctgtctgggatcatagactgtgtattcattatattcgagagggctatcctggtgttctgaggggatcaaactgccacaagggactttgatatcatctttccaatctatatattctgattcatctggtttctttctccccagtcccttcacacacactttcttctcttccaatggcttattatcctccggcgg

SEQ ID NO: 6771 - DNA, 524 bp, Gossypium hirsutum
  Clone ID: LIB3825-007-Q1-K6-B11
cagacacttctttgcagtcacggggatcacaagaatgcttgtttcaactatggccatacaatctgtgtctctgtaccaatatgtggagtgaatcggccacgctggacacgcgaagaggttctacacagagtggatcataaagagtgaaatcaatgaaagactctggacctaaagcagaggcagactggtcagactttagccaaagaggctcactctgatgcatactttcacgccctgcatcttcacggactatcaagagcttgcagatcatgctgaaacatcataacagtgtggtcgaaacattgattggggcataccatatgataggacatatgggtgatgatactattgatgacccattgtctgataaatacaagaaaatatgatgctcaattgctacactggataaagattccaacgactacaacatgatcctcaattatctggaaaaaacttatgaacctgtcaagcttgcagacattcaatatcagatctctaatgagaacatcttcaatgtggaaact

SEQ ID NO: 6772 - DNA, 1056 bp, Gossypium hirsutum
  Clone ID: GOSHI-09MAY01-C212_2
acgagtggatttgctagcatgcgcctggggtgatcggcgcatacaacgaaaagaaaagttgggaaaaaaaaggtacgaaaaggaagaagggaaagcggacactgcggattttagctatccatcttcctcggagaagatctattttgcgggatttcgatggctgctccaccagcaagagctagagctgattacgattaccttattaagcttctattgatcggcgacagtggtgttggtaagagttgcctacttttacggttctcagatggttcctttacgaccagctttatcaccaccattggtattgattttaagataagaaccattgagcttgatggcaaacggataaagctccaaatttgggatacagctgggcaggagcggttcaggacaatcacaactgcttactatcgtggagccatgggcatcttgctggtctatgatgtcacggatgaatcctccttcaacaatattaggaattggattcgcaacattgaacagcatgcatcagataatgttaacaagatattggtcgggaacaaggcagacatggatgaaagcaaaaggcctgtgcctacctcaaagggacaagcactcgctgatgagtacggaatcaaattttttgaaaccagtgcaaagacaaatctaaatgtggaggaagttttcttttcgatagcgaaggacataaagcaaagactcgctgatagtgacactaaggctgagccttcgacgatcaagatcaatcaacctgacgctgcaggcggagctggtcaagctgcacaaaaattgggatgttgcggttaaacctatgttgaccaaattcggttaaaaaaggggtaaatatttgatcttagacttccattaaaacaaaaaggaaaaaaaggggagggaggtgaagaaactaatctcattgactgcatgatgggtgcttgtgttttacttcatgttttagtgcgtgaaatatagtattttcctatattttgatagttcttcttattggttaaaaaaaaaaataatattaattaatattattttttttatatttaaaaatatggg

SEQ ID NO: 6773 - DNA, 1115 bp, Gossypium hirsutum
  Clone ID: GOSHI-09MAY01-C212_1
aagatttgactttttggagacccctctttcgttcaagtttttcaaaagatcttcatctcaatctccgatccgattcgagaggttttttatcgtttggagaagatcattgtttttttttattttgcgggatttcgatggctgctccaccagcaagagctagagctgattacgattaccttattaagcttctattgatcggcgacagtggtgttggtaagagttgcctacttttacggttctcagatggttcctttacgaccagctttatcaccaccattggtattgattttaagataagaaccattgagcttgatggcaaacggataaagctccaaatttgggacacagctgggcaggagcggttcaggacaatcacaactgcttactatcgtggagccatgggcatcttgctggtctatgatgtcacggatgaatcctcgttcaacaatattaggaattggattcgcaacattgaacagcatgcatcagataatgttaacaagatattggtcggaaacaaggcagacatggatgaaagcaaaagggctgtgccaacctcaaagggacaagctcttgcggacgagtatggaatcaaatttttcgaaacaagtgcaaaaactaacctaaatgtggaggaagttttcttttcaatagcaagggacataaagcaaagactcgtcgatactgacttaaaggctgagccttcaacaattaagatcaataaacctgaccaggcagctggggctggtcaagctgcacaaagaccggcttgctgtggttcaacctaagggagctcaaacctggtgggacacgtattggatgttaaaaactacttttcttcaaaaaatggaggggaaagagaaaactaattgtggtgactggatgatgagtgcctgtattttcttattgtcattctttataacttgttttagggtgtgaggatgtagtgtttttctttataattgtttgtgtcatgtgaagaacataaccttctgtttctcccccatctctcggctccttcatgtcaggaagcctaagttctgactgcttgcaagactagttcatttgttggtagggaaggaaatggaaaatggaagtggtttctttatattact

SEQ ID NO: 6774 - DNA, 355 bp, Gossypium hirsutum
  Clone ID: uC-gsflnu33B145b07b1
tttagctgtggttcaacctaagggggctcaaacctggtgggacacgtattgtatgttcaaaactactttgcttcaaaaaatggaggggaacgagaaaactaattgtggtgactggatgatgagtgcctgaattttcttattgtcattctttataacttgttctagggtgagaggatgaaggagtgtttctacttaaaaggaagtgtcattggaagaacatgcccatgtgattctccccgatgtatggctgcttcatgtgatgaagcctaagttctgactgctggcaagactagcttatgggatggtagggacggaaatggaaaatggcagaggtgtctttataggaacagaaaac

SEQ ID NO: 6775 - DNA, 1257 bp, Gossypium hirsutum
  Clone ID: GOSHI-09MAY01-C222_1
tcgttcaaattcagtttggaagtttccatgtaaaagaaatgaatttcatgtggtttgatagggaatcgagttcaaagacagcggtttttaagaagaagaattcttaaacatacagactacctgtctctgccgggaaactcaggattatctctttgtccgaaagaagaaggaggcatggagaagactgatgcatcatctgctgctgctgttgctgatgctaagatatcatcaatctttatctatcccgtaaaatcatgccgtggaatttcagttccacatgcacccctcactcctactgggtttcgatgggatcggcaatggcttgttgtgaatcagagagggagggcatatactcaaagggttgaaccaaagcttgctctagttgaggtgaacctgccagctgaggccttttcagagggctgggaacctaccaagacctcctatttggaaataaaagcacctggaatggatttactcaagatttctctttgcaaaccaccaaaagtgtctgatggtgtttcagtttgggagtggtctggctctgcattagatgagggtgatgaggcttcaaaatggtttacaaattatctcgggaaacccagtaggatggttcgttttaatgcagcatcagaaactaggcctgtggatcctgtgtatgctcaagggtattccataatgttttctgacatgttccctttcatgttagcatctcagggatctttggacgaactgaacaagcttctgaaggagcctgtacccatgaaccgtttcagacccaacatccttgttgacggctgtgagccgttctccgaagacctatggactgagattaaaataagccaattttcatttcaaggtgtgaggctatgctcccgctgtaaggtgcctacaatcaatcaagacaccgcaattgctggtccagagccgaatgaaactcttatgaaatacaggtcggataaggtcttgcgaccggacaagaaacaacaaggaaagatctatttcgggcagaacatggtttgcaaggaaagtttgactgaagggaaggcaaagctggttaaagtgggagatcctatatttgtcctccagaaagtctccactgctgctgaagcagttgcttgaatgccttaacagtattcaaataaataagagccataactcattatctgagactttaaatcaagttttcgaatatggctgtaaataaattgagtttgaacaaattttattttcaagtttggctttctagtttgaactact

SEQ ID NO: 6776 - DNA, 583 bp, Gossypium hirsutum
  Clone ID: LIB3582-007-P1-K1-B8
cccacgcgtccgcccacgcgtccgcggacgcgtgggatcccgtaaaatcatgccgtggaatttctgttccacatgcacccctcactcctactgggtttcgatgggatcggcaatggcttgttgtgaatcagagaggcagggcatatactcaaagggttgaaccaaagcttgctctagttgaggtgaacctgccagctgaggccttttcagagggctgggaacctaccaagacctcctatttggaaataaaagcacccggaatggatttactcaagatttctctttgcaaaccaccaaaagtgtctgatggtgtttcagtttgggagtggtccggctctgcattagatgagggtgatgaggcttcaaaatggtttacaaattatctcgggaaacccagtaggatggttcgttttaatgcagcatcagaaactaggcctgtggatcctgtgtatgctcaagggtattccataatgttttctgacatgttccctttcatgttagcatctcagggatctttggacgaactgaacaagcttctgaaggagcctgtacccatgaaccgtttcagacccaagtacttttt

SEQ ID NO: 6777 - DNA, 574 bp, Gossypium hirsutum
  unsure (1)..(574): unsure at all n locations
  Clone ID: LIB3543-037-Q1-K1-H2
cgtccgcccacgcgtcccgtccacgcggtccgcccacgccgtccgcccacgccgtccgctcactcctactgggttnntcgatgggatcggcaatggctnntgttgtgaatcagagagggagggcatatactcaaagggttgaaccaaagcttgctctagttgaggtgaacctgccaggtgggggcttttcagagggctgggaacctaccaagacctcctatttggaaataaaagcacctggaatggatttactcaagatttctctttgcaaaccaccaaaagtgtctgatggtgtttcagtttgggagtggtctggctctgcattagatgagggtgatgaggcttcaaaatggtttacaaattatctcgggaaacccagtaggatggttcgttttaatgcagcatcagaaactaggcctgtggatcctgtgtatgctcaagggtattccataatgttttctgacatgttccctttcatgttagcatctcagggatctttggacgaactgaacaagcttctgaaggagcctgtacccatgaaccgtttcagacccaacatccttgttgacggctg

SEQ ID NO: 6778 - DNA, 584 bp, Gossypium hirsutum
  Clone ID: LIB3583-015-P1-K1-A12
gattatctcttagtccgaaagaagaaagaggcaaggagaagacagaagcatcatctgctgctgctgctgctgctgctgctgttgctgaagctaagatatcatcaatctttatctatcccgtaaaatcaagccgaggaatttctgttccacaagcacccctcactcctactgagtttcgaagggatcggcaaaggctagttgagaatcagagaggctgggcatatactcaaagggttgaaccaaagctagctctagttgaagagaacctgccagctgaggccttttcagagggctgggaacctaccaagacctcctattaggaaataaaagcacccggaaaggatttactcaagatttctctttgcaaaccaccaaaagagtctgaaggtgtttcagttagggtagaggccggctctgcattagatgaaggagatgaggcttcaaaaaggtttacaaattatctcgggaaacccagtaagatggttcgttttaatgcagcatcagaaactaggcctgagaatcctgtgtatgctcataggtattccataatgttttctgacaagttccctttcatgttagcatct

SEQ ID NO: 6779 - DNA, 452 bp, Gossypium hirsutum
  Clone ID: GOSHI-09MAY01-C38911_1
gcgcccacgctatctcccactcgtccggcctcacgctaaggctagtcaaccctaaccagctcaaagggatcaagtatgagcctttgaacgtcacggcttatgattttccaaacaaaagtaatgtcataggtaacattttgatgccagcgttttaccagggttacagacagaaggctacaaagcctggtcaaggcaccgctaacaccacggtggctttacgagcggcgtctgagaacggaacaggagttttacggattgatatggcgacggcggtgaagcttaagaccttgtatggatattcgaagaggcataagattaggattggagcatatgtggtggtcaacgctagtggtgttaatgtccatcgtaaagggatcaggcttagatctatggcacccaagatgggaaattcttgtgtggtgctgcttggagctttgttcaatatcttgctc

SEQ ID NO: 6780 - DNA, 377 bp, Gossypium hirsutum
  Clone ID: GOSHI-09MAY01-C38921_1
ctcatatccgaattccgagtcgactcaggaatggcaactggaacagcaccaccaagaggaagtgcagcagcagctgcaaacatgcggaggaggagaacgacaagtggtgcaggtgcctcgggaggagctgctggcacaatgcttcagttttacacagatgatgccccagggctgaagatctctccaaatgtggtgcttgtcatgagcattggtttcattgcatttgttgccattctccatgtcatgggcaagttgtattttgttcgtaaggagtagggaggggctttcctcaatacctgtattaacaagtaccaaacaaagatcaatgttgtagttttcagttttgcttaataaatggattttgatttgatttctcc

SEQ ID NO: 6781 - DNA, 385 bp, Gossypium hirsutum
  Clone ID: LIB3148-059-Q1-K1-A5
catcatttttgttccttcttgttgctttgaaaattagggatcctctcattcaaacattaaaattataaaattttcccactagaaattgagtttacgcgtaaaaaaaaaaaaaaaaaaaaaaaaaaaaaaaaaaaaaaaaaaataaataaaaaaaaaaaaaaagaaaaaaaaaaaaataaaaaataagaataaataaaaaaactataaaatagaattgtaataattaaaaaatatcataattgttgattaaactgtactacaatatataaaattgcaccgatttaggaggggcttttcttaatacctgtattaacaagtaccaaacaaagaataatgttgtagttttcagttttgcttaataaatggattttgatttgatttctcc

SEQ ID NO: 6782 - DNA, 459 bp, Gossypium hirsutum
  Clone ID: GOSHI-09MAY01-C38591_1
accacgcgtacggcttcttcatctctcaactgtcattaaactctgcaagtgaatgctgaggaatgggtcattcttcactgttggagagtgtttctttcatatttgcaatcaagaatgagggtgttaggggaattccctgatttaaatattttagaaccaaatggtggtgttgtaagcgctagtaaataacaatcagatgcagaatgcaggttcggatgaggctagccgcacagctggtggtctctctggaaatttacatgaacccgaccttgagatgcatggaaacatcccattgcctcaggaggaaatacaaccaggctcaggtggggattcagcttgtgaggccaatcctacatcggctaccaatgtggtgacgaaggccgaatctcacttggctcagcagcccgtagctaaattatcaaaagatgccgagtccactaaataggatttgcctcatgc

SEQ ID NO: 6783 - DNA, 532 bp, Gossypium hirsutum
  unsure (1)..(532): unsure at all n locations
  Clone ID: uC-gsronu33B149e05b1
cctactcgtccgcccacgcgtccgcccacgcgtgcgaatggggtgggctatagcactccatggaggcgccggtgacatcccacattctctgccaccagatcgccgcctccctcgtgaagttggtctccgccactgccttgacgttggcatcgccgctctcaaagcccataagcaccctttggatgttgttgaacttgtggttcgtgaactggaaaactacccacatttcaatgctgggaaaggatcagtgttaacttcatcaggcacggttgagatggaagcttcgataatggatggaaagagcaagaaatgtggggctgcttcaggtctcagcaccgttgttaatgccgtatcactggcaaggttagtcatggagaaaactcctcatatatatctgggatttcatggtgctgaggcctctgctagggaacagggtgttgagactgctgaccncagctattttatcactccagaaaacatngaanggctaagcaggcacaagatgcccacagagttcagattgatacaccca

SEQ ID NO: 6784 - DNA, 408 bp, Gossypium hirsutum
  Clone ID: LIB3145-056-Q1-K1-H10
ccgacccacacgtgcgggcaaaagaaggagaaatggggtgggcaattgctgttcatggaggagctggagacatccccctttctttgcccccagaaaaacgtctccctcgtgaagctggcctccgccgctgccttgacgttgggatcgccgctctcaaagcccataaccaccccttggacgttgttgaacttgtggttcgtgaactggaaaacaatccgcatttcaatgcaggaaaggggtctgtcctcaccacctcaggtacagttgagatggaagcatgcatcatggatggcaagacaatgaaatgtggagctgtttcaggtgtcagcactgttgtgaatgccatatcccttgcgccgttagtcatggacaagacttctcatatttatctggcatttgatggtgctg

SEQ ID NO: 6785 - DNA, 523 bp, Gossypium hirsutum
  Clone ID: GOSHI-09MAY01-C38531_1
gttgctgatgcaaggttctgcaagcctctcgatatcaagcttctcaggtggctttgtagcaatcatgacattctgataaccgttgaggaaggttccgttggaggatttagttctcatgttgcgcagttcattgcgcttgacggacagctcgatggaagactcaagtggcgaccaattgtcttgccagacaactatatcgagcatgcatcaccgaaagaacagcttgctcttgctgggctgactggacatcacattgctgcaaccacattgagtctcctcggacgtacccgtgaagcgttacttttaatttgctagaatgctgtatagttttccttactggattgatgatgtacctgaagagcgtgagaaggctaagcaaagaatgaacagtggaatagaatattgtagcattttgatgatccctgtaatttgtatagatgttgaagtgtgaattgtgaagttgacagagtagtggtgaagaaccagaattgaagtgaatgaattttatagaaaattctacctc

SEQ ID NO: 6786 - DNA, 457 bp, Gossypium hirsutum
  Clone ID: GOSHI-09MAY01-C38781_1
cccacgcgtccgcccacgcgtccgcatagaagctcaagcgcaaatgaatgaggagctttccggatggaagcttgtcgtgggtgatgttttcagagaacctaatcactcgaagcttctctgcgtgatgattggtgatggagttcagattatgggaatggctttagtcactatagtttttgcagctttgggtttcatgtcaccggcttcacgaggaatgctactcaccgggatgatcattctctatcttttcttaggtatagctgccggatatgtcgctgtttgtctttggagaactctcaaagggactgcagaaggatggaggtctctttcctggtcagttgcatgcttcttcccaggaatcgtctttgttatccttacagcattgaatttcattctatggggcagcaaaagtaccggtgcaatcccgatttctctctacttcatactcttatctctc

SEQ ID NO: 6787 - DNA, 1328 bp, Gossypium hirsutum
  Clone ID: GOSHI-09MAY01-C38751_1
cttggaggctgggattggtcgagtcaaagccaatttgggaagccgggttaagaaagggcaaatgactcgagaaaagtttgagaaaaccatgtctctgctcaggggagttcttgactttgaaagctttcgggatgtggacatggtcatcgaggctgtaatcgagaatgtgtcattaaagcaacaaatttttgccgatcttgagaaatactgtccaccacattgcatacttgcaagtaacacttccactattgatttgaacttgattggtaaaaggaccaaatcccaggatcggattattggagctcatttctttagtccggctcatatcatgccgttattggaaattgttcgtactgagcatacatctccccaaataattgttgacttggttgatgttgggaagaaaataaagaagactccaatcatcgttggaaattgcacaggttttgctgtcaataggatgttcttcccttatacacaagcaggccttttccttgttgaacggggagcagatgtttattggattgaccgagcaattactaagtttggaatgccaatgggcccgtttaggctggctgaccttgtcggctttggtgttgcacttgccactggctcacagttcattgagaactttcctgagcgaacctataaatcaatgcttatcccaattatgcacgaggataagagagcacgtgaaagtactcgaaaaggtttttatttgtacgataataaacgcaaagctaatcccgatcccgaactaaaaatgtacattgagaaggcgaggagcatctctggtgtagctgttgaccctaagtttgtgaaattgtcggagaacgacattgtggaaatgatattctttccagtggttaatgaggcttgccgagtgtttgctgaaggtattgcagtgaaagcatctgacattgacattgctgctgttatgggcatgggattcccaccttacaggggaggactcatgttttgggctgattctcttggttctaagtacatttattcgagacttgaggagtggtcgaatttatacggaggatttttcaagccttgcgctttcttggctgaaagagctgccaagggtgctccattgagtgcaccactggagatgggaaaatcaagactattaaactgctttgattgcggtgctcggagatggccattgatgttttggttttaccaatttgctgccattgatagaatgataaagctctcaagatgagcctttcaataatgtggtttcaaatccaaaaaaggatatgagatagggaagcagataagctaaagaatgaaacatgaataataaatgtaatatgaca

SEQ ID NO: 6788 - DNA, 443 bp, Gossypium hirsutum
  Clone ID: GOSHI-09MAY01-C38771_1
gggatagccatataagcacagtcttgacaggagatgctctgaccttgaacaagctgaaactgaggtcgatctcttgggtgatgaggtggaagtacttctaggccttctcgagaaaatatacattgcacttgatcattattccccaatattgaaacattatcctggaattatggagatactgaagctggttcgaagagaattgagtggagaatgtgacacgtcactttgagttatccttcattagatgaatgttgattcttttgcacccctattcagcatgagggaaggaatggtcgcacggacaaaatgttccactgctgatacaatcaataacagggttatgtgcacgtgaacccggaaaaatacattcttatccctgctgattatgttattctccctgtatagaaacttagaagatagcacgtaaaaattgtggcgatggt

SEQ ID NO: 6789 - DNA, 405 bp, Gossypium hirsutum
  Clone ID: LIB3145-057-Q1-K1-E8
gggttgacgaatttcgtattaacagtagtaggtgttagcgctgtggttcttttactgagaagcgacgttaaacaatcggctgccagttttaggcgcaacgttaagcatataaagaattggcttgaagaagagtcttctgctgcttccaaggcagctgagaaggtaaagcccaaggaactggactccaaggtccctcctaaggagaaagactagtgtctttatagggtatttgactttgattttctgttatcatttttgaatatctgggttgtgctttaggattcatcagtcttgattaatgtctgggtatttctgcacttcggaacttagttccgttgccttgcctctttcggtttgttaatacactgacatgtatctacttagatgttaatactatttgagaaa

SEQ ID NO: 6790 - DNA, 385 bp, Gossypium hirsutum
  unsure (1)..(385): unsure at all n locations
  Clone ID: LIB3146-051-Q1-K1-B7
cccacgcgtccgcccacgcgtccgcccacgcgtccgcggacgcgtgggttcgaaggtaaagtcgaattttttcgctgtaaaacgaagttttgagtttgaaaatggcattaaccaacttcatattaacagtagcaggtgttagcgcagtggttcttttattgcgaagcgacgttaaacaatccgctgcgatctttaggcgcaacgttaaacatataaggaattggcttgaagaagagtcttctgctgcttccaaggcagcagagaaggcaaagcccaaggaattggagtccaaggttcctcctaagaaggactagtttctttatagagagtttgggttatntatgatgatatacagtttacagtttttgaatatctggngttttat

SEQ ID NO: 6791 - DNA, 1099 bp, Gossypium hirsutum
  Clone ID: GOSHI-09MAY01-C38011_1
gcgaacgtgaatttcgtgtggaagtggatatcttaagccgactcgaccatccaaatttggtgtctttgattggttattgtgctgatgggaagcatcggttcttagtctatgaatacatgcaaaaagggaacttgcaagatcatttaaatggtattggtgaaacaaaaatggattggccttcaaggttgaaagtggcacttggtgcagctagggggcttgcttacctccattcaagctctgccgttggaatttcaattgttcatagagatttcaagtccaccaatgtccttctcaatgccaactttgaagcgaagatatccgattttggactggccaaattgatgccagagggtcatgacatttatgtgacagccagagttcttggaacatttggttactttgatcctgaatatacatcaacgggtaaactaactttacgcagtgatgtttatgcattcggagtggttcttttggagcttttaacgggacgcagagctgttgacataaaccaaggaccaaatgatcaaaaccttgtactccaagttaggcatatactgaatgatcgaaagaagctacgtaaagtgattgatccagagatggctcagagttcatacaccattgaatctatagctatgttcgcgaacctggcatcacgttgcgtccgtgttgagagcggagagcggccgtcgatgccggaatgtgtgagagaactccaacttattttcagcacaaatgcaaaaggcctaggcatgggttttaggatgcggtaaagagtttaaagaattgagaaaatacaaaaattttttagcagcactgaaattgtatcatatatatatatatatatgatacaaagtttaaagaattatgagcaaaaaaaaatgcattatcactgtgccaattcggtatcgaaaaatatccgtgtaggatctgtagacatctaattttgtcccagattgttcactaagtgataatatattttaatatgtttaattgtagtctagcatcacttgtttgtttgtcaatgttttgcttattggagctaaatgcatgcattgataatttgtatacaatattgtgaaatataaataaatttgtgaac

SEQ ID NO: 6792 - DNA, 360 bp, Gossypium hirsutum
  Clone ID: LIB3145-049-Q1-K1-D1
gaagaacataatgagaattttcaaaaaattttaaatgcttgatgaaaattttcaaaaatttgggagccaatgtcccctggctcccattactatccgaccctacggtcgggtttgagtaacttagaatgcaaacagaataataagttggtgatacatgtttcaggttaggcatatactgaatgatcgaaagaagctacgtaaagtgattgatccagagatggctcagagttcatacaccattgaatctatagctatgttcgcgaacctggcatcacgttgcgtccgtgttgagagcggaaagcggccgtcgatgccggaatgtgtgagagaactccaacttattttcagcacaaatgcaaa

SEQ ID NO: 6793 - DNA, 811 bp, Gossypium hirsutum
  Clone ID: GOSHI-09MAY01-C38001_1
cggacgcgtgggtgtggagttttatcactcgattatgcggagggattcaaagagagatgccggcgggtgtaacgtgccgtaagctttaccggcaacggcgaatgcgagggatatgattggggagatcgaaaatcggtcagcttatttgctagcgataaaaacagatgtagaaacacaaggagatttcataaggttttcgataaaagaagttgagaatgtttcgtttaccgatatcgaaaatgctgtcccttttgttaaatggctagacgatgagctctcctacttggtcgacgaaagagccgtgctaaaacatttcgaatggccggagcacaaggctgatgccttacgcgaggcagcattcggctactgtgatctcaagaaactagaatccgaggccgcatcatttagggatgacgctaggcaaccttgcggttcggctcttaagaagatgcaggctctgcttgaaaagctcgagctcggtgtttacaacctctctcggatgagagaatccgcaaccaagagatacaaaggtttcgggattcctacggattggatgctcgaaaccggaattgtgagccagatcaagctagcgtcagtgaaactagcaatgaagtacatgagaagagtatctgctgagctcgaagctgtcgggggtggacccgaagaagaagagctgattgttcgaggtgttagattcgcgttccgtgtacatcaggttaacgacattctcattaattcatacgagtttaatctaccaactttgctttttcaaggattgagaagacaattaaaaaaagaaaccgtatttttg

SEQ ID NO: 6794 - DNA, 465 bp, Gossypium hirsutum
  Clone ID: GOSHI-09MAY01-C38391_1
gtcttaataaaatcagatgttagccttgttggcttggtgtcggccttgttgaattcttctaaattgcagttgaagaaggtgttctcttcattcaaggatgtcaaagtcattcagttctcttcaatgcaggatgcttttcttggtttcactgacaagacaagagaggagaaattcaggaaacgtgtaaagcagtatgtaggtatatggtgctgtgttgagaaccacattcctggacacatatattatgacatgtattgggacgagaaaccgggttggaaacctgttccacctaaaaccccagaggacgatcatccacctttctgaagccctctcttcaccctcttatcaaaaaggttgcccaagttctggccttgggaggtagaaaaagagacagagacagtggcggggacagtgacagtcacagcgtttcaaagctgctatggttcctaacacatcgtcaaaaac

SEQ ID NO: 6795 - DNA, 396 bp, Gossypium hirsutum
  unsure (1)..(396): unsure at all n locations
  Clone ID: LIB3148-021-Q1-K1-C12
aaaaaattgaatcaccttctgatttctttgatttctggtactggaattttgtagtgggcgtagtgtatattctgtgtgcctaaaaaaatttgcaggtacatcaatggcttttatagccagattcacaagataaataaaaataaaaaatatataaaaaatcctattttcctactgtcatctgctatgaattctgttattggctccttctggtgtgttcttttgcaggctcggttgtacagtggagcggagagacgtgcgaaggaggccatgtgaggagtcactcgtgggagccctaactctctggcttattctggcacgttccagaagcttccaatgctgctgaaatatttttgggtgtattggngcctgggtaatggggtatttgggctattttat

SEQ ID NO: 6796 - DNA, 406 bp, Gossypium hirsutum
  unsure (1)..(406): unsure at all n locations
  Clone ID: LIB3145-054-Q1-K1-C5
cccacgcgtncgatttttatttgtgaatccgcatttctatccccgatttcaacggagaagccaagggatctcatcaatgcatttagcaaaggctcggttgtacagtggagcggagagacgtgcgaaggaggccatgtgaggagtcactcgtgggagccctaactctctggcttattctggcacgttccagaagcttccagtgctgctgagatatttttgggtgtattgggcctggggtaatgggttatttgggctattttataaaagaacttggactttgatttaattttgggctatttattttctcttatttttttatatttattatttttaggttataatgggccgggcgaattgggcctattacaaaactcttaaaaaaaaataacggctacctacaagcttt

SEQ ID NO: 6797 - DNA, 829 bp, Gossypium hirsutum
  Clone ID: GOSHI-09MAY01-C38311_1
cacaagaattacttaagtcagtctgagcagatcccgatcccactggaagaatctggaattaaaaagcgatagggtttggttcgttgttaaaaagataggcagaggcatttaaaaagttttagaaattacttaggggaagcctaatcagagagatccatggagtttttagctaaagaatacgggtacgtagcgttagtggtggtggcttactgctttctcagcatatggatgggtatccaagtagggatggctcgcaagaagtataaggtttattaccccaccctttacgctcttgaatccgagaacaaagatgcaaagctcttcaactgtgttcagagagggcatcaaaactcgctggagatgatgcctatgttctttgtactgatgattttgggagggatggctcatccttgcatctccgctgcgcttggacttttttacaccgtcacccgttatttctacttcaccggctattccaccggagatccccagaaacgtctcactattgggaaatatgggttcttggcattgctggggctcaagatttgcactatttcattagcaataaacctgctccgacgatgattttctttcccttctaattagggtatcgttgtgatctcatccataattatgtatacatttcctttatatgtatcgtatgagaggtcttatctattataatgacatcttttgaatccactcgaaataaacaaaaatttaattttcatcgggtgatttcaattttaatcttttaccccatactatttaaattaaaacaagattatattaaaatctcattgttaaaagggttgtagatggtgaattt

SEQ ID NO: 6798 - DNA, 488 bp, Gossypium hirsutum
  Clone ID: LIB3584-033-P1-K1-G1
cccacgcgtccggaatccgagaacaaagatgcaaagctcttcaactgtgttcaggtttcatttttctttcttatttttttgctgcttctaaaaaaattgttcaaaaggaagcgaattgaattaattttttgattgcagagagggcatcaaaactcgctggagatgatgcctatgttctttgtactgatgattttgggagggatggctcatccttgcatctccgctgcgcttggacttttttacaccgtcacccgttatttctacttcaccggctattccaccggagatccccagaaacgtctcactattgggtatatttcttcttctttgcttttttttattattcgtgagggttaattgcagtttgaattttataaattttgaaatgttttaattgagtattggttcctaacaacccaatcttttgatcgttttagtcaaaggttaaatacaagttcaaacccgatgcgaaagtgatagtttctaaa

SEQ ID NO: 6799 - DNA, 873 bp, Gossypium hirsutum
  Clone ID: GOSHI-09MAY01-C38301_1
atttgtctggtctgcattcatcagaagaggttcaaggaatgatgacaagaaaatggtatcagatgacaaatctggtgcatatactccgcctatcattttcaagcatccaactcatcttgtgaccccatctgagatattgatggctgcaacatcttctgaaactactaatgtcaatgagggaaagagtgaaggcgaggtgcacattcaggatgtggttgtcaataatgatgcacgcaatgctgagttggaggtaaaagtggtgggtgaagcaagatcatctcagaacaatgaatttggttcccatggagactcccaaaatcgaaatttggaaaatagagagaaattcttttgctcccaggcttcagatcttggtattcagatgtcgagggagagcagtgcgatatccagggatgcttacgttgttgatgaatctcagcaagcggatggtgttggtgcatcagggtcgtatgtgaagcctaatattgctgaggaagaaatcaatgattccagaaaggatctttctggaaagggtttggaatcagccataccttctacatatcaacaatcaccaacatcaggtgcaaaagggaagaagcataaagggaaaggttctcaggcatctgctcacacttccccttcttcaagtgctttcaattctgcagattctaccactgaaccaggagcaaattccaatctcccctcagctgctgctgcatttcctcaaattgcggctatgcaagatatgcttaatcagcttattactacaccaaaagaaatgcaaaacaaatgtccaatattgttcaaccaccagtttccagaaagaagaagacttaagctgctctcaggacgagtattgaaaagctctttaaggct

SEQ ID NO: 6800 - DNA, 645 bp, Gossypium hirsutum
  Clone ID: GOSHI-09MAY01-C38331_1
cgatcttttggttctgatgtgacagatattggcttgggtctcctaaaagagtgctcgagtctccaagccttaacttttaaccactgtgaaaatatttcagaaattggactgaagcatattagtggtctaacgaacttgacatccttgagttttaaaaagagtgctgcaattacagctgaaggaatgtgtgccttttccagcttaataaacttggaaaagttggacctggagaggcgcacagggattcatggtggatttgtacacattaaaggtttgtccaaacttgaatctcttaatatcagatgctgtaaatgtatcacagacttggacttgaaggctatttcagggcttaataatttgaaggagttgcaaatatcaaatagtaacgttacagattttgggctgtcttatttgagaggtttgcacaaacttgttatgttgaatctagaaggatgtaatgttactgctggatgtttggattctcatctcagctcttgttgctttggcattcttaaatctaggaagatgtggcctgactgatgatggatgtgacaagttttctggacttgagagtttgaaggtattgaacctggcatttaacaatataacagatgcatgcttagtgcacctaaaagattaacaaat

SEQ ID NO: 6801 - DNA, 407 bp, Gossypium hirsutum
  Clone ID: LIB3145-053-Q1-K1-G5
cccacgcgtccgaaagaagcaaaccactgacactgctgatcattctgatgacatttcagctgaggttgaaacttccatcactgaaacagatgccattgtagctaaccacctgaaacctggagctccagtgaatgctggaatgaacaataatgttggtcaatcaagtaattcaagtctcaaagaatccaacaaaattaggggcctgcaatcgatacttcagattacaaacagtgttgagaagaccaaagtaataagcaatttgagccgtgtagattcaaggatagaacgtattgaggcatggcgttgaggggtactcaacagctgttggaccctaaactgatactttgacatgattgctgtgaatgtttgttcattttgcaagttgtgaaggagaaaaaaaaattgag

SEQ ID NO: 6802 - DNA, 407 bp, Gossypium hirsutum
  Clone ID: LIB3145-053-Q1-K1-A8
tgaacacggccggacaatgcctgattatgatattcataaggagtctactctgcatctagctcttggccttaccggcgttttttaagcaaggatcgttggccgttagcggcggccaccttttggctctaaataaggtgtgatgaaccttatttgggattattattagctatgaggctttcgaactttcacgggatactgctactacattttatgcttaatattacaaacagggttttgagacactattatgaaacgactacttgcctggtcaaatgcctgatagaacgtattgaggcatggcgttgacgggtactcaacagctgttggaccctaaactgatactttgacatgattgctgtgaatgattgatcattttgcaagagggcggccgataaaaaaaaactgag

SEQ ID NO: 6803 - DNA, 645 bp, Gossypium hirsutum
  Clone ID: GOSHI-09MAY01-C38221_2
cttactctcatcttctcaagaaacaaacaagtcatcacttaaacccactcaaacgcaaatggcacgtaccaagcaaaccgctagaaaatcaacgggaggcaaggcgccgaggaagcagttagccacaaaagcggcgcgaaaatcagctccggcaaccggtggagtcaagaagccgcataggttctggccaggaactgtggcgttacgtgagatccggaagtatcagaagagcacggaacttttgatcaggaaactcccatttcagaggttggtaagagaaatcgcccaggatttcaaaacagatctgaggttccaaagcagcgctgttgctgctctccaggaggccgccgaagcttacttggttggactttttgaagacaccaatctttgtgctattcacgctaaaagggttactataatgcccaaggacatccaacttgctcgtcgcattaggggtgagagagcttagagttatttaagatttattgtactaattggatttccatggatttgttgtaggattgaatatccaaaacgtggagatgtaaagcctttccctggtaaaagtagtaatattatggcaatttcagtactatatgttgatgctatttttggttcttttattaaaataaatattaaattcat

SEQ ID NO: 6804 - DNA, 621 bp, Gossypium hirsutum
  Clone ID: GOSHI-09MAY01-C38221_1
ttcctcatttccttaacaacaaacaagtcatcactcagaaaacccacttttaccctccccaacgcaaatggctcgtaccaagcaaaccgcttagaaaatccacgggaggcaaggcgccgaggaagcagttggccacaaaagcggcgcggaagtcagctccggctaccggtggagtcaagaagccgcacaggttcaggccaggaactgtggccttgcgtgaaatccggaagtaccagaagagcacggaacttttgatcaggaaactcccatttcagaggctggtaagagaaatcgcccaggatttcaaaacagatctgaggttccaaagcagcgctgtggccgctctccaggaggccgccgaagcttacttggttgggctttttgaagacaccaatctgtgcgctattcacgctaaaagggttactataatgcctaaggacatccaattggctcgtcgtattatgggcgagagagcttagtggcttttatgatctattgtattatttagatttccatgggttttaatattgaaaatgcggaggttaatgtcctttcttaaccttaatgtaatacaaacaatttctcagacataataaagcttctgtggcacttacaatgaaa

SEQ ID NO: 6805 - DNA, 610 bp, Gossypium hirsutum
  Clone ID: GOSHI-09MAY01-C39931_1
cccacgcgtccgcaaacagcgcctgcaatagggaaaacagagaaataaaccgaacatcaaagatgaacacagacataacagcttcggccaaaccagagtacccagttatagatcgaaaccctcctttcaccaaagtcgttggcaatttcaacaccctcgattacctccgtttcactaccattaccggcgtttccgtcaccgtcggctacctctccgggataaaaccaggattaaaagggccttcaatggtgacaggagggttgattgggttaatgggtggatttatgtacgcgtaccagaactcagcgggtcgactcatgggatttttccctaatgatggcgaggtcgctcgataccaaaaacgtggactcaaaaactagccatttctctctttttctattctcgtctattcacttttatgtttttaggacaatttgaataatcttcattgctgtctttgatttcctgttgttcatttcaaggcatttgtattgctgcttaaaatatgacttatatgggtctaagatcccactgaaatgaggttgtctttgaataactgttagaaggcaccaaccttttgatgcatgtggttgtttgcagcattaaaatg

SEQ ID NO: 6806 - DNA, 521 bp, Gossypium hirsutum
  Clone ID: LIB3582-027-P1-K1-C12
gttccgatttggtttcctcacaaatttttctcttctttttctctaatttttcttgttcgtctctgcaactttgtcaaccctcaactccctgcaactttccaaaaaggtaataaatctccatttctctgcttttatttattcgtttttggactagggtttcttgagaaactgactgaaaccacttccatttttagagtacgctagatgggtaagtgatgatctttttattaatctgtagataggcttttatttctgtagggtgagcttttggtgtgcttgtattaattcatgctatgcatgtacttgtcttagatgcgaaaatcatagcatcattgtaaaacattattcagtcaacaaatcaggtttggtaacaatctgaaaaggattagtagaaagttgatgctcgtatgttgtgggatactgctgaggatttagtattgtggtgcttttgttctccaatggctgccctcgcattagatgcaaactgggttcattaatactaagacaaatttatactaaat

SEQ ID NO: 6807 - DNA, 606 bp, Gossypium hirsutum
  Clone ID: LIB3582-040-P1-K1-B3
cccacgcgtacgctttccaaaaaggtaataaatctccatttctctgcttttatttatttgtttttggactagggtttcttgagaaactgactgaaaccacttccatttttagagtccgctagatgggtaagagatgatctttttattaatttgtagatgggcttttgttattttaacttaatcatgataattgcagaacagaaagagaaatgggttcgatttatttgatttggaaatgaattttcttgttgaaattgatattgtctcacgttactgtctttttttttttctttggaggatcgcactttcattattcatttcttacattcaattctccactagctataattaagtaaaatgaaagaaaaaaacacagaccttcaatgaaaatattggttcggaagatttacatctaaagaatatgtatatgttagtagttagtgacttgatgaagaggtttgtatcatagtatcattgtaaaacattattcagtcaacaaatcgggtttggtaacaatctgaaaaggattagtagaaagttgatgctcgtatgttgtgggatactgttgaggatttagtattgtggtgcttttattctccaatggtt

SEQ ID NO: 6808 - DNA, 268 bp, Gossypium hirsutum
  unsure (1)..(268): unsure at all n locations
  Clone ID: LIB3147-019-Q1-K1-A7
ctcacaaatttttctcttctttntctctaattgttcttgttcttctctgcaactttgtcaacgctcaactccctgcagctttccaaaaagagtacgctagatgggtaagtgatgatctttttattaatctgtagataggcttttatttctgtagggtgagcttttggtgtgcttgtattaattcatgctatgcatgtacttgtcttagatgcgaaaatcatagcatcattgtaaaacattattcagtcaacaaatcaggtttggtncc

SEQ ID NO: 6809 - DNA, 1214 bp, Gossypium hirsutum
  Clone ID: GOSHI-09MAY01-C39851_1
cgccccgccttcgggagaagaaagaccccagccaggaacgaacctctctttcttttctgacagacttgctgctaaattcgcatcatgtcttggtgcacaattgaatccgatccaggtgtttttacggaacttatacagcagatgcaagttaaaggcgtacaagtagaggaattgtattcattggatctcgattctctaaacaatcttaggcctgtgtatgggttgattttccttttcaaatggcacccaggggagaaggatgaacgtcttgtaatcaaggacccgaaccctgatctgttctttgctagtcaggtcatcaataatgcttgtgctacacaagctatattgtctattctcttgaactgccctgatattgacattggcccagaactatcaaagttgaaagaattcactaaaaacttccctccagagctcaagggtctagctataaataacagtgaagctatacgtacagcccataatagttttgcaaggcctgagccttttgttccagaggagcagaaagctgctgggaaagatgacgatgtctaccatttcataagctacataccagttgatggagtactttacgaacttgatggactgaaggagggacccattagccttggtcaatgccctgctagtccaggtgacatggaatggttgaagttggtgcaaccagtaatccaagaacgaattgagagatactcccaaagtgaaataagatttaacctcatggcagttatcaagaacaggaaagagttgtacaccgctgaacttaaggagctccaaaagaagagggaacgcatcttgcagcagttggctaccatacagtctgaaagacccacagacaaaaccagttttgaagcactaaacaagcaactttcagaagttaattcagggattgagggtgccactgagaaaattttgatggaggaggagaaattcaagaagtggagaaccgaaaacattcgaaggaaacacaactacatacccttcttgttcaacttccttaaaattcttgctgaaaagaagcaactgaaaccccttattgagaaagctaagcagaagaatagcagctctaggtgaagtgtatcttgttttgtttttattttcttgggttgacaagatgcttaatgcaaattcaaagaaaactggagtcacgtaaaggacccttttatgataaaatcaactctgctgttttcaaatgactt

SEQ ID NO: 6810 - DNA, 594 bp, Gossypium hirsutum
  Clone ID: GOSHI-09MAY01-C39401_1
tgggcgacgcgtgggcgtacgcgcgggcgggaagcttcgagttcttttaggtgattttctgttagggctgtttggtaggtgatggctccaagtcaacctaaaactggcctttctgtgggcttaaacaaaggacatgttgttaccaagaaggaattggctccccacccttctaatagaaaggggaaaactagcaagagagtccactttgtgaggagcctaattcgggaggttgctggtttcgctccgtatgagaagaggataactgaacttctcaaagttgggaaagataagcgtgctttgaaggtggcgaagagaaagctaggcactcacaagcgggccaagaagaagcgtgaggagatgtctagcgttctccgcaagatgaggtcagctggaggtggagagaaaaagaagtgagttgccctgcgattgtgcttcaaagcaagtattgagttttttagatttgttaaattttctctttcagttttgttttgagagtttggagtactgattcggatagcattcttttacttgtgtgggatatttaaaaaaaacatgaaatttgcatcacttaattgcaatctagattcgattatg

SEQ ID NO: 6811 - DNA, 539 bp, Gossypium hirsutum
  unsure (1)..(539): unsure at all n locations
  Clone ID: LIB3825-009-Q1-K6-A3
cgcgtggngcgggnnaagcttcnagttcttttagtggtgattttctgttaggggctgtgtcgggggggtgatgtgctccaagtcaaccctaaaatctggcctttctgtngggcttaaacaaaggatattgtttttttctttnaaggaattggcttcccgcgctggggggggggaggggaaaaccagcaagagagtccactttgtgaggaggggggttcgggaggttgctggtttcgctccatatgagaagaggataactgaacttctcaaagttgggaaagataagcgtgctttgaaggtggcaaatagaaagctaggcactcacaagcgggctctgaagaagcgtgaggagatgtctagcgttctccgcatgatgaggtcagctgggggtggggtgaaaaagaagtgcgtcgcccccgccgttgggcttcanngnaagggctcgagcttttacatttgttaaattttctttttcgttttgctttggtagtttgggaaactgcctccggttgccttctttttccttggggtggggtttt

SEQ ID NO: 6812 - DNA, 712 bp, Gossypium hirsutum
  Clone ID: GOSHI-09MAY01-C39781_1
ggagttcatggctttcctactcttttccttttaaattctaaaatgcgtgttcgttatcatggaaaccggtcttttgaatcgctcagcacattctataatgaagtcaccggctttcagataaaatctctggataaaacatcgcgggacaaaaccagacatgtaccaaagcatgagaatcataaaagctctgagcaggagagctggtcattctcatgggcaagatctccacagaatttgcttagacaagagacctatttggccttagccaccacatttgtgcttttcagattgctttatctattttatccaactttgctggtatttgctcgcttcacttggaaacggatcaatcgagatgtaaagttgggaactatgttggaacatcctttgctgatctgaaacgaacaattcggttgaattccctgaaagagaagcaacttgcaaaggtgcaatgaatgctagagcatcttgctactgctgcgatcggcaatgccaatgagtggatcttgctgagtctttagctggtgtgggacaggtatttgtttcctctagaagtttggttgcaatctcttggaagcaagagcctttttgtttcatatttttatccaaagcaacattggtatttaatttgggcctgtaatacttaattttcatttgtgatatgatttagaatacatcttttgccttgcctgtatgtaagcggcactgcaac

SEQ ID NO: 6813 - DNA, 668 bp, Gossypium hirsutum
  Clone ID: GOSHI-09MAY01-C39671_1
cttgaaatacgaagatgtgaaaaaggagcctttggggtgtgtgaggaaacttgcagggttgttgggggtaccctttacaccagaggaagaaaacaacgagactgtggcagaaatagtgaagttgtgcagtttcgagagcttgagcaatcaaaatgttaataaaagtcaaaccagcagtggagaacgacctgttggtaactctgatttctttagaaaaggagaagtaggagattgggtcaaccatttgtcacctaaaatggttgaaaaattgaatcaaattacagaacaaaagcttaattcaaggtactggattcaactttgattgactcctactactttatgatgttataatgatattagagtctataaatgatttgttcaccgtctcagtgaatctggtttatagaactaaataaaagaagtctttgtttgtgttaaaaaaaaaaaaaaaaaaaaaaaaaaaaaaaaaaaaaaaaaaaaaaaaaaaaaaaagcaagaactacaaaaaaaaaaaaaataaaaaaaaacaacaaaaagggggggccgttttaaagaaccaaagtttacatccccgggcttgcaacgtaatattttttttatggggcccccaaaatcaaattcgggggccgcggtttaacaaggcgggaatggggaaaaccgtggggttc

SEQ ID NO: 6814 - DNA, 1012 bp, Gossypium hirsutum
  Clone ID: GOSHI-09MAY01-C39101_1
aacttcaaactaaatttcattttctgtaaagatacagggactaacggcctactttgacccactacttcgacacttcaccgacctaatagtagcgattgcttctctccccccccccccccccaaaaaaaaaaaaagcgactgcttctctttactctcttctacttcactgccttttacattttagccaaaccaggggacgcccttgaaagctgtgtttgagaactgaaaatgaaggagcaagattcacccacaacaccgccaataccaatcacttcacagcaactagcaacgccgagtgttgtgaagaaagatagctccgtaactgctggattcttgggtaaaagtgggtacaaattctgggtcttggctgcaattctcctgcttgctttctggtccatgtttactggctctgtttctctcaaatggtcttctggtcatcttactgcattttccgatgacatcgatttctctgtctatgatgatcttgacgttctcgtatgcgcccaaagtgagaaggtggtgaggaagatgtgggatgtttatacgcacagcgcaagcgttcgattgccgaggttttggcttgaagcattcgaggctgcttatgaatatctatcgagtgatgttcctggagttcgagatacagctatgtctgagattgctaaattatctatgcgctccctaaatcttgattcgccctctcttcgatcaaagagcatcagtgtagggaaagagaattctaacagaaaggagatatctgcaagcaggaggagcttataagtggagcttacggtccctgttgctgtaataaaaaaggatgctgtttcaacctctcataccacttcatgttcggaggacatagcattatcttttaagtctttgggatgacgttttccaccattaaactatgaactgtagctgtaaaaaaaatggatgctgtttcaacctactgaggaggatgctactcattaaatatgtttatgaactgaacatttgccgaatttattgtcttctt

SEQ ID NO: 6815 - DNA, 383 bp, Gossypium hirsutum
  Clone ID: LIB3196-065-P1-M1-D9
cccacgcgttcggcgcggggggccaatccaaaccaagaataacatcaaactcgtcaaacggcaaaagcatcatagacagagaaatcgatgtcatcggaaaatgcagtaagatgaccagaagaccatttgagagaaacagagccaataaacatggaccagaaagcaagcaggagaattgcagccaagacccagaatttgtacccacttttacccaagaatccagcagttacggagctatctttcttcacaacactcggcgttgctagttgctgtgaagtgattggtattggcggtgttgtgggtgaaacttgctccttcattttcagttctcaaacacagctttcaagggcgtcccctggtttggctaaaatgtaaaaggcagt

SEQ ID NO: 6816 - DNA, 459 bp, Gossypium hirsutum
  Clone ID: GOSHI-09MAY01-C39131_1
gacgggcggaccgacgcgtccgaaggaactaaggacttcccgcagtgtggtggttcaaataccgtagtgcaaattttgaatgcttggaacgttccttttgaaaccataaacatattagagaacgaaatgctacgtatgggtctgaaggagtattccaattggcctacctttcctcaactttatatcgaaggagagttttttggtggctgcgatatcactgttgaagcatataaaaatggggaattgcaggaactattggagaaggcgatgtgctcttaaatacttatctgcattgaaaaacagatgtagttgtacttgttcggaattagctgattacttattgtctcggctggcttaacttcttttgtgattgatttgttggtttcacattggaaataatccaagttggtggttggataataaaataaaaggatttaaatttggaccccatttttattc

SEQ ID NO: 6817 - DNA, 398 bp, Gossypium hirsutum
  Clone ID: GOSHI-09MAY01-C39071_1
cgttcgagataacagctacactggctcgagtgttggaggcacctattgggtatacagggtgcggattacaatcaagcgacggctgaagagacggatatttcaccagatgatgttgcgtatgttgaagagcggtccattgccacattctccagattctgtgatgactaaatgccatagctcctctacaatacagtcaaatagtacgacttaacttaaatttcactaaatttcgaggcataatcgtaaaggaaacactgtcaacctgtactataagtgctctctccatttgtgtctcaccttgaatggtaaatgggatggcaatattatataggataagcggtctatgaaaacccgtagctttggcatttaaaattttagctgaatccaactttttgatt

SEQ ID NO: 6818 - DNA, 513 bp, Gossypium hirsutum
  Clone ID: GOSHI-09MAY01-C39021_1
gaaacgctgggccggctcgcgggccccggtccccggttcgacccggatactacagcggacaggaagggaaaggaatcaaagatggggggaggaatggaggcgaacaagaacaggttcattgaagattggagcagtgcgagagagaatctggagcataactttcgctggactcgccgcaacttcgctctcgtcggcatattcggcatcgctatccccgtccttgtctacaagggcattgttcgagaatttcatatgcaggatgaagataatggtaggccatacaggaagttcttgtgagtttttctccgcaaagctgggtaataaatgttgacgagtacaactgggttttatcttggacaacaatttctgttatttacttggttttggaacttgtcatgttgttatttgctcgggttagaaacaaattctgtgctctgcttcttttaagtttctggtgtagattttgaatatttggtccatattacaagttcaaataatctgggctcccccctg

SEQ ID NO: 6819 - DNA, 436 bp, Gossypium hirsutum
  Clone ID: LIB3827-002-Q1-N6-D1
aaaccgagcaaataataacatgacaatttccaaaaccaagtaaataacagaaattgttgtccaagataaaacccagttgaactcgtcaacatttattatccagctttgcggagaaaaactcacaagaacttcctgtatggcctaccattatcttcatcctgcatatgctgttggaaaaattaccaaatcactcagcaattcaattagagaaatgtacaaagggaaataaaattggaaagagtactatctctattgcacaatgttcttgcaaacaacacaggacagaaatcaaacaagaacttgcaacaaaaaaatgggaatcaacagctgaaattgttaaatcaaatcctccaaattaaaaagaaattaagagtttcaaaggagggttttttctattccttgctttgcaacttttaacctgttttattgctgacta

SEQ ID NO: 6820 - DNA, 346 bp, Gossypium hirsutum
  Clone ID: LIB3147-008-Q1-K1-E1
cccacgcgtccgtcttgatgctctgggcagggacgatttccggcgttcggaccaccgtccgtccgtcatcggcgaccgctgtatacggcggctggaagcgcaaaatcgacccctttttaacccttttgttccccttaccctagatccatagttgaagcgcccaaaaacctcacgaaaaccgacgaaaatcaagagaaacttctcggttctactctccgatcgccccaaacaaggtggtggttgaacggtggagcagaggctggttgggggttgacagagatgatgggacagaagcggcggctaggggtcttttttctggtaatgttttgggctgatgttagtggct

SEQ ID NO: 6821 - DNA, 322 bp, Gossypium hirsutum
  Clone ID: LIB3146-032-Q1-K1-F9
cccacgcgttcgcggacgcgtgggttgttacactgtctatttccctatattttgctggtgttgcgtattctgtttgttgtgcaggtggtggttgaacggtggagcagaggctggttgggggttgacagagatgatgggacagaagcggcgggtagggatcttttttctgataatggtttgggctgatgttagtggcttaggggttgtttaatttgggctggtagtttacgttttattttgttttggcgtaaaggttgttgggccactcgggtttgattgttaacaggctaaaattggcctacaacaacaagtgttttttttt

SEQ ID NO: 6822 - DNA, 760 bp, Gossypium hirsutum
  Clone ID: GOSHI-09MAY01-C39311_2
agagaacaatggaagcaaagccggaagagaaggcggaatttgaagaagcggagatagaatatgttagctatggaggggagcaccatctgcctctcatcatgaacctggtcgatcaagaactcagtgagccttactccatcttcacctaccgatatttcgtctatctttggccccaactctccttccttgcttttcacaagggtaagtgcatcggaactgtggtgtgcaagatgggagaacacagaaatactttcaggggttacattgccatgttagttgtaatcaagccttatcgtggaagaggcattgccactgagctcgtcaccagatccattagaatgatgatggaatctggatgtgaagaagtcacactggaagcggaagtgacgaataaaggagcactggcactttatgggcgtcttgggtttatcagggcaaagcggctttttcactactacttgaatggtgttgatgctttccgtttaaagctattatttcctcctcctcgccaagtattgtagccatgataacaaacggggatgcaagttatgaatttcgatccagacacttgaagaatgtgcaatgctggtgcttatgaatgtttaaggttattgctattaggtcctataaatttaagtacatcttctaagattatatacagtaatatattttcgtttaatatgctaaaaacgatgaataaagttgtccactggtaggatataatatgtatactcttgatttagtcaattcatttagactt

SEQ ID NO: 6823 - DNA, 527 bp, Gossypium hirsutum
  Clone ID: LIB3583-012-P1-K1-A3
gccacgcgtacgcgagaacaatggaagcaaagccggaagagaaggcggaaattgaagaaccggagatagaatatgttagctatggaggggagcaccatctgcctctcatcatgaacctggtcgatcaagaactcagtgagccttactccatcttcacctaccgatatttcgtctatctttggccccaactctccttcctcgcttttcacaagggtaagtgcgtcggaactgtggtgtgcaagatgggagaacatagaaatactttcaggggttacactgccatgttagttgtaatcaagccttatcgtggaagaggcattgccactgagctcgtcaccagatccattagaatgatgatggaatctggatgtgaagagtatgtttatatcctgcaccgagtattgactgagttgattctaaaaggaaggtagaaaatggttctaaatgatgtcactcttttcccaagggatctctgcagttggcaaattcttttaaagcataagaatttgcaaatttttgagtcacac

SEQ ID NO: 6824 - DNA, 989 bp, Gossypium hirsutum
  Clone ID: GOSHI-09MAY01-C39321_1
aaataaacaaaaataaatgattagcacttccctcccctccgcccgcgcccccggaataaggttcctaccctttctaatcgccatttaattcctgctaccactactacctgttccactactacacttgccactctttcctcccacccaaaccccacttctttcaaaatcgccactaaaaaccccgctcctctccaaaacatcgtgaaatcctcgtcaccagttcctgggattgttgggttttcaatgatggcgtctgcaactgctggagaagatggtcatttcaagttgtctgaaactagtgtgcttaaaatcaacaagggtgatattactaagtggtttattgatggctcctctgatgctattgttaatccagcaaacccgagaatgctcggaggtggtggcgctgatggagccatacatagagctgctggcccagaacttaaagaagcatgctataaggtaccagaagttcaacctggtattcgttgtcccaccggagaagcaaggattaccccaggatttaaattgcctgcatctcatgtgattcacactgttggaccgatttatgattccgacaaggaccctaaaggctcactgagaaatgcatacaaaaattgcttaactgtggctaaagagaacaacattaaatacatcgcgtttccttccatatcttgcggtgtatacgggtacccttatgaggaagcagctacagttgctttatctactatcaaagaatttgccaatgacattaaagaggtgcactttgttctatttgctgatgatatctacgatatttggacgaaaaaagcaaaggaattgctctaggtttagtgcatgctaggaactagaattgagaccttcttcatgcttgagggtggattggataataaatgtaccttaattggcatggaccaatttgctttcctttggattatgtattgtgagggatgcatagatgccatatgccaatatgcttaaatctggatttt

SEQ ID NO: 6825 - DNA, 682 bp, Gossypium hirsutum
  Clone ID: GOSHI-09MAY01-C39241_1
gccacgcgtccgcccacgcgtacgcgtgactttatatcagcctcattcctggaatagtggagagacgatattctttcctagagaggaaagaacaatggctaaaccagatgaattcaatcctccacaacgtgtccctgattggccgagcctggtgcacggtcaggtcagtactacactaatgccactgttctctcatgcagcatcatcaagattctcattctcagctacccctccttcaaccgccactgccattcttccatccaaacctcaaaacacaacagcagtccacagtctatgttttgctgcctcaaccagtaacaccatcaacacccctcaacatagtcggtcgtaagttcaattgtaccacaacgacggcgattacaataataatttaaatattgattcaatatacattaagacatggtagtttctgacttggtccgtgaactaaaaagagtatcttctctctgtctagcattaaggcatgtaggaccacaactttcatatatgctgattcgtatgtggtgcataaaggcatatcatcaggaacttgttcagtgcgtttaaactttttttttttttcatttcatgtagattagaaagcagattccattaaggtaaaatttgattcttttggtacaaaaacctgaaacaggaaaagtccttttttttttttctataa

SEQ ID NO: 6826 - DNA, 232 bp, Gossypium hirsutum
  unsure (1)..(232): unsure at all n locations
  Clone ID: LIB3147-056-Q1-K1-B2
cccacgcgtccgtattgattcaatatacattaagacatggtagtttctgacttggtccgtgaactaaaaagagtatattctctctgtctagcattaaggcatgtaggaccacaactttcatatattcttatgtggtgcataaaggcatatcatcaggaactttcggtgcgtttaaaaaaaaaaaaaaaaaaaaaaaaaaaaaaaaaaaaaaaaaaaaaaanannnnnaatat

SEQ ID NO: 6827 - DNA, 653 bp, Gossypium hirsutum
  Clone ID: GOSHI-09MAY01-C39231_1
cggacgcgtgggcttcactgggctccaagatttggtttggctgggctgctctatttcttccttctctgctagagggttggaatttagcaaaaacatatgagttatctgggtgtgggagttagccctgggaatgttcccgtctaccatggcactaatttgaaggtcattgatagaagagtgagagttgcagagctggttttgaggtgtctcatatgtggcttaagcgttcttgcagctgttcttgttggaacagatacccaaatcaaagaaatcttcactattcaaaagagagctagatttacagacatgaaagctctggtgtttttggtggcggccaacggcataactgcagcttactcattggtacaaggagtgcgttgcgttgtgggtatggggagaggaagtgtcctttttagtaagcctctggctttggccattttttctggagatcaggcactggcatacttgaatttggctgcagtgggagctgcagcacagtcagcggcgtttgctaagttggggcaaacaaagcttcaatggatggtgatatgcaacatgtacgggaaattttgtaaccaagttggggaaagaatagcagtgtcactactagttagcatctgcatggtgggcctatcttgtatctcagcatttgg

SEQ ID NO: 6828 - DNA, 654 bp, Gossypium hirsutum
  Clone ID: GOSHI-09MAY01-C34981_1
acgcacgcgtccgtggaaagccatatcagcttgttccaggtttttcatactttcatgctgttcctgctgctgtgcaggtgaaaccggcagagcagaaacaacctgtcggtgagtagaaatatgcgctttgtgcttcgtattgctatcaccatacaggaaacaagatacagcactgagaagagattttggcattgcagttccttgttgattgtgcttaccatatcatccaagacacttgtgctcataaactttcttgacaaggttgatcattgtccagtctaattaaactagaatggtttgatgcgcgaaagatggagaaactaggttgtcaacaatgtttttgtagggcaaatgaagatggtgtaggggaatagggctccacgaaaagcacggaagtggagcacctacttttccgtctcgtggcagtaatggaggttctttttcttatataattttatttcctttttatctttgaatttgggattttgaaatttccaaaatagatcagtaaacaaatcttttgacataatatatgcaactgaagggtgtatatgtatatgtgtttcacatgcacatttaagagtaatcctcttcattttttctattcatctatttgccttcatttttattttgattaaaaaaaaaaaaaaaaaa

SEQ ID NO: 6829 - DNA, 729 bp, Gossypium hirsutum
  Clone ID: GOSHI-09MAY01-C34951_1
agagtactagatttcgagtcccacaatgtagaaagctctatataggcgggcacaagcctacatgaaaacttcagatctaatatcagctgaaatggacatcaagaaagctcttgaggctgacccccaaaacaggaggtgaagctacttcagaagacactgagacaactccaaattgaaagcaacaagagggatgctaaactctttacaaacatgtttgcacgaatgtcgaagagatcatctatgcccattaagaaattgaaggttgagatagcagagcctgagaagagtgaagaggctgcagcaactgaaagggaatgcgtggctgaaccttcaacaccttctgaagatagaatggcagttgatcagagttgagaaattccatttatcacttgttatccatctaacaaaaggttaaaaaggtctaatgttcaaaaaccagcacttctccctcagccttgctcgcctgtaagttttagcaggaaagagaggagaaaattagtgtaaccgaactcagtgttaaaatgttaattcctataaactgaaagaagggatgaaagaaatgatgatcccgatatgaagaggcgattaagatgtcctaacatttcatatttattcataaacattgaaccttgaccaaaatcttgcacattgtatgtgtttctgttgtttgtagttgaacacaggtgggttgattgttcttcattaacagagcactcctgtgtctgcctc

SEQ ID NO: 6830 - DNA, 581 bp, Gossypium hirsutum
  unsure (1)..(581): unsure at all n locations
  Clone ID: LIB3825-001-Q1-N6-C9
ggttaaggatcaatgtttatgcatcacaattgaaatattagaacatcttaatcgcctcttcatatcgggatcatcatttctttcatcccttctttcagtttataggaattaacattttaacactgggttcggttatacggaggggccctttttggtgctttttaaacnacaggcgagcaagagcagagggagaagngnnggnccgggcggtcccccctccttaagggnnngnnaganggataacaagtgacaaatggaataaaaaaaacaagatcaactgccattctatcttcagaaggtgttgaaggttcagccacgcattccctttcagttgctgcggcctcttcactcttctcaggctctgctatctcaaccttcaatttcttaacgggcattgatgatcccttcgacatttgtgcaaacatgtttgtaaagagtttagcatccctcttgttgctttcaacttggaggtgtctcagggtcttctgaagtagcttcacctccctgttttggggggcagcctcaagagctttcttgatgtccatttcagctgatattagatctgaaggtttcatataggc

SEQ ID NO: 6831 - DNA, 636 bp, Gossypium hirsutum
  Clone ID: GOSHI-09MAY01-C34941_1
cagatttcggcttgagtgcccttggtgagcctgcgcatcaagatggattgctccacacaacttgtggaacccctgcatatgtagctcctgaggttataaaccgaaagggctatgacggggcgaaagccgatatctggtcttgcggggttatcctctttgtcctactggctggttatcttccatttcatgattcaaatctgataggaatgtataagaaaataagcaaagcagattacaagtttcctagttggttctcacctgatgtcaccaagctgctatcgagaatcctcaatcctaatccaaaatctcgaatttcaaccgcgaaaataatgacaaactcctggttcacaaaggggtttaaattgaaatcaagtcacaaaactgccgaaaaggacttgccttctaccgataccaatgtggtttttggttctgaggctaacacacagcattcgaaacaaagaatcacaaggatcagctcaccaagttgaatgctttcgacatcatttccttatcaagtgggctcgatttgtctggattgtttacggaaaccggcgagaaaaagaagttagattcacttccatgcatatgcctctgccatcacttctaaactaaaagactttgctgagcacttgaacc

SEQ ID NO: 6832 - DNA, 613 bp, Gossypium hirsutum
  Clone ID: GOSHI-09MAY01-C34971_1
cccacgcgtcctaaaaaaaaataaaccctaaagaaattccccccaaatccgaggccaaaattcagagattgtgaccatgatcagcattctcgctcaggagcgtttgcttggtgcaacattaggatgcgcattgacggggatcgttgtattcgagcaacggaaacgcatatatgattccgtttcaagttatcaatctgagatgaaagaactgatatttggaaagaaatctcgctcagagtttgcccttctatggaacaaaacggtggaccagatatttgtcccagtaattgaagccattagttcccgtcgatggtagaagatttggggtaatttttactgtcaactattggtgtggctcttacttcagatcattgcatgcgtacaattgcttgctgttaattttatctctcaaatctctttgaaccaaaagggggaatgcttacttgtttgtaatacgcagcttgtaaaaatggtaaattcagtttcatgacatatttcatttcttctccattgtttcttttttaatggtataaattgtgaatctttgttaactttttaaaaaaaaaaaaaaaaaaattctgcggcctgagaaaatctgaaatctattccagca

SEQ ID NO: 6833 - DNA, 733 bp, Gossypium hirsutum
  Clone ID: GOSHI-09MAY01-C34911_1
cccacgcgtccggggaattattagttttatcccttacttcaattggctgagctgggtttgggcttggcttgattctggaaagcggcgctacgccgtgtattctgttgtatacttggttccttacctcaggtcaaatttctctctttccccagaagatagctggcttcctattgctagcatactattttgcattgttcatgttcagctggaagcaagcataagaaatggcgatcttcaaggctttcaaatttttagtgaggctgctgggcatctttcatcaaggagtagagaggaagatgaacatttcaaagggtataatgaacccaagaaaggagaacataggaatctgcctgatgctgaagaacattcaagaaatgagatcccgcattggggaattccgaaaaggccctcacaacatcatgaaacagctgaatgatttggaggatgatggaaaaagtgaacactagaatgataggcatcatacctcaacttgatcgtagtagttggatctgcatgaaatgctatgctgatggtataaaagagcatgcaaaacatgaatatagaaaagaggcaaagattggtgcagacagaaaaggaggaaggagggttaacatggttgatacctggatgtggaactaaaagaagctcattactactttaatatttcttttgaactctttttatttaaatgtaatttacttaaatatttccatggtttatcattccaaaaaaa

SEQ ID NO: 6834 - DNA, 493 bp, Gossypium hirsutum
  Clone ID: GOSHI-09MAY01-C34901_6
caatcaccaccggatccccattctccagcaattaaacgcaggtctcgttcatttctggtgcgtttaataatccctttatacgccatggacatgaagaaggtctccaccgccatcattgttgctgccgcctcaattagcgtcgtcatggctgccgatgcacctgctccctccccttccgccggtggttctattcctagctcctctcccggttccgccccagcatcaggaccagattccagcgtggctgccgcagccttgccggtccttggatcattggttggggcttccattgtttctttgttttcttacatgctacatgtatgaaaaatcaacatgtgaacgaatattatattttatattatattttttattttttgaaagaaacatgtgatgaataatgaaaaaattgaaatggagctttggaaagtatgttgtgtttatgcttttacttttccatttattcaaaacaatgaataacatgaaaataacaatg

SEQ ID NO: 6835 - DNA, 455 bp, Gossypium hirsutum
  Clone ID: GOSHI-09MAY01-C34901_5
catataataacaatcaccggcggatccccattcgccagttattaaacgcaggtctcattcatttccggtgcgtttaataatccctttatacgccatggacatgaagaaggtctccaccgccatcattgttgctgccgcctcaatgagcgccgtcatggccgcagatgcacctgctgcttccccttccgcaggtggttctagccctagctcctctcccgctttcgccccagcagctggcccggattccagcgtcgctgccgccactttgcctgttcttggatcattggttggggcttccattgtttctttgttttcttacattctccagtaagctgataaatgtattaaagtaaaagaatatatgcgatgaatattgaaaattaatatatggagctttgatcaatatttcttgtttcctatttttttggaataataataatatttcaatttttatt

SEQ ID NO: 6836 - DNA, 790 bp, Gossypium hirsutum
  Clone ID: GOSHI-09MAY01-C34901_4
ataacaatcaccggcggatccccattcaccagttattaaacgcaggtctcattcatttccggtgcgtttaatacccacgcggccgcgcaaataataacaatcaccggcggatccccattcaccagtaattaaacgcaggtctcattcatttccggtgcgtttaataatccctttatacgccatggacatgaagaaggtctccaccgccatcattgttgctgccgcctcaatgagcgccgtcatggctgccggtgcaccatctcctgccccttcagccggtggttctagtcctagctcctctcctggttccgccccagcatcaggaccggattccagcgtggctgccgctaccttgcctgttcttggatcattggttggggcttccattgtttctttgttttcttacatgctgcagtaagctacatgtatgaaaaatcaacatgtgaacgaatattttattattttattctttttgaaagaaacatgtgatgaatattgaaaaaattgaataaaatggagctttgaatagtatgttgtgttaaaaaaaaaaaaaaaaaaaattaaaaataattaaataaaatataaaaaaaaaaaaaaataaaaaaaaataaaatataaataatatataaaaaaaaaaaaaaaaaaaaaaaaaaaaaaaaaaaaaaaaaaaaaaaaaaaaaaaaaaaaaggggggggggtttaaaggaaacaaagtttttgtaggggggttgggaaaattatattttttttttagggaaaaaaaaataaaattaaggggggggtttttaaa

SEQ ID NO: 6837 - DNA, 610 bp, Gossypium hirsutum
  Clone ID: GOSHI-09MAY01-C34901_3
caaataataacaatcaccggcggatccccattcgccagttattaaacgcaggtctcattcatttccggtgcgtttaataatccctttctacgccatggacatgaagaaggtctccaccgccatcattgttgctgccgcctcaatgagcgccgtcatggccgccggtgtcccagctcctgccccttccgaaggtggttctggccctagctcctctcctgcttctgctgcagcaccgggagcggattccagcgtcgctgccgccaccttgcctgttcttggatccttggttggggcttcccttgtttctttcgtttcttactttctgtaatcatctaaatgtatgaaaaccatgcgatgaatattgaaaatattggaaatgaataaaatggagctttgatgaaaaaaaaaaaaaaaaaaaaaaaaaaaaaaaaaaaaaaaaaaaaaaaaaaaaaaaaaaaaaaaaaaaaaaaaataaaaaaaaaaaaaaaaaaaaaaaaaaaaaaaaaaaaaaaaaaaaaaaaaaaaaaggggggcgcccctttttgggggatccacaattttaacttcccgggggttggcaaatttaaaaagtttttttttataggggccc

SEQ ID NO: 6838 - DNA, 553 bp, Gossypium hirsutum
  Clone ID: GOSHI-09MAY01-C34901_2
ttcttatataacaacaatcaccggggaaaccccattcacctgtaattaaacgcaggtctctttcatttcctttacgtttaataatcccttcataacaccatggacatgaagaagatctccaccgccatcattgttgccgctgcctcaatgagcgccgtcatggccgccagtgcaccagctacttcaccttccgccggtggtgctgagcatatctcctctcctgattctggtccagcacctggaccagactccagcgtcgctgctgctgccttgcctgttcttggatcattggtcggggcttcccttgtttctttgttttcttacattctccagtaagctgataaatggatgaagaagtgcataatcggaggttgaagatgaagaacatggagctttatatttatactgtaaactggttactatatatatataagttatatttatatatgtaatcattttggggctctttttcaattccttggtaaaattttgcttgagaaattgtttttatatatttctgagtttttttaaaaaaaaaaaaaaaaaaaaaaaa

SEQ ID NO: 6839 - DNA, 611 bp, Gossypium hirsutum
  Clone ID: GOSHI-09MAY01-C34901_1
gcaaataacaacaatcgccggggaaaccccattcgcctttaaataaaagcaggtctccttcatttcctttacgtttaataatcccttcatagccccatggacatgaagaagatctcccccgccatcattgttgccgctgcctcaatgagcgccgtcatggccgccagtgcaccagctacttcaccttccgcaagtggtactgggcctgggcctatctcctctcctgaatctggtccagcacctggaccagactccagcgtcgctgctgctaccttgcctgttcttggatcattggtcggggcttccattgtttctttgttttcttacattctccactaaggtgataaatggatgaagaaatgcataaccggaggttaaagatgaagaacatggagctttatatttatactgtaaactgattactatatatatatataagttatatttatatatgtaatcactttggggctcaattgagatatgaatatggggaccttttcaatttcttgttaaaattttgcttgagaaattgtttttataaatttttgagtttttttaaaatattcgataattaattaaatcaatgaaatttaagtaataatcttgttttt

SEQ ID NO: 6840 - DNA, 461 bp, Gossypium hirsutum
  Clone ID: uC-gsflmaxxa026d07b1
ttctttaaataataacaatcaccggcggatccccattctccagcaattaaacgcaggtcttgttcatttctggtgcgtttaataatccctttatacgccatggacatgaagaaggtctccaccgccatcattgttgctgccgcctcaattagcgtcgtcatggctgccgatgcacctgctccctccccttccgccggtggttctattcctagctcctctcccggttccgccccatcatcaggaccagatttcagcgtggctgcccgagtcttgccggtccttggatcattggttggggcttccattgtttctttgtttttttacatgctacatgtatgaaaaattaacattgtgaacgaatattatatttaatatatatttttttattttttggaaaagaaatatattttttgtttttataattaattaatattctaattttatttcatttcttttttttc

SEQ ID NO: 6841 - DNA, 411 bp, Gossypium hirsutum
  Clone ID: LIB3828-011-Q1-K6-D2
gcaaataataacaatcaccggcggatccccattcgccagcaattaaacgcaggtctcattcatttccggtgcgtttaataatccctttatacgccatggacatgaagaaggtctccaccgccatcattgttgctgctgcctcaatgagcgccgtcatggctgccggtgcacctgctccttccccttccgccggtggttctagtcctagctcctctcctgcttccgccccagcatcaggaccagattccagcgtggctgccgcaaccttgcctgttcttggatcattggttggggcttccattgttactttgttttcttgcatgctgcagtaagctacatgtatgaaaaataacatgtgaacgaatatagtatataattagtgattaatggtagtgatgagaaacataagat

SEQ ID NO: 6842 - DNA, 373 bp, Gossypium hirsutum
  Clone ID: LIB3148-032-Q1-K1-G10
aacacacgtccgggtggttatagtcttagttacatacctggttccgctccatcatgaggaccggatttcagaatggctgccgctaccttgcctgttcttggatcattggttggggcctccattggttctttgttttcttacatgctacaataagctacatatatgaaaaatgaacatgtgaacgaatgttatattttattctttttgaaagaaacatgtgatgaatactgaaaaaaaaattgaataaaatggatctttgaataaaaaaagagcaaaatattaattttaataaatattaaacatgcttttgtaataaataatttttctatcactagctaataattaattgtttattcccttaatataaaatgca

SEQ ID NO: 6843 - DNA, 320 bp, Gossypium hirsutum
  Clone ID: LIB3148-045-Q1-K1-E5
catgaccggattccagcgtagctgccgcaaccttgcctgttcttggatcattggtgggggcttccattgtttctttgttttcttacatgctgcactaagctacatgtatcataactgagcatgtcaacaaaatatattattttatttcttttgaaagaaacatgtgatgaatattgaataaaattgaataaaatggagctttgaataccaaacaaaactaaaagaaaggctattacacatttttcccaaactaaatagcttgagaaagtaaggaccccatttaaaaaaatcaaagattacaaaaaataacaaggggcggc

SEQ ID NO: 6844 - DNA, 412 bp, Gossypium hirsutum
  Clone ID: LIB3145-016-Q1-K1-A6
gttttccaagtattcgtttcgggtactttagaagcttgctatagatttttcactcttgttaaagaatacaggagatgctcattttgctatactgtttgcaggtattcctagaatgtggtttccttatctgttcataatttgcagaatttatgaagttgaacccgaaaaatcggaaacttgcaagaggttgtgaaagatgggagcattcagttcaaaaaatcagcagataagttcttaaaatcgaattttaggtttcatgatgggatcatattgaactgggaaatgtaatcgcttgagcatttgtatcatttgggacagcttctgcacagttttattatggctgaaatttgctattatttggcatcacttcatgtatctgttcttttgtcaagcctaataaaagtttttggtc

SEQ ID NO: 6845 - DNA, 296 bp, Gossypium hirsutum
  Clone ID: LIB3135-022-Q1-K1-B4
acaacagatattgacatgtggtcctttggctgtatagttgccgaactctttttaaggcggtgtttattcccaggtgcttcagaatttgatcttctaaggcgaatgattgaaatacttggggtaaagactacaggtctcagtttcaaatgggaaatggtgctttttttggagctagttatattcagaatttatgaagttgaacccgaaaaatcggaaactttcaagatgttgtgaaagatgggagcattcagttcaaaaaatcagcatataagttcttaaaatcgcattttaggttt

SEQ ID NO: 6846 - DNA, 739 bp, Gossypium hirsutum
  Clone ID: GOSHI-09MAY01-C34411_2
atagctttccaaccctgttgaccgagcctagcacctgcaaacaaggcaaagaaaaggacagaaacaatggcagagaaacagttgtgacacaaaaacaaaataaaaaagaaaaatgttattattttaaaatgttgttattttaaacgattgtcttcccaaaggcataaagatcctgaagaactacccagcaaggaacaaccttgctctacctcaggaaacactgatgaggcctttgttcaacgggtgcatgagcatgctcctagaccaggcaaagaaccggaagaacaaccttgttcgacttccgatattaaacgcccggagctaactttcaagctcggcaaagaaaaagcttgctcctcttctcgcacatcagaaactcttgctcataataccaaggcgccaacgctgtcaaacttgtgtaccacttgccctccgaaattagctttacaattcaaaaaccttgtggaggattgggttatgcctacactgcaaagcgagttaaccagttctggcgatgatgactggctgtttcagaagaagcaaaacctcaacaccgaggttaaaacccacaaagatggaaatcttaactctaaccaaatgagctcggcaacttggccacgtgcttgcttcttgcccgaggccgatatatacgcagtaccattcacggtaccgctctgaactatattttgcataggagaaaaaggcctgcaaagtgcgagaaactagaaaaaaaatagtg

SEQ ID NO: 6847 - DNA, 998 bp, Gossypium hirsutum
  Clone ID: GOSHI-09MAY01-C34411_1
gtcttctctcttcaaaccctaatctgggaatggggcctcttttaattagcttttttctttttcaaatatttttcgggttttggcgggataaattcggggttttcattaatatcgcccaaagattttagagttaaaaattattaattttttttccgtttcttgatccgatcccggtgcgtgtgggagctagggttacgtttttccgtttattgttgttgttggtgaatcaacagatgtctcggtgttttccgtatcctccaccggggtacgtaaagaacggaatccgcgatgaggcactaattgaatcgattaagattaagagagaagaagagaaggccaagaaggaaaggaagaaagaaaagaaggagaagaaagaggaaaaacgggagaagaaagaaagagataagtctcgggacagtggtgaagctgaaagtaaaaagcgtggtcataagaaaaggcataaagacgagaggagcaaagaagatcaaaaaggaggagaccgtcaaaagaaaagagagaatgaagtggaatgttttgagaagagtacgcttactgaagaacatggtcaggcggttggaccacagaactcttccgatagcacccttaacagcagtaaaagacagaagctgagctcgcctccagacagtgggcaaaatcctggtgagtgtgtttgtatctcttcctttcctgagggaggctgtttacttgttgggtttgtttgcttcacatgggcactgatgttgtgtattcccaattgttattattaatgtgaaggaagcattatccggatccccacccgccttacccaaaggcataaagatcctgaagaaacaaacccagcaaggaacagccttgctctacctccaaggaaacactgatgaggccttttgttcaacggcgtcgcatgagcatgctcctagaccaaaggcaaaagaactgtatatgtaacaccctctgcgccccctccccgcatattaaacgcccggagctaacacaga

SEQ ID NO: 6848 - DNA, 533 bp, Gossypium hirsutum
  Clone ID: LIB3828-026-Q6-N6-B1
atataaatggatcatttaatatactgtgaagcttacatctttgatgagtgtattttttagtaacagtgaaggagggacaacctcacttgtatttgttcttgttgcacatttgttctctgcctgcttgtgttcttttgctactgtttagcttctttgtattggcttcccctttgtgttcataaactgacactttgtcttgtaatttgaagattaagagagaagaagagaaggccaagaaggaaaggaagaaagaaaagaaggagaagaaagagaaaaaacgggagaagaaagaaagagataagtctcgggacagtggtgaagctgaaagtaaaaagcgtggtcataagaaaaggcataaagacgagaggagcaaagaagatcaaaaaggaggagaccgtcaaaagaaaagagagaatgaagtggaatgttttgagaagagtacgcttactgaagaacatggtcaggcggttggaccacagaactcttccgatagcacccttaacagcagtaaaagacagaagctgagctcgcct

SEQ ID NO: 6849 - DNA, 483 bp, Gossypium hirsutum
  Clone ID: GOSHI-09MAY01-C34741_1
cccacgcgtccgcccacgcgtccgcccacgcgtccggttttgattcatcataatattctgaaatgatagtgttatccatacttctactgtaacagggcattctcgaaataaatgggtcattggttcagctatttctccacatccgggaccatttggggttgactgctaccttcctgtcctccatatttaccttggtaggcagataattccatgaaagcctccatattgtaagctttatttttgttggtagattcaggctctaaagttttttgtagaattttctgtagatggtttgtaaagcataagctctaggattttcatccgaactctgtaatagtttataggcacttcggaccgtgaattcacccgacatttcacctccccaaatgagaaaatctttatgaggtgttcgtgccagagggattcgaaggattcttacagcgtcttcttctgtgaaggaattatttctatgtattcatggag

SEQ ID NO: 6850 - DNA, 463 bp, Gossypium hirsutum
  Clone ID: GOSHI-09MAY01-C34731_1
cccacgcgtccgggagaattgttgaaccattgttgtctccaattgtaaccccagaggggcttgagctgcctccattccgggaactgaatgaattatgcgactctcttggatattttattaaggaaaaatgtataaataagggggaagtggtgcacgccgagcttctattgcagctagatcatgatttgttggtaggagaggggtttgatagaagtagaaaagtagcaaaaggaaaagccgcttcttgtctgttgaaggaccttgagaacagaggaatctcccggaagaaaaaggaaacatgactgtgtggattcaagtcaaaccatggatgatgactcgttagaaccaacaatccctaagaggcaaaggagagccgaaattcagttgcttgatgaatcaaagaaagcatgcagtgctacgcctgccaccccagttattgtaacagtaaaaacgaagaaaggag

SEQ ID NO: 6851 - DNA, 583 bp, Gossypium hirsutum
  Clone ID: GOSHI-09MAY01-C34721_1
gttctccagataagttgactctcctcttgccaatccttcagttgaaataatatgagcaaccatatttgcttctctatttgtaaaaaggaatacacagttctgaaatcctaggctaatactcttagaatcgttatatgagtgtagcaatctcagatctatcctcattttctttttaaagctttcgaatcaccgttcgagaatcacccttgatctccacctccctcagatccagttgtaaacccagctgtagcgctcgaatgcacggcaccgcttcagcagcgaagaccgcacactatcgaaggggatcgggcacctcgatccctccggagcaacccaactagtcacacagagacgcttgacaggacactcgcggaacacatgttccctagtttccactccatcttggcaccgacagcaagttgcagagcccctcatttgccgatattgaagattactgaaagtaggaagatagttgcgagaaattcgccaaactgtaatctttatttagatggaagatcaagagtccacaatttttttgtaaattgtttggatcttacttgtaaattattaagaccatcatgtt

SEQ ID NO: 6852 - DNA, 225 bp, Gossypium hirsutum
  Clone ID: GOSHI-09MAY01-C34661_1
ctcacttactggcttactgcctggctagatcttagcaagttgatacatgttcattgggcatggttgcatgaattagactatcttgcatgacattgggctcattatcctagttaggagaagccattgttcatgataacatcgacaatgttatgactatgtcttttgataaacaccttgctcgtattggaagagtgaagctgatcagcggcttaatctatgaggaaa

SEQ ID NO: 6853 - DNA, 604 bp, Gossypium hirsutum
  Clone ID: GOSHI-09MAY01-C34611_1
atcatcttcctcctaccatcgtccctcttctctctttctctcgtctctgcaaatcagcttgggtttgccttctcttctcatctcaggtctcacccaccgccgtgtccgctggtttctgccgcatctgacctgtatcccgcgtcggatcgtatcgacacgggtactgcaccccaaattgccgagtccaggttcattgttttcctcgattacgggtttttgtgtggtcagaggaaaatgggaagcaccagtgctcataaagtccccagtgatacagaaatggaaggttctgaggccacgatagaaataaaaataaaaacattggactctcagacttatactttgagagtggataaacagatgccagttcctgcactaaaagaacagattgcttctgtaactggtgtgttgtcagagcaacaacggctaatctgtcgtggaaaagttctaaaagatgatcagctcctttctgcatatcatgtcgaggatggtcacaccttgcacctggtggtcaggcagccagttccaccatcatctgatggctcaccatatcattcagcaaatgatcctgcgtcaggtacaagtcgtggtcatagtaatcatgccc

SEQ ID NO: 6854 - DNA, 1391 bp, Gossypium hirsutum
  Clone ID: GOSHI-09MAY01-C34631_1
ctcacgcgtccggaaaactttagggttgactgataagagatgggcatgtgggatgttggttcatgcattgtttcctgagtcgagttggaaggagaagaaagggaaaggaccggagttttcgaggaatatcggagaaagagcggcggaggttgttgatagatggaaagggcaattggatggtgaaaaagaagggcttacgccgggggaagcggttatgtttttgcatatggtggttggttttgaattgaaagagaggtttgatgaagggtttttgaggaaattggttttggatttttcttcgaggagggatatggctaagcttgctgctgctttggggtttgaggataaacttttacatattatggatgaactagtcaagaatggcaacgagatcgaggcagtgtacttggccagaccagctggccttacagagagatttcctcctgtttctctactcacgtcctatcagcagaattccaaaaagaatgccaccacaatattgaacaatggaaattattccgcagctgcaatggaggagtcaaaaaatgtggagctgaattcaattaaagctattatcaaatgcgttgtagaccatatgcttgaatcagagttttctactgactcgttaagaaagcgagccacgcagctggaaaaagtcaagtcagataggaaaaagagttcagcagccgctggatagcctcagaataaacgaagtcatagtgctggtagtgcccgacgcagtggaccacctgctttccgtcccgcaaaagcagctaagttttcaaatgtttatccccctttcaatcgccgaaacccagctccctcagcgcagcaaagcccggctgcacgattttccgcacagtataactatgttggccagaatgttttcgaggctcctactgctccttatgcatcagcatatggtgtgactcactcacaaagtcctgctgcagttactcaacagcactacgtacacccggtggaaaatttgggggtttccagttttccaaccagtggtgcttatgggggtcaaactagttatgtagcatatgactatggctctgcagcaccgtcggtgttccaaccctcttcgagtacccaacagtctagactcagtaccctagtgagttggaaacttgtcggtttcctcgaaatttggaagcccatctttttcatgtactcctatcttgttttcacaactagtaagtaatcttttcctattggagatggttcataatcctgaaaagaagtaagctgccttgtgtcctcatgtgttatcaacaatctaattaggaattatttcattgttagagaggatgaatagaggaaatattgcaataatgaaattgtaatatttagtaagcttttaatacatgttagatttttgccct

SEQ ID NO: 6855 - DNA, 383 bp, Gossypium hirsutum
  Clone ID: GOSHI-09MAY01-C34041_1
gtcagcctcacactttctccttccagcgtcgattcatctccatcagatacatgctcttagagcctggaggaatcttggccggagatccctcctcaacttcaatttcaacgaagagaggaggagaaatctgtagcgtgctcgcgcggtaaggtttctcagtcactggtcttactatgcttttttttaaaaatggtgaatgattcccatagaatacgaaacgatgtgaagaaaggtaaagagattcgaaggaagaaatcacatctgctattctttgccttctattacgtgtatattccgcgaatatgcggtagttttgcttgggggttaccgattacaaggttcaaaacttctgctttatagcccaaaaaaaaagggaaattcaa

SEQ ID NO: 6856 - DNA, 566 bp, Gossypium hirsutum
  Clone ID: LIB3828-016-Q1-K6-A9
aaatctttgaggttgagttctcaaaagggatttttttgatctgattatcagcctcctcaataggtagtgtcggttcatgactgggaaagtttagaacagataatatagagagaggttacattttcgtattttctcacacttttggtctgcaaaaaagcagatgatttatattttgatggtctgatctataatgttaatgtgttttgctattataccatcaaaattaaacttggatacaaggaaagagtatggatataattttggttctgtaatattattattaatttggaaaaaggatggtatgaaaaaaaaaaaaaaaaaaaaaaaaaaaaaaaaaaaaaaaaaaaaaaaaaaaaaaaaaaaaaaaaaaaaaaaaaattttggggggctttcccccttgggggtttattaaaaaacaacccccctttttttttgggggttttggaaggggaatttgggaaaaaaatgggaaaaaccccccccggggggaaaccccccccttcccctggaaattttcttatttgggccgaaacttctaaaccggttttccattttttgggggaagc

SEQ ID NO: 6857 - DNA, 424 bp, Gossypium hirsutum
  Clone ID: LIB3135-012-Q1-K1-E12
cccacgcgtccgtgttaatgtgttttgctattataccatcaaaattaaacttggatacaaggaaagagtatggatatatattttggttctgtaatattattattaatttggaaaaaggatggtatgaaatagtgacgtcacgtcatctgtacctttttctaataattttatgttatattaatatttttattttaaatttcaggattttatcctaaattttaatattttaatttagatttatttttttaagataaaattctaaaatttaaaataaaaatattaatttaatataaaattattgaaaaaatatacaaatgacgtagcgctattattttatacaatttttccctattaatttgacacaaaggaaaacaaagttgcatatcagttgtgtccgtgcacaattgaacttgtcttcgtgtgt

SEQ ID NO: 6858 - DNA, 797 bp, Gossypium hirsutum
  Clone ID: GOSHI-09MAY01-C34261_1
gcgttcgcccagagaaaggcaaaaatgagagggaaatcaattcttcgcccatttcttacctgtcgaactttcagtgtccgctctgtttcttcttcttcttcttcttctcggattctttttaatcagagttacttaatgtcaaccccccagacaaattcttcaatccctaaaaccccatttccagtttggacccctaaaaaccttaatctctcccgacccttctcggactcttctcctgattttttcaaaccatccttcatggaaaccgaaccggtgccggttccagagaatgttgtccccgttaagtcagaagaagagtttgatgctgcacttagcaaagctaaagacgaatctgtgccggctgttttctatttcactgctacatggtgtgctccatgccgattcattggtcctgtcatggacgagttggctcggagaactcctgaagtaacagtttataagatggatatcgatgaggaaggccttgcaagaaaactggaaaagctaaagattacagctgtgccaactgttcaatactttaaagaagggcaaacagggagggtgaagttgttggtggtgatgctacacgcataattcaaacaatgaagaaactttacaacatgaggtatcccaagacagatgattcatagcaagatgctacttcacggggaggaggtaaagaaaaaaactgatgcttgatgatgattacggagccttcctcaacctatctcaaaaaaaggaaataaagggttttagattcttttgtgaaatgactgtaaaattggtgtcgagagtac

SEQ ID NO: 6859 - DNA, 464 bp, Gossypium hirsutum
  Clone ID: GOSHI-09MAY01-C35971_1
aaaacccttttttttttccattttcaagacttcatttaaaaaaaaaagagagcttctgcttttctctccctcccattttcctcttagcctcccccatggccgaccatgggctcatcgggggcgtctcctcgcccatgcctcgaacggcagtcggtgttgagtgaaacgggcccttttggtcctcttccgaactggttcgaaggcggagccttcatagcccatcgcgacggaagagaaaagggaaaaccccctttttggttcgttgttcccttccacggccattggctgaacccccaggggttcaacgaccttcaaatcggcgagggaacgccggagcacccccaaacagtgaatcggaggtacgtctttacaattgttatctttgtattattatttcatatgtaaaaagaaatgaaaagaaaaaaaaaacaaaacaaagtaaaatacaaagattagaaactgaa

SEQ ID NO: 6860 - DNA, 448 bp, Gossypium hirsutum
  Clone ID: GOSHI-09MAY01-C35811_1
acgcccacacgttctaaaaaaacccatcgttttacatgaggatggtatttcttctattacgatggaggttgaagcaaatgggaaggtattcaagcacacatccacagcttgtgataagaagatggccaagaaactggctttcaaagaagttttgaagtctctaaagggagccaatttcagctagattttgcatttgacttgagcggagattgaacatattgccttgcagtatctttagcaaagcttgaaaacataggtgactgatgttcatgtaaatgaactataattatgacacacgtgagtgctcttattattaaacaatagtataattatggttactacaggaatatcgaattggcgaaggttgaaaatatcaataactattattattttattatttagtccggaaaaaaaaaaaaaaaaaaaaaaaaaaaaaaaaaagggcaaa

SEQ ID NO: 6861 - DNA, 315 bp, Gossypium hirsutum
  unsure (1)..(315): unsure at all n locations
  Clone ID: LIB3145-019-Q1-K1-C2
gcaaatgggaaggtattcaagcacacatccacagcttgtgataagaagatggccaagaaactggcttccaaagaagttttgaagtctctaaagggagccaattttagctagattttgcatttgacctgagctgagatcaaacatctattacattgcagtagctttagcaaagattgaaaacatgggggactcaacttgcagaagagtatttgggttaccttcctcaaccagggggacaaatgatgatatgattggtttcatgggaagagattatggngactntcaaaggaaaaatatgatcctttatgggtgaag

SEQ ID NO: 6862 - DNA, 580 bp, Gossypium hirsutum
  Clone ID: GOSHI-09MAY01-C35541_1
tatctgttcacttagtgcttgccttgttgctgttgtttgttcttcagaacaaccaccgttcagacccctcggaagccctgccggtgatggtgcttcagttattctaaaatccgttctcgaaagagccactcaagtcttaactcatccatccggaaatttcccaatgcctcattacacattctggagagcatcgtttgatgaattcttcactctcctcaccaaatactgtgtcaccaaatacgagtcgataatacaatcgatacacaaccagtctctaccaaccacagaagtaattggttcagaagctataagacgtgaaatgccttgcgagctcttacgtgctagtctccctcacaccaatgaagctcaaagaaagcttttaatggacttctcgcaacgttctgtcccggataacggatccaactcgcctgccggaagtaatagccaaataaactccgaatcagtaaggggctaacctaaaagaaaaaaacgttttagaggtcttttacactttgggttcttggttgaatggcacccctttttttattttttattatatcattttctttcttgtcctttt

SEQ ID NO: 6863 - DNA, 547 bp, Gossypium hirsutum
  Clone ID: GOSHI-09MAY01-C35511_2
cccacgcgtccgtgcctctcgaccagccatggctcgtcgatattcggaactacagggcaagagcgtcggcagcatgcaccgccactgcaacctgctatgtctgccactgcactactgcagaaagctgctcagatgggagcagcagcaagtaatgcatccttgcttcgcggtctcggtattgtggcgtcgtcagcaccacaagaaaatttacaatggggtcaggcacaagtcgaccccgacaatgcctccattgcagcagggcttggactcgggcttccctgtgacggaaggtcaggattaaaggaactgatgatgggaaccccagtgttcggtcctaagcaaactactctcgatttccttgggttgggggtggctgccggtggcaaccccaatgccagcctgtctgctctaattacccctatcggaggtggatttgatgctgccacggcggcagcatcgtttcgaggtggagattacaccgacaaggacattggaagaagctcgtgatacattgtgaagggttatctattatcaaaatatacggcat

SEQ ID NO: 6864 - DNA, 762 bp, Gossypium hirsutum
  unsure (1)..(762): unsure at all n locations
  Clone ID: AI055194.1
cagcagcagtggtgtatttgcaagcttatttgcctcctcaactgtatctgcaagcatacgacctcctctatcggaggaggatttgatgctgccacggcggcagcatcatttcgaggtggagattacaccgacaaggacattggaagaagctcgtgatacgttgtgaagggttatctattatcaaaatatacggcattgcagaagaaaacgatggcaatatataattccgataaagaatagcggttgccgaagttagcaccgagccatcaaagtggcaatcggggtctgccttctatgtaacaatggtggcaaaaacaacttccttgtangggtatatagccttngtagtacaaggtaaaagttgatgaaccagatgtatataagtatggtngtagttagaaaatttggaacacaacatctctgtaaagagatnttggttgctntcgacatgtntgtgtctgttntttttttttttttaaagcttggaaacatcagcaaaagagcggttttttcaagcttgaaaagccaacaatggagtggtcaaagtcaacttttaacctctgtattgngttcattatattacaattataatttaaatgttataaaaaaaaaaaaaaaaaactcgaggggggccgtaccaatcgnccatagtgaggttacaatcattggcggtttacacgtggatggaaaacctggtacccactatcgctgcaaaatcccttgcccatgctatacaaaggccacgatgcttcacatggaacg

SEQ ID NO: 6865 - DNA, 630 bp, Gossypium hirsutum
  Clone ID: GOSHI-09MAY01-C35531_1
gtttacttcatttctaaggtccctaattaattatctcccttcccttcaatcttcaaaactccattaatggctgactctcaacattcctcttctggtaaaacttatgtcaactctcaagaatttagttcagaggaggaaacaagtgaagaatcaaagcttaaattctctgaagatgaggaaacacttataattaggatgtttaatctggttggagagaggtgggctttaattgctggaagaatccctggtagaacagctgaagaaattgaagagtactgggataccaggtattcaacgagtgaatgagaaaaaaaaagcgacatttttaaagaaaggggcaaaatttgagggactggatggcaattatgggcaagagagcaatgatgggtatttgttgtagtcaccaaaaaagggtcaagaatatggtataatcggttcaacccgacttagaaaattgagcattgttgtttgatgttttggggttttctcttgttttgatgaacttttactatgggggggatgtctccgtggctttatatatactttcaatagcccaaggatgtttcttagtttattatgtgtgtcttttatccatttagtcttcaagttttaaatttttcagcatttggg

SEQ ID NO: 6866 - DNA, 656 bp, Gossypium hirsutum
  Clone ID: GOSHI-09MAY01-C35401_1
cggacgcgtggccggtcgcccccgcacaaagatggcaggcgcagcaaattgggtttccataaccttactgttttcagtatgtttatcggcgtcctatggtaagaggaccggaatctccaccatggctgacggagccgatgggtttcaaccaagcaacggttttccgcatgaagctgatcctgattcttcaacctctatcgatcctgatcctaccggattcggtgctggcataggtataggttatgaaagaagcccttactgtatcgactgcgacgatgtggatatcatgggcggcagcttttgcggcacctgcaattacggatgcccttaccgcaggttcaataatgggtgtggtggtggtatcgcttatatggatgaactcaaacgaacgattaaggaccttaccatgaaacttgatgccaatggtcttttagggaaaaagaaggccatgaatatacaagctatggcgccagaatcttcatagatttatatatagattatagaaactacggattctatacaaagagaaagaaaataaagaataaccaagcagcttgatatatgattgaattacaatgtgctagctgtttttttttatctttaattattatatgaataaaagagatttaaagtaagcttgattgaaaattatcatt

SEQ ID NO: 6867 - DNA, 721 bp, Gossypium hirsutum
  unsure (1)..(721): unsure at all n locations
  Clone ID: LIB3828-026-Q6-K6-C8
tcagtataagtttatcggcggtgccctatggtaagnagggacccgggaatcgtccagccattggctttgacggnagccgatnngggtttcaaaaccaagcannacggttttcnncgcatgaaagctgtatctctgttatttcttcannacctctatnncgatcctgtatgcctggggcgggatgtgcggtngncctgggnatttaggtattaggnnnttatgaaaagaaagcgcctgtacgtggtgatcgactgggcgacgatnngtggatatttcatgggnnncggcagcttttttgcnnggcgccctnngcaattaccggnnnatgcccttnnnaccgcagnngttcaaaataatgngnngtgtggnntggtggtattttgcttattatttggatgaactnnncaaacgaacgaattannaggacctnntaccatgnaaacnnttgatgccannatggtcttttnnagggaaaaagaaagnngccatgaatatacccaagctanttggcgccnnagaatcttcatttagaaatcttcatagnatttattatataggattatttagaaaactanccggattctattaccanaggaggaaaggaaaattaaaggaataacccaaggcagcctttgatattattgatttgaaatttacaaaaatgtgctnnagctggttttttttattttaattttatttattaattaacaatgaaataaaa

SEQ ID NO: 6868 - DNA, 416 bp, Gossypium hirsutum
  Clone ID: LIB3146-048-Q1-K1-E3
aaacggccgggccacgcgtccggggacacatgggtactgatcctaccttattttgtgctggcataggcataggttatggaggaggcccttactgtatcgactgcgacgatgtggatatcatgggcggcagcttttgccgcacctgcaattacggatgcccttacccgcagttcaataacgggtgtggaggtggtatcgcttatatgggttgaactaaacgaacgattaaagaccttaccatgaaacttgatgccaatggtcttttagggaaaaagaaaggccctaaatatacaagctatggcgcccgaatcttcatagatttatttatagattatagaaaaccctggttcttttccaagagagagaaaatttagaatatccccgcggcttgatatatgattgaattacaaagtgct

SEQ ID NO: 6869 - DNA, 455 bp, Gossypium hirsutum
  Clone ID: uC-gsflmaxxa055e10b1
gcctcctatggtaagaggaccggaatctccaccatggctgacggagccgatgggtttcaaccaagcaacgggtttccgcatgaagctgatcctgattcttcaacctctatcgatcctgatcctaccggattcggtgctgggataggtataggttatgaaagaagcccttactgtatcgactgcgacgatgtggatatcatgggcggcagcttttgcggcgcctgcaattacggatgcccttaccgcaagttcaataatgggtgtggtggtggtattgcttatatggatgaactcaaaccaacgattaaggaccttaccatgaaacttgatgccaatggtcttttaagagaaaagaaggccatgaatatacaagctatggtgccagaatctttatagaaatcttcatagatctgatatatagattattggaacttccggttttattcaaaggcatg

SEQ ID NO: 6870 - DNA, 413 bp, Gossypium hirsutum
  Clone ID: uC-gsflmaxxa057a08b1
tcgtttacgcgtacgcccacgcttcctgaacggactggggaaagttaaattgtggcgattacagatgcccttaccgcaggttcaataatgggtgtggtggtggtatcgcttatatggatgaactcaaacgaacgattaaggaccttaccatgaaacttgatgccaatggtcttttagggaaaaagaaggccatgaatatacaagctatggcgccagaatcttcatagatttatatatagattatagaaactacggattctatacaaagagaaagaaaataaagaataaccaagcagcttgatatatgattgaattacaatgtgctagctgtttttttttatctttaattattatatgaataaaagagatttaaagtaagcttgattgcataaaaaaaacctccttgttgtaat

SEQ ID NO: 6871 - DNA, 414 bp, Gossypium hirsutum
  Clone ID: uC-gsflmaxxa070e09b1
cccactcgtacgcccacgcgtgcgcacatagatggggggggctgcatattgggcttccatatccttactgtcctcagtagtgtatatcggcgggctatggtgagaggaccggagtctccaccatggctgacggtgccgatgggttttaaccaagcaacggttctacgcatgaagctgatcctgaatgttcaacctctatcgatcctgatcctaccggattcggtgctggcatatgtataggttatgaaagaagccctcactgaatcgactgcgacgatgaggatagtcatgggcagcagcttttgcggcacctgccactacaggtgccgtcaccgcatgaacagtcacggctgtacaagccaggagaccaactattgagaactgtcagagattgtttacaagcaaggaagcttg

SEQ ID NO: 6872 - DNA, 356 bp, Gossypium hirsutum
  Clone ID: LIB3493-006-P1-M1-B8
cggacgcgtgggtgaataaaagagatttaaagtaaataaataaataaacagctagcacattgtaattcaatcatatatcaagctgcttggttattctttattttctttctctttgtgtagaatccgtagtttctataatctatatataaatctatgaagatttctatgaagattctggcgccatagcttgtatattcatggccttctttttccctaaaagaccattggcatcaagtttcatggtaaggtccttaatcgttcgtttgagttcatccatataagctctaagtatctcacaaagatggctggcgccgcacattgggtattcataaccttactggtttcaatatgtttat

SEQ ID NO: 6873 - DNA, 1109 bp, Gossypium hirsutum
  Clone ID: GOSHI-09MAY01-C35711_1
cccacgcgtccgggaaaacctcctcgcccgccgtgattccgctctttcctctcaggtcatcttcctcagttctgttcgagggtgcagtaattctttttcttctctttctcccaagagctatcacattgaactgcagggatggctgaggagggtcaaaaagttatcttgaatgtgtatgacttgagccaaggacttgctcggcagctttcaatgaccttattagggaagcctattgagggaatatggcacactggagttgtggtttatggcaatgaatactattttggcggaggaatccaacattctcctgctgggacgacaccatatgggacaccaattagagtgatcgatttaggagtcacccatgtgcctaaggatgtgtttgagatgtatttgcaggagattagtccccgctacactgctgagacctatagtttgctcacccacaattgcaacaacttcagtaatgaggttgcgcaatttttagttggttccaacattccggactatattttgcagctacctaatgaagttatgagcagtccgatgggtgcacttttaatgcccatgatacagaatctggagacaactttgagggctggtgctgttcctcaagtaccccaattcaggccttctgtatctgctcagtcatcccagtccacaaccatcagtgtgaacgggtcctccattagtagtcagccaaaagaggtagataataaggtgaaagatggggagcaaccaaaatctgaagaagtcgagacatcagaaaagacagtaccaccttctaaaccaaccggcacaaaggaaaaatcaaaaagcaatggagctgcagcagaccctcttggagatgctcgagccaaggtccaagaggagataacccgtgaatttgccgcagtcatggcgagtggaacattgcgagctagtgaggcagcagcactagcaactaggaaagtgatgcagaaatatggacacttgaatgttgctatgcaacaaagttagaagcaggaaaaagaaaaaaacgatttttttttttgtaagtactgcgtttacctttgggaatctggatctggacaaaaatgaaatcattgtatgataactattcaacttat

SEQ ID NO: 6874 - DNA, 530 bp, Gossypium hirsutum
  Clone ID: GOSHI-09MAY01-C35691_1
cggacgcgtgggtttatgatcagatttaacactaagaaatggagtacaataagaagcttgctttggtgttggcgatgatggttgtggcagccaccacaacggcaaccgcggctcgcaacgagctgacggaaactctttccatcaaagcaagtttgaactcgagcttgactaacatcatcaagaaacccttgggcaatattttcgacgttaatggcgaacctgtagtggaatgcaacccagatgatcaaaactgcattaaaaaatatggattttgcttgtttcagaacaagatttgctgtgataactgcacgtgcttcgggttgtgcgtgctttgcggacaaaaataaagacagtgactgactgatcaggaagggatatcaggaatcaatgttttattgtttttctttttatacctaactatggtgcttgctggtactgttttcatgttttgttgatgtttgcgtacttaattattaaattatcaataagatcgccatttattaaaaaaaaaaacataaagggcggccgtt

SEQ ID NO: 6875 - DNA, 615 bp, Gossypium hirsutum
  Clone ID: GOSHI-09MAY01-C35651_1
ctaatctatttgatgttttcccgatataggtggttttgaacagaaagaaggaatttcggtgggagaggctggcacttttcatgagagttggtgcaactagaaggagtttgcagttggtggaagcttcaagtggtgaaacttccctagataatttacctagtaggactgatggtgtgtttgacgttgcatatttgttgctaaggcttttaccatctaaagacggtgtggtactaagaagacttataatgactgcggatggagcttcattagtacgagctgcagtttccaaagaagcgaaggccttccgattccaactgtgcaaaatcattgctgatatcctataccaacggatggtcaaagctcttgggcaacttgtgccagctagccagtatagttacaagttaaggcttggccggtgggcatcagaatacagagctacacccatccgctagattatccacaagttcaaccgtctatgactaccagtcccttttaagcgaccggcgactgaagctaatcttatccaagatcctcaattccgcaagaaaggaaccagcattgatgttacggttttactgggtttcatttgtcacattcatcgctgcttcagccctg

SEQ ID NO: 6876 - DNA, 546 bp, Gossypium hirsutum
  Clone ID: GOSHI-09MAY01-C35601_1
ggcgtttttgttccaatcttggcatgaataatcaagcagttaaagctgcccaagaagcagttcagaagtctgaggagtttgatataaggcggagccctatatcaattgcagctgcagttatttatatcataacacagctgtcggatgataagaagccccttaaagatatttctgttgctacgggagttgcggaagggacgatccgaaattcatacaaggatctttatccccatgtgtccaagataataccaaactggtatgccaaggaagaagatctcaagaacctatgcagtccttgaattacagaactgacaataatggagataccacaaacaaaaccctcaaagtgctgagttctctctctcgggatctcgtggaactctcggtacattccgataatgatcttctattttttttaatcctttttcatttttcttgcataactccgcccgtgcaagtagagacaaaggggggaagggcggaaatgtggaaaaagaagtctatggtatttactgattaatttttatgcatgttcgaagttttagc

SEQ ID NO: 6877 - DNA, 1555 bp, Gossypium hirsutum
  Clone ID: GOSHI-09MAY01-C35181_1
ccctcgcgtccgcccacgcgtccgcggacgcgtgggtttccattgaagcatttcctctataggtttttactttttaatcccttttcctcatttttgcaacaactttttttttccattgcacatataatttaagaggaaaatgactttcagtggaacaacagagaaatgcaaggcttgtgataagactgttcatgttattgatttattaacagctgatggcatttcttatcataagacttgcttcaaatgtagtcattgccatggtgtgttggtgatgggaaactattgctcaatggatagtgtcctgtattgcaagccacactttgagcaacttttcaaggaaactggcacttaccaaaataagaatgcaaaaccctcctctgaaaattcgaatggaacgggaaaggctcctagcaaatttgcatcattcttctctggtacacaagacaaatgtggtgcctgtaagaaaactgcataccccttagagaaggtgactattgaaggagaaaactaccataaatcatgctttaggtgttcacatggaggttgtgtgctcacaccatcaacatatgctgcattggaaggattcctttactgtaagcatcacttttcacaactcttcaaagagaaaggcacctatgctcatcttacagagacatctacttcaaagaaaagttcagctgcaccttcacctgaagtaaggtctgaagctgaatcagattccgaatcaaaaccaaaagaagatgaatcacaacctaaagccgaagcagcagaagaagaaatagaagcatgaagctagtactggaatactcattgaaccttcaagggaaatctttaaaacgcaggcaaattttaagtctaatgagacgtagggagggtcttgtgtacggcgtaattttttttcagggttcaaattttcaccattgcatggcaatcgaaatcaattggattcattctttcatcccaaaaaaaaaaaaaaaaaaaaaaaaaaaaaaaaaaaaaaaaaaaaaaaaaaaaaaaaaaaaaaaaaaaaaaaaaaaaaaaaaaaaaaaaaaaaaaaaaaaaaaaaaaaaaaaaaaaaaaaaaaggggcggccggttttaagaggacccaagtttacttccccgtgcttgcaacgtaatactttttttttggggcccccaaaattaatttcacgggccggggtttaacaacgtgggaacgggaaaaaccctgggtttcccaaattaaatcgctttgaaaaaaatccccttttccccagttgggttaataccaaaaaggccccccccgatcccctttccaaaaatttgcccaccctaaatggcaaatggaaccccccttttaccggccctttaaccccggggggtgggggggttccccccaggggacccgttacatttgccagccccttagcccccgttcttttcgttttttccctttcttttccccccactttccccggttttccccgtaaagttttaaatggggggctccttttagggtcccatttaagggttttacggcccctcacccccaaaaacttgtttggggggag

SEQ ID NO: 6878 - DNA, 435 bp, Gossypium hirsutum
  Clone ID: LIB3145-011-Q1-K1-D7
cccacgcgtccgatttttttccattgcacatctaatttaagaggaaaatgactttcagtggaacaacagagaaatgcaaggcttgtgataagactgttcatgttattgatttattaacagctgacggcatttcttatcataagacttgcttcaaatgtagccattgccatggtgtgctggtgatgggaaactattgctcaatggacggtgtcctgtattgtaagccacactttgagcaacttttcaaggaaactggcacttaccaaaataagaatgcaaaaccctcatccgaaaagtcaaatggaacgggaaaggctcctagcaaattcgcatcattcttctctggtacacaagacaaatgcggtgtctgtaagaaaactgcataccccttagagaaggtgactgtggaaggagaaaactaccataaatcatgct

SEQ ID NO: 6879 - DNA, 316 bp, Gossypium hirsutum
  Clone ID: GOSHI-09MAY01-C35131_1
tttggaatttcacagatgctagctggtgatcagggtggaaagtagatcattgggatccccgcctgatcaaatgacttttatcttcacttctgcttacttgatggttaaccacttgaatgtcaaataatgctcaagaacctattatttgcctatgctttagggaataagaggcatttatttttagtatataagtagtaaaaacctgtcatccttctttaggtcttgaaggaggcctctaggctttatgctgcaagttgggtaagagatattggtcatgatcttagaccaaacgattataagaaggatgatgggactg

SEQ ID NO: 6880 - DNA, 906 bp, Gossypium hirsutum
  Clone ID: GOSHI-09MAY01-C35121_1
tcctatgcatttttcttggagaagggtcaaattgctcaattagttgatccttacctagtgaagaaaaagcaaacccagcatttccatcaccttgaaccagtttgggaaattgaccctgatacctcggaccattaatggattcatatgggttggtgaacaaatgttgaagccagagacagtatggtagtggatcccaagctaatagttctgaaccaatccagggttcctgaagaaaaaaaccaaactcatacccctctagagatgaggcagaacatatgcagaattgcgaatgccgttcgtgtgctgtcaactttaggtttcagtatcgaggcagatttgatcctggagacaggtgagttgagcagcacagtgaaaattgacatacatgacatgctaggctcagagtttcatgttttggttgcggaaagggaagctgagcggagaagcttggtgggaaagcggaaaagatgatgtgatattcagctggcagcagttatctttcaagggaacatcgcttatttgcttccatgccaggaaaatggtgaacctagtgcaaaattgttcccgttcataaccattataatttattttatagaattttaatggttccggcagagatggaagaaacgccatggaatttagaggtttatatatgcaaggaaaaactacattaaaatgtagagctgagactgttaatagcatctagaatgaaggttccagtaggctgggaaagaagaaacaaatatgagctttacatttttaaattatgaaagaattagtgaatgtccatgatgaatccgaggaacacaaggcaagacaatttctttgtaatggtaattgaataatgagatttaggatgtaaattaaacacttgccttcataatctatctatttgagtgtagctcg

SEQ ID NO: 6881 - DNA, 604 bp, Gossypium hirsutum
  Clone ID: GOSHI-09MAY01-C35281_1
cggacgcgtgggcggacgcgtgggcggacgcgtgggcggacgcgtgggcggacgcgtgggttccaatttcattttcattttcaagttttatattttacggcggaaaaattagaataaaggagtccaccatgtgggtggagatcatctgtggacttgtcttttaccgcttgttccgccgcttcttctacggcgcccgcccccgcgtccggttcgaaacctctgattttgatgctactttctccgtcgccaatagacttgaaaagcttcatggtggaaaggtgtatgtggggcttcacattccggatgtcaacactggctctcgacagaatatcgatattgttcttgttactaaaagagaagcagcagttatttctgtccagaatctagcagggttcatttctatacatgaggatggtagctggacctgtgaaggtggcagtagccaaagtgcagtgtgtagtcctgatcccgtttcagaggctaaaaaccaagcttcagtcctcgaatcatatattgaacaaaggggagttgctatacctgaaggatatttttcatacaaagttgtaattcctaatccaaaattccgtaccttttataaacattt

SEQ ID NO: 6882 - DNA, 1359 bp, Gossypium hirsutum
  Clone ID: GOSHI-09MAY01-C35271_1
gcgaaatcgttgctgttggcgaagtaaagcagccaatgccatatcttttataccttcaaggagggcctggttttgagtgccctagaccaactgaagccagtggatggatacttaaagcatgcgaagaatttcgggttgtattgatggatcagcgaggaacaggtttatcaacccctttgactccatcatctatgcagcaaataaagtctgccccaaaactggctgattacttgacacgttttcgagctgacagtatcgtgaacgatgctgaattcatccgtgttcgtcttgttcccgaagctaggccttggagtgttctgggtcagagttatggtggtttttgtggtgttacttatctgagttttgcaccccaaggtttgattcttgtgcttttaacaggagggatacctccaattggagatggatgtactgcagattctgtgtatagagcttgctttgagcagattattcatcagaatgaaaaatactataagaggttccctcaagatattgaaaattgtccaagatgttgttacctttttggcagaatccgaagcaggcggggtacctcttcctctgggggagggggggcccaggggctgcaatttcttggtctatctggtttaggatccagcgctggttttgaacgcttgcattatatgtttgagagggcctgggatccaattttagttcctggagcaccaaagcaaatcagttcgtattttttaaatacatacgaaaattgggtgtcctttgatacaaatccactttatgctattctccatgagtcaatatactgtcagggtgcttcttcgcggtggtctgctcacagagtgagggctgatcacgagagcaaatttgatgcaatcaaggctgcaaaagaagggcgtcctgtgctttttacaggggagatgatatttccatggatgtttgatgaagttaaagctttgaggcctttcaaagaggccactcaattattggctgagaaggaagattggcctccactgtatgatggcactgcattgaacaataacaaggtaccggtagcagctgccgtatactatgaggatatgtatgttaacttcaagctggtcaaggaaacagcgtctcagatagcaggaataaggttatggataaccaatgaatacatgcattccgggcttcgggatggaggtgggcaagtttttgatcacttgatggggatgctaaacgggaagaagcctttgttctgaaatcaaaattagggtattgcctgtgtacataatgaggaaccaaactttgttcggcaccaagcttgtatttgatacgattgttgggtttctttatcataatcagccgcactggaagtgtatttgtctt

SEQ ID NO: 6883 - DNA, 377 bp, Gossypium hirsutum
  Clone ID: LIB3145-012-Q1-K1-E12
cccacgcgtccgctccgatagaagaaaaaaaaaagaaaaaaagaaatttgcaaagtcgcggcgaaaactcaaatgctaaacgggaagaagcctttgttctgaaatcaaaattagggtattgcctgtgtacataatgaggaaccaaactttgttcggcaccaagcttgtatttgatacgattgttgggtttctttatcataatcagccgcactggaagtgtctttgtcttaaaaaaaaaaaaaaataaaaaaaaaaaaaaaaaaaaaaaaaaaaaaaaaaaaaaaaacaaaatataaaaaatttaaaataaaaaaaaataaaatattaaaaatttccttatcccaaattttaaaaataaaattaatggggggggccct

SEQ ID NO: 6884 - DNA, 313 bp, Gossypium hirsutum
  Clone ID: LIB3145-019-Q1-K1-C7
cccacgcgtccgctccgatagaagaaaaaaaaaagaaaaaaagaaatttgcaaagtcgcggcgaaaactcaaatgctaaacgggaagaagcctttgttctgaaatcaaaattagggtattgcctgtgtacataatgaggaaccaaactttgttcggcaccaagcttgtatttgatacgattgttgggtttctttatcataatcagccgcactggaagtgtctttgtctttaaataaatataacaactaaaaaaaaacaaactactaaacaaactgagcgaactactacagcaagaatcaaatgcgccctaaac

SEQ ID NO: 6885 - DNA, 737 bp, Gossypium hirsutum
  Clone ID: GOSHI-09MAY01-C35261_1
gcgtgtcatagcagagagactctctgaggaagaaattggtggcttgaaagagttgttcaaaatgattgatactgacaacagtgggacgattacatttcaggaactcaaagatggtttaaagaaagtgggatctgaacttacagaaacggaaatcaaggatttaatggaagctgctgatattgataacagtggaacaattgactatggtgaattccttgctgctacactgcacataaataagatcgagagagaggaaaacttagttgctgctttctccttttttgacaaagatggtagtggttacatcaccattgatgaacttcaacaagcttgcaaagagtttggtctatgtgatgtgcatttggatgagatgatcaaagaatttgaccaagataatgatgggcgaatagactatggggagtttgctgcaatgatgagaacgggtgatgggggtatgtgaatgacagatcattgtgaaccaggctgactctagcatatccgatggccttggaatgaatgactctcacaggatattatatgaaaccatgtactggatataatgccgattcatgttttttccacacagtattcaataaatgagagccttcaagtgtaatgaatctattgttgatattaatgcctttgtcactgaatcgatgttattccttgattacgtcatatgttgtctaggtgttttatctttgtgtggtgaattttaccatcttgtggtgtctttt

SEQ ID NO: 6886 - DNA, 631 bp, Gossypium hirsutum
  Clone ID: GOSHI-09MAY01-C35231_2
ggtgttcggtgtgataaacatgtcaatacagaaacccagtcagatgaaattttggattattctcatgttccaggacgggcagtttttcatcgcgggcgccataggcatggtgcaagagccacaacatctggtcatcgggtcaacttacttttgtggtgcagaagttcggtcttccgtgagctgaggaaatatcagaaagatttctcaagctggtgtggagagtgccaacgtgagaaaaaggaaagacagtctcaattgccgctaccaaacaggaattactgaagagggaagcggacccggcggcttgaactcagtttttggtaccagttattttgtaaaatagttgggagtcgtggcattgttataaagaacaagcaatgttcattgtaatgttgttagcgaggcccattgccaagttgggatatggtaaagatgatcatgtgtgtctgtcttcattgtacgtcaatgctgtacatatgcatcttgaacttgaactatataagtgtgtttcgccagtctgtctgcaaattgaacctgcaatttgttctgaacattccaaattacccaatcattagggaaagaattgaaaagcttatggcttacattgtttctcccgagggaaagagaaaac

SEQ ID NO: 6887 - DNA, 1331 bp, Gossypium hirsutum
  Clone ID: GOSHI-09MAY01-C35231_1
gttatatgcctcccccgatgctctccctctctcgtgactccaagctccattacatgcgcgatattattcttcgttactctcctgaaggcgaacgtactcgcgttcaaaagcagcgagaatacaggcaaaagattatatcacactatcagcctctacaaagggaactgtatgccatgcatgcctcaaacttctttgcgccctcatttctcaaagcaattaatgagaataaaggggaaagttttagaagtataatggctgaacctactcaaggagtttttacatttgaaatgcttcagccccatttctgtgaattgttgttatctgaggtagaaaacttcgaaaaatgggtccacgagacaaaattcagaatcatgcgaccgaacacaatgaacaaatttggtgctgttttagatgactttggtctggaaaccatgcttggcaagttgatggaggactttatccgacctatatccaaagttttcttttctgatgtgggtggatctactctggattctcatcatggttttgttgttgaatatggagttaacagggatgttgagcttggttttcatgtagatgattcagaagtcaccttaaatgtttgcttgggtaaacaattttccggtggggacttgttcttccgaggtgttcggtgtgataaacatgtcaatacagaaacccagtcagatgaaattttggattattctcatgttccgggacgggctgttcttcatcgcgggcgccataggcatggtgcaagagccacaacatctggtcatcgggtcaacttacttttgtggtgtagaagttcggtctttcgtgagctgaggaaatatcagaaagatttctcaatctggtgtggagagtgccaacgtgagaaaaaagaacatcagcgtgtctcgatatctgctaccaaacaggaactgctgaagagagaagggaaacctgccacataactcaagctgtttgcaagtttttgggtgtgacattgtaaaaataagcttcttgtgctgtacatccgtgtcttgttttaagtatcgcacctggctagtaggccctttatcagccgactacaaccataactaaactctcttctagcaagttaagagttcaatgtgtattcgctacacaaatggcaggcagtagcttccttctacatactccattgtttgttcaatattgttggggtctggaaaattgtcgacaaagctttagttgttggggttccccactacgaaagttattttgagatgggttcttttaagaatgttgagtttcccagggagggaatgtaagtgcattgtttttgaagaatatttagatttctacat

SEQ ID NO: 6888 - DNA, 327 bp, Gossypium hirsutum
  Clone ID: uC-gsronu33B089b08b1
cccatgcgtccgtcaaagcaattaatgagaatgaagaggaaagttttagaagtataatggctgaacctactcaaggagtttttacatttgaaatgcttcagccccatttctgtgaattggtggtatctgaggatctgaatgcttatgtagaaaactttgaaaaatgggttcacgagacaaaatttagaattatgcgaccgaacacaatgaacaaatttggtgctgttttagatgactttggtctggaaaccatgcttggcaagttgatggaggactttatccgacctatattcaaagatttcttttttgatggggggggagctactc

SEQ ID NO: 6889 - DNA, 667 bp, Gossypium hirsutum
  Clone ID: GOSHI-09MAY01-C36911_1
cggccgcgtgggttttgaccttaagcaaaagaacttgccaataaccccaaatcccacagctgagaattgcgaacccaacagatccagatgtcccagattaaccctaaatccacccgtctctgttagctagttcctttcttcggccggtggcccaaatcctctgcgtttcgaatcagagttatactcaaaggacaagccaagcccccgaaacaatgccattcaaaacaatgatagaggttgaaccaccgagtccgttaagatatatcatcggagcagcggtcatgatgatcggagttgtattgcccgtcggatacatgatgttccgtaacaaacgcgtcccttcctcttcttcttattccaaacagacgaacaaagttttaatatagagattttggtggaagagagacttgtctttccgcgaaattggtgatttaaatttgaagaaagatgagggaagcattgaaagaaggccttgaatggcctgcagatacaaaaaatgtaaatgaattataaaacccctcggttctagtttgtgatagttgtgtgggtattaattgaattctataaaagatgaaatctgttggtttgttcaatttatgggcttgattagtttaactatttagcaccataatatatcaattctatgatattggggtgttttactact

SEQ ID NO: 6890 - DNA, 886 bp, Gossypium hirsutum
  Clone ID: GOSHI-09MAY01-C36841_1
gctggcacgcctgcacgctgcccgtgccttactggctggacccacgcgtccgctccgacactccaaacctcgacgaggaagattccaacagtccacccacttttgattccgacgactgcgactctgattgtgattccacgcacttcactgatctctccgccggtcttcgtgtcttctctgattcgattcttaggatggagctggccgggatggagatggtcaaggcaatggaagcttcccgatgtgaggcggagaaacggagggcggaatccgaggccgaattgactcggatgatgttgcgaactcagtcccagatcgcttcgtttgtcgccggagatgctgataccaggaaaaggaagcgtggagcagaagacgaaccaagggattcctctgttagacaaggagctttgctgctgagcttgttgcagtgcaacttaatcttctgaagtttcactaaaattaattgaataatctttggtttatttatcaaaattgaggatgaaaatgaagctgggattttatatactatatctatgtaatgtactgattattatattaaatgaaaaatctctctttctccgcaaaagtcctttgtctctctacaaatgtaatcacctaaagtgctgtagattgcaaagacaacaaatctaatggaggtttcttcatacgagggcttgggttttggtttctctgctctgcaacactgagcagggcctgtcttcgattagtggcacttctcatgtattcctccaaaggtgggagagctggttgttctttgttatttgttgcttgtcctcgaataagccgtgaaaaccatgaatgaatgtaaataatagaacgtggtatttatagatcattttttattttttttttttttaaataattt

SEQ ID NO: 6891 - DNA, 412 bp, Gossypium hirsutum
  Clone ID: LIB3146-058-Q1-K1-F3
actgatattgtctacccaggcagagcaaagtctttactcgtagcgttaatggcggacccgggtgctggacccaatccgaccctcaccaaagacgataattgtctaaaatacacctgcgatgctgggtttttctctaacccacacccctccgacactccaaacctcgacgaagaagattcgaacagtccacccacttttgattccgacgactgcgactctgattgtgattctacgcacttcactgatctctccgccggtcttcgtgtcttctctgattcgattcttaggatggagctggccgggatggagatggtcaaggcaatggaagcctccagatgtgaggcggagaaacggagggcggaatccgaggccgaattgactcggatgatgttccgaactcagtcccagatcg

SEQ ID NO: 6892 - DNA, 810 bp, Gossypium hirsutum
  Clone ID: GOSHI-09MAY01-C36821_3
tcttccacgcgtacgcccgcttggtcttcgggggagtgttttaaatattgaggctttctcgaactaagagaactctggctttccttttgatgcttggcttttggaggagtctctcttggtgcagttcacaaagtgggcgattccaccggctggactagtcttgggaatattgactacctcaagtgggcttccaccaagaattcccatgttggcgactctcttctttttcagtacaaccctcaattccacaacgtgatgcaagtgacccccgcccgtcccccctcgcgccccggaacatctgccatgcgcctcctacacctctggatcccgactccgtaaccctcaaaaaggcctggcccacttttatttcctttgcgggggtccaggccactgccaagccggccagaaaaggcgacgtatggggcaaatacatcggccacagccccaattgcgagtcccagcccatccactttagggtcatcgcctgcataccccaccgtcagaaatgttgggtgctcctggcccagctcagagcagtgactatgaccttgttactcttcacgaattccctggcatggagtcttgtcgcggttggcggcgtcttctggcatgtcttatacttctaggctggcgctccttacaattgtgggtgtgggcggggctacacattggtgatgagaagcacctgatgcaaacaggtataaatgtattaggtaaggctgtgaagttttaaaagataggcagcatttcaatcactgctattgttgcaaaatcagaattactgagagattctcggaccccctgaatttt

SEQ ID NO: 6893 - DNA, 818 bp, Gossypium hirsutum
  Clone ID: GOSHI-09MAY01-C36821_1
cggacgcgtgggcggacccgcgcgcttacttttatattgccaagctcttctggggtttccccgcttgttcctctcttaattgcgttctatattgaggatggcttgtactaagagaactctggctttccttttgatgctggcttttgtgggagtctctcttggtgcggttcacaaagtgggcgattccaccggctggactagtcttgggaatattgactacctcaagtgggcttccaccaagaatttccatgttggcgactctcttctttttcagtacaaccctcaattccacaacgcgatgcaagtgacccacgacgatttccagtcatgcaacggaacatctgccatcgcctcctacacctctggatccgactccgtaaccctcaaaaggcctggccacttttatttcctttgcggtgttccaggccactgccaagccggtcagaaagtcgacgtattggtcaaatcatcgtccaaagccccaattgcaagtcctagcccatccactttaggttcatcgcctgcaaacccaccttcagaaatgttgggtgctcctggcccagctcagagcagtgccctgtctctcttctcctccaagaattccctggcatggagtcttgtcgcggttggcggcgtcttcggttttgccttctacttctaggctggcgctccttccaattgtggttgtgtttggggctattttgggatggcatcatcatatttaggtcatatggtattaatggattagggttgcttggttgccagattaagttaatgtttaattaaaaaaaattatataacttttactttttaacctt

SEQ ID NO: 6894 - DNA, 552 bp, Gossypium hirsutum
  unsure (1)..(552): unsure at all n locations
  Clone ID: uC-gsronu33B155b12b2
ggagcagaatgtggcacttgaccttgccagaagagaagcagagacggccatccgtgctcgaaatgatttcttggctgttatgaatcacgagatgagaaccccaatgcatgctattattgctctatcttctttactgcaggaaactgaattaacacctgaacaacgtctgatggttgaaacgattctcaagagtagtaaccttctttcaactctaataaatgatgtattggatctttcgaggctggaagatggcagccttcaactagaccttggaacttttaacctttttgccgtattcagagaggtccttaacttgatcaagcccattgcatctgttaaaaagcttcatgtttcattaaatttggctccggacttgcctgaatatgccattggtgatgagaagcacctgatgcanacaattttaaatgtcgttggtaatgctgtgaagttttcaaaggagggcagcatttcaatcactgctattggtgcaaaatcagaattactgagagattctcggacccctgaatttttccctgtgcctagcgataatca

SEQ ID NO: 6895 - DNA, 1001 bp, Gossypium hirsutum
  Clone ID: GOSHI-09MAY01-C36581_1
tcggaaaatgataaacaaggcgcatgtgtggacgtatttctatctattgatctacattttgctttcttccggcgttatattgtataacaagtgggttctgtctcccaaatacttcaattttccttttcctataacgttgacaatgattcacatggcattctccggaatcgttgcgttttttcttatccgtgttttcaaggttgtagctcctgtcaaaatgacgtttgaaatatatgcaacatgtgtaatacctataagtgccttctttgcttcaagtctttggtttggtaacactgcctatttgcatatatctgtggcttttatccagatgctcaaagctctaatgccagtggcaacatttttcatgggtgtaatgtgtggcactgataaaccaaggtgcgatgtgttcttaaacatggtgctggtcagcgttggagttgtcgtttcctcatatggggaaattcattttaatatagttggcacagtttatcaggtcacgggcatcctagctgaagctttgaggctggtcttaactcaagtcctactgcaaaagaagggcttgactctaaatccaatcaccagcttatactacatcgcaccctgcagttttgtgtttctttttgtgccttggtgtttactggagaaagcctgggatggaagtttcacagatacaattcaatttctggatctttttctccaatgctctttgtgctttagctctgaacttgtccatattcttagtaattggaagaactggagctgtcaccattagggttgctggtgtcctaaaagactggatactgattgccctttccactgttgttttcccggagtctacaataacagggctcaatataattggttatgcaatcgctctttgcggtgttgtcatgtacaactacataaaggttaaggatggtcgtacacctcagctcccttcggatagtattcctgagagattaacaaaggattggaagttggagaaaaagtcatctgacata

SEQ ID NO: 6896 - DNA, 580 bp, Gossypium hirsutum
  unsure (1)..(580): unsure at all n locations
  Clone ID: LIB3583-004-P1-K1-B5
cccacgcgnccgcccacgcgnccggnnnnaatattctaagcattatttattttctgttctcaatacaggtgtggtaacactgcctatttgcatatatctgtggcatttatccagatgctcaaagctcttatgccagtggcaacatttttcatgggtgtaatgtgtggcactgataaaccaaggtgcgatgtgttcttaaacatggtgctggtcagcgttggagttgtcgtttcctcatatggggaaattcattttaatatagttggcacagtttatcaggtcacgggcatcctagctgaagctttgaggctggtcttaactcaagtcctactgcaaaagaagggcttgactctaaatccaatcaccagcttatactacatcgcaccctgcagttttgtgtttctttttgtgccttggtgtttactggagaagcctgggatggaagttcacagatacaattcaatttctggatctttttctccaatgctctttgtgctttagctctgaacttgtccatattcttaagaattggaagaactggagctgtcaccattagggttgctggtgtcctaaaagactg

SEQ ID NO: 6897 - DNA, 248 bp, Gossypium hirsutum
  unsure (1)..(248): unsure at all n locations
  Clone ID: LIB3585-065-P1-K2-D7
cttcaattttccttttcctataacgttgacaatgattcacatggcattctccggaatcgttncgttttttcttatccgtgttttcaaggttgtagctcctgtcaaaatgacgtttgaaatatatgcaacatgtgtaatacctataagtgccttctttgcttcaagtctttgattgtttatgatatagcgcttgttacctactggcttaacagaatatttacagctatttttctatatcacctccccat

SEQ ID NO: 6898 - DNA, 410 bp, Gossypium hirsutum
  Clone ID: GOSHI-09MAY01-C36781_2
cccacgcgtccgcccacgcgtccgcccacgcgtccgagcggtttaatctacgaggaaacccgtggggttttgaagatcttcttggagaacgtgattcgtgatgcagtaacctacaccgaacatgcgaggaggaagactgtgactgctatggatgtggtttatgcactgaagaggcagggcaggactttgtatgggtttggtggttaaatgatttagggaatagatcttttagcgatgttggcggatctggacttgttgtcatgctagcaagaatgtttgagtttaggattagggatagggcttgtaattaaggggtgctattgggattactggaaattataatttggtcgtgtagttttctttggtgatttgtaattcgtgccatgaattgcagattttaaatgaaattg

SEQ ID NO: 6899 - DNA, 665 bp, Gossypium hirsutum
  Clone ID: GOSHI-09MAY01-C36781_1
cccacgcgtccgtcaataagtagcgtaggttataatctaagttcaagattcgaagatgtcgggaagaggaaagggaggcaagggactgggcaagggaggagcaaagcgccatcgtaaggttctccgtgataatatccagggtatcacaaagccggcaattcggcgtttggctcgtagaggaggcgtcaagcgtatcagcggtctaatctacgaggaaacccgtggggttttgaagatcttcttggagaacgtgattcgtgatgcagtaacctacaccgaacatgcgaggaggaagactgtgactgctatggatgtggtttatgcactgaagaggcagggcaggacattgtatgggtttggtggttagatgatttagggattagatctttctgcgatgttggcggatctggactagttctcatgatatcaagaatgttttaggattaggaatagggcttgtaattaaagggtgctattgggattattggaatttataatttggtcgtgtggttttctttggtgatttgtaattcgtgccatgaattgcagattttaatgaaatttggaatttaatttcggccaatactttaactaacaaaaaaaagaataaaatttaatattaataataatgacaatcattttgaacactagaaaaaataaaattg

SEQ ID NO: 6900 - DNA, 337 bp, Gossypium hirsutum
  Clone ID: uC-gsflnu33B100h11b1
aagatcttattggagaacgtgattagagatgcagtaacctacacccaacatgcgaggaggaagactgtgactgctatggatgaggtttatgcactgaagaggcagggcaggacattgaatgggtgtggggggtagaagatctagggattagataaatctgtgatgttgccgagatctggactacttgctcaagatatcaataatgtcagaggattaagaatagggctggccattaaagggtgctattgcgattattggaaattataaaatggtcaaggggacttgttctgtgatggggaattaaggccatgaattgcagatgttaacgaaagtggga

SEQ ID NO: 6901 - DNA, 846 bp, Gossypium hirsutum
  Clone ID: GOSHI-09MAY01-C36741_1
gtgatgtccctggaataaaaaggttacttccatccgggtggagggaatcagaattttttaataatatttatgaactagtgggagtgccggttgttaccgtgcaactccgatacaatggctgggtcacagagttgcgggatctacaacgggcaaggcaactgaggcaagctataggccttgataatcttctgtatactccggctgcggatttctcctgctttgcggacctagctctcacttctcccgaagtttactacatcgagggacaaggttcattgctccaatgtgtcttgacaccaggtgacccgtacatgccgttgccaaacgacgaaatcattaagagagtagcgaagcaggttttgcctttattcccatcagcccgagggtttagggaattactgggtcatctggttgtcaaaatcggggcaatctcttatatcgcgaaggaccctggaaaagatccattcagacctgatcagaagacaccaataaagaacttctttcttgctggatcttatacaaagcaggattatatagatagtatggaaggagcaactttgtctggcaggcaagcatcagcctacatatgtgatgctggggaagggttactggccctgcaaaagaagcttgctgcaattgaatctcatcaacagttggaaacttcaagttcttctgatgaattaagccttgtataaatagttcatttatatacacactcgtatacatttattgtaacatttatgtaaccaaagctactagaaaaatatagaaaaaaatgactcctttctcatatattcgctcccccccacgctgactgcaatgattttagagttgaaattagtttaa

SEQ ID NO: 6902 - DNA, 478 bp, Gossypium hirsutum
  Clone ID: uC-gsflnu33B146e02b1
tcgctctctcgtccgtccacgcgtccgcaaaattggacaatctctataccgcgaaggacctggtaaagatccattcctacctgatcaaaagacacccataaagaacttctttcttgctggatcatacacaaagcaggattatttagatagcatggaaggagcaactttgtctggcaggcaagcatcagcctacatatgtgatgccggggaagagttagctgcactgctaaagaagctcgtgatggttggttcttaagaacagatggaaacttcaagtgttaccgatgagttaagtcttgtatgattgtttatctgtttagtaatattactcaaaccacctaaaatggccgagacaaggtggctgactgtgccttcattcaacatgttatataacatttatattatcaaaggaagttattaggaaattacttttacacccttcctattttctatgctcataatctcaatgaattttccc

SEQ ID NO: 6903 - DNA, 372 bp, Gossypium hirsutum
  unsure (1)..(372): unsure at all n locations
  Clone ID: LIB3146-005-Q1-K1-C2
tcgtccacgcgtncgcgggataaaaagaatgcttccatcagagggggaggaattgcaattttttaataacatttacgagttagtaggagtgccagttgttaccgtgcaacttagatacaacggctgggtgacagagttgcgggatctggagcagtcaaagttgtccttaaactcattaaaaggaaactgaggcaagctgttggccttgataatctcctgtacactccggatgcagatttctcctgctttgcagacttagctctcacttctccagaagattactacatcgagggacaaggttcattgctccaatgtgtcttgacaccaggtgacccttacatgccattgccgaatgatgaaatcataaagaga

SEQ ID NO: 6904 - DNA, 433 bp, Gossypium hirsutum
  Clone ID: GOSHI-09MAY01-C36731_1
aaagactcttccgtttgagttccacataattggaacaattttcgagtaatacatttttttaggtggactcagatggacaaaagaaacacaaattttagctactgaacagaaaaacgccatctaaatggttcctcataattcttaacttcattcgtctcttaatgcattagtctatgaaacaagtgggccgctggctgcatcaccagtaagttgaagatctgcatctgctatagaagaaaagttgaaaatttttttactggattatagagatcttatatttcttttttattcatggagtgaaggacttggttattttaataaatccttcaaactcatggaccattgcatttgtgaacattgaatatgccttgaatattttgatatccaatcgaatgcactctacatttaccaagaaaaaaaataaataacaaaa

SEQ ID NO: 6905 - DNA, 897 bp, Gossypium hirsutum
  Clone ID: GOSHI-09MAY01-C36691_1
gattaatattttgttgcagatgcgtgcttgatcctggggacaagattgttgactgtcctccaaccttcacaatgtatgaatttgatgctggtgttaacggggcacaagttatcaaagttccaaggaagccagacttcagcttgaacatagaagcaattgctgaggctgttgagcatgaaaagccaaaatgcatatttcttacttctccaaataatcctgatggaagtataattagtgatgaagttctcttgaagatccttgacatgcccattttggtggttctagatgaagcttacattgagttttcaggaaacgaatctaggatgcagtgggtgaagaagcatgataatttaattgttcttcgaacatttagtaaaagagctggtttagccgggctccgcgttggatatggctcattccctttgagcataattgagtatttgtggagagcaaagcaaccatacaatgtttctgttgctgctgaagttgctgcatgtgctgcattgcagaacccaaagtatctagagttggtgaaagacgctttgatacaagaacgggataggcttttcaaacttctcaaggaaataccatttctgaatccatatccaagctattctaatttcattctatgtgaggtgacatctggaatggatgctaagaaattgaaggatgacctttcaaaaatgggtgtaatggtccgtcactataacaacaaagagttgaagggctacatccgtgtgactgctgggaagcctgaacaaacagatgctttaatggagggcttgagtcggctatcttgatttcattcctttgctaaatgttccaggaaattaaatctattttctaatgacaaatgaaattgtgttttattacttcaaattcagacctttgattttc

SEQ ID NO: 6906 - DNA, 488 bp, Gossypium hirsutum
  Clone ID: GOSHI-09MAY01-C36641_1
gttcgtcttccctaacaatctgtgaaagatgagcagcgatgacagtttggacaaacttataaaaggaacgtttgttgatccctcgccggaaaatagcctggaacttagagaagaccttcgacagtatgggattccggcaactgaagcacaaattggcgcgaacgtaccgccgttgccgggcgatgataatcaggtcaactcgttgagcttgatgtcgagtagtagaatgaaaagaaacctggaatttgttttcgataatttctcgggagataaaggagaagaaaaaaagaagcagcgccgaggaggcttttatatcggtgaatcatcaaatccgcagcaacaacgaggaacggaaagtaaagaagaggatttatctaagctggaaatggtgaaagctttcaaggatcgtattaacagccagataaagatggacgacatggcatatatggaatctgttatcttgattttccatcagatgatagagatga

SEQ ID NO: 6907 - DNA, 607 bp, Gossypium hirsutum
  Clone ID: GOSHI-09MAY01-C36661_1
gaaaataggaattagggttttcattccaagcccaatcacacccaaccaattaaaattttctgcaattcttggtgttggactcttttcttttttcggcaatgaagaatcggaatcccaaaggaaatggaaacggcgaaggaagcacaatggatggcccaaagccgatgactatgaagaagaaaaagaacatgaatcgattgggaggaagtggaactggtctttcgcttcaagcatttgccaatgccaaatccactagcaatcactacaatcccgccttaattaagaaaaaaaaagagttctataaaaatgctaagtatgttaacaagtttaagaagtcattaaagcaacaaaatcaggggaaaaacagtcttccttcagcccaaagaaccatagagtatgagaatgaagacataaacggtagtgggcaaacaacatgaataataagaagaagaagaatggttcacagagtttgagacaagtgtccgagaagcagtgggaagagaaagaaaaggcatggatggagagagaggcagctatgcaagttaagaaggagcagagagagaaagctgaagctcagaggaaggttgaaggaaaatacagttcaaaa

SEQ ID NO: 6908 - DNA, 638 bp, Gossypium hirsutum
  Clone ID: GOSHI-09MAY01-C36611_1
cccacgcgtccgcccacgcgtccgcccacgcgtccgaaggaactcattggcttacgaatcggactctcccaccagggaaaaaagttccatcttttagataagcgaaaatgcgtgatcatctcgttgtatgcgtggaccgccttacgaaacccgaaagtttgaaaccagtgaatgaacccgaggttgcgggaccttcgggtgaaggttcttctgtagttgctgagccacatgtttgtgctattgatgttgaggaagtggaggaacacggttcgtgtgacgaagaagaaccgctcatccagacggttgaatgccgtatctgccaggacgaggacaacattaacaatttggagacaccttgctcttgcagtggcagtttgaagtttgctcacaggaaatgtgttcaacggtggtgcaacgagaaaggagacataacgtgtgagatatgtcatcagccttatcaaccaggatatactgcgccaccacctccccctcagccagaggttgctacaattgatatcagtgagtggacggtcgctggtgcccctttgggtttacacgaccaacggattttagctgtggcagcagaacgccatattttggagcaaggctatgatgaatatgctgagcctgattctagt

SEQ ID NO: 6909 - DNA, 407 bp, Gossypium hirsutum
  Clone ID: LIB3145-030-Q1-K1-A12
cccacgcgtccgagacggttgaatgccgtatctgccaggacgaggacaacattaacaatttggagacaccttgttcttgcagtggcagtttgaagtttgctcacaggaaatgtgttcaacgttggtgcaacgagaaaggagacataacgtgtgagatatgtcatcagccttatcaaccaggatatactgtgccaccacctccccctcagccagaggttgctacaattgatatcaggccagtatttacaatcatgcacttacctaaaaatagacatgatgaagatcggtgtcgctcaaactttgcttgctttgtctttcctgtttgtgaggatctatatatgtcggaacctgttcagtgatccgtagggatggattactattgtatgctaatcacctctgacctctta

SEQ ID NO: 6910 - DNA, 682 bp, Gossypium hirsutum
  Clone ID: GOSHI-09MAY01-C36171_1
aaaacatctgtgcccccaggaaggcgtctgattgttccactacaaatctgtgttttgcaaggtttgtcttttgtgaaagctcgcttgctttccatggagattcctgcatatgtgggcgagagtccttccaatccggctaatgtggatggtaaccattcaaataaagctgttggctatggaagtaagataaagagattagtgaagattgatccctttagaggaagctggggattacgttttcttgaactagacatgtctaatccacctgatatggtgttcgaaggaagtgcttctgtcttggaaaaaccaagcaatgaggacgacgtgtctgttggctatgctgctgaatatggttatccccaaacaagaattgtcagagaatacttctcaagggttgtaataccacttgagcattttaagttaccttttcttgatgatgtcattcttttcaaaagatctgcagcttgacgagtccaccaggtgtaaaaattctagtttgtccgatagaagcacaaaatctgaactaaatgcttccattaagagccatcgtttccagaataaaagtcacgtggcaatcaggtgcagaacagctgtggagaactgaatatcacagatgctatacgagtagcccttccatcatccatcatggatatactattgccagatcctctgacttttagcc

SEQ ID NO: 6911 - DNA, 996 bp, Gossypium hirsutum
  Clone ID: GOSHI-09MAY01-C36001_1
gaaaactgaaaaacaaaaacgcaaacaaagccctaacaatcttagatcagaaaagaaaagctggccaccatggaaaaggaggtagagtttgagaaaaagaagcacggcctgaagcacatagctttcgtgagggtggctgcgatccgcactctggtttacgtctcgaatctttacgggtatgctaaacagaattctggtccgttatggtccaccgcggggactgtcgaggttgctgtcgccgccatcgttggccccgtctacgagaaatataaggacgttcccgatcatcttcttgtttttcttgattccaaggtagatgaggcttcacagaaatatgacgagcatgtcccaccagcgggtaagcaaatggtgaaccaagccaaatatttggttcacatggcagcacaaaaggctcacaaattaatcgacgaggctcgaaccaacggtgcgcgcggcgctttgcactacgccgcgaccgagtacaagcagctggttctggttagctcaaccaaggtatgggtaaaactgaatcgcagttctgctttccactcggttgcagagaagatcgttcccacagcttcgaatttgtccgataagtataactgtttggttaaagacttgagcgggaaaggatatcctgtgtttgcgtatctgccattgattccggttggtgagctgagaaaggctgtcaagcaagctgaagccaaggacaaagcacatgtcactgccgacactcgtaaatcggattccgattctggttcgggttcgggttccgattcggattcaggttagggagctttttctttggtttgtctcgtctcgtctcatgaactcaagaatctgatgctctaaatcataactttttctctttaaaaaaatgctcataaatcaaatttttattttgacggttccgccatttaaagttggatgttttttaatctttgcaatggtataaatcaaatatgaattgctaaaaaaaaaaaaaaaagggcggcc

SEQ ID NO: 6912 - DNA, 563 bp, Gossypium hirsutum
  Clone ID: GOSHI-09MAY01-C36341_1
cccacgcgtccgctaagccagctgcttcatggcttgatgattttcttgtatggttatcacctgaggcatttggttgttgtcggaagtttacaaatggatcttactgtccaccagatgatcaaccaccttgctgttcaccagatggaggttcttgtggcttaggcggagtctgcaaagactgtacaacgtgcttccgccattcagatttggttaatgatcgcccatctacagagcaattcagagagaagcttccttggttccttaatgctctcccatctgctgattgtgccaaaggtggtcatggggcctacactagcagtgtggatttgagtggttatgagagtggtgtaataaaagcatcagagtttcgtacttatcacacaccacttaacggacaaggtgactatgtcaatgcgttgcgagctgcaagggagttcagctcaagaatttctgattcattgaagatgcaaatctttccctattcagtcttctatattttctttgagcaatatcttgatatttggacgattgctttgacaaatattgctattgcgctaggtgct

SEQ ID NO: 6913 - DNA, 592 bp, Gossypium hirsutum
  Clone ID: GOSHI-09MAY01-C36331_1
ctcgtctctcttcacacatccctgccgccatttgaaaccctaaattaacttactcgtgaggttgagttgtctgctctctgcctcttcatcactctgctatatttgattctgttttggatcctaccgctatttgaaaccctaggcgaagccattagaatgggcggaaaaagaaagacgaacgaaaacgaagggatggaaggagaggaggatagcaaacacaacattaaaaagatgaagaaggagaagagtgagatacttccttcctccattaaaaacaaggagaagagatctgctgtacacgccaaactcaagcaccaaaagaagctcgacaaacgcaagaagcttaaagctcgcgacgccgccgctaaacgcgctctcgagctcggagaagagcctccaccgaagcaaattcctcgcactattgaaaatacgagagaggctgacgagacagtttgcatgcctgatgatgaagagctgtttgctggtaatgacgctgatgagttcagtgcggttctaaagcaagatcgtaccccgaagatattaatcacaacttggccgtttcaattccacttaggggaccggcttttatcac

SEQ ID NO: 6914 - DNA, 501 bp, Gossypium hirsutum
  Clone ID: LIB3583-037-P1-K1-C2
cggacgcgtgggctttccagaggagaaaccagacccttttagggtttcctcgaccctcaaacgccgccgctcagcctcgcgccaaggctccgactgcgacggagatagcgccgactcgacgaatccggcgagagaggtaagtccttcctcccttctttatattttaaattaaaaataaataaaaaataaaataaaaaagaatggaaaaaatgaaaaaaaatacgattcaccttcgaaaatctctttgtaatctcagtattttctccctatttttgtatttcagtattctctcaatacaatattggtcccccttttacatgatctaaatcggcctttaaatagccgaaaaaagacaataaaataagcaaaaaaatcttctcttcaatattcgttgcgttttttactgttactctgttattgctgcgttgtacgtccccttttttcgcaggttcggtggccgtggagtgcgcccgtacgtggaggcgcaactcgcgcgaatgg

SEQ ID NO: 6915 - DNA, 418 bp, Gossypium hirsutum
  Clone ID: LIB3145-023-Q1-K1-H4
tttccagaggagaaaccagacccttttagggtttcctcgaccctcaaacgccgccgctcagcctcgcgccaaggctccgactgcgacggagatagcgccgactcgacgaatccggcgagagaggttcggtggccgtggagtgcgcccgtacgtggaggcgcaactcgcgcgaatggcggctactgttgcggagggggtagtgcgcaggctcgcggcggctggagagggtttcagcaaattgatttcgctgggctagggtttgagaattggctgttgggcctgttattaggcctgctagtgttggactggttatttttttggttgggtttattatgtgggcctgggcattattgggcttgtacaatatatatatatatgaaattagtggtaagagagaggcaatttcattttctccaac

SEQ ID NO: 6916 - DNA, 643 bp, Gossypium hirsutum
  Clone ID: GOSHI-09MAY01-C37981_1
agaattgttatgtctacagagcacggttggaagaaactgaacaatactggagaggctggtatgaaggcctttcagaaaaatttctatcttctcctgttccaaagctcttgcttttagctggcaccgatagactggacagagcgctcacaataggtcaaatgcaaggcaagtttcaaatggtggttgttagacatacagggcatgctatacaggaggatgtacccgatgaatttgctaccttgataatcaattttatatctcgtaaccgcattgggcctcatggagttgagatcccaggacttgctcggccgaacccagcacaagcccaaggccaatcacccgcacaaacaaaatcatgaaacagtcgcaatgatgaatgttattagctgctgacaaacttcgttctatggtcttggctagctttaaactcgtgcactttcttttgtttacttgcattgcatgggactattttaaagctagagtagcggaaaaggaaaaagtggagttatcacgttttgataataatgggtattaatattatgtgataaccaaaaacacctaatcaagtgagatctctgctatatataaaatagtctatgtatgttttctggttgaggagaaaaaaaaaaaaaaaaggcggccg

SEQ ID NO: 6917 - DNA, 638 bp, Gossypium hirsutum
  Clone ID: GOSHI-09MAY01-C37831_1
ggaaaacagaggtaaatagttaagcaagctaaagaaatggcaaaagttcaacagatcactcttgtttccttggcgatctgcctttcaaccctcctcggcttcgctgccgccgccaaccctgaagagaagttcatcgttgaaggccgagtttactgcgacacttgccgtgttgaatttgagaccaaaatcagcaaaccaattaagggcgcatcagtgaaattggaatgccggaacattaccaacgagaaaatcgtgtcgcacagccaagacgtagttaccgacgaagccggaggatacaagatcgaggtgaaaggtgatcacgaagatgagatctgtgaagtgagcctggtgaagagtccaagggctgattgcaatgaacctactgaagtatggaggaaagccagggtggtcttgacaaaggcagatggtgtcagtgggacttatcgattcgccaacaatcttgggtacatgaagaaggaagctcttcctgaatgcaaaaaagttctcacagaaatgggatattttgaacttcaagatgaaattggggaggaagttgaaggtcattctactgccccatgatctcacttcttaaaacctttgcctatgtaataaaaattaattgcatctatagtaatatt

SEQ ID NO: 6918 - DNA, 818 bp, Gossypium hirsutum
  Clone ID: GOSHI-09MAY01-C37791_1
cttcactgaccatcccaaacggttcccatccccgctaccgaacccattgtttctcctttgagtaatatggaaaggtttttggaatcggtcatgccttccgtccctgccctctatctctctaagacgacgatgagagggtggcggacgtgtgacattgagtttgagccatatttcgtgttaggtgatttatgggagtcgttcaaagagtggagtgcatatggagtaggtgtcccactaattttgaatgactgtgattctgttgttcagtactatgtaccttatttatccggtattcaaatatactccgattccaggaaaatgtcttccaagtcaaggcaaccaggagaggatagtgatagtgactttagggactcaagcagtgatggtagtagtgattgtgaacctgaaagaggaccaaatgttttgagagaaaaaacaaatcacatggcaagtgagatgtctcttaggatggagagattgttcatgggagaccagcagatgcttcaagaagacttctctagtgatgagggtgaatctgttaactctcggagttgtttaatttttgagtattttgaacaagacactccttatagccgggaacccttagccaacaagattgcagatctggccttccaattccctgaactgaggacactaacaagctgtgatttgttgtcttccagctggatttctgtggcatggtatccaatttacagaatacctactgggcctacattaaaagatctagatgcttgctttctgacttatcattatcttcatacacccatagtggacgggcaccggccatgacatgttcc

SEQ ID NO: 6919 - DNA, 439 bp, Gossypium hirsutum
  Clone ID: LIB3147-043-Q1-K1-E9
cccacgcgtccgcccacgcgtccgcccactcttccgcccacgcgtccgggccttccagttgcctgaattgaagacactaaaaagctgtgatttgctatcttccagctggatttctgtttcatggtatccaatttacagaatacctactggacctacattaaaagatttagatgcttgctttctgacttaccattgtcttcatacacccataggaggtggagaaagtgctcaggcaccttttattacttgtcccaatgacatggatgatgttccaaagatgtcattgcctgtctttggtcttgcgtcatacaagttcaagggctccttgtggacacctaatggaacaactgattgtcacttggcaaacagcctctttcaggctgctgacaattggttgagacttcttcatgttaatcaaccacatttcacaatttttctg

SEQ ID NO: 6920 - DNA, 458 bp, Gossypium hirsutum
  Clone ID: GOSHI-09MAY01-C37691_1
cccacgcgtgcgcttctctattggttaatacaacagccttagcgatcaactgcatttctccgtcccccaggcttttcctttctaataaactcaatggcccgccaaattgttgttcttgctttggtcaccatggccctctttgccttggtttccaccgctgctgcggccaccgcccccgcacccggtggcagcccctcaggttcacctggagatgctagctcccctccttctcaggccagtgctcctagtcccagcagcggtgctgctcttgagctctcggctattgttggagttggagcagccgccgttgctggctactttatgttctaaatacgatatgtaggggccgctttcctagttttgatatcatcacaaatgctgtcttattaattatgttgagatttgcataatttctttacgaataaagaaaaggaatggattggtgcatagattggtgc

SEQ ID NO: 6921 - DNA, 464 bp, Gossypium hirsutum
  Clone ID: GOSHI-09MAY01-C37121_1
gtaaatctttcatttcactcattctcgggcacagcagagcagtcaaaacctcctgttaacgagccaactaaattgccaggagctccacagcccagggaacctcctgctgtggtagctactgagtcgtcgacattagaagatattatcatgttagaagataattcaaaaaaggatgaacaagttgatggtagtggtagtccggaagtcaatgatacacctgggaaggagagttgtatggcaccttcctctgaaacggagaaagaagatgagaccatgtctttatccgatttatctaccagctttccaacagtgcttcgagtctatgaatcaaaacagaaaagcagttacagtgaagaaatcaaacgaagctagtggtgttttgcaaataaagccatttgattatgaagcagcccggaaagagattaagtttggagaagatgcagagacagaatcaggaagccatg

SEQ ID NO: 6922 - DNA, 639 bp, Gossypium hirsutum
  Clone ID: GOSHI-09MAY01-C37081_1
gcgttcgccccgcgtccggttagaggtgaaatcaaaagccggtgtaaagctccttgttaaggaggtgaaatctcttcgaacctctcaatctgaattgaagcaagaacttagccgtgtgatgaaagaaaaactaggattggagagggtggtgcaggaggaaaagaaaaggatggagcatgccaatgctgccggtgctaaactgcttcacgagtgcaatcttctttgggatcggctccaagaatgcagtgttaatttcctcagtgaggaagaggataagttgaatgttgatacttcatctccatctgatgctctggatctcttaacaacttctgataatcgaattggtctccttcttgctgaggcacagctccttgcacaagatgtagaaaattcggtggttagatcggaagagagccataagatgaaagacggtgataaaagaattgatgacgagctgaggaagatgctaacagatatgtttgttgataatgcaagattaaggaagcaagtgaactcggtagtacgttgtgctctcaatgcatatgtgaagactgacgaagatgatgatgatgatgatagtgaagaagaagagcagaggaagaggaggaaacccatttgaggaaaactgttctgagcaaa

SEQ ID NO: 6923 - DNA, 859 bp, Gossypium hirsutum
  Clone ID: GOSHI-09MAY01-C37041_1
gtttggaagcataagtacagaggaacacacaatacaccaaaggaagcgcttgtcatggggaggataggtcaagggccttgtgtccgacagtgatgaagaacaattttttatcacaaagagccgagacccttttacatagcttgagggttcgattccccggccttccacaaacagcattggatatgaacaaaattcaatacaataacgtgggtgggcagtcaattcttgaaagctactcgagggtgatggagagtttggctttcaacattatggcaaggatagatgatgttctttatgttgatgatgctataaagcaacgtgctgcggcagaaacagtttctcttttcagcaggagcggtttcagtggtcgtccaatccaaaggcgattgtctcctagtcccttctcaattcaacagactccttatgcctctcctttcgcaacacccaccttttgttctccaaccccactcaccggaagtccacgacgagcagcttcctctttgaagagaaatgatattaaggaagaacctgaccggaaatttgaaaaaccgttcgcgagtgaatttgagaaggtgtggtcgtatacagatagcctgagcgcgagaagggtttcagaaaatgctccggagagagactgaaatcaaagattcatgatcccatgtaagataaagttctataaatggaagtaactcagtttagttgggtgtctgactggttaagaaatattggtatatctagtatttgtatatttctttgcattaggaagattagtcctatttttcgagtggagtcgaagctagtatcgatcggtttgacatgtctctctatcccgaacctaaaagtttgattcaattaactt

SEQ ID NO: 6924 - DNA, 585 bp, Gossypium hirsutum
  Clone ID: GOSHI-09MAY01-C37351_1
cccacgcgtccggtttctaacaaaaatttaaacttttctttgctctctctctgcaggtccaagtcctgtcaagtcccggcgagctaccaccgccctccgccgcgtctccgttgccggcgaccgccgtgaggtgcagaggcggtggagtagaggccacttgctgtcgacgtgattagaggcgatgggatagggtttcttagtttaggttttttctttttttaattttgtgtttgggctatgggtatttgggctgtaatggacttgggttaatgggtttagtgtgggtatttagggcccaaaattgggcttgtacatggactattctagtgctaatggatgcatcagagaatggatgagaacaaaaaggtcaaaaatactgccctacccattaatctgcagtgtttaacattttccgttttccaaagttgcctatacagatatatgtacatactaatatactattcctacggcttatttagagattaaacaaatgaaagccacaaacttgtgcttgcaaataagcaaatcttatttaggctaaatcagaaaatcgggacctctcctttgtacaaatggcaaccaata

SEQ ID NO: 6925 - DNA, 613 bp, Gossypium hirsutum
  Clone ID: GOSHI-09MAY01-C37361_1
tttacgcgtccggttagcggctgccgcacccaagcccaatattgatgttcccaagccaaaagagtttaagggaacaaggtccgcaagagatgtggacaactttggggggggaatcgagcaatacttctgtgccaaaggcatcacggaggatgtcactaaggtaactactgctgcgatgtatttatctgacgttgctttgttgtggtggcgtcgtaggtccactgatgtgagacgtggtgggtctgaaatcgaaacatgggaggagtttcgatgtgagttcaaagcacagttttacacagagtatgccgaggatgaggctcgggcaaggttgcgtcggcttgcgcaacaaggcactgtgagggagtatgtacaggagtttagcgagcttatgctccaaatctcagatatgggggagaaagaggcatttttttcctttatggacggattaaaaccgtgggcgaagcaagagttgcagcgccgaggagttcaagagctcaccaaggctatgtcagtagcagaatcacttgctgaatttggtgggaggaaagacaattccaattcttctaaacccagattaaagggtaatagtgggggagataaagaaaggcccact

SEQ ID NO: 6926 - DNA, 649 bp, Gossypium hirsutum
  unsure (1)..(649): unsure at all n locations
  Clone ID: AI055432.1
gtaagtatagaaagaaaaactaacagcagctagtatagagagagagaaaaattaaaagagagcttgtattgtattttatttgtgtgtaataaaattagtatttgagttatttttattattatgcttccaacaaatagaatccagtgctatgaatctttatcaactttaatggataataagtttaatatttttcggggtaccttaatgggtgggtgcgcggtttttggcgttccctctttaacatttccatacttggttgaaaacatttacaatcaggcgaaatggtgtgggccaaaagaagaagagccatcatcccaatccacgctatcacagcatatccacacaatcacggtcaaaatccacatgaaagtctttccgttgaaagggcatccagtaatcagaagcaagatgatgctcatcgatgccatgaaactattgngtnggcagcaaggtactgacttgtatactttggttcgtatctgctatattgaaagcctgctttggaaacctttcgtggttgttctgtgaaatccttggctataaccccggaggggttagccattggaaagactggtccataaggagcccccatataacaaatcctttcttggacaaactccttgagagtttgcgcccagtgaatctgtgg

SEQ ID NO: 6927 - DNA, 575 bp, Gossypium hirsutum
  Clone ID: AI054833.1
gtgagtttgagagaaaaaaaaggtgttgtaagtatagaaagaaaaactaacagcagctagtatagagagagagaaaaattaaaagagagcttgtattgtattttatttgtgtgtaataaaattagtatttgagttatttttattattatgcttccaacaaatagaatccagtgctatgaatctttatcactttaatgattataagtttatatttttcgtgtagcttagtggtggtggcggcttttgcgttccctcttttacattttctactttgttgaaaacatttacaatcaggcgaatggttgtgggccaaaagaagaagagccatcatcccaatccacgctatcacagcatatccacacaatcacggtcaaaatccacatgaaaagtcttcgtttgaaaggcaatccagtaatcagaagcaggatgatgctcatcgatgccttgaaattattgggttggcaccaggtactgacgtatatactgggtttctattggcttttggaaggtccgcttttgagaatcttggggctgtcttggaaatctttgccttaaccccagagggttagccagtg

SEQ ID NO: 6928 - DNA, 635 bp, Gossypium hirsutum
  Clone ID: GOSHI-09MAY01-C30811_1
cggacgcgtgggcggacgcgtgggcttcctctttccattttcaatctcttctttcacatctgggcgaaagatatggacaccttgctattcacttccgaatctgtcaatgagggccaccccgacaagatttgcgaccaggtttcagatgctattcttgatgcatgcctagaacaagatccagaaagcaaagtagcttgtgaaacttgtaccaagacaaacatggttatggtctttggcgagatcacaaccaacgctaaagttgactatgagaaaatcgttcgtgatacttgcagaggtatagggtttacatcagctgatgttggccttgatgctgacaactgcaaagttctagttaacattgagcaacagagccctgatattgctcaaggagttcatggccacctcaccaagaagcctgaggaaattggggctggtgaccagggtcacatgttcggttatgccactgatgaaacccctgagtttatgcctctaacccatgtgcttgcaaccaagctcggcgccaggctcactgaagtgaggaagaacaagacatgcccatggctgaggcctgacggtaaaacccaagtgactgtcgagtatcgtaatgagggtggagccatggtccctattcgtgt

SEQ ID NO: 6929 - DNA, 1288 bp, Gossypium hirsutum
  Clone ID: GOSHI-09MAY01-C30591_1
ctgggttttttctcttccctctctttttttgataaatcactaatcatcttttttctgcatgcaacttccttttcttggataatagggagggggaaaagaaaaagtaaccggatgttgataagcagcaattcgtaagacttatccgctggctgagaaccccgcccccgccccccttggtttgcactgctaacgatttatcagcgtggaaggatttcccaaaggggctcacggtccttcttcttgatggagacaccaattctgctgcagagctaaaatcaaagcttgaagctatggacctatattgtttattccttttccatgcaacgaaaatgaagctcttgcggcagtttcgagtagaccctgaaagcttccatgtagccattgtagaggtctgtacccacagtaacaatgggcgtttcaagtttcttgaaacggcaaaggacttgcctaccattatgacttcgaacattcattgtattagcaccatgatgaagtgcatagcgcgtggtgcggttgaattccttaagaaaccactttctgaggataaactaaggaatatatggcagcatgtggttcataaggcattcaatacaggagggaatgaccttactgaatcactaaaaccagttaaagagtccgtggtttcgatgttacaacaacaaccggaaaatctaaaacctaaaaacgaagactcggaaacaacagaagatgcatctatgattcatgaaaatgacagtgaaccacctgcgggtaatgatgagtacccggctccttcaacaccacaattagaacagggaggaagattgttagacgatagagattgccaagatcatactcattgctcgatagaaaaagggagcggggagcaagatggagaagccgaatctgtcgaaactaccggtggcaatacaactgcaacaggtggccaacctcagggaccgagtgagaccaatgtaaaagaggaggatgactcagttgatggtaccatgggcgagagtccgcaaaaccgagtagatagcaaaggttctgatgttgttgctggaaagccaagttcatgtcctgataaagctaatcggaaaaaaatcgaaggtagattgggacacccgactgcataggaaaatttgtcaagcaagtggaccaacttggtattcgatcaagctatccccgctcgcgtctacagctatgggaagtagaaggcttgacgagggcatatgtggcaagtcatctccagaaattcgatgcaggaacccattttactaaggtgatgatcgaatgcttcaagacctaa

SEQ ID NO: 6930 - DNA, 556 bp, Gossypium hirsutum
  Clone ID: LIB3583-041-P1-K1-G1
cactaatcatcttttttctgcatgcaacttcgttttcttggataatagggagggggaaaagaagaagtagccggatgttgataagcagcaattcgtaagacttatcggctggctgagaaaggatgccaaaccagctatggtttgcactagaaatgatttatcagcgtggaaggatttcccaaagggtctcagggtccttcttcttgatgaagacaccaattctgctgcagagataaaatcaaagcttgaagctatggattatattgtatataccttctgcaatgaaaatgaagctcttgctgcagtttcaagtagacccgaaagcttccatgtagccattgtagaggtctgcacaaatagtaacaatgggggtttcaagtttcttgaaactgctaaggacttgcctaccattatgacttcgaacattcattgtatcagcacgatgatgaagtgcatagctcttggtgcagttgagtttcttaggaaaccgctatccgaggataaactaaggaatatatggcagcatgttgttcataaggcattcagtgtagggggg

SEQ ID NO: 6931 - DNA, 375 bp, Gossypium hirsutum
  Clone ID: LIB3196-049-P1-M1-B2
ccctaaactacctatatactatatgggctcttatcaatacctgggttctgagcttttttctcttccctctctttttaagataaatcactaatcatctattttctgcatgcaacggaccttcagtcatatactccgaaggcgcaaaagaagaagtagccggatgttgataagcagcaattcgtaagacttatcggctgcctgagaaaggatgccaaaccagctatggtttgcactagaaatgatttatcagcgtggaaggatttcccaaagggtctcagggaccttcttcttgatgaagacaccaattctgctgcagagataaaatcaaagcttgaagctatggattatattgtatataccttctgcaatgaaaat

SEQ ID NO: 6932 - DNA, 453 bp, Gossypium hirsutum
  Clone ID: GOSHI-09MAY01-C30501_1
cccacgcgtccgcccacgcgttcgcccacgcgttcgcccacgcgtccgcggccacatatcagaaactgcgaaaattcatttaaaaatggcgaccgctgcatcctcttcatcctccatggtggccaccgccgttttgattcctcgttttccggcagcctccgttggaactacccgctgcagtgccttgccgcctctccctcctcgcgtttcgaccgcttccttgtccttttcctcttccgttaagctaatcccagaatccaagaggttttctctactgcagacaaaagcctcagaagagacctctgttgatgctggtgaccttttcgctgacttgaaggaaaagtgggataaagttgaggacaagaccacagttgttctttacggtggtggggcattagttgctgtttggctatcatccattcttattggtgccattaactcggtccctttgct

SEQ ID NO: 6933 - DNA, 290 bp, Gossypium hirsutum
  unsure (1)..(290): unsure at all n locations
  Clone ID: LIB3120-024-Q1-K1-D1
cggacgcgtggggaatctttgaagagagcctcaataaattgtaaaacaaggccgctaaagtggaggattgtgtagcgtttggagcggccacatatcanaaactgcgaaaattcattgagaaatggcgacagctgcatcctcttcatcctccatggtagccaccgccgttttgattcctcgttttccggcagcctccgttagaactaccggctgcagtgccttgccgcctctccctcctcgtgtttcaaccgcttccttgtctttttcctcttcccgtaagctaatcccag

SEQ ID NO: 6934 - DNA, 579 bp, Gossypium hirsutum
  Clone ID: GOSHI-09MAY01-C30771_1
tcgaccacgcgtgcgcaactccatttgcaatctaccgttccttattccttctaattccctacacaccccatttcagggcagggcacattgtctctccgccttcattctccgcacggtgcgcatgttttcactacccataagcatgcaatggcttccgctgcaaaaggcgagccaacgttcgggtgaataactgctcgtgaaatcggaacctcatcgtgggcatttcttgctattatgccagagcacaatctacatctctctttctcaaagacaccatcaaaattgattttaacaatcgatccagttgggtgtctccatttggccatcgttctactcctgaccaaagagtccacaaagcacatccaaacattcgactctgatgctgagagctctccacaaaaacctgggacactctctaaagatatggtccacagacttcatttctgcaccacatcgaggacatcctatgttcaccatcaatcttctttgtcttaaatttgggaaaataggaataaaatctttcgtaattctccatattggaacttttactttagttcgaagctgtaaggtccacaactt

SEQ ID NO: 6935 - DNA, 914 bp, Gossypium hirsutum
  Clone ID: GOSHI-09MAY01-C130759_1
atcgattgagatctcatgaaacctacctttttcatgaaatttagctcttgaactgaatttctttttcccaaatatatgctcttttctcgagacaaaaatggggttaaaacttgcaggcctgcatccggttttcctataagcatcttgctttagatccccaaggagtaaaacaatctcttcctcgctaacaacagcaacgtagtaatcagatccaggctcggtttcgccgttgaatttagcagatttcaagtcccagaagatatcaaagggtttaccatcatcgaccgtgaagcgtttggagccttgtttcctccaaaaataccatggtttaagctcgattttgcaggtatactgagactccccctcgggaccttccactgatatggaaagaccatgaagcaacagattcttgcaccaagtgacggtgatcaaacgacagtgatccgccatttttgtacggtaaactgacatgaaaacactctgaccccacctggttaccgccggatcatggtcggttggcttctcacctgatgaaaaacaagcgggaatcccgattgggtcttgcatggttatctacaagaattaataaaagtggagttgatggatcaaagcttgaatgaaagtattaaggaataagggagatttactatataatgtgactattgaatgagttgagtgagatttaatgatggtgccaaaggtgttattggcagcattaatggatattaaaaaaaatagttccaaactgcaatgtgttgtaatgaattatgattatagatctattacattcctttcttttcttgggtttaatatatttaaaggtcaactttttcttgatggatctgatacttatttcttaagtttatatatgtgtttgaaacgggattccatgttttaatcgttaggtgtttcag

SEQ ID NO: 6936 - DNA, 359 bp, Gossypium hirsutum
  Clone ID: GOSHI-09MAY01-C30701_1
cgttggtggaagcttatcccctattttcccgagaaaaaattgtggtcagtgaaaatgaagtcgctgccattgtcagcaggaacttacatccccaaaatcctcaaccctaaaatcctaaacaagaatgtggaaaacccagtgattagatggtcaaaaacgaagccgaaaatgggttcaatagcaattgttgagcaacaaaatgataaagccatagtgttgttgaagaggagagaagcggttggtcttggtttatatgttgggattgctgatgtcttgttgcagttgctgccacaaccttgtcccagtggtgcagctgttgaagtagccccagcggcttgtgaattgactgttagtccttc

SEQ ID NO: 6937 - DNA, 390 bp, Gossypium hirsutum
  Clone ID: GOSHI-09MAY01-C30691_2
cgactactaaaacatacttcgtagaatttgctttgcactttgcaatggcattcgagataacaaatgaaatgctggttggcagtttaatgccagttattgtttattgggtttatggtggactgtatacaattttaggctactcttgtaacaattacaggttgcatcctaaagaagatgaggatgagaagaactttgcctccaaaaagaccgtcatcaaaggcgtccttgggcaacaatttcgtcagttcatcgccactaacctattatatatgataacaagaggaaatgatcccggagcttcttcagggcagtcaacttccttctttgttatagcaagacagtttattgtagcaatgttcgtattccatacttaccaatattttctttaca

SEQ ID NO: 6938 - DNA, 509 bp, Gossypium hirsutum
  Clone ID: GOSHI-09MAY01-C30691_1
cggacgcgtgggcggacgcgtgggcggacgcgtgggcggacacgtgggcggacgcgtggcgccagttattgtttattgggtttatggtggactgtatacgattttaggctactcttgtaacaattacaggttgcatcctaaagaagatgaggatgagaagaactttgcctccaaaaagaccgtcatcaaaggcgtccttgggcaacaatttcgtcagttcatcgccactaacctattatatatgataacaagaggaaacgatcccggagcttcttcagggcagtcaacttccttctttgttatagcgagacagtttattgtagcaatgttcgtattcgatacgtaccaatattttcttcacagatacctacaccagaacaagttcttgtacaagcacctccattccaagcatcatcgactggtggtttcgtacccatttggtgctatctacaggcatccgatcgagggacttctttttgacatcatatgcggtacaatggctatttaca

SEQ ID NO: 6939 - DNA, 605 bp, Gossypium hirsutum
  Clone ID: GOSHI-09MAY01-C30631_1
tgttcaattgcccctctgaattcgtaaatcatggtaagttcctggttcttaagttacttcggttggattaacatctgcacgttacagctcgatacagggtaaaattttggaacggtttaccttcctatctggatagtctgctcggagaccccttttagcttgcatgagatgacgattccccacgcgtccgcgtggttcccggccttcttctctggaatcgaactaggcagcagtgggggggaaacaagaagtctgaaaatcggcctcaaaaggttcgggaacccaaactgagttggaatgcgagttacgaaagtttactcggaaacaacaaaccattccctcaacctattcctctccctgaaatgatcgattttctggtcgacatctgggaacaggaaggattatatgactgagcaaacagtacagcaaagcacattcgggaaaaaaaaaaaaagggggttagatattaatacccttattgttgtaacattttactagcttcattatgaaaaaggcattagagcattttaaactggcatgtattgtcgaccggaacggtctttggtcttgtctgtccgtggcttgctcatttttcactttttttt

SEQ ID NO: 6940 - DNA, 414 bp, Gossypium hirsutum
  Clone ID: LIB3493-043-P1-M1-A3
gttgtgagagagcaaaaaggactctatcatcgacagctcaaactaccttcaacatcgagggagtgtccaaaggcattgtctattacaccaccataactttttcatgggttatcgagctaacagaatctttttaagacacgaatggtaccaatcgagctcaaaaggttgggtaacccaaactgtgcatttacggtctctgcatgggtaatccattctggccttgcagttggaatgcgacttacgaaagtttactcggaaacaacaaaccattccctcaacctatttctctccctgaaatgatcgattttctggtcgacatctgggaacacgaaggattatatgactgagcaaacagtacagcgaagcacattcggaaaaaaaaaaaagaaaacggctagatattaatacccttat

SEQ ID NO: 6941 - DNA, 407 bp, Gossypium hirsutum
  Clone ID: LIB3120-009-Q1-K1-D11
acgggccatttgagttcatgtaattatcatttggcatcttaatgatgaacttgttattgatttattagtgttggctagagtttttggtgggtggtgctaatcatttatacgatttcgggtgatttataacagagcagtggttgtctaggatgttataaggagcctaaatctgatcctttgatgaatgatacatcaaaaggattagaagttccaggtcagacggtgaggaaaaccagtatatctgaagatttctggaccactagcgcttgcgatatggataacagtgcagcgcagtcacaaggaagcatctcgtcaatcagcgtgatcaatcagtctctagatccccatggcaatgccaatagcccatctgaattcgtaaatcatgggtctcttctctggaatcgaac

SEQ ID NO: 6942 - DNA, 478 bp, Gossypium hirsutum
  Clone ID: uC-gsflmaxxa090h10b1
ttattaagagatgaaggaaggtcaaatgggggatttaattaaggcaatcaggatcatgattgcgactgtcttgcttcttagtttgatttgatatatgggatgtataggagcctaaatctgatcctttgatgaatgatacatcaaaaggattagaagttccaggtcagacggtgaggaaaaccagtatatctgaagatttctggaccactagcgcttgcgatatggataacagtgcagcgcagtcacaaggaagcatctcgtcaatcagcgtgatcaatcagtctctagatccccatggcaatgccaatagcccatctgaattcgtaaatcatggtcttcttctctggaatcgaactaggcagcagtggattggaaacacgaagtctgaaaatcggcctcaaaaggttcgggaacccaaactgagttggaatgcgagttacgaaagtttacttggaaacaacaaaccattccctaacct

SEQ ID NO: 6943 - DNA, 333 bp, Gossypium hirsutum
  Clone ID: LIB3146-021-Q1-K1-B2
attcaatttcagcaggcaatcagaatccattgatttgcagatctgttcttgcttcctctagttcttgatttttgtatatatgggagcagtggttgtctaggatgttataaggagcctaaatctgatcctttgatgaatgatacatcaaaaggattagaagttccaggtcagacggtgaggaaaaccagtatatctgaagatttctggaccactagcgcttgcgatatggataacagtgcagcgcagtcacaaggaagcatctcgtcaatcagcgtgatcaatcagtctctagatccccatggcaatgccaatagcccatctgaattcgtaaat

SEQ ID NO: 6944 - DNA, 912 bp, Gossypium hirsutum
  Clone ID: GOSHI-09MAY01-C30181_1
tgaggagcagtggaggctgatcctttggatcagttccgcaaatggtttgatgatgcgggggtgtcacttaaaggaaccaaatgctatggcattgtcaaccactggaaaagatggaaaaccctcatcgagaatggtattgctaaaaggggttgacaaggatggtttcgtctggttcaccaattatgaaagtcagaaggcacgtcaattatcagaaaatcctcatgcggcacttcttttctactgggatgggcttaatcgacaggtaagagtggaaggatctgctgagaaagtttctgatgaggaatcagagcaatactttcacagtcgtcctcgaggcagtcaactcggagcaatcgtaagcaagcagagtacggtagttcctggacgccatgtactgcaccagctatacaaagaactagaagaaaaatactccaaggagagtttaattccaaagcctaaatactggggaggatatagacttaaaccagaacgtttcgagttttggcaaggacagccatcccgtttacatgacaggttggaatattcccctcaagagaccgacggaaaacgagtttggaaaattgttcggttggccccctgagttcgtatcttcagcttcttcactgtcaagttagcctgtggttgtggttttcacaaaccttctaacttgcaagtatgtattttctgtggcattgaggggcgggggggtgtgcatgacattttactataaaaattgtacatccttgactcttaaataccgcaaaggatcaaagtagagctcgggtttgaaagatgcgagtgaatggcatggttcaggatctcttacatggagattgaatcatgaatgagggaaaaaagatcctgaaaacacaagagtagtaaatttacttcaaatttatttgtgttcttacc

SEQ ID NO: 6945 - DNA, 674 bp, Gossypium hirsutum
  Clone ID: GOSHI-09MAY01-C130299_1
gaccaaattctgaagataaagaaactcaacaaggcaatcaagcagaggacttgaaacagacaccagaaatcaagatttcgagcctttcttcaagtaaagattcatcacaaggaaacctggacattaggacagtgtcgttggatgacgtggaccctatcaagctattggaaaaggaagtagtaattcatgagagcgacgatgagaattatgattcccatgattccagttttcatatgaacacaagcatgtttaaagtcagggcccaagatgaagataagaattacgagtgcacagagaaaactgcactgatgtttcagaactcatttgataagcaaatcccctcaagccttcgtgtggcttgaaggtggaggctgtacctgaaaaccccacagaacatgtggctcaaagttctgggacgaaaggtaaacgaccctttaccattaataaggcgccgttttctgtaaggactagacaagttcgtggctactgaggagcatcagtatactgatttgattttgaagtttggcgagttgcattatagcatcagtcaggtctataagtttgtttgtttgtttccccttttttgtttattttcttgagatgtaaactggatgttaacatttttggaattattttcgaagaaaaatatgttggaaaacaaaaaaaaaaaaaaa

SEQ ID NO: 6946 - DNA, 671 bp, Gossypium hirsutum
  Clone ID: AI055737.1
gtgttattaagtattaggaatatggacggcgcaccaatttgaaagaagaacgacagggagtagaaagggtttgatcaccaaagaaaagattggacctttttgaaaagattgtacaagagaatggaataataaaagtagtatgataaggggcctgtcaaaatgtggaagagaatggggttttaagaaagagttgagattgagattccaaagatcatgtttaaatggcccaagcattttaaaacgggggccagaatagattagggatatcgggggcacagaaaatagggatgaagtgtacaagatctcattaataaacgaattcccttaaagcttgagtgggggttaaagtgaaaggttgaccctgaaaaccccacagaaaatgtggctcaaagttgtgggacgaaaggtaaacgaccctttaccattaataaggcgccgttttctgtaaggactagacaagttcgtggctactgaggagcatcagtatactgatttgattttgaagtttggcgagttgcattatagcatcagtcaggtctataagtttgtttgtttgtttccccttttttgtttattttcttgagatgtaaactggatgttaacatttttggaattattttcgaagaaaaatatgttggggaacaaaaaaaaaaaaaaaaaaaaaactcgag

SEQ ID NO: 6947 - DNA, 420 bp, Gossypium hirsutum
  Clone ID: GOSHI-09MAY01-C31981_1
attttaattccccctttttttttctttcactttttatccacaaaaaacactgtcactttcttttgcatctctcttctcgttgagcaccactggcaaccatgaagaccgccgaggcaaccgccgccacgacgaccgttctcagccgcggttacaaacgttcccccaaatccaacggcaaggtcaacggcacagctgctaagaaaaccggcgttaatcatggcaatggtggtgacatttctaacgggaaagcatcgttcatgaagtggacactcgacgacgtcgtttacgtcgctaaataccaccgcttaccctgttttttcgcggcgtggttcttgtttttcatatacgtggagtacacgctccggatggtaccggattcatccccgccgtttgatctggggttcgtcgtcacacgatctt

SEQ ID NO: 6948 - DNA, 572 bp, Gossypium hirsutum
  Clone ID: LIB3829-008-Q6-K6-F8
ataacatatcatctgatccaatatttgatgtaagattatgaagactaggaagggaaagcgttttgaggccttttggccatccattgtgatgaagaatggttgaatataaagccaaagtgtatgattttagcgaagatgaggtcgagactgaaaccgaaaccgagagtgaagatgatgcttattccattaaagattcaagattgaatggtggtgacgattatatccacagcacactgcaaaaccaagattgcagcagccaaatttcagattcgtcatctaaggtttatcggttaaggcaccggaggggaaaatcagaaactctgcgcgtacagtacataaacacaaaggatgtgagggtgacaataggcacttggaatgttgctggaagacttccatgtgatgatcttatcattgatgactggctttgcaccgaacagctagcagatatttacattatcgggttccaggaggtggtccctttgaatgctggaaatgtactgggggctgaggataacaggccaattcctaaatgggaagcaataattagaagaactctgaacaaatctttgaaa

SEQ ID NO: 6949 - DNA, 362 bp, Gossypium hirsutum
  Clone ID: LIB3120-025-Q1-K1-H1
tcgcccacgcgttcgatccaacttattctcttaaagattcaagattgcatggtagcgaggatgacacccgtaggacattggagaaccattctgagtgcagaaaccaaattccagatgcaccttccaagggttatcgattaggacacaggaggggaaagtcggaaactctgcgtgcacagtacataaacaccaaggatgtgagggtgacaataagcacttggaatgttgctggaagacttccatctgatgatcttgagattgatgattggctttgtacgaaagaaccagctgatgtttacattattggcttccaagaagtagtccctttgaatgctggaaatgtatttggagctgaggatagc

SEQ ID NO: 6950 - DNA, 632 bp, Gossypium hirsutum
  Clone ID: GOSHI-09MAY01-C131979_1
gtgatttcaaagcttctaatattctactagatgcggaattcaatgcaaaactttctgatttcggattggccaaggcagggcctactggcgatagaactcatgtatcgactcaggttatgggaactcaaggctatgcagcacctgaatatgtcgccacaggtcgattgacggctaagagcgatgtttacagctttggagttgttttgctcgaactactgtctggacagcgtgctgttgataaaacaaaagttggcgtggagcggagtctagtaaactgggcaaaaccatatttgggtgacaaaagaaaattattccgaatcatggacacgaagttgggtggccagtacccccagaaaggtgcttttacggcagctacccttgctttacagtgcctaaatagtgaagctaaactcaggcctcgaatgtcagaagttttggcagcactggagcagctagaagcccccaaaactgcatcaaaacacagtcaagcagaacagcatgctgttccacttcctgttcggagatccccaatgcgacaccatcgatcacctatgcatctaacacccagtgcatctccattgccatctcacagacaatccccgcgggtacattgagattccatctgtaaattc

SEQ ID NO: 6951 - DNA, 1090 bp, Gossypium hirsutum
  Clone ID: GOSHI-09MAY01-C31971_1
ggaaaatctccactgtcccctaaagggatactgtctcaactacaaaatatttgtggccaacttgttcaagggaaggaggaggatgcacatgaatttttaaggtatgttattgatgtgatgcaatttgattgtcttaaagaagctggggtgcgttcatcaaggtgttcagaagaagaaacgactttaataggcctaacatttggaggttttctccggtcaaagataatgtgtgtgaaatgtcaaggcaagtctgaacgtcatgaaagaatgatggatcttacggttgagattgaaggagacatagagaccctggaagaggctcttcatcgctttacgaggactgagattttagatggagaaaataagtaccaatgtggcagatgcaactcttacgagaaggccaaaaagaagttgacaatatcagaggctccaaatgtcctcacaattgctttgaagcgatttcagtctggtaaatttgggaagcttaacaaagcgattcaattccctgagatcttgaacttggcgccgtatatccctcgcgctcgcgacaattcacccatttacaggctctatggtgtggtggttcacttggatgtgatgaatgctgcattttcaggtcactatgtctgctacgttaaaaatgcccaaaacaagtggttcaagattgatgatagcaaggtaacatcctctgaacttggtaatgttctaacaaaaggcgcgtacatgcttttttacgcgaggtgctcacctagagccccaagatcgataaggagcagaagtaagtccattctatcaaaaataaattcaaagaattatccaaagtcaagttcaactcatcctgatagttcagggagtatcgaatccttctattcgaaaatacaatcggttacaaaagattgtaggaagaggattcatcaagtgatacttcttctctgtttggcagcaattctgataatacttcttcctgtactgatagcacacaagatgactcactggattctgtatttggcgattccgatgcttcatcttccccttcctcttcttcctcttaactcaaagcattcaacccttagctgatttaaaaccgata

SEQ ID NO: 6952 - DNA, 438 bp, Gossypium hirsutum
  Clone ID: LIB3120-020-Q1-K1-F8
cccacgcgtccgtgtgcgtgtgttctcccccttctttacaaaaatgaaaggaatggctttataggcgaacaataatccaacatagagaaatacaagccccccttttttttattctgttgttttttgcttctatttgctgatgtctgcttgtctgcttgcaggtacatggcggtgtacggatgtggtatggtcgtgtcgacgtggaggctcgagcgatggtagtgctggaggctgctggaggctactgcatcggcaagcgaatggggctagggttagggtttccaagaactttcaaaggattgggcctatcgggctctatttttgggtctaggttaatattagttgttgggccattgagtattgagctagggttaattcgggtttggggtttaaatatatgtttgggtttgtaatggattgggtttaaaaattgggtta

SEQ ID NO: 6953 - DNA, 405 bp, Gossypium hirsutum
  Clone ID: LIB3146-016-Q1-K1-E10
ccgaaagtaaaaaaaaatgaagaaaaaagaaaaaaaatacaaaaagctgctccttttttgtctctattttgctgttgtctgcttgtctgcttgcaggaacgtggcggtgtacggaggtggtacgattgtgtcgacgtggaggcgcgaacgatgttagtgctggaagatgctgaaggctgctgcagcgccaagcgaatggggctagggttagggtttccaagaaactttcaaaggattaggcctatcgggctctattagttgttgggccattgagtattgagctaggattaattcggttttgagttttaaatctgagtttgggtttgaaattgggatatgtaacttgtacttgatgacatttaatcttggttaatttttatttattttttaaattttagtttttag

SEQ ID NO: 6954 - DNA, 728 bp, Gossypium hirsutum
  Clone ID: GOSHI-09MAY01-C31471_1
ttcactttcagggtttccaatgaagaacaaattaagagcataaaagcaccaggatcaaattcagagtaaatttgaaaaataaccccaaaaatcaatgcatcccttgattccaaagtaatctttaaaaaaaatcctttcttttaatcaactcattaagcccatccttcaccgccaaatcgaacctaccacaaaaatttgagcagaaaaaaaaattgatcttgattctcctttcttcttctctttttgcttttctgttgttgcttcggtcgccggagatttggttgtggccaaaatgaagctttcggcgctacaacagagttatctaggtcgtcggagtaatagtttcagatcatcgggaccgttggattcttcttccgatggagcttttaaatcgccggcggccgttttttggcttgtcctccatggtctgtcttgcttaattagcttactccttgggttccgtttttctcgtttggttttccttttgttatccacttcttctacctatacctcaccgtttcattcccctaccgagcttgccaaaaccctagatatccgctcagttattcccgctgatcccgtcgggaacgtcccgttaccgtttcctaacaagaccgcgacgaactcccgggtggttgtcgggcggcacgggatccggatccgaccgggccgcatccgaatccggttgaggttatgaaggcacaccggatcatcgaaagggtccaaac

SEQ ID NO: 6955 - DNA, 494 bp, Gossypium hirsutum
  unsure (1)..(494): unsure at all n locations
  Clone ID: LIB3585-026-P1-K1-B6
cccacgcgtccgngccaagggagctggtaaatcgccggcggccagcctatggcttgtcctacatggtctgactcgcttaattagaccactcctagagttcagtctatctcgagcggttgtcctgtcgatacccactaattcaacctatacctaagcgtatcattcaccctaccgagcttgccaaaaccctagatatccgctcagctattgccgctgatccaggcgggaacgttccagtaccgcttcctaacaagaccgagacgaactcccgggtggttgtcgggcggcacgggatccggatccgaccataaccacatccgaatacggttgaggttatgaaggcacaccggatcatctgaaagggtgcaaacggagcagacgctacaattaggagagaaggatcccaggaaaagtatcgtgctcactccgacgtatgcacggacattccaagcactgcaattgacggatgtgaagcattcaatgatgctggtccc

SEQ ID NO: 6956 - DNA, 416 bp, Gossypium hirsutum
  Clone ID: GOSHI-09MAY01-C31461_1
tttataaccctaagccttacataaaatacaaggtattgaaagagaagttggacaaagaaagagaaatgagtctgctttcgaatgcagattggggaccaatcgttgttgcagtggtcttgtttatcctcttgtcgccagggatgatgttccaattgccaacgaggacaagggtgatagagtttggcaacatgtgcacaagtgggatagccatcttggttcacgccataatttatttcagcttattcaccatcttgatcatggcaattggtattcacatacatgtttactagttgatccaaaatctcaacaaaaagggtaggctcttctttggctcctttccgtaatttggcttcactggtatttcattgttgtttgtaagagaaaatttggataggagtaatgatgaatctatttct

SEQ ID NO: 6957 - DNA, 647 bp, Gossypium hirsutum
  Clone ID: AI730532.1
aagatatttctctcttgaaacacccccccccccaaaaaaaaattctaattattattttattttccattatctttcccactctttttttttcgtttctcaaaaaaataaatttatatttaatttctctgaaaaaagattattaccattttccccaagctctttctctccctaacaaaaaggggtcgtttatcttgttccgtttcggtttttttagggtttcgtttaatcaaaggccgttgaaggaggacgatttaatggcggcggcgacggcgcaagggatggacccagcggtactagacgatataatcagacggctgacggaagtccgatcagccaggccagggaaacaagtgcaattatctgaatctgagatcaaacagctttgtgttgcttcgaaagatatcttcgttcaacaacctaatttgcttgaactcgaagcacccatcaaaatttgcggtgacatacatgggcaatatagtgacttactaaggctgttcgagtatgggggtgttcctcctcatgctaattacctatttttaggcgactatgttgatcgtggcaagcaaagtttggaaactatatgtcttttacttgcttataagattaagtacccagagaaattttttctattgcgaagaaaccatgtt

SEQ ID NO: 6958 - DNA, 451 bp, Gossypium hirsutum
  Clone ID: LIB3120-019-Q1-K1-E10
ctgggttcttctttctctctctccaaagttcttcgatcctttccgtctccaaaggtctccggagttagctgcatacgagttgagtagaaactggatattgcaagttttttagggtttcatttaatcaaaggccgttgaaggaggacgatttaatggaggcggcaacggcgcaagggatggacccagcggtactagacaatataatcagacggccgacggaagtccggtcagccaagctagtgaaacaagtgcaattatctgaatctgagatcaaacagctttgtgttgcttcgaaagatatcttcgttcaacaacctaatttgcttgaactcgaagcacccatcaaaatttgcggtgacatacatgggcaatatagtgacttactaaggctgttcgagtatgggggttttcctcctcatgctaattattttctggttcagtagcaacaaat

SEQ ID NO: 6959 - DNA, 420 bp, Gossypium hirsutum
  Clone ID: GOSHI-09MAY01-C31751_1
cccacgcgtccggatttttctagaaagttgccaacaggtgggatagtttgaaagaagcaagtgctagacttttaaaagggagtcttattataacaagttttgagttcgcaatgggattcttggatctgttagttgtggcattggtgccaattctaaaagtgttactggtaactggtgttggtttgtttcttggcatagaaaacatcaacctgttggggccggaggcaagagactacttgaataaaattgtattctatgtattaagtccttgcctcttactcagcacctgggccgagacaatcacttacaaaagttgggttaccttatggttcatgccacccaatgttcttctaacctttcttcgttggctcagcttctgggttggattctttgcaaacctaactaaaactcctagacacc

SEQ ID NO: 6960 - DNA, 780 bp, Gossypium hirsutum
  Clone ID: GOSHI-09MAY01-C131709_1
cccttcatttcatcttctgcaagctagcttcacatcttctatagttcttctgctctctataacagctcccttttgtgttatttatacttgtttgtttctgggtttgttttttgtttaatatttccatggaagaagctattgttgtgaacaaaggagacgacgaactcatcgatttgcctcctgggtttcggttccatcccactgatgaggagatcataactcattatctcacagagaaggtgatgaacagcaacttcagtgcaagcgctattggtgaagttgatttgaacaagtgtgagccttgggatttacctaagaaagctaagatgggagagaagcaatggtacttcttttgtcagagagacaggaagtacccgacagggatgagaacaaaccgagcaactgaagctggttattggaaggcaactggcaaagacaaagagattttcaaagggaaaggttgccttgttgggatgaagaagacccttgttttctacaaagggagagctcccaaaggagagaaatctaattgggtcatgcatgaatacagacttgaaggcaaattctcttactataatctccccaaaggtgcaaaggatgatggggtggtgtgtggtttcataagaatatacagggaccagaaagtcaatcctgatcatcatcactgttgaaatgaatcttatggtgatgatttatggatatgctcactgccctctcatggaccctactatatccacaagctgctctctgcacttatgacgcgcgatacgaatcaagcgc

SEQ ID NO: 6961 - DNA, 561 bp, Gossypium hirsutum
  Clone ID: GOSHI-09MAY01-C31111_1
cccacgcgttcgcaaaaggaccaaggcactgttggtaaagcttttaacaaacccctctttgggtgggtgtttaaacaaggaaactcaccgaagtgaaagggttcaaaacaaaaggaaaagaagagagaaagcaacttttttttttccttcttgtgcgtgtggggaacttatttttgaaggatcagaggcatatgaaattgaactaaatttttgttggtcttttttttttgcaacaaatgatggcaggaaaccctagctggtggagcatgcatttgcatccaccttctcaacacccttcaactttgttaaccacaccatccccatccctcttccctcaatatgttgttgaatattcagctacttctttgcctgataaccaagagcttcctcagtcatgtagccaactactctcgggtggattctccggtgaagaagaaaggttatgtccaagtaatttccagccaaaaaagttggaaaattgggaaaaccaaatcctgaatccatctctgagggttcccgtagttgagttataaagcagaggttactcacaacatagcaact

SEQ ID NO: 6962 - DNA, 539 bp, Gossypium hirsutum
  unsure (1)..(539): unsure at all n locations
  Clone ID: LIB3543-035-Q1-K1-D7
gcactgttggtaaacttttacaaacccttttggttgggtgtttaaacaggaactcaccgaatgaagggttcaaaacaaaaggaaaagaagagagaaagcaacttttttttttccttcttgtgcgtgtggggaacttatttttgaaggatcagaggcatatgaaattgaactaaatttttgttggtttttttttttttgcaacaaatgatggcaggaaaccctagctggtggagcatgcatttgcatccaccttctcaacacccttcaactttgttaaccacaccatccccatccctcttccctcaatatgttgttgaatattcagctacttctttgcctgataaccaagagctttctcagtcatgtagccaactactctcgggtggattctccggtgaagaagaaaggttatgtccaagtaatttccagccaaaaaagtttggnaaaatttgggggggggttgtttccccccccccctttttttggtctcttttcctttttttttgtggtttggtgccctttggcgctttcctcccctt

SEQ ID NO: 6963 - DNA, 403 bp, Gossypium hirsutum
  Clone ID: GOSHI-09MAY01-C31071_1
atcagaatcaatggaacaatcaaattgttagtggttcaggaaaaaaatgaagtaaatggggattttgcaagcgtcccaagtgccttttgcatcgacttgttcatcttcgtcttcttggccccctgctgcacctaaaacctttatccgcatgcaaatcatgggctgtgaatgtcaagttgagcaacgcatgcagttcgacgagtctgcgactgcgtaagatcggtggtggagttgttggggtcggtaaggaaggcgtacaaccagtgcgcattggtgaggatgataatggtcatgatacttctttatcagcaaccgcccaaccggaggaagatgaggacctccaatgcgttcgccaaatccaaagagttctacaacttctcaggaaaaaccgagacatgttatt

SEQ ID NO: 6964 - DNA, 729 bp, Gossypium hirsutum
  Clone ID: GOSHI-09MAY01-C31251_1
ggggttcaacttttccttttagctttttggtatttccaatcccacgctgctcaaaaacacgctctcctccccctctctcaccctctaatctgatcactgatttcttcgatttcaagttgaagtcaagctgcagctatactgtgatttggttaatatagaattgaaacaatgggggagctgttgggactgctaaaagtggtggttgtgcaaggtaaaaggttggttatccgggattttaagagcagcgatccttatgttatagccaagctcggtgatcaggtagcaaagactaaggttatcaacagttgcctcaatccagtatggaatgaagagctcactttctccctcactgaacctgttggagttctaaatttggaagtattcgacaaagatcgtttcaaggctgatgacaagatgggacatgcttatctgaaccttcaaccacttgtctcagctgctagattaagccatgctcttcgagtttcttctggtgagatgacattgaggaaggttgtacccgacactgataattgtcttgttagagagagttctattagtttgataaatggtgaagtagttcaaagtgtctggttaaggctttgcacagttgagtccggggaaatagagctaaaggtcaggttaattgagacacgcgatggaccttcaaggtagttgagctatatccgctgatgagataagtgttgggagctcaagtcaggtgattcccgc

SEQ ID NO: 6965 - DNA, 448 bp, Gossypium hirsutum
  Clone ID: GOSHI-09MAY01-C31211_1
cccacgcgtccgtaataagcaaggcaatggtttcactatgcttgaattcattgccacttccaccttcttcatgcccccaaaaacttactgaaacttcctcttcttttagtaatggtagtataggaacagccttgaaacccattgtcgtcaatggaaatcctcccacttttgtttctgctcctggtcgccgtatagttgcagttggagatctacatggagaccttgatcaagcaagatatgcgcttgaaatggctggtgtcttgagttcggatggtcaagacctatggactggagaagatgcggtacttgttcagctaggagatgtgcttgatcgaggagatgatgaaatagctatcttatccttgttgcgatcattagatatacaagccaaggctaaaggtggagctgttttccaggtcaatggaaatcatgaaactatgaatgtgga

SEQ ID NO: 6966 - DNA, 441 bp, Gossypium hirsutum
  unsure (1)..(441): unsure at all n locations
  Clone ID: LIB3145-045-Q1-K1-C11
cttccatctgtagttggagatctacatggagaccttgatcaagcaagatatgcgcttgaaatggctggtgtcttgagttcggatggtcaagacctatggactggagaagatgcggtattctttttctactactaattttgttgataacaatgatgcagaaaactagaatttttcttatgttgtttcttactatcataatggccactacaactatacccaatgtggaaaaattcttgtgtgtatggatttatttctctactcagaaccccatctgatgcctatgtttctgtttgagaaaaaaggtacttgttcagctaggagatgtgcttgatcgangagatgatgaaatagctatcttatccttggtgcgatcattagatatacaagccaaggctaaaggtggagctgttttccaggtcaatggaaatcatgaaactatga

SEQ ID NO: 6967 - DNA, 832 bp, Gossypium hirsutum
  Clone ID: GOSHI-09MAY01-C131239_1
cagatgctaaacgcagcagatcagataaaaaagccaaaaagaggcatgcccgccgaaataacctacaaaaatcagatgagcccttaatattggagaaagaaattacttcacaaagagaagatgacactgctatgagtggcacagatcaagcattaagttctggttctcgttctcctgtagactcaagaagtaggaaaacacctaaagaattaacacaagggtcaacttctgaccaacttcttaagatgagcaggaacctaagtggacagtctggggatttgctgaaggagggatatgttatagctatgcatgcaagagatcgacctgcactccatctgtccagacaaagagttaagggtggtggttggttcctagatagcatgtcaaatgtaactaaaagagatcctgcagcccagttccttgttgtctgcagaagcaaggacacaattggtctgcgttcttttgctgctggtgggaagttgctgcagattaatagaagaatggaatttgtatttgcgagtcacagttttgatatttgggaaagttggacattgcaagggtccgttggaggaatgtaggctggtcaattgcagaaatccttcagcatttttggatgtacgcattgagattctggcagctgtttgtgaagattatggggtaactcgtgacttgaatagttgtcaccgatatagcggttactctcgatagccactgtaatgttatttaaaatcctgccagatgatttcaaagaaatgtctaccggtggaaattttacaatgtggcattttggtattaaaaatatattatagaatttaattgtgagttcatagat

SEQ ID NO: 6968 - DNA, 422 bp, Gossypium hirsutum
  Clone ID: GOSHI-09MAY01-C31201_1
ctttcttacaattttaccattttcttatcttcttcttcttcttcttgagacttgcctagaagatcactgagaaacaaatacagatagaaaaaatggcggcctcaataagtggaattggaattgggttaggtctttcttgttcttccaacctttctaaatcacttcattcttcacaatcctctggttttcgtgttaagatgactgcttctgttgaagataaaaagaagaattatacccttcaaaaatctgaagaagctttcaatgctgccaagaatttgatgcctggaggtgtaaattctcctgtccgtgcctttaaaaatccgttggtggacaaaccgattgtgattgattctgttaaaggttctcatatgtgggacatagatggtaatgagtatatcgactatgttggctcctggggtccg

SEQ ID NO: 6969 - DNA, 361 bp, Gossypium hirsutum
  Clone ID: GOSHI-09MAY01-C32901_4
gggacgacccacgcgtccccggccccgggggtgcctttccatctggttcctttgtcccccgcagaataaagttaggaccttgctgcctctcgttatttcatcttttccccttcccactcacaacatggggcttggccctcatgacttctctccgacagccccgatcctcagtttgctgtgcaccgctgtcactttgggcctccgctagtgattcaccaccccgcagcttgttcgattagtgactgaggtcgcttgctccatggtgcttgacggtgtaattatgtactatgttttgcaggatggggtttgaatgtaattatgttagtctttctggtgaatagaaaagttgaaagcatttttc

SEQ ID NO: 6970 - DNA, 791 bp, Gossypium hirsutum
  Clone ID: GOSHI-09MAY01-C32901_3
gtgatcccttttagctaacgactccaatcttctttgtttagttacctcatttcctttgtaagcaaaaagtgaaagaaaatgagggttgttaataagagagatggaggtttaatctctctatcagtattatttgtaatggcaatattactcatcttcaacgccaaatgtttcagagttgctgtgttagcggagaagttcaatgacaccgctttctggggtggccacggtggcggtgacagtgtagggctcgacgatgatgactacagcagcttcatcggtgacgatatggagctggagatgttgacggattcctacatccgccgagtgctcgccgggagcaacggaaaatcaacgattgcattcactaacaacgctaaaaaaactccaagttgtggcaagggtaaacaatatggtccgtgcatgggtgacaagaaagttgctagcaattgcagtacataccaccgtacttgccagggatcgtcataatatacaaggaaagaaagtgagtttggtcagtcttttgtattatcttgagcctcttcccctccattttaatcctttgatccattgtggctgccggtcatcgtccggttttcttttttgcttttctatttgttttctttgtttccggcagaataaagttaggaccttgctgcctctcgttatttcatcttttccccttcccactcacaacatggggcttggccctcatgacttctctccgacagccccgatcctcagtttgctgtgcaccgctgtcactttggtcctccgctagtgattcaccacac

SEQ ID NO: 6971 - DNA, 715 bp, Gossypium hirsutum
  Clone ID: GOSHI-09MAY01-C32901_1
tcctttaaacatttaagtgatcccttttagctaacgactccaatcttctttgtttagttacctcattccccgtgtaagcaaaaagtgaaagaaaatgagggttgttaataagagagatggaggtttaatctctctatcagtgttatttgtaatggcaatattactcatcttcaacgccaaatgtttcagagttgctgtgttagcggagaagttcaatgacaccgctttctggggtggccacggtggcggtgacagtgtagggctcgacgatgatgactacagcagcttcatcggtgacgatatggagctggagatgttgacggattcctacatccgccgagtgctcgccggtagcaacggaaaatcaacgattgcattcactaacaacgctaaaaaaactccaagttgtggcaagggtaaacaatatggtccgtgcatgggtgacaagaaagttgctagcaattgcagtacataccaccgtacttgccagggatcgtcataatataaaaggaaagaaataagttggtcagtcttttttattatcttgagcctcttccccaataaagttaggaccttgctgcctctcgttatttcatcttttccccttcccactcacaacatggggcttggccctcatgacttctctccgacagccccgatcctcagtttgctgtgcaccgctgtcactttggtcctccgctagtgattcaccaca

SEQ ID NO: 6972 - DNA, 518 bp, Gossypium hirsutum
  Clone ID: LIB3829-012-Q6-N6-H7
gaaaaagctttcaacttttctattcaccagaaagaataacataattacattcaaaccccatcctgcaaaacatagtacataattacaccgtcaagcaccatggagcaagcgacctcagtcactaatcgaacaagctgcagtgtggtgaatcactagcggaggaccaaagtgacagcggtgcacagcaaactgaggatcggggctgtcggagagaagtcatgagggccaagccccatgttgtgagtgggaaggggaaaagatgaaataacgagaggcagcaaggtcctaactttatttttctttccttttatattatgacgatccctggcaagtacggtggtatgtactgcaattgctagcaactttcttgtcacccatgcacggaccatattgtttacccttgccacaacttggagtttttttagcgttgttagtgaatgcaatcgttgattttccgttgctaccggcgagcactcggcggatgtaggaatccgtcaacatctccagctccatatcgt

SEQ ID NO: 6973 - DNA, 450 bp, Gossypium hirsutum
  unsure (1)..(450): unsure at all n locations
  Clone ID: LIB3120-036-Q1-K1-E4
agcttttatccgctattaaggcggctgttacttccttcttccctctcttctcgacttgccttgtaacccagcttatcggttctgggatcagtttgatccttggtttagccttttctgcagtagtcattttaggcttccaagttcattaccctncaccttattttattttcctttgccttgtttacgtgattattctcttgtttattgtggagcatttacaagtgaattggatatttgcttacgtagtcgtcgtcgttgaatcaagctgggggtttgaaccattaaagcgaagtcgaaatttaattaaaggaatgaaaggcgttgctttgaagattatactgcntttcgggctcgtaatttccattaatacctggcgctcagttatgacatacaggaattcagctgctgataaatggacaagttggttatttgtttgaatatggacgtcac

SEQ ID NO: 6974 - DNA, 321 bp, Gossypium hirsutum
  Clone ID: uC-gsflnu33B009f05b1
tcagcttatcgtttctgggatcagtttgatccttggtttagccttttctgcagtagtcattttaggcatccaatttcattacccttcaccttatttcattttcctttgccttgtttacatgattattctcttgtttattgtggttcatttacaagtgaattggatatttgcttacgtagttgtcgtcgttgaatcaagctggggatttaaaccattaaagcgaagtcgaaatttagttaaaggaatgaaaggggctgctttgatgattatcctgttactaggattgttatctttcttaataccctacgcttagttatgaca

SEQ ID NO: 6975 - DNA, 672 bp, Gossypium hirsutum
  Clone ID: GOSHI-09MAY01-C132479_1
cctatgcttgcgataatgcttccagtttttgtcattcttgtatactatttcatcagaaaggatgtttatgatctacaccacgccatactgggccttctgttttctgtgcttatcaccggtgttataactgatgctattaaagatgctgttggtcggcctcgtccaaacttcttttggcgttgtttccctgatggaaaaagggtttttgaccctgtgacaaaggacgttatgtgtactggaataaagagtgtcatcaaggaaggacacaaaagttttcccagtggtcatacttcatggtcatttgcaggtcttggatttcttgcgctatacttgtctggaaaaatccgggtatttgatcgccagggccatgtggcaaagctatgcatcgtcttcttaccattactcattgctgctttagtgggaatttctcgagttgatgaactattggcatccctgggcaagatgtttttgctgggggttctcctagggctaccagtttcctcattttgttaacttccaattctttcccggccccatatgaagttgatgggttgggggctccatccatatttccaaaatttaaccagactctcgaaatgttaattccatccaccgctccaaatgttcaacaaccagaactccagagtgttattgttgaattcaccccatgca

SEQ ID NO: 6976 - DNA, 679 bp, Gossypium hirsutum
  Clone ID: GOSHI-09MAY01-C132419_1
ccgttgaccgccgcccagcagcagggaggcctaattgctccaaaacctgctccttggaaatctccttactccccttgaaaacatagaccttcgatatttccgtgaaccccaattcatggacatgtgcttgagtcccgaaagatacgaaaccgacaagagcttgttccggcaacaatccaatagcctgtttcaacgccgatttagcaaacactagctcttcctcgatcatacaagtgtctaacacaaaaacaaaaaccggttgcaattgaggagcattggaagggttgttggggtcgggattcgtttgaagcgtgtattgcacggtggtatattgcgggtagagttcgcaaggcaggttcgtttcggagatcatggcataatgcggcggaaattggttgcgctggtaacaaaacggacagatccagatcttggcgaggaaatcaacgcgcgaataggcgttgagggcggcggaacatgtccggcagcggagaggagcgtaagggagagtacgaatgtccgactgaggggggatcggtgccatggaaacggccaagggaatgacgcacttgctggcttcaaccttggtgcggggccaaacttctatgtcatccgaacgccgtcaaccccttcgggatcggagttcgccattatcccacaaatttgaaaacaaattggaacg

SEQ ID NO: 6977 - DNA, 614 bp, Gossypium hirsutum
  Clone ID: GOSHI-09MAY01-C132769_1
agcatttgaaccgacttatctctatactatggaaaagggttacttcttgctgcctgacgcggctaagtcacggcacaacgtacgtactgttaatattagcatatcagcccgacatccttgttttgggaacaggtggcagcaacttctaatcaatagatttgttgggtatgacactattttgatgaatagtttattgcatcagcctggtaaaggttatctttataattttcagacaaaggagttctataatctcacttatgcacgagaattaccagatggttctgctagagttggagagtatcttgtcaccaaatgtggtgtgctcatgatgtctttgttcgtatttttcacaaccaccatgtcagtatcatttacattgagggaaactcagactcgcatgttgaagttcacagtgcagcttcaacaccatgctcgacataggcttccaacatttcagttgatattcgtgcatgtgattgaatcacttgtatttgtaccgattatgattggcatcctattttttctgttcgagttctatgatgatcagctattggctttcatgggtcctaattccgggtctggttaatgtgaaattatttatactaatcagtgtg

SEQ ID NO: 6978 - DNA, 748 bp, Gossypium hirsutum
  Clone ID: GOSHI-09MAY01-C132649_1
tttctcctgatatatctccggcaataaaactccaccattttattccatcttcgtttgttgagtttttgctcagatcgactaccggctgacaaagaattagagatatcggctcaaaagggaaaggagaagattactgaggagtaaattaagaatttcggaagctttgggagaggagaagaattgagaaacatggcaacaacatcgaagaacatgaatgttttctacaggcagaagaagaacagctctgcctccaccggaaaaaaatcaactaaaagcccatctcccaaacacgccgctactttcggttccgatatcacccaaccccccgctcttgtttctcatggcggttcactcgatctcaaagatgattttgatgaacaagagcaagtgttaaggcaatttgatatgaacatggcatacgggccgtgtgtggggataacgcgactggatcggtgggaaagagctcaaagaatggggctaaaccctcctaaagagattgaaagccttttgagaggtgggaaagtgaagttagaaagtctatttgatggtcgtgtttagttaattagcaggtagcataatagtagtattatgtatgtttagctgaatcagacagcttctggctgtgcttctggttgggtgtttttaaatgttgtgatgaatctggaaagttgttttggtcttaatccatgggggattttatgaatttgcactaccaaattgattgttgtatatgatcgagttgggcctt

SEQ ID NO: 6979 - DNA, 928 bp, Gossypium hirsutum
  Clone ID: GOSHI-09MAY01-C32151_1
aggaatttcagccaacaaaaagaaggaaaaagagaagtgatagctgaactaaaagagtcaactctactcgatgaaaaaaacagtcaaacatagtgtcctgaaaactatttccagtaactgctttgctttcaaaaggagtattaatgtgtaaaggcaaaagtcaatatctaccaaatccaggaggggcgtttatgcaatgggatcaaaagaaccaatctatatattctgcagcagcaatcaagagaagctattctttgtctacatccaagggcttttatcattgccccaaatgtacacaagcaaaaatgaacacatcctcggacagtttttgccatctttatcacttatcttacattctgccttgtcttaatcatccgtttcagagttgcaagccaaaagttgcattcgtcccactcattggtagtcagaagaacctggatatgtagagctgtcccaaaatcattattgtccaacgcctggcagagctgaataagcttatcagaagcattttttgaaatgtctccactgttgagtttggcaaataaggcacctattttctgtgaattgtcttctatttcacgcttcttggctgggttcgcacgtggtcctcccagtgcttgagaggtctcattgaaaagtctagttaaagttgtgattacaggtttctggtgggcaggtacatttgaagtgtcagcagtctgcacagttggtgggggtgcagcaggtgctgcagctagttgtattgatgctgactgcgtaaggctagtagattgcacaggactcatgccaggtctttgaacaacaggtgtgtcggtcactggcataaatcctttaggtgttggggtaggagctacaaattggggcactttggggccaggaactgatcccatttgcaatgggacaggtgcaggagaaccagttccttggg

SEQ ID NO: 6980 - DNA, 629 bp, Gossypium hirsutum
  Clone ID: GOSHI-09MAY01-C32081_1
cccactcttttcaattcaatggaatctcaggatcaaagcccagttgttctaatcacagggtgttcccaggggggaatcgggcatgccctcgcacgagcttttgccaataacaactgcaaggtggtggcgacaagtaggtctttacgctccatgtccgatctgcaacgagatcccaggttttatcttcaagaactcgatgttctctcggagcaaagcgtgcagcatgtcatgtctaatgtaataaataagtttggtcgtgttgatgtcttggttaataatgctgggatccaatgcgttggccctcttgcagaagtccctttgccttccatggaaagtgccttcaataccaatgtttttggtgcgatgagactagtacaagctgttgtacctcacatggcatctaagaaaaagggtaagattgtgaatgttggaagtgttagtgctttggctcctgggccatggtccggtgtctattttgcatctaaagcagcccttcatgcgctaactgatactttgaggttggagctgagccatttcgggatcaatgtcatcaatgttgtgccagagctgtaaggtcaaacatcggtattctgctatagctagctacaataggatgcctgactggaacc

SEQ ID NO: 6981 - DNA, 581 bp, Gossypium hirsutum
  Clone ID: GOSHI-09MAY01-C132029_1
cttttggttatggatcaccgggcccgatcgcggcagcttttggagaaaatgagtttttttgtgccattgatgctggtggggaacaacaggtcatttgttgggataaaaccaacaagacatcttcggttcccactttcgatttggttccttccatggcttctctctctggtggtgaaggatttctctgcggcattactgcgaacaattcgcaggcgttttgttgggatttattaaattttggtataaatcttgttcctaaagcttttagatataattcttactcccaaattgctgctgggaaatctcatgtttgtgctatcaaagggtcttatttttcaagttctaatgatttcagtaacgtggattgctgggaacttgatcgatcacttggtaaaagtaattttactacgagttcttttagtaaccattatgttaacaatgttattgttaagaacattgtctctggggatggttttagttgtgggattgctaaggaaactactttgatcttttgttggggcctgtgtcattggctttaatatcaaggcgaaataaaatgttggcttttccgttctgaccta

SEQ ID NO: 6982 - DNA, 619 bp, Gossypium hirsutum
  Clone ID: GOSHI-09MAY01-C132389_1
ctggttctattgttgcagaaatatcagagtcaatggaaggaagaactagcaaaagaacagcatccacattcattgccaaggaccagtgtttcctgtcagataaaggcaaacacaccaccatctttcacaccattgccatcttctgatattccaaattccttgtggcctcgtcaagatgatcctagtaccagcactaatcttggtgattttggggcttcaccaatcattgctgatgcagctggttttcgcctggctcccttgctaatgcaacaggatgctggtcctccagacaatctggaagttttaccccggcttaagtcaatgacatggaccatggagaatctcaactcagcgccagccaataaagcagctattatccatcttaagcttcaagattatatcaagtctccttcaggagagagagaagtgaaatttcagctgactaaagacacaattgaagctctgttgagatcattgacttacatcagcgaacaactttcaaacatgactgggacttcctcagagccggcacagaaaaagcaaaagcagtaggaccatacggccatagttcatttcttgtctctttgttttctgtactgacattatatatagattcatg

SEQ ID NO: 6983 - DNA, 422 bp, Gossypium hirsutum
  Clone ID: GOSHI-09MAY01-C32201_1
ccaggaaccagttaccgccactcaaacagaaaactcagtttgtgctatggccgtgagactattgtcaactccaactgctctgtcgcacccaacaaagctctccgtcggctcatcacccaaacccatatcaacagcaacctccttctttcaatggacatccacgtgcagagtttttacagggaaaatggtggtaaaggcatgtcttaaggtggaagaatagaatgcgaaagatactagtaaacaagaatggggcatggtgtctgctgtactttttgacatgcatggcgcgttgtgcaactgtgagaaccctcctagaaaggctgctgctgatcgttttgcagagatgggtgtccaagtcactgcggaggactttgctcctttcactggaatgggtgaagcaaactttttaggaggcgttgctt

SEQ ID NO: 6984 - DNA, 553 bp, Gossypium hirsutum
  Clone ID: GOSHI-09MAY01-C33931_1
cccacgcgttcggttcaaagtgcatctgggtgatactcctcacaacttgactgaaaatgattttgaaagcttagctcatcggacggatgggttttcagggtcagaacatatctgtttgtgttaaggatgttctttttgaacctgttcgtaaaacccaagatgccatgtttttcttcaagacacctgatgatatgtggatgccatgtggaccaaagcaaccaggtgctgtccaaattactatgcaggaattggctgccaaaggacttgcggcacagatccttccccctcctatttcaagatcagattttgacaaggtgcttgcaagacagaggccaacagtgagcaaagctgatcttgaggtccatgaaagatttacaaatgagttcggagaggaaggttgatagatttaatgtaacttttcacattgatctacactagttgtaagtgcaaacactgtattttatttataacttctggatcatcgaatgaatgttcgacccaatccgaatctcctgtttatacagtgtaaataagattataaggaatttggctt

SEQ ID NO: 6985 - DNA, 617 bp, Gossypium hirsutum
  Clone ID: GOSHI-09MAY01-C33841_1
ccggtccggaatctgagtgttcggcccaggcggcaaaaacatagcagccatggcagtccgtatgcttcttgggttaggtgtcctgctactctgccttgcaaaggtttcatctgatctgaaggcagaagaagttataaccaatgtcggtgaggtgggttctttggttaccagaggcggaaacagaagactgatgctagagattgattgtggaggattatgcaagaaaagatgcagtcaacactcgaggccaaacagatgcaacagggcgtgtgggacttgctgcttgaggtgcaagtgcgtgccaccggggacttcagggaacagggaggtctgcgggacctgctatactggcatgaccacccatggaaacgttgccaagtgcccttaacctttacgtcgcccaatatgtgttgcagccatcaaggggaaaaatgaaatgtttgtttgtgtaatatgtatgttgtagctcagatgtctcacctactcctaaaattattagtacttgtaatatatatttttaaaatagtagtatgcatttagcctccgttcagtattacaatgtggcttgctggtttggtattatatttaatatgatatctataagttgttagatcttt

SEQ ID NO: 6986 - DNA, 551 bp, Gossypium hirsutum
  unsure (1)..(551): unsure at all n locations
  Clone ID: LIB3828-028-Q6-K6-C1
aggcagtccgtatgcttcttgggttaggtgtcctgctactctgccttgcaaaggtttcatctgatctgaaggcagaagaagttataaccaatgtcggtgaggtgggttctttggttaccagaggcggaaacagaagactgatgctagagattgattgtggaggattatgcaagaaaagatgcagtcaacactcgaggccaaacagatgcaacagggcgtgtgggacttgctgcttgaggtgcaagtgcgtgccaccggggacttcagggaacagggaggtctgcgggacctgctatactggcatgaccacccatggaaacgttgccaagtgcccttaacctttacgtcgcccaatatgtgttgcagccatcaaggggaaaaatgaaatgtttgtttgtgtaatatgtatgttgtagctcagatgtctcacctactcctaaaattattagtacttgtaatatatatttttaaaatagtagtatgcatttagcctcnnnaaaaaaaaaanaaaaaaaaaaaaaaaaaaaannnaaaaaaaaaaaaaaaanaaa

SEQ ID NO: 6987 - DNA, 412 bp, Gossypium hirsutum
  Clone ID: LIB3148-022-Q1-K1-F9
gactgatgctagagattgattgtgtaggattatgcaagaaaagatgcagtcaacactcgaggccaaacagatgcaacagggcgtgtgggacttgctcttgaggtgcaagtgcgtgccaccggggacttcagggaacagggaggtctgcgggacctgctatactggcatgaccacccatggaaacgtttccaagtgcccttaacctttacgtcgcccaatttgtgttgcagcctttatgggaaaaaattgaattgtttgtttgtgtaatatgtttgttgtatcttaaaacctatcaacttactttgaaatataatatagtacttggtagtttattttttttaaaaatttttattttttttaaagtcctttctttattttttatatttaaatttatttttaatatatttttatt

SEQ ID NO: 6988 - DNA, 298 bp, Gossypium hirsutum
  Clone ID: LIB3272-052-P1-K1-F11
gccatggcagaccgtatgcttcttgggttaggtgtcctgctactctgccttgcaaaggtttcatctgatctgaaggcagaagaagttataaccaatgtcggtgaggtgggttctttggttaccagaggcggaaacagatgactgatgctagagattgattgaggagggttctgcaggaaaagatgcagctaacactcgaggccatacagatgcaacagggcgtgtgtgacttgatggtagaggtgcacgttcttgcgagcgtttgcatggagaaacagggaggtcctactatcctgtt

SEQ ID NO: 6989 - DNA, 542 bp, Gossypium hirsutum
  Clone ID: GOSHI-09MAY01-C33861_3
cccacgcgtccgcccacccgcccgcctggtttctcttcctcatcttctcccaagctagggttactcttcttcttccttctctctctgggcttttacattcctctttcttgggtttttagggttcctgaaactcttgcagtcgtttgatttttttgttggtatctttttcctttggatatggatctgtgatttttcattaaaagcaaagttctcaaatggatgctcgtaaaagaggaagacgcgaagctgggttcaatgctaatggcggcatcaagaaatctaagccagaaatggaatctttatcaactggtgtaggaagcaaatcgaagccttgcaccaaatttttcagtactgctggttgtcaatttggtgagagctgccatttcctgcactatgttcctggaggttacaatgcggtggcccagatgatgaaccttgcaccagctgttccaccggcttctagaaatgtgacagcaacagctgcagtcccgcatggatctggctcccaagtcaaaactcgcttatgcaacaaatttagtggt

SEQ ID NO: 6990 - DNA, 786 bp, Gossypium hirsutum
  Clone ID: GOSHI-09MAY01-C33861_2
gaccaagccttccgccaacccttccgttgaagtcccgattggatctggctcccaagtcaaaactcgcttatgcaacaaatttagtggccctgaaggttgtaagtatggtgacaaatgtcattttgcacatggagagtgggaacttggcaagcctattgctccatctcaagatgatccccgttccatggcacctcttcctggtcgtatgggcagtcggatggaaccaccacccccatcaggtcctgctgctacgtttggtgcttcagcaactgcgaaaaattagtgtggatgcttcccttgcaggagccatcattgggaaaggtggtgtgcactccaagcagatatgtcgtcaaacaggtgcgaagctatctattcgggagcatgagtcagatccatcacttaggaacatcgagctcgaaggatcatttgagcaaattaaagaagccagtgcaatggttagagaactaatcagcagcctgggtccagtaccaggtccagccaaaacagctggtgcacatggtggtcaagggcatccgggaagcaactacaaaacaaagttgtgcgacaattttgcaaagggaagttgcacttttggagaaagatgtcactttgcacacggtgcagccgagttgcggaagtcggtggtgtgagggctaaacaagtgcattctaagtagttaataggattgagatattatgcagtcttgtatgagttagagccttgtttaacattctagctgtgctatactatctagttgaagtgacatgtattgagttttttattttt

SEQ ID NO: 6991 - DNA, 1225 bp, Gossypium hirsutum
  Clone ID: GOSHI-09MAY01-C33861_1
tcttcctcttcctcttactcttcctcttcctcttcctcttcttcacccaggggacccccgcccgaagctagggttactcttcttcttcgttctctctctgggttttttacattcctctttcttggggcattttagggttcttgaaatttttgcactcatttaattttttctcggttttctttggatctggatcactgaaagaagttctctaatggatactcgtaaaaggggaagacgtgaagctgggttcaatgctaatggcggcatcaagaaatctaaaccagaattggaatctttatcaactggtgtaggaagcaaatcgaagccttgcaccaagtttttcagtactgctggttgtcaatttggtgagagctgccatttcctgcactatgttcctggaggttacaatgcagtggcccagatgatgaaccttgcaccagctgttcaaccagcttctagaaacgtggcagcgacagctgcaatacctcatggatctgcctctgcggtcaaaactcggttatgcaacaaatttagtagtcccgaaggttgtaagtttggtgataaatgtcattttgcacatggagagtgggaacttggcacccctattgctccatctcttgatgatccccgttccatggcacctcttcctggtcgcatgggcagtcggatggaaccaccacccccatcaggtcctgctgctacatttggtgcttcagcaactgcaaaaattagtgtggatgcttcccttgcaggagccatcatagggaaaggcggtgtgcactcgaaacagatatgtcgtcaaacaggagcaaagctatctattcgggagcatgagtcagatccatcacttaggaacatcgagcttgaaggatcgtttgagcaaattaaagaagcgagtgcaatggttagagaactaatcagcagcctaggtccggttccaggtcctgccaaaacacccggtgcgcatggtggtcaagggcatccaggaagcaactacaaaacgaagttgtgcgacaattttgcaaagggaagttgcacgttcggagaaagatgtcactttgcacatggtgcgcggagtgcggaagtcatagtgtgagggctgcattggtacagtgcattcaagtagctatagctggagatcatgtatgaatgttgtatcagatgagccctggtaacatgctagccgtgattgctgcatttactgttgagttttactataagctag

SEQ ID NO: 6992 - DNA, 359 bp, Gossypium hirsutum
  Clone ID: GOSHI-09MAY01-C33801_1
ggaagcaacacttgccggtaacacccaagtatttagtgggttggtccaaggaagatagtgagagaggagaggccgcatttcatcttcatacttatgtgtgcatagtttaatgatattccagaactaaaaaaggaggaaaaaaaaaggagaaaatatgatatgctagtatgtagaccgcattccttggttttatctcttatttcatcatgtgtcagtattgacgttagattacattttatgcgggtgaaaatttttgatgtaaaatgccacgtacaagcattttgggttaacgcgtgtttcgtagatggttatttccttatttgctgtttaaaataaaaaaaaaaaaaaggcggccgctc

SEQ ID NO: 6993 - DNA, 1143 bp, Gossypium hirsutum
  Clone ID: GOSHI-09MAY01-C33831_1
ggaatggcctgtactttgcgatgaaaactatggataaaggcattatgctcaaccggaacaagcgcatagagcttgtgcatgaaagagaaattcttgacatgttggaccatccttttcttccagcattgtatgcatcatttcagaccaaaaacatatttgtctgattatggattactgtcctggcggagaacttttcatgcttttggacagacaaccgatgaaggtcatgaaggaagatgctgtaagattttatgctgcggaggttgttgttgcattggagtaccttcactgtcaaggaattatatacagagatttaaagcctgaaaatgttcttctccaggacaatggacatgttgccttgaccgattttgacttatcttgcctgacatcttgcaaaccccagctgctgattccagcagcagatgaaaagataaaacgccagaaaggtcagccaaaaccagtatttatggcagaacctatgcgtgcatcgaattcttttgtggggactgaagagtatattgccccggaaattatcactggtgcaggccataccagtgcagtggactggtgggcacttggcattcttgtctatgaaatgttgtatggatatacaccattcaggggaaggacaagacagaagacttttgccaatgttcttcgaaaagatcttaaattcccaagaagcacacaagtaagtctgcatgcaaagcagttaatatttcgattattagatagagatccaaaaagcagattaggttggcgtgaaggtgcgaatgaaatcaagcgacacccgttcttcaaaggtgtaaattgggctcttgtgcgctgcatgaatccacctcagcttgatgttcctggagctctcaaggaagatcaactttcacaccttcaactacatgatttacagacaaatattttctgagattcagtggcttgcagctgcatgtatatttcgtgttattctacaagtatagatttttttttaatcactcaaactataaaaatatattaattagtgttcacacttcacaagctttgaataagataatatttataacaatgtttaatcgcttcttttataaaaaaaaaaaataataactatcccacgatattcatgcttaaacaaaaaaatttctagaataa

SEQ ID NO: 6994 - DNA, 699 bp, Gossypium hirsutum
  Clone ID: GOSHI-09MAY01-C33541_1
ctcgtctacccattcctggcacaggagtttttctacctcctccaggctccaattcagcatctcaacagtcgtcaacaactgcaaccgagcccaacattcctgtggagacaactttcccccccgaaggaaaatgagatggagtcagggaaaaccaatcagcatgcagcttctcctgaagtggggttggataaaaaatctccaaagcaggactgcaatggaagtgtagatggaagtgtgagtgggagagctatggtgaaggaagaagtacaatgtgctgagaatagtgtcaagcaaagctgctaatgcagttgtgagagagagaaagagagaaaagcagttaggctgcaaactccaatgagttaaaagcaaatgtaaagagcggcaacagtcgagacatttggcatttgatacgagtaggtgggagggggagcaaaggggagggaggaacttctcagttgtctctgcaatccttcatgttgtcttttccatttcttttttgctgtcttagtatatgaacacactcacgctaggtggaaaactccattcttaatataccttttgcttcttattcatatctatctgctttacaattttcatactctgagatgccttgccaaaaatctgcaatgctggaaacatgtaatagcccaatcacatacatcaaatacaaaaatccatagctgcttctttcttcctttt

SEQ ID NO: 6995 - DNA, 441 bp, Gossypium hirsutum
  Clone ID: LIB3135-005-Q1-K1-B8
attcatcatctcaacagtcttcaacttctgttactgaacccaacattcctgtggaagcttgctccccactgtaaaatgagattgagtcagggaaaaccaatcagcatgcagcttctcctgaagtggggttggataaaaaatctccaaagcatgactgcaatgcaagtgtagatggaagtgagagcgggagagctatcactaaggaatgaagctcaatgtgctgataatagtgtcacgcatagctgctaatgcaactccgagagacgagttcttgttgattagcacatttggctgcaatcctcaatgtgttgcgggcgaatgtaatgatcgtccccagtagagacattttgcatctgataaaacaccgtagattgagcttcaaacttttttcttgaaatttttgatttccaacttcaaaccattcattgcttttttttaccc

SEQ ID NO: 6996 - DNA, 513 bp, Gossypium hirsutum
  Clone ID: GOSHI-09MAY01-C33451_1
gcatattgctgctggagatttactgagagcagaagttgccgccgctagtgaaaacgggaagctagcgaaggaatacatggagaaaggagaattagtccctgatgaaatagttgttatgatggtcaaggagcgtctgctgcaacctgattctcaacaaaggggttggcttttagatggctatcctaggagctcatcccaggcagctgctcttgaggattatgggatccgtcctgatcttttcattttgttggatgtttctgaagacattcttgttgagagagtggttgggcgaaggttagaccctcttacggggaagatataccacttgaaatattctcccccggaggacgatgaaattgcatccaggcttacacaacgatttgatgatactggaagaaaaggtgaagttgcggctacgcacacatcaatcaaaatgtggatgctgtgctctctgtatataaagatatcacagtcaaggttaatggaaatgaggccaaggaacatgtgtttgca

SEQ ID NO: 6997 - DNA, 864 bp, Gossypium hirsutum
  Clone ID: GOSHI-09MAY01-C33471_3
gccaggacagcccataaagccccaagccaacctgagagccggtgctgttggtcccgatgagagcaacgaaatggtcgaaagagagggcgtagctgtatctaaatcaacagatgcccaagggaaacttgttgttaacgaagctattgctgaccatacggtatgtgagtgtcagtacaatccatatgatttgcgaggcattaccctttctccatctccatctccaacgataagaaatattcaatggacagctccatctccgtccccggctgcggctcccaccacgggtgatgttgttgatcaaagtggcatcaccattggagaagctttggaggcaacagtcctctctgttggtgacaaaccggttgaccaaggtgatgccgctgcaatacgagtggctgaagcgagggctgctagcagcaggctaactcaacatagtggtcttggcactagagctcaagctgctgccactttcaacgaccgtgcgtcttatggtcataataagatcactatatcagatgttttatcggatgcttcggaaaagctgcctacggttaaagcggtgacaaatgaagatgcagaagaggtgagaggggcggagcaaagaaacaaggctgacatgatagccacggctggaggagtggcggataccatggcgacagctgcgaagttaaacagggacattcatacgccctgatgcttgtattacatatttatacattatatagtagacttagttgatattaagggccgcggccggctctttatcgtccgagttttattagcgtaagactccatctgggttgtactgtggctcctgtagctgtcttcaacttcctgtatcgaagctgttttacctttgaatct

SEQ ID NO: 6998 - DNA, 767 bp, Gossypium hirsutum
  Clone ID: GOSHI-09MAY01-C33471_2
acccttccaagtccctttctttgatttcatctacagggaaaattatgaaccagagacaagcaataaggcctcaagcagccgaccaggctgtcgactacggcgatgttttcggtgtcaccggtgctacgccttcatttccaactccaacgggtgcggttggtgaaagtggcatcaccattggagaagctttggaggcaacagctatctctgttggcgacaaaccggttgaccgaggtgatgcagctgcaatacgagcagctgaggccagagctgctggtggtaacgtcacccaacgtagcggccttggcgccaaagctcaagctgctgtcaatttcaatgaccgtgtggcttatgattacaataaaatcactatatcagatgttttgtcggtaataaagacttgataaattaagcccaacacttgttaacccttcactttaccagttacattacacagcagacaagaagtaaatccctcattcgtctaattttcttttttttttttgtttgggaccgacaggatgctagtgggaagctgcctcacgataaagccgtgacaagcgaagatgctgatggcgtgagaggtgcggagctgagtaacagtaccgaagcaatgcccacaccaggaggagtggcggataccatggccacagctgctagggtaaatcgggatgataagccatgaacaacttcatttctgtagccaatgttatggttctactaaagcagttttatggtagaaattaaatcttcatgctttgttgcat

SEQ ID NO: 6999 - DNA, 949 bp, Gossypium hirsutum
  Clone ID: GOSHI-09MAY01-C33471_1
cccacgcgtccgcttccaagtaccccttctttgatttacatctacagggaaaattatgaaccagagacgaccaataaggcctcaagcagccgaccaggctgtcgactacggcgatgttttcggtgtcaccggtgctacgccttcatctccaactccaacgggtgcgggtggtcaaagtggcatcaccattggagaagctttggaggcaacagctatctctgttggcgacaaaccggttgaccgaggtgatgcagctgcaatacgagcagctgaggccagagctgctggtggtaacgtcacccaacgtagcggccttggcgccaaagctcaagctgctgtcaatttcaatgaccgtgtggcttatgattacaataaaatcactatatcagatgttttgtcggatgctagtgcgaagctgcctcacgataaagccgtgacaagcgaagatgctgatggcgtgagaggtgcggagctgagtaacaatactgaagcaatgcccacaccaggaggagtggcggataccatggccacagctgctagggtaaatcgggatgataagccatgaacttcatttctgtagccaatgttatggttttagtaaagcagttttatggtagaaattaaatcttcgtgctttgttgcatatataatggatgatccgtggctggccatttacgagataaaaaaatgtagtcaataaattgcggttactaacagcagtaaattagtatgttgaccatgggagcaaaacaatacaattagttttgttgtagtagcttgaattgaaaatccatgtatagtttccaactttccatactacataccccaccttctcagttgctagcactttggcctgagtaagttaagcaagacggtcgattgcttgaaatttattttgctctataattcggatctctgaattaataaactgagatttacatagttgtac

SEQ ID NO: 7000 - DNA, 823 bp, Gossypium hirsutum
  Clone ID: GOSHI-09MAY01-C33411_1
cccacgcgtgcgctttgatcagttccatatgtaagaaagaaagaaatcaaatatgggttccatttccaagagtttccttctccttgcccttttagctgctactgttcttctcatttcatcggaagtggcagctcgagaccttgctgaaaccaccactgaaaagaacaatggtgaggtggctactgaaacaaccgaggctgaggctcaggtagaagaggccaaatatggatatggtggatacgggagccgtggaggttatggaggatacggagggcgcggtgggtacggaggatacggagggcgtggtgggtatggtggtggttacggtggacgaggacgtggacgtggacgtggaggttatggaggaggttgtgcctatggatgctgtcattcagattattacggaagaggttgccgaaggtgctgcgcttacgttggggaggctgtgaatgttgaaacacatgctgatcctctctactaaaataaaatcattccaagttgcatgtatctaaaaaagtaaagtggcatagcaaatcttacaatttgctacgtcctaaataaagatgcttccttaatattcaggaattatattattatctccctcccctccccccctccccccccctcctcttcttctcctcccctctccggccccccctccgtcccgcctccccccgcctcctttctcccgctccctttctcctcctctttcccccccccccccccccgggggaatccctccctccccccccctttcgtttccttttccccccccccctccggccccccccttttacacccccccttactcggggaaaccccc

SEQ ID NO: 7001 - DNA, 472 bp, Gossypium hirsutum
  Clone ID: GOSHI-09MAY01-C33771_2
cggaatccgggtcgccgaaggcgtccgcccacgcgtccgcaaatactttgatcagtttcataaaaaagaaagaaatcaaatatgggttccatttccaagagtttccttctccttgctcttctagctgctgttgttcttctcatttcttcggaagtggcagctcgagatcttgctgaaactaccactgaaaacaacaatggtgaggtggctaccgaaacaacccagcctgagctagaagataaacgctcagcttataatggaagaggacacggaggtaaaggagggtatggaggtgggcacggagggtatggaggtgggcacggagggtatggtggtggacacggagggtatggtggtggacacggagggtatggtggtggacacggagggtatggtggtggcggccactgagggtatggtggtggtggccaccgaggatattgtggcggtggacatggatgaggttataaag

SEQ ID NO: 7002 - DNA, 805 bp, Gossypium hirsutum
  Clone ID: GOSHI-09MAY01-C33771_1
cccacgcgtccggaaagaaagaaatcaaatatgggtccatttccaagagtttccttctccttgctcttttagctgctgttgttcttctcatttcttcggaagtggcagctcgagatcttgctgaaactaccactgaaaacaataatggtgaggtggctaccgaaacaacccaggctgagctagaagatggacgcggaggttataatggaagaggacacggagggaaaggagggtatggaggtgggcacggagggtatggtggtggtggccacggagggtatggtggtggccacggaggatacggtggtggtggccacggcggtcacggtggacatggaggaggttataaaggaggctgcgcctatggctgccctcgcgcccgtcatcacggtagaggctgccaaaggtgctgctcttatgctggcgaggcgggcgaagttgaaactcacgcctaatgtagccttttgcatttacagttggcatgtatcttaataaataaatgggcatacgtcctaaatgaaaatgcttccttaatatagtgatgtaagtggaagtataaagcaataaaattgtgcttttacttttcaaaggacaaatccgcgcgacccatatacccaaaaaaaaaaaaaaaaaaaaaaaaaaaaaaaaaaaaaaaaaaaaaaaaaaaaaaaaaaaaaaaaaaaaaaaaaaaaaaaaaaaaaaaaaaaaaaaaaaaaaaaaaggggggccccctccggaactaaaaatgcccccctggaaaaaaaaatttttgggggacccccccccgggggggggggtggttacc

SEQ ID NO: 7003 - DNA, 356 bp, Gossypium hirsutum
  Clone ID: LIB3165-033-P1-K1-A12
caaatatgggttccatttccaagagtttccttctccttgctcttctagctgctggtgttcttctcatttcttcggaagtggcagctcgagatcttgctgaaactaccactgaaaacaacaatggtgaggtgcgctaccgaaacaacccagcctgagctagaagataaacgctcagcttataatggaagaggacacggaggtaaaggagggtatggaggtgggcacggagggtatggaggcgaccactgagggtatggcggcggacacagcgggtctgcgggtgccgcccgacggactgactgggaacggctcccttgggggccttacccgggcgacgaacagtcgacttagaactg

SEQ ID NO: 7004 - DNA, 411 bp, Gossypium hirsutum
  Clone ID: LIB3146-051-Q1-K1-C11
acggagggtatggtggtggtggccacggatgtatatggtggcggtggacatggaggaggtgataaaggaggctgcgcctatggctgctgtcgttcaaattacggaagaggctgccaaaggtgctgctcttatgctggcgaggctgtcgaagttgaaactcacgcctaatgtagccttttgcatttacagatggcatgtatgataataaataaatgggcatacgtcctaaatgaaaatgcttccttaatatagtgatgtaagtggaagtataaagcaataaaattgtgcttttactttaaaaaaaaaaaaaaaaaaaaaaaataaaaaaaaaaataaagaaaaaacaaaaattaaccaaaaactaagcattaagcttaaaacaaaaatataaacttgaccaactacttcaat

SEQ ID NO: 7005 - DNA, 166 bp, Gossypium hirsutum
  Clone ID: LIB3493-004-P1-M1-H8
cccacgcgtccgtcctaaatgaaaatgcttccttaatatggggatgtaagtggaagtataaagcaataaaattgtgcttttactttttccctatttggttgctacggtcatgttcgaaacgtaccactgcggaactaattaaatttaaagcttatcttctctcttt

SEQ ID NO: 7006 - DNA, 460 bp, Gossypium hirsutum
  Clone ID: GOSHI-09MAY01-C33641_1
gggcaaccgcagattgtttcatctgatctgaaactccgtcgcccaattccccaaacaaagcaaatcgatggcgtctcctcctggaccatactccggcaccagcactctcgctctcgtggctcgtgcatctgctttctcttttggactcgtttatggtagcattaagctcaagtatctcaaggccaaggcaaggtctcaaaggaaagctgaagcaaaggctcaccactgaagcaggggtggtttttgttcatagttggtttgcatgagtgaattgagtttggtgtaggaataaagcatatcaatggtattgtaccagattttcatttcggcttaaagcttctacggacaatgacattcttgtccccaaatttttttagtattacgaacttggcatttcaagtattaatttttcggttggcaatggcactactgacgtttagtgtctttagtaaatgggaag

SEQ ID NO: 7007 - DNA, 444 bp, Gossypium hirsutum
  Clone ID: uC-gsflmaxxa004d09b1
gcttattgtttcatctgatctgaaactccgtcgcccacttcccaaacaaagcaaatcgatggcgccgcctcctggaccatactccggcaccagcactcttgctctcgccaaggcaaggtctcaaaggaaagctgaagcaaaggctcaccactgaagcaggggtggtttttgttcatagctggtttgcatgagtgaattgagtttggcgtaggaataaagcataaaaatagtattgtaccagattttcatttcggcttaaagcttctatggacaatgacattcttgtccccaaatttttttagtattacgaactcggcacttcaagtattagtttttcggttggcaatggcactaccgatgtttagtgtctttagttaatgggaaagatgttggatgattatatgcttccatgttcaatgtaataattctcactttttggctccc

SEQ ID NO: 7008 - DNA, 761 bp, Gossypium hirsutum
  Clone ID: GOSHI-09MAY01-C33041_1
ccgctatccaaaatcaccccctaatttctctctttctatttatttatgtttcgacagctttaatttgtacatttaattcttcatttttatttatttattttccaattaccgaaactttttaaagcgcgtaattggttagtaatttattgttcttataataaaaagctcatatatatatgtcataatatatccctccgttttatctatttgtcttttggctttgttgggggaaaaaggaaacagcaaaagccccagtaaaaagaggcaattcgatttggtaggaggtttcctctttggatgggaaagaatgcaagttttgagaggcggaattcgacaatcgaagaggatcaacgacaatccggagagctctgcttccttagttccgactgctcggaatgctgctcctaatagaggtagaggtagagggagaggtaggggtagagggcgcggaggaatgaatcctgaagaaaatcaaaagcttgttggtcccagtgcttgtggccggggttgcaatggaataaacttgccagtgagacaggtcgttgaaaaaagtgcagaaaaaccggttgctgtcaaggaagaaggaagcactagttcactacctgaaagggtacaacttggtaactctcctgtgtacaagttagacagaaaactcggtaaagggggtttcgggcaagtttttgttggaagaaggatatctggtgggacggggtgcagtggaccagatgctttcgaggttgctttgaagtttgagcatcaaa

SEQ ID NO: 7009 - DNA, 1044 bp, Gossypium hirsutum
  Clone ID: GOSHI-09MAY01-C33391_1
atttgattctgctgctttacttgaagaagcggaatcacaaattttgttgttcattttctcgtgagccggttgtttgttattggataccgagactccaagttttggatttttctgatggggaaaaatacattgcccccggggtttcgatttcaccccaccgatgtagaacttgttatgtattatttgaaaaggaaagtattaggccagaagctcttgttgaatgtgattgctaaagttgatgtttataagtttgctccctgggacttgcctgatatgtcctgtatgaagaccggggatcttaaatggtacttctattgtcccatcgagaagaaatatgctagaggggatagggtgaatcgagctactatattcggctactggaaagccacgggaaaggatcggcccgtgaagtacaatgacgaagttgttggaatgatcaaaaccttggtatttcacaaaggtaaagctccacgtggtgaccgaacagactgggttatgcatgagtataggcttgaagaaaaaatattggctgacagagggcctgttcaagatatgtatatgctttatgttgttttcaagaaggatggtctgggcccaagaaatggttcccaatacggggccccattcaaggaagaggagtggagtgacgacgagcaggcagatgtgcctggtgcgggcgcccgggccggcccgtctacagtagctgttggtggtgataatagctcctgtgtccccgagagtgtatgtgctgggccttctgtcgagtcaagtgggtggtgtacacaaccatcgatgggtcatactaatggcgatgttaatgtcaccactgccattgatactaatgcttatgctgcccctacatgcgcggatgcccctgaagttccagtggtcgctgttgctgaggatgttcctacattgttggaggcgcctcaacctgctctggttcctcaagatcaagaatcgaatgataacatgttatctatgttggagtgcttctttgaagagggtgcatttggtacacatgaaagtcagaggaggggcaat

SEQ ID NO: 7010 - DNA, 637 bp, Gossypium hirsutum
  Clone ID: GOSHI-09MAY01-C33381_1
cccgactcgacccatcgcgtccggccacgcgtccgagcgagttgaatctatggcgtcctccaagttacaggctctgtggaaccaccctgccggacccaaaaccattcacttttgggcaccaacttttaaatggggcattagcatagcgaatgtggctgactttgctaaaccaccggaaaaactttcctaccctcagcaaatagcggttactgcaactggaattatctggtcacgctacagcactgtaatcactccgaaaaattggaatctcttcagtgtaaacattgctatggctggaacaggcatataccaactaacacgaaaaataaaacatgattacttttcggaggcagagccagccgttgcatctgaatgatgacgaaatcttctgaaatcctttgtttttaatggaacaaattatcagttatcttgccttgtttttctgttaattaaaagttacactttggccctatggctttgaattattcaagcatgttgtgctgtggaaaaattggaacttgatgatgatgatggtagagccatcaactgatactggactgagcaacagaatcccaaaaatttttaataatgcttttgttccctcaaaaaaaaaaaaaaaaaaaaaaaaaaacaaaaa

SEQ ID NO: 7011 - DNA, 548 bp, Gossypium hirsutum
  unsure (1)..(548): unsure at all n locations
  Clone ID: LIB3828-024-Q6-K6-B1
gtatgaatctggggggtggtggggctacaaactatgtggaaccaccctgccggacccaaaaccattcacttttgggcaccaacttttaaatggggcattagcataacgaatggggctgactttgctaaactttttttttaactttcctaccctcaacaaagaggggggggtgcaactggaattatccgggcacgctacaccactggcagggctgcgaaaaactggaatctgttcagtgtaaacattgctatggcctgcaacaggcatataccaactaacttcgaaaaataaaacatgattacttttttgaggccaagccgtgcattgcatctgacatgatgatgaaatcttccaaaattctgtgtttttaatggaacaaattttcagttatcttgccttgtttttttgttaattaaaagttacactttggctctctggcttggctttgaattactcaagcatgttgtgttgcggaaaaagtggaacttgatgatgatgattgtagtgcctgnccttatcgcctcactttcaacggtttatcataaccc

SEQ ID NO: 7012 - DNA, 507 bp, Gossypium hirsutum
  Clone ID: uC-gsflnu33B016b09b1
aaagcgagttgaatctatggcgtcctggaagttacaggctctgtggaaccaccctgccggacccaaaaccatacacttttgggcaccaacttataaatggggcattagcatagcgaatgcggctgactttgctgaaccaccggaaaaactttcctaccctcagcaaatagcggttactgcaactggaattatctggtcacgctacagcactgtaatcactccgaaagattggaatctcttgagtgtaaacattgctatggctggaacaggcatataccaactaacacgaacaatcaaacatgatgacttttcggaggcagagcacagccgttgcatctgaatgatgactaaatcttctgaaattctttgtttttaatgcaacagattatcaggtatcttgccttgttttgtgctaatttgtgccattgagatcagaggattacagaagatggcgtcctccagatacaggctctgtggaaccaccctgccggacccaaaaccatttac

SEQ ID NO: 7013 - DNA, 667 bp, Gossypium hirsutum
  Clone ID: GOSHI-09MAY01-C33351_1
gtaatcctatgaaagactcgtctggtgattacccttctgagaagagatctaagcgtgagaatgaccagtcttacataccatctcagaatcctcaacaagcctcagttccaccattctcgcatcctgaatcacaccaacataatgttgtgaccaccacccagcagttggctctaaatgaggtgccacctcctccatcatcgtctcctccacctctgccaccactgccgcctatgccaccgtatgctgtgccccagtacatgccaactgctggatcaataaatggggtgacatatagctatagcatgacatcacagcagccttccttgcctggttattccatagctggagctgcaatgagtggcatctccttatttgccacatcatcaactaattcttaccagagtttccaaagctctgaaggttttcataaccagccgtcatccttgccaacggcacctatttctcgacagtagttcagataggatgctttaaaatgaattgttcttgttagataagacttggttcttcagaaactaatcctctcagcagtcagcaccagaccaatctttgttctgcatgtgcacaatgtaaatttcttgtaacttacatatatcaattgtgttcgagtctttgttatttaaaactatttatggcattcttggattgt

SEQ ID NO: 7014 - DNA, 1133 bp, Gossypium hirsutum
  Clone ID: GOSHI-09MAY01-C33341_1
cccacgcgtccgcccacgcgtccgcccacgcgtccgggtgattcttggaaaaccaaacgtttctgatattttcccggtgcttgcaaggtttgacatacagggattggagaaagagatgactaaaatcgttaattctttcgataagcttttcaactccatgattgaagaaagagagctctttagcaacaaattgagcaaagaagatggaaacactgaagcaaaagacttcttgcagcttctgttggacctcaagcagaagaacgatagcggaatatcgataacaatgaatcaagtcaaggccttgctcatggacattgtggtcggtggaactgatacaacatcaaccatgatggaatggacaatggctgaactaattgcaaatcctgaagcaatgaaaaaggtgaagcaagaaatagacgatgttgtcggttcggatgccgccgtcgatgagactcacttgcctaagttgcgctatctagatgctgcagtaaaggagaccttccgattgcacccaccgatgccactccttgtaccccgttgcccaggtgacttaagcaacgttggtggctatagcgtaccaaagggcaccagggtcttcttaaacatttggtgtattcagagggatccacagctttgggaaaatcctttagaattcaagcctgagaggttcttgactgatcatcaaaagctcgattatttaggaaacgattcccggtacatgccgtttggttccggaaggagaatgtgtgccggagtatctctcggtgaaaagatgttgtattcctccttggcagcaatgatccatgcttatgattggaacttggccgacggtgaagaaaatgacttgattggcttatttggaattattatgaagaaaaagaagcctttaattcttgttcctacaccaagaccatcaaatctccagcactatatgaagtaactttactattgtatttcttttataccactttattgcctctttgtcatgtttaggcaacaattctaagtaataagtttggctatatggtgaacaataatgtgtttattatacatcataagcaatgagctcttcccgaccctagggcaatacaatgatactgtgtattaagggaaatcaacaaatcttttattct

SEQ ID NO: 7015 - DNA, 365 bp, Gossypium hirsutum
  Clone ID: GOSHI-09MAY01-C33361_1
actttattctggtttttcaagaaagtaaaagcaaaccgttaaaatgggttctttaatggcgggatgggattctcctgtatcagaatcggatcctacatcagtaatacgccaacgaaatcgatcgttgaccaaggaagagatcgaagcttattggaaatcaaagaagcaaacggaggaagaacatcttaaagctacttttagtccatcatatacctgcactcactcttacctggaaacaccattggaggagcatggaagtaagaatctgagatcaaactccagccaggaggatgcagaaacaagcctggagaatatcataaagaaaaatggctggtggacaaggagcaattgggcattcttgaatg

SEQ ID NO: 7016 - DNA, 631 bp, Gossypium hirsutum
  Clone ID: GOSHI-09MAY01-C33311_1
ctgtctcgtgggtttaaaatgaagaaaccttccatggctttttaaagcttcggcacttacatagcaaaattcacatcaagaatgaataacatggaattggatcggtggaaaacgaaagttgtcgagtaatcgatcgtgtccgccgatatccgagatcttgaggtgcatacaaacacgggatcgtcagttaagtccatcacactattggatacttatcggattttaagctgaaattttctcgatactatggcatgtatagactagttgggaattggttctttggagagtatatttgtattaaaagccatgtgaatatggcttaatttgcttgctctactcgattttggattggattaaaggccatgcacattttggtgttggctcgacattataggcgtgcgtggtttattcgaactaggtatgagcttaatatatatataacatggatataggtgaaaggatacatgattttagagagggatgatgatgttggattctttttgcctggcagtttcagacaggtagaccaacaaggagctggtgttaatgttggacatgctcaaagtgcaaatgcttgtttaattccaatggtgcctactccaccacaagcttatacatctcctgatctcac

SEQ ID NO: 7017 - DNA, 827 bp, Gossypium hirsutum
  Clone ID: GOSHI-09MAY01-C33321_1
gaaaggaggataaggagagaagagatgctatagaccaaagaaccaggctgattctgttgtctaccagactgagaagcagctgaaagagctcggagacaaggttccaggtccagtgaaagagaaagtagaggcaaaattgcaggagctcagggatgcaatttcagggggctcaacacaaggtatgaaggatgccatggctgccctcaaccaagaagtgatgcagcttggccagtcactctacaaccaacccggtgcagcaggaggtcctggtggacctgcacctggtggtgaaactggaccttcagattcatcaaacaaggggcctgatggggacgtaattgaagcagatttcacagacagcaaataaaaaggcagggtttgaaccaggtacgagaattgggttttttgtggaccgttgatttggggggggggattgaatttcctatcatttttgttcccccgcgcggccggaaaacaattggttttaggagttgagaggatgaagcacgaaatatagggtgcgtatgggtgtttaaagcctaggaacattgtttcaattgttaatgggtttcttgatttggctcctatattgaaggaatgaaagttaagagtctttagggtctaaaaaaaaaaaaaaaaaaaaaaaaaggaaaaaaaaaaaaaaaaaaaaaaaaaaaaaaaaaaaaaaaaaaaaaaaaaaaaaaaaaaaaaaaaaaaaaaaaaaaaaaaaaaaaaaaaaaaaaaaaaaaaaaaaaaaaaaaaaggggggggccgttttaaaggatccaaattttcttccccgttcttgcaaaataaatatttttttt

SEQ ID NO: 7018 - DNA, 259 bp, Gossypium hirsutum
  Clone ID: LIB3135-002-Q1-K1-D9
ggatgaagcacgaaatatagaatgcatatgggtgtttaaagcctaggaacattgtttcaattgttaatgggtttcttgatttggctcctatattgaaggaatgaaagctaagagtctttagggtctaaaaaaaaaataacgaagagaaatacataaacggcgaacgacgcgctaaatccagatactgagtacattcgcaaattaaattcacggacccattatgcggcttcaaagagtacttctttgatcacctagaatc

SEQ ID NO: 7019 - DNA, 419 bp, Gossypium hirsutum
  Clone ID: GOSHI-09MAY01-C28981_1
aaaagatttactttcaaatctttacttctcttgagccctttctcagcttttgattaatctaaaaagtttcatccatgtttgattccgctccctctgcttctactttctttctcttcaacatcttccctttaataatcgggctttaaagttttctgcttttgatctttacatataggagtttattttcttgaattcgttttattagaagagaaaagaaaatgagggtagccaagtctcgggtatggcaaccatgcaagaagaagaggtatttgattaattgcaagctttgaaagaaaggttttcttgaaaagacaagggaaaataaatttaagagaaatacaaaggaattttagaggaagcgatggcgaatcgcactagtgcagcgagcaagacacgtgtggggaagtacgagctaggga

SEQ ID NO: 7020 - DNA, 411 bp, Gossypium hirsutum
  Clone ID: GOSHI-09MAY01-C28501_1
gtgttgaaagcctgttttaatttttatacaagggagaaatggtgcgagtggggtaagcactgagcatctctttttgttctttgtggggataagggaaaatggtagtagtagtagaggatcaaaagcaagagacaaataaggtaaagaatagtagcacttgccttacctctctattttcaaatttcaaaagtttgtgcagcaaatgagaaggggatttgatagacaagcaccaaaaccaacaccatcacccattcaaaaattataatagcaacaataatttacatctccaaacaaattaaaggagggggcattagcaaaggaatagcatatatgtaagattgcaagtcaatgccagttataaagatcactagaacccttttagttatattcccaaagcaatgattaacttga

SEQ ID NO: 7021 - DNA, 421 bp, Gossypium hirsutum
  Clone ID: GOSHI-09MAY01-C28531_1
ccttcctttttcttccaatagactccattttgttaattgtgatgaaaagggtctgattgtggggtcttagtactttgtgcttgatgtttttggtcctttgtgtttggatttgcatgatggagtctattctagtgaagggtatggagattatagcagtgtaatatttggttacttatttggcttttggcaacctgtttagattttgccacaatgttggatggtctgttatttagggacatttgggaagctatttagttggaacttggttccattttgacattgatcacttccttttgtggtaatgaagagcatagattagaatttctgggattattgtgtgctaatatgtcgtcaggttattagtagtttaggcattgtataaaatcgatgaccgattttagaaatagcatcctacattcac

SEQ ID NO: 7022 - DNA, 661 bp, Gossypium hirsutum
  Clone ID: AW187426.1
gcccggcttgtgtgcaagaaatggagacacttgaccacaactcctcggtttttacagatgagacgagaaggttcatgtcaaaaaccatggttgtttctctttggtgctgttaaggatggctattgctctggggagatacatgcactggacgtgtctcaagatcaatggcacaggatctgtgctgatatactcagaggtaggttcatgttctcagttgccagtatgcaggatgatatttatattgttggaggttgttcaagcttaaccaactttgggagggtagataggagctcattcaagacacacaaaggtgtgttagtctttagccctctcaccaaatcatggcgtaaagcttcatctatgaagtttgctagatcaatgcctattttaggaatatccgaggtctgttcagatttttcggtcattcaaagccatcagaatcgacatgataggcagtttcccagatcccgagttggtggggtgtcagatgtttacgaggatcctcacaggctttcactcaaacttcagtacagaaatgcttttgatgaaaatgggccttcattattaccaaataaaagatcatacaagtgtattagaacaagaaatgaacaagcaaatatgaaaggttgtaaaaggttcgtgtcgattgctgtcggaggtc

SEQ ID NO: 7023 - DNA, 645 bp, Gossypium hirsutum
  Clone ID: uC-gsronu33B044d09b1
ttgatactaccattaaccagtcttatgaatgcccggcttgtgtgcaagaaatggagacacttgaccacaactcctcggtttttacagatgagacgagaaggttcatgtcaaaaaccatggttgtttctctttggtgctgttaaggatggctattgctctggggagatacatgcactggacgtgtctcaagatcaatggcacaggatctgtgctgatatactcagaggtaggttcatgttcttagttgccagcatgcaggatgttttttatattgtttggcatgttagtttcttctttttaccaaatttttaatgtttttattatctttttatattttatattttacttctgtttgtttatatttttttttattttttttattttattcgtcttatttttttcttcttccttaactttctaatttatttctttttgttattcattttctcaattttttatttcatattttattcattttaatttttttttttgcactttttttttttctcttttatatattaatttttttttcatcccttattattattttaacttcatttaatttatctttttctcttatttccttttttgttctttcacttttaattcctttcttttctttttttattctccaccttctttttt

SEQ ID NO: 7024 - DNA, 498 bp, Gossypium hirsutum
  Clone ID: GOSHI-09MAY01-C28421_1
ctttctttgttttttcttttttacaaatggatgcttcacagaaaactattcttgttactggtggtgctgggttcattggcactcacacagtggtacagctactcaatgaaggttttaaagtgtcaattattgacaatcttgataactctgttattgaggctgttgatagggttaaggaattagtgggtcctgagctctctaagaaactccagttcaacttgggtgatttgaggaacagggatgacttggataagcttttctctaagacaaagtttgatgctgtcatccattttgctggccttaaggctgttggggagagtgtcggtaaccctcgtcggtattttgacaataatttgattggcactatcaatctgtatgagatcatggccaaatataattgcaaaaagatggtattctcatcctccgcaactgtgtatggccaacccgagaaaataccatgtgttgaggattttgagttgaaggccatgaatccttatg

SEQ ID NO: 7025 - DNA, 656 bp, Gossypium hirsutum
  Clone ID: GOSHI-09MAY01-C28751_1
ggaagaatacgcctttagctgatgcagaaggagctaagaagcataatatgattgagttattgaaatcacatggaggattatcttatggccaaaatggaagccattttgaatcaaagcctgttccaccccctctaccaaacaagtgtgactgggaaattgacccttctgagctggacttctcaaattccaatatcatagggaagggttcatttggtgaaattttaaaagccagttggcgaggaacacctgttgctgtcaaacgcattcttccatcactttcagatgacagattagtgattcaggatttccggcatgaagtgaagttgcttgtaaagctccgccatcctaatattgttcaatttctcggagctgtcactgacaggaagcctcttatgttaattactgagtatttaagggggggtgatcttcatcagcatctcaaggaaaagggtgcacttcatccatcaactgccatcaactttgctttggacatcgctaggggtatggcttatcttcacactgagccaaatgtgattattcatcgggacctaaaaccgaggaatgtgcttttggtcaactctagtgcagaccatttgaaagtcggagactttggactgagcaagctcatcaaagttcaaaattctcatgatgtctac

SEQ ID NO: 7026 - DNA, 657 bp, Gossypium hirsutum
  Clone ID: GOSHI-09MAY01-C28111_1
ctgcacgaggtttttgtcaacttttcacaactccacttcctggaaatatccactgctggtttctttccccaaagaaatcccattgtttttatttagagattccttgtacaacttttcttgtttctcaaagaaggtccaagttgagtcagagaggatgttggagatgtgcacaaggccgttagagatgtgctttggaggaggtggaggtggaggcgatgagctcttatggcatatggatttgaagccctacgtttctggggactattccatagcagttgttcaagccaattcctctttggaagatcaaggtcaggtgtttacttccccttccgtcacttacgtcggcgtctacgacggccatggtggacctgaggcttcccgtttcatcactcaacatttggtcccttttcttcataagtttgcatcagagcatggggggttatcggcagaagtaataaagaaagcctttgatgctactgaggaggagtttctgcacttagtgaaacgatcgtggccagccaggccacaaatcgcttctgttggttcctgttgtcttgttggggcaattgcaaacgatgttttatatgtggctaatcttggtgactcaagggcggttcttggccggagagtgtctccaaatggacctaataatcaagt

SEQ ID NO: 7027 - DNA, 907 bp, Gossypium hirsutum
  Clone ID: GOSHI-09MAY01-C28071_1
cagtctttataaaaaatgagtcattttcatacagtgggggttttgcttatgtaattttcccaaataattaattaattttcatcaattaggtaaaaaaaatcaaattttgctgaagcctagctagattctttcagagcttaacagtgttataaaaaataagaggtacttcccacgcggtcgaccacgcggccggtgatatggatttcctgaattggttaatgtactttgttttctacttgatattgtttcaagctttccttttgatcacaagaaggaaattggtaagatcccataagcttccgcccggtccaccaacaattccgatcttcgggaaccttttccaggttggtgataaaccccataggttccttgccaaacttgccaagattcatggggacatcatgactctgaaacttggccacactactaccgtagttttttcatctgcaacaatggccaaagaaatcctccaaaagcatgatgccgtatcttgtaaccgaaccattcccgatgcccttcgtgcccttcaacatcacgaagccggattgccttggatgcctgtttcaaccacatggagaaatcttaggaaaatctgcaatttgcatattttcgctactcataaacttgacgctaatcaatacttgaggcgcagcaaagtagaacaactccttgctggtgttcgggaaagttccctcatcggagaagcgattgagatacgtcaagctgctttcaaatctacgcttagtctcatatcaaatactatgttcgccattgatttagccgactctactcatacttctgaggagtgccgagaaattgtgcagggtatcatggatgagttgggaaaacccaactttggtgattatttccctattgctattcgtctcgtggcataagcgtgaatgca

SEQ ID NO: 7028 - DNA, 469 bp, Gossypium hirsutum
  Clone ID: uC-gsflmaxxa090d03b1
aaaatgagtcattttcatacgtgaggttcttttttaagtaattttgcggtatactcaactaattttcatcacttcggccaaaaaaatcaaataccgatggagccctgcgagattctatcagagcttaacagtgttataaaaaatcagaggtactttctattgcgtataacaagcagcaatcgatatggattttctgaattggctaatgtactctggtttctacttgatattgcttcaagctttccttttgatcacgagacggaaattggtcagatcccatatggttccgcccggtccaccaacaattccgatcttcgggaaccttttccaggttggtgataaaccccataggttccctgccaaacttgtcaagattcatggggacatcatgactctgaaacctggccacactactacccgagttttttcatctgcaacaatggcccaaggaaatccttcaaaaggcatg

SEQ ID NO: 7029 - DNA, 405 bp, Gossypium hirsutum
  Clone ID: GOSHI-09MAY01-C28371_1
aatcaaaagccatcctgtatttacattgatctgtaattcatacaatttttttaaaatatttgttgaaacttctgccaaaaaaaaagagaaaaagggagagagaacagacaagaattactaggagtgaaaatcagtaaggttgaagttgagcagctgagcagcttattcgcctccgcttcattggaaaaacttgctggaaacctccaccattggtggcggctacatgccactcgtccaacaccatcccttccacctcaaactgttgcaccgcactagacccatcatataaacacccttcttggaacccgccaagaccaagaccaggacccggtggtttggctttccggcggccagccccaacggggacgttccgtagggctccacctgctgtccagtacctttggc

SEQ ID NO: 7030 - DNA, 404 bp, Gossypium hirsutum
  Clone ID: GOSHI-09MAY01-C28211_1
cccacccccaactgtgcgatgtttttaatttgtaatagatcttcttatgcagtagtcctagtacttgctttcccctatgtcgcaagcttttgctcagtgatttcattttgtgggacttctcactcaaagctgaatgcttaggaaaacaagacttccttcaccagcaaactccaaaccataattcgctccaggagcaaaaagaaaagaacaagaagaaaatatcaaacttacatccacctctctccacctttctgtcttctctaacatgatgtttagttaaccatttttcttgtcatttttgcttgcaagtggtgtggattaaatggctatatgaaactatgttttgagtcgagcaagagagttataaggctctctttaactgggattcatctttatgaagtgat

SEQ ID NO: 7031 - DNA, 958 bp, Gossypium hirsutum
  Clone ID: GOSHI-09MAY01-C28201_1
ctttcccagagccggtaatatcacgaccacgtttgtggacatcggcgatctcgaagctgtgaaaaatgccatcgtcgaaggaaagaccaaagtgttatacttcgagtcgatgtcgaatcccacgctcaccgtagccaacattccggcactaagcagaatcgggcacgagaaaggaacgacggtggtcgtggacaacacgttcgcccccatggttctttctccggctcggctgggtgctgatgtggttctccatagtatctctaagctcataagcggtggggccgatgttattgcaggtgctgtttgtggccctgcaagcctggtgaactcaatgatggatcttcatcaaggtgcgttgatgcttctgggcccaaccatgaacgccaaagttgccttcgaactctccgagaggattcctcacttgggcctgagaatgaaggagcattgccgaagagccatggaatatgccattagaatgaagaaattggggctcaaggtcatatacccaggcctcgaggatcacccccagcatgagctattgaagtccatggccaacaaggaatatgggtatggtgggcttctttgtgttgacatggaaaccgaagaaagagccaataggctgatgcaccacttgcaaaactatactcagtttgggttcatggcggttagcttgggttactacgagactctcatgtcttgttccggcagtagcaccagcagtgaaatgaatgccgaagagaaggaacttgccggcatatcgccggggctggtgaggatgtccatcggatacatcggaacactagagcagaagtggagccaattagaaaaggcactgtctaggatgcaagatggcaccttgttgaataaaaactaatgtttgccttgggtgtgtaaagtcttgtttatgttgtttcagtagaactggagcgtttgcataaatataatgcttttttctttt

SEQ ID NO: 7032 - DNA, 671 bp, Gossypium hirsutum
  Clone ID: GOSHI-09MAY01-C129889_1
ccgtggtggtaattcaggatcgataagcagatccttaaccggaggcaattatgatttctggatacggaaattaaacaaaacttgtaggcaggagcagcggagaagcagttaggatttgcaaagcagattaaggagtggttgtgtgtgattggatcattcccaagagcatgcgtgaggtttgtttgcagttgcaggtacattggtttctttggctcatgaaacgaggctgaggtccttcccttttcggttgaggtcctctcccaattttgccttttagcttcatttgcagttctctttttgccttccacgttccttcccttgattcagagattttacaaggattcgacctttccccgttccatctttgaagaaaacaaaatgagcagctctcccaattatgtttgctgccatagaaatagactccttgttgtcttgctgttcctcctggtttcaagcttgacccaagttacattcatggctgctgaaggaaggtctctttccagttgcttgaagtactcaaaaagaaactgaagaagaagataagccatttatgatgagaaatctgataggtcaaggccgccaaggtgtgaaagaaagtgcagttcttggccctactgtgaaacaattcaagttcctgtcacaacactattcaaaaaccgtagagaacgccc

SEQ ID NO: 7033 - DNA, 564 bp, Gossypium hirsutum
  Clone ID: GOSHI-09MAY01-C129899_1
agaattgattgtccagtaagagctgttaaaggccatgaaattactaccgtaatagcaagcgtggaggatttgtaattaaaaattctggaaatttagataaggttttgctaattcctgccctgctacattatgaattgttggtatcagttgaatgaaagaggaacttcccttgttaccatgcttgatcaccatatttttttctttcctagttgaaaattgaatttaggtaaccatttctattcctaaactgggacctccattttcaaattaatgggaaaatatttctccagtttctgttatccatctgtgcattaagttaaccgtccgtttacttgtgactacagctcacaagatactgcctatcaatgtttaagacaagtccatacaagcaacacaaaattcactatattatgattctcacttacaatcaaattcaaacaatggctgaaaattacatgcacacacatacacacaacaaacatccatcaattctgtacccttacaaaaaaaaatgtattacagaacctaccaaataatgcactgtaagctatgagctaatgtttc

SEQ ID NO: 7034 - DNA, 939 bp, Gossypium hirsutum
  Clone ID: GOSHI-09MAY01-C129829_1
ccaaatcttttatcttcgacttaatcttttcgaaattcgtccttactttactcaacaacaaataatagtaattaaaaaaaagctataatatttccttttatttttttgaactaaataatatttccttgttaaagacgagtacgaccccaccgttgacttctgcctgtgatacctatagctgtaatttgagggagcttgatttatatagacagctggtgacaacccttgtttcccctcttcttaaattagttcacgcttttaggcattgaagaacctgggaatcattttcaacttttttttcccttctgtattgtcccattttctcactcttctctttgagctccaaaaccacaccaaagttcccattcaaccaaaattgatttggcactaattttttttcttaaaaagtgtgaaaaaggaagggtaaattcgcatgtcatgacttgaaaccgtgttcggaagctttgttgttgttatcgtcgtggtcttgtttcctccttctaatgtctggactagaatgtgatgaatttgcacatgagccaactgttatttcatcacttttatagctcaggcatgcagcagcatccaacaccccaatggggctttggggcacagtggaagctgagtgttgagttgccacattagcagttttagcagcagccccattaatgaatgtcaaatctttcatcagttcaacacacttcaaaactctaccctttcctacaaaggcgaaagatgaaactgccttgtcaatggataatgtttgcatatctcctgaaacagaaatagctattgctgcagcaatttcagaaggcctgaattccaagaagtcaatacctttgattgtgctcaatatcagttgcaatgatctggatattgacattgacgatggatattgatcattacaaattttactcagaaagtagtcaatgaaggaac

SEQ ID NO: 7035 - DNA, 631 bp, Gossypium hirsutum
  Clone ID: AW187097.1
tttttagtttcaaatatatgcttctgtctactactcttttcagtggacttttgccagggtttcctgttttcttattcaaagagtcactgctacgttctgttgaaattatggatctcggtgtgggcttctgttttggcgtttgggcctgtgccctccttagtttatggccttttgggcttttatcccgcttggaggctgtctgaccctatttgcaaatgcacaaaaacgaaggtttctcttttgtggacgtcggccattcatatcaacccaaggtatctctctacaatctaatggttaacaatggaagtttaataaaaccgtgggttttttagctgcttccatgtaattttcttcttcatatctggaaaatattactatgtaattcagaagtacttctgggtaagtctttttttctcaattttctaccttaactattgattaaatcattcatctcacattcttttcctatttagatacatacatatattttaatgaatttgggtctccctggtattctaggtgatagtttatttttaataaaactttggatatgtgataaatatttttgttttggggagtaaattttggtacataaatttgcatattattccaacatcgtctatgtattcac

SEQ ID NO: 7036 - DNA, 597 bp, Gossypium hirsutum
  unsure (1)..(597): unsure at all n locations
  Clone ID: AW187151.1
tttcaaattttttccttctgtcctcttttctttctcccagcctcctttcttgtcctttctttcttcacacacacaaatacggtacattaggtaaagaaaccctaagttttgtttatcgtttctgttatttgtgatttttgaaatcccctaattcattggagattcatttcatggatgaatatgtatttaactttgtttctttccttttcatctctgtttttagtttcaaatatatgcttctgtctactactcttttcagtggacttttgccagggtttcctgttttcttattcaaagagtcactgctacgttctgttgaaattatggatctcggtgtgggcttctgttttggcgtttgggcctgtgccctccttattttatggccttttgggcttttatcccgcttggaggctgtctgaccctatttgcaaatgcacaaaaacgaaggtttctcttttgtggacgtcggccattcatatcaacccaaggatgttgcttatggactccttgacgaagatatctttcantcgctgctgcatgagaggcatgatactatgaaagttgttaaagtgtgcgagaattcggtcttcaaatcga

SEQ ID NO: 7037 - DNA, 702 bp, Gossypium hirsutum
  Clone ID: GOSHI-09MAY01-C29291_1
caagaactgtccagatcttgttgtttttcggctatgcataatggggcgccacagggctgatcctgtgaccggtgaacccatggatgatgggtttggagccatagttatgaattgtaagaagctcactcgtcttgccgtatctggtttactgacagacaaagcttttggctacattggtcgacatgggaaattggtacgcaccttgtcagtggcttttgctggagatagtgacatggcgctgaaatatgtgctcgagggctgcccacagttgcagaagcttgagattagagatagcccatttggggatgcagctctgcgttctggtttgcatcactactacaacatgaggttcctttggatgtcgtcatgcaggctaacgcgccatggttgccaggagattgctcgtgctatgcctcgcctggtagttgaagtgattaggtctgctgatgaggaggagatggatgatgttgttggaacattatacatgtatcggtctcttgaaggaccaagaactgatgcaccaaaattcgtcaccatcttgtaggtaaatggggtgcaggaagctgtttcaattgttctcatgatagatacaaagcaagttttaaactgtttcacgggaatattgatacggaaggcatcttttaaatagctcccgtgttaaagttccagcaatccaaaccaagcaaaagttgagtaaataac

SEQ ID NO: 7038 - DNA, 633 bp, Gossypium hirsutum
  Clone ID: GOSHI-09MAY01-C129239_1
ccttcttgggacgaatcagcatcaggcggaaccaagtcaacgcaatggaagggtaccacgagcaagagattgaagacctagagcttttccaaaagcagctctccgatcgctttgccgagctcttatctgcccccgatgacgcccccactgaagcatttctctctatttcctggatacgcaagctggtcgacgtgttcctttgttgcgaaaccgaatgcaaggcaattctcttgatggaacgagacgcggctcagatctccaaaccccctctcgatcgcttgattcccgaacttctcgaacgcgtcgttaaagctatggacatttgtaatgcggtaaccaacgggctggagttggtcaggcattgccaaaagctggcggagattgccgtttcggctttggaacaaaaacccttcggtgaaggacaagcgaggagggccaaaaaagcgttggtttcactaatgtcggcaatgcacgtcgacgacaaagaaagctccgttcagaaaacggcggagcggagctggtcgttcggccgccgaagtggtaattaaagatcgacacccttggacattacaggtcacttttcttggcaggtaggccaagcattggtcagcattccaaacagattcacgcctt

SEQ ID NO: 7039 - DNA, 681 bp, Gossypium hirsutum
  Clone ID: GOSHI-09MAY01-C24951_1
acggagaaccaaaatacatatggcactatagatgaaaacaaaaggtttgaacatgctttaggtatatatggtgacgatgtacctgatagatggataaaagttgcagagatgatacctggtaaaactgttttagatgttattaaacagtacagggaattagaagaagatgtttacgatatcgaagccggtcgaattacgatccccggttattccacctcatattttacattagaattggtcgataaccatgattttgatggttataggaaaagacctaatggtgctaagggccatgatcatgaaaggaaaaaaggtgtcccatggactgaagatgaacacaggaggtttctaatgggacttgtaaagtatggtaaaggcgattggagaaatatttcatggaactttgtggcttcaaagacacctacacaagttgctagccatgcccaaaaatattaccaaaggcaactttcagggggaaaagataagaggagaccgagcattcacgatattacagttcttaatctcactagcaccactacgttttccgaccatcgtaaggctctgtctgtaaaccagtctaatgtccttgcattgcagcataagatagcgagtatgtcaaaagctgtaagccttaatgggtcggatactagtttcgattcggagaatggaaacaggtttaca

SEQ ID NO: 7040 - DNA, 605 bp, Gossypium hirsutum
  Clone ID: GOSHI-09MAY01-C24941_1
gaaaaagtaggattaaactctttcacgtcacttcccccatatcactacaatttcatctctagactcggtttcccaaagattagaaactctatcaccatgccacccgccccatcggcatccccaccgacaccatctcatcccaccactcaccacgtccttcaagccctgttagcctcctcacgtcccttccttcgtggcgagcttcaacatgtcgacaaaaacttgcctaatttggtcgccgtcttgcgttccgttggtgccggcgagtgttggcacaagcacggcagctttttagagcatctggtcgatatctatcggattctcaaaatatggaaggcgcaagactccgtttgcctttgcggtcttttccactctgcttactccaactcttacgtcaacctcgccatattcgacccttcaaccggccgcgacgtcgttcgaggccacgtcggcgacgctgcagagcgtttaatccatttgttctgcgtcgtccctaggcaacctttgatccacgatgaccttttgttcaaatatacggattcggaaatcgtcgaacaccttgcggcctccgaggtttcgttgaagaacgccaaagaaaagggcgt

SEQ ID NO: 7041 - DNA, 354 bp, Gossypium hirsutum
  Clone ID: GOSHI-09MAY01-C24961_2
ctcacccttcgcactcctctaaactagttcatccccccagtctcattaattctcgaagagacaatttcttgccttcgtttctttaaatgaagtggataaatcactatacttaagggttctatattctatctgtttccccctattttggctacgcttctttttggcccgaacctaacaatccatcccttctatcgcagaaaaccttgcatctggctcatggttttgaatgcctgattaaataatttgaagatgagtccattttcaatcactcttaataaaacgccttttcagaatcacatagaatatgaagataccaataataaaaagtcatatgactaaaactgctccattata

SEQ ID NO: 7042 - DNA, 459 bp, Gossypium hirsutum
  Clone ID: GOSHI-09MAY01-C24961_1
aaattacttggtcacctttttattaattcagggggctaaataatagaagagacaatttcttgctttcgtttctttaatgaagtggataaatcactatactaaagggttctatattctatctgtttccccctattttggctacgtttctttttggcccgaacctaacaatccatcccttctatcgcagaaaaccttgcatctggctcagggttttgaatgcctgattaaataatttgaagatgagtccattttcaatcacgcgtaagaaaacgcctttccagaagcacagagaagaggaagaagccaagaagaagagggcagaggacgaaactgctcgattatacgaggagtttgtggcatcgtttcaaggagataatacccctggatcgaaggcatttgttcgaggtggaacaatcaatcccaacgagaggttgaaatccgattcttgaggtgaaaagt

SEQ ID NO: 7043 - DNA, 575 bp, Gossypium hirsutum
  Clone ID: LIB3828-001-Q1-N6-A2
ccagaagatattatatataacattcagttgcatctttcaatgaatcctaataaaacagaaaattcatttgataatatgtccagaaataaagaaaataacttcattaccttggacttcgaaattcccaaactacgcaatttctactctgctctaattcaaagttggtagccctcaagactcatgccctacctaccactagcttatcggcaaccaaaataacggaaaacaccaaaggagcacaagttataagatgggtcagtcatcagtgtaggaaattttctatggctatcttgttgatagtattaccttaaaaacagggtggcgaatctctaactcaagaagctgagatttgattgcatttgagtgttgagacttggaagcctgactcaaggagaatggtccacaacccttggattaagggaaagaaggacaatatatgctacagtgataagcttttctggtggaacggacaagcctctcacctcagggcagtaaaggagggaactcaatctttcctatgtcttgcccaaaaccctttctttctggcagaatcattttctgatactgatctgccc

SEQ ID NO: 7044 - DNA, 367 bp, Gossypium hirsutum
  Clone ID: LIB3146-006-Q1-K1-B2
ggaccattctccttgagtcaggcttccaagtctcaacactcaaatgcaatcaaatctcagcttcttgagttagagattcgccatcctgtttttaaggtaatactgtcaacaagatagccatagaaaatttcctacactgatgactgacccatcttataacttgtgctcctttggtgttttccgttattttggttgccgataagctagtggtaggtagggcatgagtcttgagggctaccaactttgaattagagcagagtagaaatgtgtagtttggaattctataggtaatatgatcgtctaatggtagggggattttcaaagtccaaggcgatgaacttatttctttatttctggacataatatg

SEQ ID NO: 7045 - DNA, 1210 bp, Gossypium hirsutum
  Clone ID: GOSHI-09MAY01-C24821_1
gttgcaaggcaaaagagggaaaaacaggcgtgaagtttggtagaatcggcgaagatggaagtggaagtagacgagaaagacctaaaatcggcgggagccgagcttttgaaagatggaaggcgcggtttacgtatccatggatgggagatcgagtcccttaagcgctctattctcaattcctccactctccaacaatgggagcaaaagctccatacctctcactttccggaaatgattttcggtgaaagttgtttggttcttaaacacctcggcagcggcaccaaaattcatttcaatacattcgatgctttggccgcttggaaacaggaaggtttgcctcccgttgaagttcctgccgctgctaaatggaaattcagaagtaaacccttccagcaggtgatattggactacgactatacgtttacaacgccttattgtggaagtgaaacggttgagctggagctggattcagacaagcatggaagtgggggaatttctgggggggactcgggcctccattgggaagattgcaaagagcagcttgatatggcagcactcacattaagggaacctattttgttctatgatgaggtagttttatatgaagatgaattggctgatagtggagtgtcacttctaactgtgaaagtgagagtcatgccaagttcttggtttctccgccgccgccgttggctgcgagttgacggagtgctaatgagattaagggacactcgcttgcattgtgtttttgacgagagtgcaaggcctgtcattcttagagaaagatgttggagggaaggaacatttgaagctttgtctgctaaaggatatcctactgattctgcttcatatagtgatccaagcatcatcagccaaaggctacctgtcatcatgcatcagacccaaaagcttgtagtccctggtaatgtaaattgccacgcgcaacagattcattagttgaatatgtagacattgcgaatttgatccatttcggtggattcataagcaaaaaaaatcatgttcatgcacttgatgtaccattaacaagcaaaatttatgatgtgattttgagtgtaagcaagaataagaattctctatctaatatttgttttaattataaatataaatataatatatattaaatttgggcggggtttttaaagttccaagtttattttcgcgttcatgcgacttaatagctcttttttag

SEQ ID NO: 7046 - DNA, 451 bp, Gossypium hirsutum
  Clone ID: LIB3146-001-P1-K2-F12
cccacgcgtccgcccacgcgtccgataggatttcgttttaggaggaaatatttgttactgtggcctgttatcatcttttccctacttgtttttctttcacaagttgcatatcttgttagatgggctgttggaggctataaacaaagtgtaggagatgcttggtggctcaagctaattggttttatgataatccagtcttagagatctcccactgtgatctattttttggttacacaacttctagtgctagtagttgcattgcttgatatacatgggaatagattcggtcttgttccgtagcggtatacttgttggggtcatttcttaacagttgttgaacaattaggtttaaaatacgcatggtcgagaaagtgatgatgatgacaacgacgatgatgatggtgatgatgacggtgaatcaaacaattcaagtggttttgaaatggaatta

SEQ ID NO: 7047 - DNA, 434 bp, Gossypium hirsutum
  Clone ID: LIB3828-024-Q6-N6-B3
ataaagaaagatatattgtttagtacctgaactcaattgaatgtctataatacattgtgttttgttaggtaatgcctcataactctaatttggcgacgggttcaggttaaggggtgttacaagagaaatccatgagggatggctaattcccaggaccagctgaatagcaggtagaagcaaacaggaagcaactttaagatgggaacaaacctaattgttcaacaattgttaagaaatgaccccaacaagtataccgccacggaacaagaccgaatctgttcccatgtatatcaagcaatgcaactactagcactagaagttgtgtaaccaaaaaatagatcacagtgggagatctccaagactagattatcataaaaccaattagcttaagccaccaagtatcctctacactttgtttatagcctccaacagcc

SEQ ID NO: 7048 - DNA, 809 bp, Gossypium hirsutum
  Clone ID: GOSHI-09MAY01-C24521_1
tgatgctgaaacttttgttagtattaaccgctactcattcaactggtctgtaaataatacctcggtaagtccagatgggaagttgcttgcagtactcggagatagtgtggagtgcttgatcgttgatgcccaatctggcaaaattaccaacagcctaaaagggcatttggactattcttttgcttcagcttggcaccctgatgggcacattctggcaactgggaatcaggacactagctgtaggttgtgggacataagaaacctgtcgaagtccctagctatattgaagggaagaatgggagcaataagaggcgtgaagttcacatcggatggtcggttcctggccatagctgagcctgcagattttgttcacatctttgatacaaagttggggtatgttaattgccaagaaattgatatttttggggaaatagctggaatatcatttagcccggatacagaagcgctctttgttggggttgctgatcgcacttacggcggcttgttagcgtataaccgcagacgatataaccaatatctggactccatgttgtagaatgcagtgcctctgataatttatatgagaggtaaggtaagctagtgtgaatattttaaggggttgtatcagaattgccttggataattgtgtttcagtgtataacttcctggggaggagcagcagcagccagcaggtttagttttgcccttggtaagtaaagatgtttctgtgaaggtcaacttttaagggaaattttttgttgtaaagctattggcaatcgtatatatagcacatttaatacgtttttatg

SEQ ID NO: 7049 - DNA, 652 bp, Gossypium hirsutum
  Clone ID: GOSHI-09MAY01-C24741_1
ccctcgcgtccgaaataatatctgctcgttcttatcctgctcgctactctccactcaaatggcgctatccttaaccatcagcaatggcatcagtagcagtagcaatgcaaatgggggcccaatccttcccaacaaccagctacctttcggcctccctcatcgccgcaacgtcctcttcccaatctcccccagaaccttccacttgacctccgctgccaaaaagttctcttcccgaaccggacgcttcgatagcaagaaccggaggagcaatctcaccacaaaagaacaagatgaggaacaggagctcaaacggacggcggagattgaagaatcaaacattgctattggagttggattggaggacgttggtgggagttcgtctgagatttcggctgatggtaagccgttccccgatcttccgggccttcagccggatttatgggaaggtcccaagtgggatgttctcggtttccttgttcagtatttgtgggcttttggcatcgttttcgcgttaattgcatgcgggattgctgtggcgacttacaacgaaggggcaacagattttaaggagactcctgcatacaaagagtcgatccaatctcaagagctattagaacaacctgatgcctctaatcaaaacgtctttgaatca

SEQ ID NO: 7050 - DNA, 542 bp, Gossypium hirsutum
  Clone ID: GOSHI-09MAY01-C24731_1
gccggaaataacatgggatatggcataggatatggcactggaaatgggaaccagttaggaactggtatcggatatggtattggaaatgggaaccagttaggaaccggtattggatttggtaccggaaatggaggtcagtcaggaaatagtgttggatatggcgtcggaattggatcaggtggaaacaactggaatggacctgggactggagttggaatcgggtcaggatcaggcggactagggtcagggattggcgtgggatacggctcaggaggtgttcctgcatgtactaccggcaattgcaatctagtgaatggccctgggagctgtgtaccagttggtccagctcattatgaacttcaaggacgatctgctgctggagctgccaaagagatgtcgaagattatgagtacagttactcagccctagacaccacataactgttgttctaatataaagagctaatgatgtttcagaggtttacaatcaagccttgttgaatcaaatcaatcagataataaaaccccaaatgttttttggtc

SEQ ID NO: 7051 - DNA, 533 bp, Gossypium hirsutum
  Clone ID: GOSHI-09MAY01-C24651_1
gcgcccacgcgtccgcggacgcgtgggcaggtgcaagcatttcaggtggactgaaggcaaactacagcattactgctgcaaagggtatgtattattcggcccgaggaccagatccagaagacagttctctagatgatgcagacataatgaaaccgaacttgattgcccctggaaatttgatatgggctgcctggagttccctcgggacagattcagttgaattccaaggtgaaagctttgcaatgatgtctggaacaagcatggcagctcctcatattgctgggcttgctgcattgataaagcaaaagttttctcatttcagtcctgcagccatcgcctctgcactttcgacaacagcttctctttatgacaagagtggtggccccataatggctcagcgtgcttatgctaatcctgatgtaaaccagtcttcagcaacaccatttgacatgggcagtggttttgtgaatgctaccgcagctctagatcccggtctgatcttggattcaacttatgaagattatatgtctctt

SEQ ID NO: 7052 - DNA, 916 bp, Gossypium hirsutum
  Clone ID: GOSHI-09MAY01-C24671_1
ttctttcgtccgaaaatttcaaaatagtttcaaaaattttctttccatttctcctttttggtggctgcttttttccccttattttctctccataagaactctttttctcttcattctcccaatatcttcatttgaagcagctatgtcttttagaggaggaaatgcatcatcgggcatgggagtggctgaacacagcaaaagcacgtacctggaactgcagagaaagaaggtgttccgatatgttatcttcaagattgatgagaagaaaaaggaggtcatagttgaaaagactggaggtccgacagagagctatgatgatttcgcagcctcattgccggagagtgactgccgctatgcagtttatgacttcgattttgtgacttccgagaattgtcagaagagcaagatcttttttattgcgtggtctccttctgtttcgaggatccgttccaagatgctttatgcaacatcaaaggacaggttccgaagggaattggagggcatccattacgaaatccaggcaaccgacccgactgaaatggatcttgaggtgattagggagcgtgcacattaagtgtccgctcccagaattcacatgcttaggaaaacttcctagaggtacctttagggttgttttatggttcaattaaattgcagaattaagtcgagttacccgtctctgacatagtatgtcgttatcattattaaataacgcctgagaaggctgattaggaggaggatcagggttggaacatgggaggaatgttgggactttggacttctcattgccatgatgcttctcaggtgaaaaggagtgtgattattatggatattgactcttattcgtggaatggtatttcaatctcttgtgcttttcatctgaaacttttctaattaattgaaatataaaagcttc

SEQ ID NO: 7053 - DNA, 639 bp, Gossypium hirsutum
  Clone ID: LIB3543-055-Q1-K6-E12
gctgctttttccccttattttctgggggggggggggggtttctcttcattctcccaatatcttcatttgaagcagctatgtcttttagaggaggaaatgcatcatcgggcatgggagtggctgaacacagcaaaagcacgtacctggaactgcagagaaagaaggtgttccgatgtggggggggcaagattgatgagaagaaaaaggaggtcatagttgaaaagactggaggtccgacagagagctatgatgatttcgcagcctcattgccggagagtgactgccgctatgcagtttatgacttcgattttgtgacttccgagaattgtcagaagagcaagatcttttttattgcgtggtctccttctgtttcgaggatccgttccaagatgctttatgcaacatcaaaggacaggttccgaagggaattggagggcatccattacgaaatccaggcaaccgacccgactgaaatggatcttgaggtgattagggagcgtgcacattaagtgtccgctcccagaattcacatgcttaggaaaacttcctagaggctgattaggaggaggatcagggttggaacatgggaggaatgttgggactttggacttctcatttccatgatgcttctcaagtgaa

SEQ ID NO: 7054 - DNA, 436 bp, Gossypium hirsutum
  Clone ID: GOSHI-09MAY01-C24151_1
cgaccaagaaaaagatcttctttgtcatggaacatgtccgtgggggtgagctctttgccaaagtttacaaaggcaagctcaaagaacacgtcgctcgtaagtactttcaacagctgatcagcgccgttgatttctgccacagcagaggtgtttcccaccgtgatttgaagcctgagaatctcctgttggacgaaaatgaagatctgaagatctctgattttgggttgtcggctttgcctgagcagcttctcaacgatggtctccttcacactcagtgtgggacaccggcttacgttgctcccgaggttttgaggaaaaaagggtacgatggatccagagctgatatttggtcttgtggcgttgatttatatgttcttctcgcacgtttcttgccttttcaagatgagaatatgatgacgatgtataggaaagtttt

SEQ ID NO: 7055 - DNA, 614 bp, Gossypium hirsutum
  Clone ID: GOSHI-09MAY01-C24031_1
tgaaaaatcagatcttttaaatttcaaagattgaaagaaaagcaaaattgttatatcggtacctttttgagagaattggttgaagacttaacttccgattatttccgatgaggaaaggaagaggagccgccgcggctgccgatgcagcgatgaaaccggcggtagaagccaacggatcggtcgaagaactaaggtccagaggtgcttggaaaagaccatggggaagatttgcagcggagattagagatcccttgaaaaaaactagggtttggctagggaccttcgattcggccgaagaagctgctctagcctacgatgcgtcggctattaccctgcgtggaaacaaagcgaaaacgaatttcccttttaattcctccgatttccctgctttcggaatagatcgtcatcatcgtcggaacaacgaaggctttatcgccgacggccaccggttacatcagacgggcggcgattatgaagatccggaagtgaacccgcagagaccggcgaggagcagcatgagtagctcggtggagtcgtttagtggtccgagacctacccaaccaccacgaaaaccatcagatttcgaggcggtttcgacgaagaaataccacccc

SEQ ID NO: 7056 - DNA, 392 bp, Gossypium hirsutum
  Clone ID: GOSHI-09MAY01-C25941_1
ggaaattctcgaggtgacccaagttaccccaacctttaactcaccaaaatgaacgactgagttccgtcttccactcactttctccgacataatctggttcaagtttcctcctgttgagcgcctcttcttttaccaattcgacgagttaacccctgcctgtttcaactcagttatcctcccaaaactcaagcgctctctttccctcacactcgtccattacctccccctcgctggcaatctcaagtggccaccaaacgaacctaaacccatcattttatacactccaaacgatggagtttccctcacagttgcccactccgatgccgactgtaacatactctgcagcgatggggtctatgacgctgctgagttgcatgctatcaaacctgacc

SEQ ID NO: 7057 - DNA, 432 bp, Gossypium hirsutum
  Clone ID: GOSHI-09MAY01-C25891_1
gaggctgaaatgcttctggtagagaaccttggatcatttgagccaaatcacgagttcattgagaaatttctcaactataaggaattgctacctgctgatgtgattgagattgcttttcaaagtcgatatgacagaaagttaacagagttgggcagcggatatgtgaactccagcaatgcaagtgttgctaattttgacccagaagttggagttggcctagatggttcctccacggggggaggcatgaagaaagggaagaaagggaagaaagttagtccagctgttttgggattcaacgtagtgagcaaccggattatgatgggtgagattcagacagtagaagattgagaaatctggacttttttttgagagatcataacggatttttgagacgttgggtcagttgtaaatacatttgggttttactctttt

SEQ ID NO: 7058 - DNA, 320 bp, Gossypium hirsutum
  Clone ID: LIB3048-023-Q1-L1-G2
gaggctgaaatgcttctggtagagaaccttggatcatgtgatcgagatcacgagttcatcgagatatttctcaactataatgaattgctacctgctgatgtgattgatattgtttctcaaagtctatattacataaagctaacagagttgcgctgctgatatgtgaacttcagctatgctagtgtagctaattatgacccataagtttgagttggcctaaatagctcctacacggttggaggcaagtggcaaggtcagcaaggtgccaaagttagctcaactggtttatgatgcaacgtattcagcctccgtatcatgat

SEQ ID NO: 7059 - DNA, 360 bp, Gossypium hirsutum
  Clone ID: GOSHI-09MAY01-C25811_1
tgaaggtgatcatcatcaacagcagctgaggagaggaccttggactatagaggaagattcagtccttgttcattacattgctcgacatggtgaaggtcgatggaattttcttgcaaaacatgcaggtttaaggagaacaggcaagagttgcaggttgagatggttgaattatttgaaaccagatgttaagcgtgggaaccttactgctgaagaacagtttttgatccttgaactccattctaaattgggtaacaggtggtccaagattgcacagcatctgcctggaagaaccgataatgagattaagaattactggagaacccgtgtgcaaaaacaagctcggcagcttaacatcgatgc

SEQ ID NO: 7060 - DNA, 380 bp, Gossypium hirsutum
  Clone ID: GOSHI-09MAY01-C25801_1
caaaagctttgaaatctttactctctttcccagagaggcagggaaaaaagagcttttgtattattttctttaaatttcatcaatggcggtggagaaaactttgggggagaagcttttcagtattttcgaaaaatttcatcacaagctgttaccaattgccggatttcatcaacgactattcaaaatcgaatctcgaagaatgccgggaaaggtacggccgaaatggcaccggatccgggagatcttaacggtgccggtaatggtgtgttcaagcggtttcttcataaaggatctgcggtttcaccggcaatgaggacgttaccgagggggaaagatttgattgagaagttgaaggagattgatatgtcgaaagatcggat

SEQ ID NO: 7061 - DNA, 621 bp, Gossypium hirsutum
  Clone ID: GOSHI-09MAY01-C25831_1
ctgacatccccttcctttctcgcctccaaatcccctcttctcccccgccgccatctcctccctccaagtcttaaacccatcaccgccgtccattcggccgacccgactaagtcaaccaaatcaacggcggcggcggcctccaccagctccccttcgatccccacgcaatggagcctcgaaagctggaagtccaagaaggccctccagcttcccgaatacccagaccaaaacgacctagtatccgtcctcgagacgctctctacgttccctccggtcgtcttcgccggggaggctaggagcctggaagagaagctgggacaggctgctctcggcaacgctttcttgctgcaaggtggtgactgtgccgagagcttcaaggagttcgatgctaacaacattcgtgacactttcagggtcctcctacagatgggtgtagtcctcatgtttggtggccaaatgcctattatcaaggtaggaagaatggcaggtcagtttgcaaagccgagatcagatccgtttgaggagaaggatggggtgaagctcccaagttatagaggtgacaatataaatggtgattctttcgatgagaaagaaagattccagatccccataggatgatca

SEQ ID NO: 7062 - DNA, 793 bp, Gossypium hirsutum
  Clone ID: GOSHI-09MAY01-C25591_2
tccacgcgtgcgtccactcgtccgcgcacgcgttcgagttatttaaattaccacgtccaaatggcaacgattgcagctggtgcttatggtcttacccaatttcgtatgcgtgctttcttttggggtgctcgtcctaatcaaaaattgccacaatatccacttgctacacatgatcttgtcctaagaggtgtcatacctgttgagtttgagatgaacactgtaggctgggaagaaggtaaaaaaatagagttggaaaagaaacttctactagaagatgccatttctgaccttccatcagttggaaattatgaggataaagatgaaatggactatgacaaagatcctaaaacagagtttcaaagattcatcaggttaagaagagaggagatgcctggtttttcgtcattaaatgcaaaaccaacaaaacatttgctctacgatcatcgtccacttcaactcaacacggatgattaccaacgtgtttgccgggttcccaaaaggaagggagcaaattttagagactttccaggtgttatagttaatagtggcaataaagttgagtgggatcctaacgttgagagggtttatttggaatccggaaaaccattggtccctgattatgccatgtcttttgtcggcggctcatcaagcaaaccatttgctcgtctatggtgggatgaaactgtacccacagtggtcactagggcagagcctcataatcaggcgatattgcatcctgtacaagaccgagttctctcaattcgcgagaacgcaaggttgcaaggcttccctg

SEQ ID NO: 7063 - DNA, 793 bp, Gossypium hirsutum
  Clone ID: GOSHI-09MAY01-C25591_1
gcgtccgaatttttaattttatcaactttacggagctttttttatagactttccaggggttatagtgaggggggtttttaaagtccggtgggatcctaacgttgagagggtttatttggaatccggaaaaccattggtccctgattatgccatgtcttttgtcggcggctcatcaagcataccatttgctcgtctatggtgggatgaaactgtacccacagtggtcactagggcagaacctcataatcaggcgatattgcatcctgtgcaagaccgagttctctcaattcgcgagaacgcaaggttgcaaggcttccctgattactacaagctttttggccccgtcaaggaaaggtacattcaagttggaaatgctgtagcagtgccagtttcaagggcattagggtatgccctggggttagcttaccaaggtgtagtttcaaatgatgaaccattaacgaaacttcctccaagattccctaacatatctgagaaagcttcttcggattcatctcaagataattcttaaacccccccttttttcttcaatctaattaatattagtcaatggaattgtgtattactttttagattttgaaactctaagagtaattaaaacctagtttaatgttcttcattcgatcccttgttgtacgactacgtgttgtcggtgctaatatttttttaattgagttttaatggttaaaacccattaggtaaactagttactcaattgttagtatgtttttattttgttctctaaatgtattgctaataagataactattagttt

SEQ ID NO: 7064 - DNA, 492 bp, Gossypium hirsutum
  Clone ID: GOSHI-09MAY01-C25581_1
ctgtacacaaactctccctctgttttcttgtctgttcactgaagaaaattaatatatatggaatatcaaaaggtcttccttcagttgcttaaaaccaaaatggcagtttcatcatttagaagcgggcgtttaccgttgtttcatcaccctcaattgcctaataaagccgcttcagctgcttgtacaacaagatcgattggtgggtttaagaagccaaatgggcgtttcagttccaaccccaagtgcggaagggccctctttctttttgcccagtactctcaaccatctcaagctcaaacacagcaagatcgtttctcatctcgtctccaaagtagtcttgagaacttacccaagctgctggaggatatcgtccagacatctataagcacaggtccccgaggagccctgaggctagctcaaggtattcaagcctttggtggtgttggtgggggatggcttgctgatgtctctaggtccacaaatgaacctact

SEQ ID NO: 7065 - DNA, 715 bp, Gossypium hirsutum
  Clone ID: GOSHI-09MAY01-C25491_1
gggcctacaaaatggtctgtcattgctaaatctttgcctggacgaatagggaaacaatgccgtgagagatggcacaatcatttgaatcctgatataaagaaggatgcttggacgttagaggaggaattggcccttatgaatgcgcatcggatatatgggaacaagtgggctgattttgctaaagttttacctggaagaactgggaatgcaataaagaatcactggaatagttccatgaagaagaagttagatttctatttggctacagggaagcttcctccagttgtgaaaattgttcttaaaaatgagactaaggatatagaaacacctgctgcaacagaaaacctgcttgtttgttcaaaaaaagaatcagattccactgctcaaacatcatccggaactatagatatatgtaagccagaggaagatggaaaagatcagttggaatcctctactccagttcaagatatggcagctacgtcaagtattattccaagtgagtctgttgagactgaaagtgcagaatttaagccccaatcatttgatgctaatccttgcagctgtaactcagtgtcagtggtgaagttcgagagtcgaagaaccagctctgctattgtcaaagacaaagttgttgagacacaactaaggtctgatactccaacatattggccctttatgtatgagccacctaggttacaagggggtacttcattag

SEQ ID NO: 7066 - DNA, 462 bp, Gossypium hirsutum
  Clone ID: GOSHI-09MAY01-C25431_1
ggaccacaccatggtccattccatgccattcacaggctgcaagtgtcaaaacaacgccatgctcacaaatggttatattgccacctcagcaaacagaaaactgtcaatttcctcgagaagagagcaatgcatctcttgaagacagccttgaaggacctacttgcagaaaagcatcggtgcatagatatcttgagaagaagaaagacagatgaaggtttaagaacaagggaaagttggcaatgtcttcatctccgaccttagacatctacttaaatcaagggggagatcagttttcaaatgagcagttgaaacaaagtgaaccatattattctccccaagcagaagcgcaccgcatgcctcttgagtgcagctccattgaaaatgttgcaaagattccccgccttactactgatggaaaagatgcattcaaaatatgacccatgaatggagcccctaccatgt

SEQ ID NO: 7067 - DNA, 414 bp, Gossypium hirsutum
  Clone ID: GOSHI-09MAY01-C25751_1
ttggggatttactctggttctacttgcaaacaaggagagatcgaagctgtggttattgccaccggtgtccatactttcttcgggaaggcggctcaccttgttgataccactaaccaagttggtcatttccagaaggtcttgacagcaatagggaacttctgcatatgttctattgcagttgggatggtaatagagataattgtgatgtatccaattcaagaccgggattaccgtcctggaattgacaatcttcttgtccttctcattggtgggatcccgattgccatgcctacagttttgtcagttacaatggctatcggttctcataggctatcccagcagggggcaatcacaaagagaatgactgcaattgaggaaatggcggtcatggatgttctttgtagtgataagact

SEQ ID NO: 7068 - DNA, 428 bp, Gossypium hirsutum
  Clone ID: GOSHI-09MAY01-C25771_2
cacgctaccattttatctgtctctttctctccattgatttcattgcagctgaaaatctctcccaaaataaaaaaccccattttttcccctatttcccaccttttttgcatttttttttgctcaatcttttcgtttctaaaacacccattttaaaaaaatatatacttatttggtttttagaaagcggttttagccttttagggagggttctcaacatttccaatggatgctttacttcttgggtcctctactggaggactttctttgttcatctctggaaagagtagctggaggagtaaagacttgaaggctgtgcattttccaaatgttgctaaaaggcagaatcaaaagcaaagagtcaaaggttctgctatacgagtgcaagtgccaacaaacaagtcatataacctcattggaaacttttatac

SEQ ID NO: 7069 - DNA, 662 bp, Gossypium hirsutum
  Clone ID: AI054583.1
cttgggtcctctactggaagactttctttgttcatctctggaaagagtagctggaggagtaaagacttgaaggctgtgcattttccaatactagtatttgtttcttttagatgttgctaaaaggcagaatcaaaagcaaagagtcaaaggttctgctatacgagtgcaagtgccaacaaacaagtcatataacctcattggaaacttttatactcaaaggattcagcattgtgcgagaggtattctggaaacatctacagtcttccagaaaagtaatacaaagtttctagtgaatgccacttctggtcatccgcttgaatcagaacccaaagcttaccccaataccccatggaattctgctaaaaatgcattggatgcttcttacagtgtttcacggtctcataccgttataggcacagcactcatcatattttctgattctctccttgctgtgcaataattatcggaatattcttccctgatcattaatggggtattataaggctgtattgttgctcttttctgaatatttatatagtcggctatatctttgtcgaactttgattccatgttatcatgtttatttcttttagatgatgagttttagcatttccgattcatgaggtacatatttcatcatgaatttgtttgaggatttaaat

SEQ ID NO: 7070 - DNA, 397 bp, Gossypium hirsutum
  Clone ID: GOSHI-09MAY01-C25651_1
gccaaatgtttctcaagaaactgaaccaatcttgaatgaagatcattcttctgtccatgatgaacaagaaagccaatcatctggcgaagttgagtctgttaatattctcctagctgagaatagagatgttcatcatgatgtggttgagatcattttgcgagatggagaaaatcagctgggaacggaatcaaatttgtctggagctccaccaatttctcttttggaattcaattccagggaaattcattctagaccagagttggttacagaggattctagcagtagctcaagttcgtcgtcgtcgtcttcgtcattgtcttcatcagagacagatgaagagatatctgatgtcaaggaagaacgttttgcaagttttgaacccagagatcatgaaact

SEQ ID NO: 7071 - DNA, 475 bp, Gossypium hirsutum
  Clone ID: GOSHI-09MAY01-C25621_1
tgttgacctcaaatcacataaagatgtagctctaaatggtgatctggaagaaacaataaaatcaaatcatgcagagaaaaaacctccatctcacgagatgagtcaatctcggcatccttccactttacaaggtaagtgcgaagaaaagatggccagagctatgtgtaatggaaataaaaaatctcaattggccgattcggcacaggaagacactggtatagggaacaccactgaaataacagtgtcacacaagtttgaaaatgatgaagccacccaatatggcagcgagggaagaaaaaataagcttgatgagatacatggattgagctcaaattatgtactggataacttaataagaaatcacatggcactgttggaaggtgggaatataaatcctgaaaacgaccgtggcgaggctttctgtagtttcccggcacggaggaaccaactgatcccaatgcggcaatggatgaca

SEQ ID NO: 7072 - DNA, 425 bp, Gossypium hirsutum
  Clone ID: LIB3149-004-P1-K1-A10
cgacccacgcgcacggccaggacaaaggaaaccaatgccatattttgaagtataaatcaataccaagcggccctaatggtgtcattgatgcatcttttggctttgatagctcatatgattctttttctgtgacatcttcggtctcatcgtcaccccatccactgttcataaggagtatttctcttgaccagtttttgcgtttactttcactaaaccgtatgtttgtggattttcttattagccctcgttaatctttctttgtcttatttactagtactgttaaacattttattagattttcctcatctgcaaatcagtagtaatctttctttaatgtgcaattgatgtgcttcataacctataagtagccgatgatagccaaatgttctaacatggatcaaagatgtactaatatctgctaaatt

SEQ ID NO: 7073 - DNA, 298 bp, Gossypium hirsutum
  Clone ID: LIB3146-007-Q1-K1-F5
cggacgcgtgggcgttttcttgggaaaaggagagagctcaagaccagcagatgcggctaccttcactaaaccgtatgtttgtggatgtgcttagtagccctcgttaatctttctttgtcataataactagtactgttaagcatgttattagattttcctcatctgcaaatcagtagtaattgttctttaatgtgcaattgatgtgtttcataacttatttgctgccttttatggccaaattttctaacatggatcggagatgtactaatatctgcttaattccatttgattcatcttt

SEQ ID NO: 7074 - DNA, 1057 bp, Gossypium hirsutum
  Clone ID: GOSHI-09MAY01-C25121_1
aaaccctagatcacaaccgtaacacatgatcaaaatttcccaattcgattgaaagccccgaaaccctaacattttttgcaatgattagaagaatactcccttcaatatcctcagtttcttctcatttcctcaagaccaaacccatctgcagcccatcaccactccaccatttccattccctgcaatctctccaatgttccaaccccattagcaaaaatgggtcattatggtttcagggtattaggtcttatagtcttttgagcttgaatgatctgagagacaatgttcccagaaaacagaagacgaggaaagggagagggattgggtctggtaaaggaaaaacggctgggagaggacataaaggacagaaagctagaggtaatggcaagttgggatttgaaggagggcagacccctatgcggcggcgtttgcctaaacgcggctttaagaaccctttcagcctcacttttcagccggtaggattgggaaaaattgccaagcttataaatgctgggaagatagattctcatgaattgatcacgatgaagacactcaaggatgctggggccatcgggaaacagatagaggatggagtaaggttgatgggtcgtggtgctgaaccagatcaaatggccaattcatctcgaggtgtcaagggtgactgttagagcaaaggaagcagtcgaagctgcgggtggatctgtgaggagagttcattataacaaattagggttgagagctttgctcaaacctgagtggtttgaaaagaagggcaggttgttgccaaaaccagccaggcctcctccgaaattgaaggataaagttgacagcattggccgccttccttctccaacaaaacctatcccgtttttcactgaagaggaggcatctgcctctcctgctttgtagacagatgctttgtttgttggttgaacagcaaatttgatattcataatgagttattttgcaatcagattttgttttctcggactcatagtgttgcggttttccgtgtttcggaggaaactaatcaatacatgcaatcccttccatgtgc

SEQ ID NO: 7075 - DNA, 278 bp, Gossypium hirsutum
  Clone ID: LIB3149-004-P1-K1-B7
gcaggttgttgccaaaaccagccaggcctcctccgaaattgaaggataaagttgacaggattggccgccttccttctccaacaaaacctatcccgtttttcactgaagaggaggcatctgcctctcctgctttgtagacagatgctttgtttgttggttgaacagcaagattgatattcataatgagttattttgcaatcaaaaaaaaaaaagaaataaaaaaaaaaaaacaagagagtttcaacaatgttaagcaatggcttaaacgaaatttgacc

SEQ ID NO: 7076 - DNA, 554 bp, Gossypium hirsutum
  Clone ID: GOSHI-09MAY01-C25011_2
gccgaaggcttgctgcgacgggatccggtccctgaacatgatggctcgaaccacccctgagcgccaaaccgtgtgtgggtgcttgcaaactgccgctaaggctgtcaaaattaaaggcaacttggctgagaccctcccggccaaatgtagtgtcaacatcccttacaagatcagcacttccactaactgcaaaaatgtgaagtgagatggatgaagagagggttttgcagcagcttgaaggagatataatatatgattaaaaagaagaagaagaatgaataaggattttgggatggaattttcaaaatccaaaattagtctccactttagtgtagtgaggctttgtttattttgtttaatgttttggtccctgcatgtattggctgttttaatgttttaatgaaaggaagtttatgctttgtcagatcagagtaatatgttttaatattgaccagcctattaaatttaatgtaaattgataaaaaaaaaaacatatgtggataaaaacagcatacaccatcaaacaggaagatgtaataaaagggaacaatagc

SEQ ID NO: 7077 - DNA, 841 bp, Gossypium hirsutum
  Clone ID: GOSHI-09MAY01-C25011_1
cggccgcccacgcgtacgcccacgcgtacgcgtccgaaacacttctccagtgaccaaaaaagcttcattgtctcttctatcgaaaaccccatggctgctcttaagctagtttgtgctctagtgttgtgcatgttggtggttgagcccattgccacaaccaccataacatgcggcgatgtgacaagcaaagtggccggttgcttatcatacttgcagaacggagggaacgtgccgaaggcttgctgcgacgggatccggtccctgaacaacatggctcgaaccacccctgaccgccaaaccgtgtgtgggtgcttgcaagctgccgctaaggctgtcaaaattaaaggcaacttggctgagaccctcccagccaaatgtagtgtcaacatcccttacaagatcagcacttccactaactgcaaaaatgtgaagtgagatggatgaagagagggttttgcagcagcttgcaggagataaaatatatgattaaaaagaagaagaagaagaatgaataaggattttgggatggaattttcaaaatccaaaattagtctccactttagtgtagtgaggctttgtttattttgttttatgttttggtccctgcatgttggctctaattttatatcctctatgtattggctattttaatgttttaatgaattaaagtttatgctttgtcaatcaataaccgtatttaaaaaaaaaaaaaaaaaaaaaaaaaaaaaaaaaaaaaaaatataaaaaataaaaaaataaaaaaaaaaaacatacaaaataataaattataatataataaaaactaaatttaatttaatttttcttgggggggcccctttta

SEQ ID NO: 7078 - DNA, 396 bp, Gossypium hirsutum
  Clone ID: LIB3135-049-Q1-K1-E5
ctgtcttttatgctgtcaaaattaaaggcaacttggctgagaccctcccagccaaatgtattgtcaacatcccttacaagatcagcactttcactaactgcaaaaatgtgtaggagccggaaaaacagagggttttgcaccagcttgcttgagataactatatgattaaaaagacttagaagacccccgcaccccgattttggggtggaatttttttttcccaaaaaaaggcttcactttagtgccccgcggctttgtttttttggaggaagggctgggctcttgggggtggcctctaaataaaaaaaccctccgcctcggccctttaatgttttaatgaattaagggtccttcttttgtggataaaacaaaaaaaataaaacaaaaagggggggg

SEQ ID NO: 7079 - DNA, 350 bp, Gossypium hirsutum
  Clone ID: GOSHI-09MAY01-C25021_1
tcgagccacgactcacgcatagcgtgaagatatcgagttggctaagagggagaatgcactgggcgatgctggttatatggatgcggatcaacagccttaattgactgtgccatccaaaattttcttctttgatgatatagttggtgtttaagaagagggtatttatttaaatgtttaatttaatttaagttttatgtatccatttatttcctagaagttccttcataatgatgttactctgaaatattttcattttgatcaaggatagcctgaaatttgctgttaagtttgattatgccatgagaattctggaaatgaatctagatcccatcacaaaaaacaatcacgct

SEQ ID NO: 7080 - DNA, 1206 bp, Gossypium hirsutum
  Clone ID: GOSHI-09MAY01-C25391_1
cccgcgtccggggttatggagggggggggggggggcatgagcgtggctttccattgggggatcattgcaaagactcaccttcaggagtccgtaccatgccaattaacaacttggatgaagctactcaattggaataccaccagtttgttttgcatcaggattttgagcacttggcacgggggggaatggtactggtttctctggggaggatgccatgcttcatacttctagctatctgccaagtatatgcctgccaccatctgcattcctaggtccaaagtgtgcactttgggattgtccacggccagctcaggtgttggactggtctcaagactactgtagtagctttcatgctgctttagcaatgaatgaagggccacctggaatgggcccgattctgcgacctggtggcatcggcctcaaggatgggctgctctttgctgctctcagtgctaaggcacaaggaaaagatgtgggtataccagaatgcgagggggctgcaactgcaaagtctccatggaatgctcctgagctctttgatctttcggttcttgatggtgaatcaattagggagtggctctttttcgataagcctcgaagagcatttgaaagtgggaacagaaagcagaggtctttgccggattacaatgggcgtggctggcacgagtcgagaaagcaagtcatgaatgaattcggaggactgaagagatcatactacatggatccacagccactaaaccattttgagtggcatctttacgaatacgagatcaataaatgtgatgcttgtgccttgtatcggttggaattgaagcttgttgatggaaagaaaagtgcgaagggaaaaccagtgaaggatacagtttcctatccgcataaacatatgggaaggctccccgacgggttcccttctgaaaagaactgctgtgtcaaaggaaggacaaaggttaatgcttaaaatgggtggtgggaattttttttcccactccaaatgcagtggtaccaacgaggtgagaagttcgagtacggcccgagtgtgcagtatgactatgtgggcagctattatctaacataatataaggaatgcggatttgtatacgtctgttgaagcatttacagtcatagaagggatggagattatgcatttttagtactctttttctagttgattatcagaaaaccaaattatgcacttatttttggtgc

SEQ ID NO: 7081 - DNA, 507 bp, Gossypium hirsutum
  Clone ID: GOSHI-09MAY01-C25351_1
aaaaaatatacggcaatgagcttcattgagaatgaagaagatgatgaatatattgacatggaaatcacttcagttgcaattatttcacaaattcaaggaattcaagggaatttgaattccaaatgtcttcaatttccattgaaaaggaacccacaagttccccagctgatgaacttttttacaacgggaagcttcttccccttcatcttcctccacagctgcttcaattttcgggttcgggttcgggtgtatggtgacttcaacaatggtgtggctgaagaagcgtatggcacaccattaaccactactgttacgacaccgacttcgacgagcactccgtttgaatcctgcaatatctcgccttgtgactcgtgttatgttagtggagagctgaacccggatgagtactcgtcgatgtcgttgttctacgagtactcgaccgagacggaagttagtcgatgtttcgatgagaaccccaagaagtcttggactaaaaaactcaagctc

SEQ ID NO: 7082 - DNA, 436 bp, Gossypium hirsutum
  Clone ID: GOSHI-09MAY01-C25301_1
gaagttggatagatttaataagcagcaggagaagtgtcagtcgatgctctccaacatcgccgggaaatcattatcatctagggcagccgcagctccaaaaccggcacctgctccgcctttttctggtgcaaggccttctgctcctgtcaaattctcaaatgataccgagaggcttcaacatattaatagcatcaggaaatctcctgttggagctcagatgaaacgtgttatcgacattctttttcagacaaggcaagctttcacaccggaacagatcaatgaagcatgttatgtcgatgtgaatggcaatagagatgtttttgagggcctgaggaaaaatccaaaagtgtactatgacggaaagcgcttctcgtacaaggctaagcatgatgtaaaaaacaagaacgaacttcttgttttgaattcgaaatttata

SEQ ID NO: 7083 - DNA, 981 bp, Gossypium hirsutum
  Clone ID: GOSHI-09MAY01-C25241_1
tcgttggaagtctcgctcgaatactcctggattctggaacatctgctcccgccctttccgtatatagtaattaagccctgacgaaacttcaagacccgaccaacgattcaactctacgccgcacttttgcctgagccagagtaaggttttttcttttttgttattgaatggcaataatctccgagttccaagaagacgaggctaaaaagccctcgccttcttcgtcgccggcttctaaaccgctgctgtttagcgccactttggatccgtcgaaccctgttgtgtttttggagaaagttttcgatttcattgggaaagagagtgattttctagtgaaagagaacgccgataaggagatcgcggccatcgtgagagcggccaaggagaagagcaagaagaaggctgaagagatggctcggaaggtggagaccaagaatagggaagtgaaggaagagaaggagataaagaaagaagttaaggaggaagcaatggaggtcaataaaaaggaagagactaaggatgaagagactagctcctgttcgagagttccaaacaagggcaatggtcttgatctggagaattacgcttggacacagtccttgcatgaggttactgttaacgttccatttccaagtggaacaagatcaaagttggttgcatgtgagataaagaaaaaccatctaaaagtgggactcaagggccggcctcctattattgatggggagcttttccaacctgtcaaacctgatgattgctactggagcatcgaggataaccgatcatctcaatccttttgactaagcacaaccaaatggagtggtggaaaatcttggtgaaaggagaacctgaaattgacactccaaaagttgaaccagagaacagcaacctatccgacttggatccccaaaccccaaccgctgtggaaaaaatgatgtttgacccaggaccgaagggcctgggccttccccccagtgatgaact

SEQ ID NO: 7084 - DNA, 525 bp, Gossypium hirsutum
  Clone ID: LIB3584-011-P1-K1-B5
ttcaactctacgccgcacttttgcctgaggccaggggaagggtttttcttttttgttattgaatggcaataatctccgagttccaagaagacgaggctaaaaagccctcgccttcttcgtcgccggcttctaaaccgctgctgtttagcgccactttggatccgtcgaaccctgttttgttgggggggagagttttcgatttcattgggaaagagagtgattttctagtgaaagagaacgccgataaggagatcgcggccatcgtgagagcggccaaggagaagagcaagaagaaggctgaagaggtggctcggaaggtggagaccaagaataggaaagtgaaggaagagaaggacataaagaaagaagttaagaaggaagcaatggaggtcaataaaaaggaagagactagctcttgttcgagagttccaaacaagggcaatggtcttgatctggagaattactcttggacacagtccttgcatgaggttactgttaacgttccagtttcaagtggaacaagat

SEQ ID NO: 7085 - DNA, 768 bp, Gossypium hirsutum
  Clone ID: GOSHI-09MAY01-C25231_1
ctatctagcgctcgcgtgggctccccgggaaagcgatcgtggttcctcgctggctcgctcaaccctgtaaaaaacttgggggggagaggattgatttgaatgctaaaagcgtaacccgaaagcgactccttcgttaagaatcctcacttcctctgccaatcattttcacaaacacctttgccgcaatataatttcaaaatccctgaagtagtgaaaatccgacagtatgcttggaaggtcaattttggaattaccacgttgccgaggggctccttggagaatacccaggcagattatgccccagtgttcatcaccttttatttattcaagaaagcaattttcgacttcttctggagaaaatggtactccgaaacctgaatcgaagagtgggctttcaaaatttgtccttggaacttctcttattggtggtgctattttggttgcttaccaaactggatatttagagcaatatggcgcacgccccaaggtttctattgattcaacgaaaactggttttgatgagaaagatgaaaaggatatccaagttgtttcttctcgtgatgaagaaataaacaaattgactcctcatgtggacttgcctgagcaaaaagctgcaactaatatcgatcttcctcctgagcctgaaatttcaagtgaaacccaaggtgagaaccagtcgtatgttgaagataagttgaacgagataattgaagatagcacaacatctgtaccagataaagcattacctgaatattctcagaacaactt

SEQ ID NO: 7086 - DNA, 424 bp, Gossypium hirsutum
  Clone ID: GOSHI-09MAY01-C26951_1
tctgcttctcgttctttcgttcttctcttttgtgtgggctcgtgctccgcatccaagtttctctctgagccaggctctttacacttatgttattctgatagtatcaccacttttggttactgaaatgcgggcatctcaagtgtgctattattttttgttcagtttataagtcccgagtctgattctctgggctgaatgaacctgcatgcctttactagatattgccagcgctcaaccttccttgccaggtcctctggttccagcgaggggtcaaaccctctttttatggtcagctggtatcaaaatcatggaaatcctctcaattgccaaacagggtgaatcatagtgtgggacacctggagaatccaagtgggagacttcagattaaggctgttgctacccttgaacccaagggctctgttcc

SEQ ID NO: 7087 - DNA, 384 bp, Gossypium hirsutum
  Clone ID: GOSHI-09MAY01-C26901_1
gtgaccctaggttgttcaatatttatactatttccgggaggagctgacgttagtccttacagcaaaggaagagaaagtacagtttggggcgtttctctgatggttgggtatcttgggtttgatggttttacaagcacattccaagataaatcatttaaaggataccatatggaaatacacaatcaaatattctacacgacatcatgttcttgtattctcagcttgacaggccttctattacagggacatttactttcagcaatagattttgtttatcgccacagcgattgttttcttgatattgtattactttctactgtagccacagtcagtcaattcttcatgtcttacacgatacgtacatttggtgccattgcatttgct

SEQ ID NO: 7088 - DNA, 694 bp, Gossypium hirsutum
  Clone ID: GOSHI-09MAY01-C26881_1
ccttgtccgggctctaataccccttcacaaaccaaggggcgtggccgatgtaccaccagcagttgtcttactgcatcacgcagtttgtcgagaaagactgcaaactagctgatactgctataaggggattgttgaaatactggccaattactaatagctcaaaggaagtcatgttccttagtgagcttgaagaaattctggaagctactcagcctgctgaatttcagagatgtatggtacccttgttccaaaatattgcacgatgtttgagcagttcacactttcaggtagcagagagggctttggacttgtggaataacgatcacatcgagagcttgattagacaaaaccgcagagttatactgcccattatattccctgccttggagcaaaatgggcataaccattggaaccaggttgtacagagcttgacgcttaatgttcgcaagattttttctgataccgatcctgagctattcgaggaatgcttgaacaagtttcaagaaaatacagaaaagcgggaagagatcaaaacaaaacacgaagcggcctggaagcgcatagaagagattgcggtatcaaatgctgcaaatggtgaagcagttcttgttcctcatgtcgtagcttcagaaacatcatgagtacccttggtgatttgactggactctagtcaagtgtctatttcttttatcgt

SEQ ID NO: 7089 - DNA, 412 bp, Gossypium hirsutum
  Clone ID: GOSHI-09MAY01-C26841_1
gatctctgcttagaaacgaaggatcaatagagatgggttgttgtgtgtctagacctgaaggctgtgttggccaaaggtcgaggtcttctaagaagaagagtcgtaaaagaaggaaaacctttaagaaaagggcgccttctcgtctttccgagggttcctctgataatgtcgatcgtcgctcttccttcaccaacccagcttttcaagatacgttgtctttaaatggtcttgaaggtgtagcttcatccaatatttcatctctaagagatgctaattatggagaacattcctctttagttgaccagatgcagaatccagggggtctgtcaactggtaattctgcacgcaactctgctagtgaggctgctagaatttcaaatagtcaaatcttatgttcaaaggatgttaatcc

SEQ ID NO: 7090 - DNA, 513 bp, Gossypium hirsutum
  unsure (1)..(513): unsure at all n locations
  Clone ID: uC-gsflmaxxa002f04b1
gtttgtgtgggggattccctctgccattttctggagatggtgatatcataggggaggtgatgaattgatctctgcttagaaacgaaggatcaatagagatgggttcttgtgtgtctagacctgaaggctgtattggccaaaggtcgaggtcttctaagaagaaaagtcgtaaaagaaggaaaacctttaagaaaagggcgccttctcgtctttccgagggttcctctgataatgtcgatcgtcgctcttccttcaccaacccaacttttcaaggttcttgttttttttatatttggcatttgctatttggaacatgggagctaaaggagtgctctagaacatccctcctggacccaattttgatgggatcatgataggattatgaccctgttttttatatattgggacaataattatcactgttattattattttacttgttcaccatgtcatgtttaaatatgggcaacattactgaatngcagctgaaacagttttattcagttacaggct

SEQ ID NO: 7091 - DNA, 372 bp, Gossypium hirsutum
  Clone ID: LIB3048-029-Q1-L1-E7
agctaatgttttgatgatgccaccttggcaggaagccaagagttgtggtttgatccagtttcagtatttgactccgactgcgaagaggagtttgaaagtgttcaggaggatacgttgtctttaaatggtcttgaaggtgtagcttcatccaatatttcatctctaagagatgctaattatggagaacattcttctttagttgaccagatgcagaaaccagggggtctgtcaactggtaattctgcacgcaactctgctagtgaggctgctagaatttcaaatagtcaaatcttatgttcaaaggatgttaatccccaattaaagtatgatggggcttcaaatgaagtaaagcaacctgtttttcttgatgat

SEQ ID NO: 7092 - DNA, 405 bp, Gossypium hirsutum
  Clone ID: GOSHI-09MAY01-C26861_1
catactttcaaggttgtaggaaagtgaagaaatggtgaggatttgttgtattggagctggttatgttggaggtccaacaatggcagtcattgcactcaactgtccctccattgaagttgtcgttgttgacatctcggttactcgaatctcagcctggaacagtgaccaattaccaatctatgagccaagtcttaatgaagtggtcaaacaatgcaagggaagggacctgttcttcagcaccgacatataaaaacatgtcttcgaagcagacataatctttgtttctgtaaacacgcccaccaaaacccgaggtctcggtgctggcaaagctgcggaccttacatattgggaaagcgcaccaaggatgattgctgatgtatcaaaatccaacaaaatcgtcggcga

SEQ ID NO: 7093 - DNA, 389 bp, Gossypium hirsutum
  Clone ID: LIB3048-025-Q1-L1-H9
tgcttgatacgcagcttgacataggctcttgctggagaggggggcattgcgctgatatatgtgctcgaggtccgccaatggatgctatatgctctgagatgagagatagatcaaagttgggatgcatcgactatcttcggtactgaatattactacggcacagtgaccaattaccaatctatgagccaggtattactgaagtggtgaaacaatgactgggaaggaacctgttctttagcaccgacatagaaaaacatgtctgcaaagcagacataatctttggttctgtaaacacgcccaccaaaacccgacgtctcagtgctggcaaagctgcggaccttacatattgggaaagcgcaacaaggatgattgctgatgtatcaaaatcc

SEQ ID NO: 7094 - DNA, 304 bp, Gossypium hirsutum
  Clone ID: LIB3048-016-Q1-L1-F3
gctgacttgaagtttatagtgattaagagtctacccgggctggagagttgtattcctggagctccatatgttggcatgtgcaacaatagctagcgattgcactcaactgtgcctacattgaagttgtcgttgttgacatctcggttactcgaatctcagcctggaacagtgaccaattaccaatctatgagccatgtcttaatgaagtggtcaaacaatgcaagggaaggaacctgttcttcagcaccgacatagaaaaaacatgtctccgaagcagacttaatctttgtttctgtaaacacgc

SEQ ID NO: 7095 - DNA, 424 bp, Gossypium hirsutum
  Clone ID: GOSHI-09MAY01-C26801_1
atgctttatatggataattcagttctatttttcttttggttagggttagtaaggtgaccttaaatgtggtaaaggtaagagggaggatgctcaaaggatggaaagttttccctttaaaagataagcaaatgaatatatctatatcttgcatgtgcagtgccataacattgtctcagcttcataccttctggtattccaacccaagtttccggggaattttaaattacctgcactggactctaatttccaatttccatatggcttgccttttggtcaacatcatcttgctttatcacaaccttataacaagtttatattgaatttttatgcttcatttaagtgatactcactgttttcgagcattacatctttcaagaaggatcatacaagtctttcctagcatggcgtttttaggataggaaaa

SEQ ID NO: 7096 - DNA, 730 bp, Gossypium hirsutum
  Clone ID: GOSHI-09MAY01-C26571_1
cctacccaaaccctagtcaccaccggacaattcaaacccacagcaaaaacacacccagctctttcttctcactgtggggtgggttattttgagccttttttttcaatggctctttacttgttgttcgagtcatcttctgggtacgcgttgttccacgctcaggggctcgatgaaatcggtcagaatactgaggccgttaggaactcggtggcggatctaaatcggttcggtaaagtggtccaactcactgcttttcagccttttgagtccgctattgatggtctcaatcaatgcaattctgtttctgaagggcttatgaccgatgagttgaggagttttttggagctgaatctcccaaaagtgaaggagggcaagaagtcaaagttcagcctgggtgttgcagagcctaagcttggttcccacatctccgagacaacaaaaattccatgtcagagtggggagtttgtgcttgaccttcttcgtggtgtgcggttgcattttgataagtttatcaaggacctaaagtctggggacttagagaaagctcagctcggtctggcgcacagttacagtagagcaaaggttaagttcaatgtcaaccgagttgacaatatggttattcaagcaattttcctacttgacactcttgacaaggatatcaattccttttccatgagagtgagggagtggtactcttggcatttccccgagttggtaaagattgtcaacg

SEQ ID NO: 7097 - DNA, 808 bp, Gossypium hirsutum
  Clone ID: GOSHI-09MAY01-C26481_1
ctatgtctctgttatggttgcagagagagccaaactgaatcaatctctaggcatttgcttctccagattccaatcttctttttcttttcttttttactaataagtcgtgagaaatgccagcaaaaccagggaatgatgatcagcagatagaccgtggggctcaaagtgtgttgcagtcaactgcctactctgaaccctggtggaaaggagttgggactaacccctttggtgaagctgcctcgaagtcgccttctgtagaacaactaaatggttcagtggcaaatggagatgtgcattcacaggctcatggggacttgggcaatgaagatgggagaaacagacaagatcgccaacatctcaaacacgttccttccacaacaccccttactttgggtgaacaccatgaaccaaattcccaaatggaactagttggtcactcgattgtcttgacatcatatccttattcagatcctcagtattgtggaattctgacttcatatgggccacaaatgatggtgtcaccacatctatatggaatgcatcatgctagaatgcctttgcctcttaaaatggaagaggagcctgtttatgtaaatgcaaagcaatatcatggcattttgaggcgaagacagatacgtgctaaggctgagcttgaaaagaaagccattaaagttagaaagccataccttcatgagtcccggcatctacatgctatgagaagggctaggggttgtggaggtcgttttcttaatacaaagaagcagggtgatgatgttaccagccccacttcacaaaaggcatgaattca

SEQ ID NO: 7098 - DNA, 382 bp, Gossypium hirsutum
  Clone ID: LIB3145-048-Q1-K1-E9
cggacaagatcgccaacatctcaaacacgttccttccacaacaccccttactttgggtgaacaccatgaaccaaattcccaaatggaactagttggtcactcgattgtcttgacatcatatccttattcagatcctcagtattgtggaattctgacttcatatgggccacaaatgatggtgtcaccacatctatatggaatgcatcatgctagaatgcctttgcctcttaaaatggaagaggagcctgtttatgtaaatgcaaagcaatatcatggcattttgaggcgaagacagatacgtgctaaagctgaacttgaaaagaaaagccattaagttagaaaggtaaaaatggtattcttttagggggctttcccccccatt

SEQ ID NO: 7099 - DNA, 636 bp, Gossypium hirsutum
  Clone ID: GOSHI-09MAY01-C26451_1
ctcttttcccaacttgtttccctctctcttcataccttttcaaactcttcaaataccagcaaacgatgcccattcccttctgcattatccttctcttctagccttcttttccttcctttttcttttcttgggggtggggtatttcaacaatggcgaaggctgctaatgttgacaaggtgaagcggttaagaggttgggtgcaaaactacgattggggaagatgtggggcggaggcacaggtggcaaggctattggctttgaattccggggccgaggttaagcccgataggccttatgctgagttttggatgggaacacatgactcggggccaagttttttggctgatggctatggagaaggtcaaaatgtgggtttaaaagagtggattcggaagaatccgaatgtgcttggtcataaggttttggaaaaatgggggcccgatcttccttttctcttcaaggtactttcagtggcaaaagccctttcaatacaggctcatccggataaagaattggccaaagaattgcttaagttgaagccaaatctctataaggatgggaatcacaaacctgagatggctttggcaattacagagttcagggccctttgtggattcattactctcgaggagctga

SEQ ID NO: 7100 - DNA, 479 bp, Gossypium hirsutum
  Clone ID: GOSHI-09MAY01-C26611_1
cgccacgcgttcgacctggtgctggtacctggagtgcatatgacatgccgagagctcgaggacatcgctagtgtgatttttaaaagcatgctgagatgattcatctggtttatgaatttgcaccttgcaaattttctgtttcagcagttatccagtgatgttggagttccctgagctcatgatatgcgatggtgatgaggatgataactttgccatggtgtgcaacagcttgttttagctgtatgacagaatccattgaaggaagaggggtttcttaaggtctcaagcttttatttactctagctattatgaatggagatagtttgagatgttttctagacatcatgtgaatcaatatcttcttattcccattttgtattgcatactatgatcccctttcccacagccgggccagactgctaaactcaaaactgcaggttgtgcttcttcctgaactttgtggtgcattcttaacccag

SEQ ID NO: 7101 - DNA, 724 bp, Gossypium hirsutum
  Clone ID: GOSHI-09MAY01-C26601_1
ctgcctttgagctctctttggagcctcaccgacgacgaaatcgaaaaacgagaatggaaccgagacaagaatagtccccagcagcaggacgagaacgagggcttcctccacaacttttcacagaacaagaagaaggccattaattttggcgcggagctggagaaggatctcgatgacctggacgacgaggatgcagaggaagaagaagctagcgcctcctcgagtaaacctgctaagccagaggattataatgatgaagagtgggagattaagtcttccattgggagggactgtactcttgattacgaggaagaggaagatgcatacgataaagtggcagttggaagggataagaatggagatcgcctttacatgaaagatgtgaatgactatgacatagatgcggattcttgcaacacacttccaactacgttcaaggatttcagtagagatccacgtgccaatcacatcgctgcaaaacttaggctcatggaagatgaagaagctactaagagaaggcttgaagaagatgctgaagctgctaaaaaaatcgattcattgcatgtgtctgatagtgatgcagctgtgggtgtggacgctcacagtagcacatttgaggacggtaacccgaaatccattttgaagaggaaggatgctgagtcaaattcaaaatcacagaaacgtgtccgttttgattctgaatgttgtaaaaatgattgcagtg

SEQ ID NO: 7102 - DNA, 385 bp, Gossypium hirsutum
  Clone ID: GOSHI-09MAY01-C26621_1
gcagtttggtgttacctacttagtgactcacaaagaaaccgatcagcaattcgcttgtaaatccatcgccacccgtaagcttatcaaccgtgatgacatcgaagacgtccgccgagaagtccagattatgtaccatctaaccggccacaggaatattgtggagctgaagggggcttatgaggatcgtcactccgtgaatctgataatggaattgtgtgcgggaggtgagttgtttgaccggattatagcgaaaggccattattcagagagggaggcggctaatttgtgccggcagatcgtgacggtggttcataattgtcattccatgggggttatgcatagggacttgaagcctgagaatttcttgttactgagtaaaagggga

SEQ ID NO: 7103 - DNA, 909 bp, Gossypium hirsutum
  Clone ID: GOSHI-09MAY01-C26161_1
ccctttcgtccgctccatctcaattcaaacaaacccattaaatttatctgatcaaatccattatcaacaatggcttctctcaaattccccattgttctcttcatttcttctcttctcctccactcttctctagctgagatgatttgtgaagatttgcccaaagacgtgtgcgcgttttcgatagcctcatcggggaaaagatgtgtgttggaaacggcggtgaagaaagacggcgacgtcgagtatcaatgccggacgtcggaggttgtggtggagaggatggcggagtatatcgagactgacgagtgtgttgctgcttgtggcgtcgatagaaactccgtcggcatttcatcagattctcttctcgatcaacaattcaccgccaagctttgtacccctgcttgttaccaaaagtgtcccaatattgttgacctttacttcaacttggccgccggtgaaggtgtatttttgcctgatctttgcaacgctcagcgatcgaacccacggcggagcatggtggagcttatattgagctccggtgttgcccctggccctgtttctagccaagcaacagccgttgaagcccctgcccctgcccccatgtggtgatctaaattgctttcttttatttttttttttacttcaataatatgatttcatcacaattcacaattacttcatttccatatgtgaattggttttgaggaatacttgagagagagaatatatttgtatttaagaattttcagggtgggtttattggattggacattcatttgttaaattataataatatgtgtcttctatttattatatatttattttattattctattgacgggttttgacccgacccaatctgttaatgtttgatttgttttaaaatgaagttcagagtaaattaagttg

SEQ ID NO: 7104 - DNA, 410 bp, Gossypium hirsutum
  Clone ID: LIB3048-007-Q1-L1-G1
aaacaccttcttcattagttcatttccattttatgagcaatccatggagtttcttaaaaccctgttttgtttatttgattttaatggtttttgttgtctttttggcagctgagatgatttgtgaagatttgccgaaagacttgtgcgcgttttcgatagcctcttcggggaaaagatgtgtgttggaaacggcggtgaagaaagacggcgacgtccagtatcaatgccggacgtcggaggttgtggtggagaggatggcggagtatatcgagactgacgaatgtgttgctgcatgtggcgccgatagaaactccgtcggcatttcatcagattctcttctcgatcaacaattcaccgccaagctttgtacccctgcttgttaccagaagttgtccaatatttgtgacctt

SEQ ID NO: 7105 - DNA, 377 bp, Gossypium hirsutum
  Clone ID: uC-gsronu33B002g08b1
gatggctacactcaaaccccccatctggggctggattaatataatttccctccacgcttctatggctgagatcatttgagaagatttgcccaaagacgcgtgcgcgcaaacaatagcctcatcggggaaaaggtgtgtgttggaaacggcggcggacaaaggcggcgacgcctagcatcaatgccggacatcggaggtcgtggcggagaggatggcggattatatatagagagatgaatgcgttgctgcctgcggcgtcaatagaaacgccatcgggatatcatcggattcaccttcttgatcaacaattcacggtcaagctttgtgcaccagcttggcaccaaaactggcccaacagttatcgaccttttacttca

SEQ ID NO: 7106 - DNA, 1052 bp, Gossypium hirsutum
  Clone ID: GOSHI-09MAY01-C26121_1
gcgctttggagccaacaagcctgctaaaggccattcagcataaagttataattcaggttctctatcctcatattggatggccattataccatgtggaagtacatttgttgcccagtggcatattcgtcctcagttgactacacgatcttatgtcccaaaccgaataatgacagccagattgggagtcacaagtacaatgagttatttgagagcctcaaattcaggcttattcgcacgtgattccttaccgttattatcctttgtgaggccatctcaaacatcacatcatcgtaggggagcacagttcattgttagagctgaaactgattattatactgtccttggggtttcaagaaatgcaagtaaatctgaaattaaaagtcccacgcgtccggcttatcggaagcctgctcggagttatcatccagatgtgaacaaagatcctggggcagagacgaagttcaaggaaattagcaatgcatatgaggtcttgtcggatgatgagaagcgatctctgtatgacaaatatggggaggctggacttaaaggcgctggtatgggaatgggggattttagcaatccttttgatctgtttgagtcgctattcgagggcatgggtggtatgggcggcatgggcacatgggcatgggtggacgaagttccaggaatagagctgttgatgggcaggatgaatattacagtcttgtattgaatttcaaggacgcagtttttggagttgagaaagaaattgagataacccgactagaaagctgtggaacttgcaatggttcaggtgcaaaacctggaacaacaccatccaaatgtaccacatgtggtggccaaggtcaggttatctcatctgcaaggactccgttgggtgtcttccagcaggtaatgacatgctcttcttgtggtgggacgggggaaatttctaccccatgcaatacttggtctggtgatgggcgggtaaggagaacgaagaggattagtttgaaagtgccagctggtgtggattccggtagtcgtttaagggtccggtctgaaggaaatgc

SEQ ID NO: 7107 - DNA, 426 bp, Gossypium hirsutum
  Clone ID: GOSHI-09MAY01-C26051_2
cagaaatggaagaagaatcttacaagaaatctgaaggatgcaccattaaggaatgccaagacatgattcaaagaagtctacggactccaatggtgaaatttttgatggagcatatggagaaaacagggtgtaaggtaggagataatttcatcaaggcagttaattgcaataggaagatgggtggaggctatgttcgtggcgaaggagtaattatctttatgctcctttatgttagaaatattgctttaaattaatccaattaaaacagtttcttgatcagttaatgcaatatgattagtggtttattttaatagatgccttctctctacatgattttgtgtgtgtgtttctagatagtggtgtgtagcgaccaagtgaagatacaagatgatgtcaatcaagtagttatacatgagcttattcatg

SEQ ID NO: 7108 - DNA, 672 bp, Gossypium hirsutum
  Clone ID: GOSHI-09MAY01-C26051_1
cccacgcgtccgcgacacattctcaggcgacttcctttttcttctccggctgctgtttcccatcacaccgacttcgaatctcacgggtcgcactgacttaattcctacacagtgctgcgacatcttcaactctgctttcgaaatccaacgatattcttcggcagccattgatctttaggttttatctctcatctattagattgattcttttataacacaaccgaaaaaagtaattttttttcttaaaaaaaatcagaaatacacttgctatataggtgcttgattttttccccaaaaacccaaaacagtacaaaatggaagaagaatcttacaagaaatctgaaggatgcaccattaaggaatgccaagacatgattcaaagaagtctacggactccaatggtgaaatttgtgatggagcatatggagaaaacagggtgtaaggtaggagataatttcatcaaggcagttaattgcaataagaagatgggtggaggctatgttcgtggcgaaagaataatggtgtggtaccgaccaagtgaagatacaggatgatgtcaatcaagtagttatacatgagcttattcatgcatatgatgaatgccgtgcttcaaatttggactggacaaattgtgctcatcatgcctgtagtgagattcgtgctggccatcta

SEQ ID NO: 7109 - DNA, 423 bp, Gossypium hirsutum
  Clone ID: GOSHI-09MAY01-C26351_1
aaaaggggtagcggtttgcttctttttcattgtctttttccattatgaatcacgtaatttcctatccagattttccctgtaatttctcctatcatggataatcaatgtaatatatttcttatttttgtccttattatcttctttctttccccctaaagttgtttagtggtttaaagctggcaagaaaatttgtttctcgagagagaactaaaatcctatatatgtagtaggaaaaaaaaattatcaaaatagatggaatagcaagtgatgatggtgaaagttggcatgctttgtggaggagccagcacgctatgtagatttcttttgtgtgtgtgtgcaattagccgacgacgaggcctaactgactttaaaacagatctctccagctccttgacaatggatgatctttctcatcggatttct

SEQ ID NO: 7110 - DNA, 431 bp, Gossypium hirsutum
  Clone ID: GOSHI-09MAY01-C26271_1
agatgatgcacgagccctgggttctttgagtgtgttggctacattgttgcaaaccaaggaattggatgaatcaatgctagatggtcttggtattcttcctcagcgcaaacagcacaaaaaactcttgctgcaagctttggtaggtgagggctcaggtgaagagcaacttttttcttttgaaagtggctccgcaagagatagtattagttctgagcttgatggatatttaaaaaagttgaaggaacaatatggagtgtctattgggggagcagcagcaagccctcgtatacgtagaaaccaggtccttgatgcattggtcaaacttctttgtcgatcagatatatctacagaaattttatgggatggtggttggcttttgcgacaattgcttccttatagtgaggccgagttcaaaagccatcatcttaaat

SEQ ID NO: 7111 - DNA, 583 bp, Gossypium hirsutum
  Clone ID: GOSHI-09MAY01-C27921_1
tatggatctttcaggcagacaggttccgaaaaccttagggaggattctctctctcccagattataactcatcacccatcggcagccctgcgaggaacccggagcctagttctatagctgcacagtcaagattcgccagcccggacaagctccagaagttacaaaacaatgtgagtaaactaagtcaatccgcagaggaaccagagagccggcctggcgtttctgataataaaaacggtgatgaagtccgaggtgataatgcaattttaaacaaactcgacgcttgtgtgaatgatgataaagaggatcaaagtcattcttcttctactaaagatgaaatgggttgcgaaggtgatgccggtgttgtcgttgttgctgaggaaactgaaattacggttgaagaagaaaccgagctcttggatgcttcctctgagacaaatgactattcaattactagagatgacaaaaatgtcgatatgtcagaagtttatgatgaaaagcaatatccggaatgcttgaaacaggatttaaccgaagaggaccaacaactggtttctccattagcttctccatcaaactcatca

SEQ ID NO: 7112 - DNA, 383 bp, Gossypium hirsutum
  Clone ID: GOSHI-09MAY01-C27891_2
caacaaatgaaggaaatccttcaccatatctatcttcatttggccgactaagaaaatcaaaacccgaacctctcttgattttccctcaatcgatcctagcacccctctcttaagcaccgatctgcctctatcaatggtgacgaatagattcgggcttcgagggacgacaatctcgaccacgagattccttctacgcttcagtttcaacaaagaagacggaatctcttagcacatccgcaaggtaaatctattgttttctctttgtttttaaatgcgaaaaactaatggaatcgaaagataaaagaagaaattaaaagtattttattccaaaaacaccttttcaattttgattccttttttcaatctcccttcccccgatttaa

SEQ ID NO: 7113 - DNA, 546 bp, Gossypium hirsutum
  Clone ID: GOSHI-09MAY01-C27891_1
cccacgcgtccgagcaaatgaaggaaatccttccctatatctatcttcatttggccgactaagagatcaaaaccctaacctctcttgattttccctcaaccgatcctaacacccctctcttaagcaccgatctgcctctatcaatggtgacaaacagatttgggcctcgaaggacgacaatctcgaccacgagattccttctacgcttcgatttcaacgaagaagacggaatctcttagcacatccgcaaggtacggaggcaacgtgacggggtagttggcgcgtacggaggctattggtggcgcagctgctgctagggctagggtttgctgcaaacatgatttaggttttgggccctttttgggcttagggttttattagttttgggttttaaatttgggtttgggtttgtaatgttttgggttttaaatttggacatttaatggactgctaatatttggatttttttgtttatttttgcttttggctgatttgggccttttgggccccggccaatttgggcctttacaattataattatataat

SEQ ID NO: 7114 - DNA, 534 bp, Gossypium hirsutum
  Clone ID: uC-gsflnu33B028h04b1
ttttccctcaaccgatcctaacacccctctcttaagcaccgatctgcctctatcaatggtgacaaacagatttgggcctcgaaggacgacaatctcgaccacgagattccttctacgcttcgatttcaacgaagaagacggagtctcttagcacatcctcaaggtacggaggcaacgtgacggggtagttggcgcgtacggaggctattggtggcgcagctgctgctagggctagggtttgctgcaaacatgatttaggttttgggccctttttgggcttagggttttattagttttgggttttaaatttggttagggtttgtatgtattggggatataaatgttggacatttgctggtcaggcaagtatcggctgttaaggattaggccccttgagatggccaacattcaatatatgttactgttgttcccctgcgtgatgtaatatctgctttgtcgacctcaacttgcttagactctggagagtaaattagacccttgtatcacataaatcaatttgagaacatgtaggac

SEQ ID NO: 7115 - DNA, 417 bp, Gossypium hirsutum
  Clone ID: GOSHI-09MAY01-C27551_1
cggacttgtgggactagatcctacaagagtcgttgaaatgcttaatgatcggccttcatggtatcatgattgccgagctggggatgttacaaacgtgttgtctcactggaaatggtggatccattgaactgcttcatatgccagtaagctcattaatgtcaaatctatcctacttttccaactaactctatgtgaatatttgggccgtaccagagatctaagtatgtgtatttaaattgttcaccatacccaattattgatggtatatgagcatgtgagtacatacgctatccccacaaatttcaacttccaagacctggttctgatataaatccaagaaaagaatagcataataaatagtatagtggtaaattattaggaaaataaagaaaagcatttctattttcgggatccaag

SEQ ID NO: 7116 - DNA, 569 bp, Gossypium hirsutum
  Clone ID: GOSHI-09MAY01-C27531_1
ggggaagaagtcactgcaaacttggacataacaggacatgtcgggagagatggaacggatattccgattaaaatgaaaatgctggcaagaagggtaagcccacagcatgctctgatattaagtgttggtaaacgattagaggctggaaaaagtcctgtgaaggattcatttcttccgagtatttttagtgtaggcaatacagttccgaggcatgtagttactctagatgagaaataccttcgtcgctgcctggaattgatttgtatcaatgcagcaaaagccgctcaatgcaacatatccgtgagcttgagctccgtagaaatgagcattttatccgatggattgaattcacctaacatcggggatgaagatgcttgtgacttccaaaggtttgttttcgaccgtccactagcagttgggactggtggagtagtcattcgtcctgtaggacagtgggctcgaagttcaaaaacgggcagccggagtatggcgaatatattgaagagcccgttgttacagaaattcggtgcatcggatgtccgtccaagttcgaatgctttaaaagatca

SEQ ID NO: 7117 - DNA, 440 bp, Gossypium hirsutum
  Clone ID: GOSHI-09MAY01-C27421_1
cttatgcgtgatttatgcttgtcaaaggccaaacaacaaaattttatgcatattattggttctctcccatcttctacgtattctagaccaacacctgtaagcaagatccgtagatgtgctatccatttggatcaaaacaaccaagatcctggtttgccagaataccagaaaaatcctaaccttaggtccttattctttttccgtccaaaaaaacatagaatacataatgagcgccttttgaaatctgtgtttgacaaattcaaattgcttaaagtgttggatcttgaaggaattaaaggacttgaggagaaattacctgaagatataggatttcttgttcagatgagatttttaagtctgaagaaaacacgtataagagaattgccgacatctttggtcaatctgattggcttgcagactctgaacttgcaaacaattga

SEQ ID NO: 7118 - DNA, 436 bp, Gossypium hirsutum
  Clone ID: GOSHI-09MAY01-C27181_1
gctcattcctctcctttcttttccagatctctcggcggcgcgcaaccatacctccgctcgctgctgctctcgttaatctttcaacgatttctccgagctttttttattgttgaacaaaaatcacactgcaaccgttacaactcagacagaggaagaaaggcatctttttttttttaattttgttttgaagttggtgttatcatggaacctgctacagggaagtcgagtcttttcaggaatattctggcgcgtgctcttattttcggtgttcctatcatggtcttccgatttgcttacgtggtcagcatcacccgcgaatcttgcactctcagtagcttctgcttcttctccttgcggcagaatctcaacttcatcgtccccggtgccagtgtctccgccatcgtcgggaacgacgccgtttctcgctccgatcctc

SEQ ID NO: 7119 - DNA, 652 bp, Gossypium hirsutum
  Clone ID: GOSHI-09MAY01-C27141_2
ttttgttggctcagttgtagctgctgtaatgattgtttttgtattattggcttatcaccgagcgcaagttaaagaatttcgtggaagaagtggatttagtgaaacgactactgtaggtgatgctaagttgggcgggttttcacgaccttctgttttcaagttccactctaatgttcgaacaccacaaacttcgttgagcttttcaaatgatcacttgctcccgtcgttagcgaggccattgccctactcgaagcagcatcattcaaagcttgtttgctacataaccaaagagctaatggatacagagaacccacctcaagtcctgcctaacggctatgtctacagctctaaggctctcaaagaaatggccgagaaaaacaatggtaaaattacatgtccgaggaccggtctggtctgcaattattctgacctggttaaggcctatatctcatataactacaccatcaacactgcaaaggtaaaaaagaaaaaactcttcctggcctgtttcctcttaatgttagtgctaaattttatgcatcatctgtagatatatttctcttctgctttcgaatttttcggaacttctcattgtaatcttcttgcacctttaactcgttcacctcatgtaaataatgcatccttttttttt

SEQ ID NO: 7120 - DNA, 860 bp, Gossypium hirsutum
  Clone ID: GOSHI-09MAY01-C27141_1
gaaaagcctgaatctttcaggaaatcatttaagtggagtaattcctcttcaaggttcacgtgttaatgaattacttgttatgtcatcttatccgcaaatggagtctcttgatctctcctacaattctttgactggtggtttgccttcagagattggtaatatagctgccctcaaactgctgaatcttgcaaacaatgacttatcaggccagctgcctagtgaattaagcaaacttagtaatctggaataccttgatttatctggaaacaactttaaaggaaaaatccctgacaggctttcaaccagtcttaatggatttaatgtgtcctataatgatctgtcaggtcctattccggaaaatttgagaggctttcctctatcttcattttctccagaaacaggttgctaattttccctcatggcatgccatcagcaaactctgctcaagttcagccccctgatcatgctggacatcataactcaaagagcgatgttagagtatcaattattgttgcctcagttgtagctgctgtaatgattgtttttgtattattggcttatcaccgagcgcaagttaaagaatttcgtggaagaagtggatttagtgaaacaactactgcaggtgatgctaagttggtcaggttttcccgaccttctgttttcaagttccactctaatgttcaaacaccacatacttcgttgagcttttcaaatgatcacttgcttacttcaaaatctaggtcattgtctggactgcaagaatttgttgctgaaattgtagagcatgatgcacctgagagagccacaacctcttcggcttatgtgaatactaatcttctagataatgagccaacaacatc

SEQ ID NO: 7121 - DNA, 411 bp, Gossypium hirsutum
  Clone ID: LIB3145-016-Q1-K1-E3
tgaaaactccatactgttttgaagatgactgcaccaaggaagacccactgtcacaggaaaacttccggaagttagcgatgccattgccctactcgaagcagcatcattcaaagcttgtttgctacataaccaaagagttaatggatacagagaacccacctcaagtcctgcctaacggctatgtctacagctctaaggctctcaaagaaatggctgagaaaaacaatggtaaaattacatgtccgagaaccggtctggtctgcaattattctgacctggttaaggcctatatctcataaactacactatcaacactgcaaaggtaaaaaagaaaactcttcctggcctgtttcctcttaatgttagtgctaaattttatgcatcatctgtagatatttctcttttgctttc

SEQ ID NO: 7122 - DNA, 1115 bp, Gossypium hirsutum
  Clone ID: GOSHI-09MAY01-C27111_1
catcagcgttacaatcagttgaaaaatggtggagatgaagaggcagcaacccttgttttcgtgtggacggaccgtggttattacaggagaagaaggcctaagattctctctttccttttactttctcttcttgcttgtggcttcatattggctcctcacttctttagcttttcttctgctttatctcatctctatttttttggtgtacaaaatgacggccttgctggtgatttatatgtaaatgctcctctttgttcttcaatctctaatggttcagtttgctgtgacagaagacattttcgatctgatatttgttttatgaaaggtgacataagaacacattctcccagctcttcggttttcctttattcaccaaaaaaatagcgacgatgacgcttcaagtacggttgatggtgatgaacttcaacacgaaaagatcaaaccttatacccgaaaatgggaaacgagtgtaatggccaccattgatgaattgaaccttatctcaaagagacgaaattcggacgttgaccattcttgtgacgtaattcatgatgttccagcagttatcttctcaactggaggctacacaggccacgtttatcatgagttcaatgatgggatcatccctctgtacatcacttcgcagcaatttaacacggaagtggtgtttgtgatccttgaatatcatgattggtgggttatgaagtatgctgacatccttccacatctctccagtatccaccaatagacttcaatggagacaatcgaacccattgctttactgaggcaataactgggcttagaatccatgatgagctactgtggaccctattttgatgaagaacaatgagagtttggtgatttcgaaacttcttgatagacttaccggcccagattacagttgatcgaagcccagagagaacttagtggcatactacccaaaaggatgccatcacaagaaacaaatgtgactgcctgaagctaacatactaccaaattggaagcccagaatgggtagcgttagcgacccacgattcaattctgatattagacccttggcaggcccatttttgtaaacctgggtttttttaagtattccctaagaaaagctgaac

SEQ ID NO: 7123 - DNA, 575 bp, Gossypium hirsutum
  Clone ID: GOSHI-09MAY01-C20951_1
gttggctatatgtggtatgaatgtatttacaagctggacaaggtggcttacaacaaatatcacccatacacatcttggattcctataactgtctacatttgcttgcggaattgtactcagcagcttcgaagttacagtttgactctctttgcgtggcttggcaagataactctggagacttacatttcacaatttcatatctggttgagatcagacatgcctaatggacagcccaagtggcttctttcttttatcccggaatatcccctactcaacttcatgctcacaacagctatttatgtcttgatatctcatcgtctgttcgacttgaccaataaacttaagtcagttttcattcccacaaaagacaaccgacggctgctatataatttcattgctggagtagtcgtttcagtgtgtttgtactgcacttcactcattcttcttcagattccccattcaactgcctgagaacgcatgaagttggatagcgagcgcttttacatcggacataccaaaaacatacataaatagttggagcagaataagtgaaactggaagacgtatacacgatc

SEQ ID NO: 7124 - DNA, 746 bp, Gossypium hirsutum
  Clone ID: GOSHI-09MAY01-C20891_1
aaaagaaggattaaaaaaaatcaatggaatcgaagaaacgaacggcggaatcagccccggtattccaggaaggaataagcttaatcctcactcggtggtcggctctcaccgccgccgttgaaaacgagtggggcggccgtgattctctcggcaaagccaacgccatctgcacggacgtcttcgcattcttcactgaagccagagcggagccgctttatatagatgatttggaaaatcttttagaggaaggtttgcttagtcttaatacgttagttgaagatggcagcattgaggaggtggctgagaaattaatgattatgcatgaagagtgtttggaaggtaactatcaatctgttgaaaaactgaggacaacgaatcctcctccagtcgctcatgtccgaccgagtaacgacgaagatgaggatgacgatgatgatgaaaatgatagcatgagtgcagacatcgcggcaaacatgatggtggatgtaccgaactctcagtcaagtttgaatccagttagtatgcttacagaagagccaaagcaaaaccagtcagctgaagctgaagacggttgggttgtagtttcatcccggaaaaacaaaggtagaaggaattaagccataatttttgttacccctgctccctattcctggtatatacatgttttctctagacattgcccctgcgctaattattagtgtttgtaacttttttttaacaatcttatattgaacgaaggttactgt

SEQ ID NO: 7125 - DNA, 384 bp, Gossypium hirsutum
  Clone ID: GOSHI-09MAY01-C20581_1
cagtcaaaagcgctttttcagttaaacagataataattatgactaggaaagctgccaagtctataagcattattaccaaccctgatcaatggaaacaatcactaacaaaatgctctctccctctctctctcactaattatttaactgagaatcttaatctagctaactacaacacattcacaacatatggtacacaatttcctttgcttcaagcatttcccaagctcaaaattcacaactgacaaagcttcacaagttcttttcttttttcctttgcttcaagatataaaacgtgttcttcatgcaacgcatctacataaggccacctgtatatggattgtacgtttgaaccggcatacctgaacttgaaaggtgtacaagggc

SEQ ID NO: 7126 - DNA, 357 bp, Gossypium hirsutum
  unsure (1)..(357): unsure at all n locations
  Clone ID: LIB3149-064-Q1-K1-E10
gttttatatcttgaagcaaaggaaaaaaaataaagaactgtgaaactttgtcagttgtgaattttgagcttgggaaatgcttgaagaaaaggaaattgtgtaccatatgttgtgaatgtgtcgtagttagctagattaagattctttgttaaataattagtgagagagagagggagagagcattttgttattgattgttttcattgatcaaggttggtaataatgcttatagacttggtaacttttttatcanaaaaaaaaaaaaaaaaaataaaaaaatataataaaaaaaatatttatttaaataataaaaaaaatttaataaatattaaagggggggcccgttctaaaggatcc

SEQ ID NO: 7127 - DNA, 697 bp, Gossypium hirsutum
  Clone ID: AW187338.2
gtggttctagctcattcagttatgggattgggagtgtgtccatagatggtactgcaggatcctccgaggattatgttggaagctacggtgttgctaatagacagtcgagtagaggtaatattctgtttaagcagtcctgagactcgagactcgaatgccagcttgctgcatgtgtttaattagtctctttggtttcttatccaggaattgctgcctagggggggggggactgtgatttggatatcagaagtcatgaagtagggtgaataaacaggtgaaggatttgtgaattcgatatacaactgccttattacaatgtcagcttacaaggaaattgatgttataacactaatgagggatattgatttgagagtgagcagttacaaggggaggttttgtgtaaggtttgagattcgatttgtttgtttgtttgtttgttttgtttatggtaatagtgaaaatgtaggttggtgagtgaggtgtacaatcagattgcgggacatatactccggaaggcgtctacggcaaaggcgcgccagtagtggtacatcaaacaatagggtactaaatttttttctttttccatttttattttgggaagctggttcttgtcctgataattgttgcctatcatctgggattgttttggtctcagattgtaaggagttgtttcagttccaaaaaaaaaaaaaaaaaa

SEQ ID NO: 7128 - DNA, 297 bp, Gossypium hirsutum
  Clone ID: LIB3083-047-Q1-G1-G3
tcctccgaggattatgttggaagctacggtgttgctaatagacagtcgagtagaggaattgctgcctagggggggggggactgtgatttggatagcagaagtcatgaagtagggtgaataaacaggtgaaggatttgtgaattcgatatacaactgccttattacaatgtcagcttacaaggaaattgatgttataacactaatgagggatattgatttgagagtgagcagttacaaggggaggttttgtgtaaggtttgagattccatttgtttgtttgttcgtttgttttgtcta

SEQ ID NO: 7129 - DNA, 485 bp, Gossypium hirsutum
  Clone ID: GOSHI-09MAY01-C20411_1
ttcatcgcgtccggaaggctgtggttcatctcatatgttgtgccatgaagtaaaaagtctttcatgctcgccgtcctctgtagaagatgtttctactcagcattctaaattctctgggaaagaaccagtttcaactaacagcatagttattctgttagatacaatgcataacctgtcgaaattgcttctgcatcactgctccaatgagtcatctgaattgaaggaacaagatcgcaagtcacttgaaaaagtaataaaaaatcttaatacatgcatgtcaaaaaatgttggacaagaatcatttttaagcgatctacatgaggggacaagcatgggaacgccccaggtggcggctattgatgtctggagtcagcatgtacaagagaaaacgaagcattctggtaggaaagatgacaagtgttctggtttcattcctttcgagagtggtgcaggcataaaggcaagaaatgataaaatgacccagg

SEQ ID NO: 7130 - DNA, 585 bp, Gossypium hirsutum
  Clone ID: GOSHI-09MAY01-C20401_1
tggattcaagccactacaatagtttcagtttggattgggacgaccgtttcactgaagacgtgatccgactaatggatgccattgaagccactcctcctcctcctcctccttcatcttctcgcaagaggcgcaagtccgccgtccatcatcaagataacctcaaaaccggccgccaattgccccattctattctctcacccccgccttcttttccgtcttccttcgctcgttgtcaatctaatacaaggcttacatatccgccgttgagatttggaggtcatactttgtatagctttacggaagatgaggtagaaaatgctgcaatggagctattcaaaattgttgaaattaagaagaaagaaatgggtcaagttgctttagggtttgatattgagtggaagccctctttccaaaaaggaattttgcctgggaaggctgcggtgatgcagatatgttgtgacagtcagtattgttatgtgatgcatatttttcattctggcatacctcaaagtctgcaggttcttcttgaggactccgaaattataaaagttggagttgcaattgatggcgatgctatcaaggtgt

SEQ ID NO: 7131 - DNA, 763 bp, Gossypium hirsutum
  Clone ID: GOSHI-09MAY01-C20421_1
gctactcggaatgtttggggaaatgtaggccttagcaatgctacaaatgcttccagtcctgctagttacttagggtctggaaatggtagtttcggttctttaggaaatagtggggcaaattggagaccttctcttcctgctcgaagcggagggaacgcttctggttataccggtgggagtgccgatgacaactacagtttgggagggggaggatatggaagaaacatcggcattgttgcagcaccaccatcatcatttgctgggtcaactggtaatattgaatgttcctatggagatctttaccgtaatgcttcagtttatggtgactcaacttggaagtttgcatcacctgacttggatggttctagctcgtttggttatggacttggcaatacatccgcagatgttactacaagaccctctgaggattatgttggaagttacaatgtcgcaagtagacagtccaatagaggaattgctgcctaggagatccggtattcggatatcagatactataatgtagggtgaatggatttgcacaaattcgatatgacttgttactatgttggcttacatggatattgatcttatggcactaacgacggttaatggtttgaaatatacacattcagagtgagcggtttcagccgattttcaacaaggtttgagatttgatttttttttctttttactttatttaaaatagtgaaagaacaaaatttaggttcctttcttggcatttgagtgaggtttacaatcacat

SEQ ID NO: 7132 - DNA, 583 bp, Gossypium hirsutum
  Clone ID: GOSHI-09MAY01-C20781_1
agaatgaaaatcatgtttattatatatatatataaataaaaataaaaacgaaagccaattttagattattctcatgtcgtgtatgttccaagtatatggtctactaaacggagtaattaccggaggaatggtaaatttaacagtaggacctaattccaaccatcaccataaaaatacaaacaaaacatttgcatattcccattacaaacataacacccttactgcaagcctctaccctgctgcttgaaaatccccaaaatcatcctcctctatgtcttctgtgctctgactttcaccacattgttgttcatctctatgctctttctcggacttcgaagccttcttttctgaagttccgtctaactggagatccgggggcgagcttgttggagaattcccagtcgtttctacaggtgaaagctgtgctggtggatgtggctggggtgacttaagagcgctagctacaggtgaaagaggtgtcggtgggggaggtggtggtttgatgctaaggatgggctctttctggttgcctttgtcagccaaagacagcttgtcaatgcccagctccgcagcttttgacttc

SEQ ID NO: 7133 - DNA, 506 bp, Gossypium hirsutum
  Clone ID: GOSHI-09MAY01-C120799_1
cggacgcgtggggtctcagctacacaaccgcaaccgtcaaagccaaaccaagatagttccacatcttcaaagaagaaaaaaaaaagatttatgatggaagtgaacaaatttctacttcaattactggtgctgctatatttttggtgaaaaacatatgaactattggccttgaaattaagtaggagcattgcctctgagaaagtgattcaagaaagtgctcaaaaattatattcagccttttgtgaagtacaaggaataactgaggataagggctatcgtgtgttgagcaaaatctcaaaccatccaacgcaaatgctaatttttttcagtttactttcttctgtgcaattggaattggtgaaaagatttcttattgatcattaaaaattatggctgcgttggtaatattttgataactttttgtatatgcaatatttggatggtaagatgtcattagtagaatgttataaactattataactttttgatattggaaaatttaacat

SEQ ID NO: 7134 - DNA, 995 bp, Gossypium hirsutum
  Clone ID: GOSHI-09MAY01-C20691_1
cgggtaacaaggcccgctctcgggggggggggggggggctggaaaagttaaacttgtcattcactgttgtttctgatggtgggttaagagaactgtctggactaacgtctcttaaatcacttaatctggatgctcgtcaaatccctgatgctggacttgcagctcttacaagtggggcggggctgactcatcttgatctttttggagcccgtatcacagattctgggacaagccacttacgaaatttgaagaacctgcgctccttggaaatctgtggtggaggattgaccgatgctggtgtgaagaacattaaagatctttcatccctgtcgctgctaaatctgtcacagaactgtaacctgacagataaaactttggagatgatctccgggttgacaggattgatctctttgaacgtttcaaattcccgtgtgacaagtgcaggattgagacatctaaagcccctgaagaacttaagatctctgaccttggaggcttgcaaggtcacagcaaatgacataaggaggcttcagtcagctggtctccctaatctggtaaacttccgccccgagtagtaattatgtttatggtggcgttgatatgttctgtagatagcttttattggggaggggaacactgctatctgtatatgtgaaaaagttgagcagatgttgggacatatttgtacatatggggtgattgaaaggtagttaaggaagcagcttaatttactttagtaaatttaaagggaggggctgaaatggtcactttctttaagggccgcggtttttagatgaaagaagaataatcaaatttctgtaaatatgctttgaatgatttatcagcggtgtgtgctgtactgtgtgaacttgtgtacagttgtacgtaccggcccattatcatgaattttatttagtttgaattatgcttgaacttttcctactccttatctttatttttattttcaagaattagtcttactttttaagattctt

SEQ ID NO: 7135 - DNA, 435 bp, Gossypium hirsutum
  Clone ID: LIB3083-051-Q1-L1-D3
gcagaattggtgataatgggctggttcacttgacaggtcttcggagtttgaaatgtttggagttgtctgatactgaagttggaagcaatggtcttcgctatctttctggtttgtgtaagctggagagtataaacttgtcattcactgttgtttctgatggtggattaagagaactgtctggactaacgtctcttaaatcacttaatctggatgctcgtcaaatcacagatgctggacttgcagctcttacaagtttgactgggctgactcatcttgatctttttggagcccgtatcacagattctgggacaagccacttacgaaatttgaagaacctgcgctccttggaaatctgtggtggaagattgaccgatgctggtgtgaagaacattaaagatctttcatccctgtcgctgctaaatctgtcacagaact

SEQ ID NO: 7136 - DNA, 335 bp, Gossypium hirsutum
  Clone ID: GOSHI-09MAY01-C120639_1
gtttcttcattcgtttaaagacgttactgatatggtcaggggactagaacaataagacatgtgtttggaccgttcctcacatcttccacgatgttcttggatggattcggtctgcctgggacagttgtcgggcatagctacgcgagataccgggttttgggagtgggggagtcgaactatggagggggccatgcagatatatggccttctttggtccttgggcgctcaccacctatggagattgagtatccaccgccgtgtgagctccagaccgaggctggcgtgcgtggctcgcagagaggcgttctggtgatcatacgctgacgatggcgtga

SEQ ID NO: 7137 - DNA, 842 bp, Gossypium hirsutum
  Clone ID: GOSHI-09MAY01-C20181_1
cctcaagttttgttacttttccggtgagaaatatttttatggtttacattcataagtgctttagcatcaactaggggaaatgatttccctagacagatactttaaacgtatagcagcatcgcattgtgttggagctgaaagaggggatggcatttcaactgaggatggtcaatcacttgatccatactatcctgaatatagcttttccggattggataagtcccgaagaatttttgcaaattgcattgaaacctccttgctacctatatacataggctttgaaaaggcctagttcacatattcacttttgttgtctcttttatctagttgcagagaaaaatgaaatggggccgccgatagctgggtcaccgttgaggcttcctcgtatggcttgcaatttgacaggtttcgtgtgagtttgtatttttatcatgtggcatgaagcttggataacaggtcaggaaaatttacatgccttgttggattctcccatttcagtagttcggctatttctttctctgtttctgtggcttctctcttcaaatcattaagacagtagcctaggctgcttagacatagaaccatttggctcttaagcatctcttcgacttcattacgctcggtcttatctgccactctgattgtatattgaagaaaacactttccgatctcagaaatgctggtttcttcataccccaatcgtgtacagacatctgcatttggtgattttcccaactcaaggtcttgggatacactttccatttgcaactgtttttcaatctcttccagagacttaattagtcacaccttatccaggcattttgataaagagcctgttttgt

SEQ ID NO: 7138 - DNA, 884 bp, Gossypium hirsutum
  Clone ID: GOSHI-09MAY01-C20161_1
aaaatgtcattttcttaataactaattcaagcttaaataatataagtacggcaatcccactcacgaatgaattaatgcaccataaacatcaaattccatatgactcggcaatgatatatgaatacaacaatataacagtcacaagggtgaacattattgcaaaaatccttaaatccaacattttgcatttttcacccactctccatccactccatcgaattacatccatgccgtacaatggatcttacatcatcaacccaaacacactgcacaaatcaaaaagaatgtgtggctacgtcacaaagttgaactaaaatgcaatttcacagggtgcatgaaatgttcttccacggcatatggactccaagttttctccagtgtacgaacaaagcggtgatacctccacaccagttgcatataatggcactgaatgtgttaagaagccaccagcagctactacccatcgtgtgtgtagccgcagaacaagcaaccttgcactgtctggagtgtcataatttgaaccgttagcatttttcactggtgcaaactcttcctctcgtaatacctcaaacaaagcagttgaaggagcatatggaaatgcatcaaagacgaactgctctagtttcaaacccattgtatacccatggatagaaggaacctttttctccgccagatggtaaatgccgtctttctcaaggccatctgccacttggcttaggaaatccaaagtaaacatgtgtaagcacacattactccagcaaaaacgaaggcgtccagtttgctggttaactgcagaagccagtgatgaatctaattcactgtattcaaccacagtaagtggcccgcctttaccacgccttacaaaaacaccaacctttctgcga

SEQ ID NO: 7139 - DNA, 274 bp, Gossypium hirsutum
  Clone ID: uC-gsronu33B055e02b1
gtttgtatccagtgaaaaatgctaacggttcaaattatgacactccagacagtgcaaggttgcttgttctgcggctacacacacgatgggtagtagctgctggtggcttcttaacacattcagtgccattatatgcaactggtgtggaggtatcactcttttgtacaatctttgtagtaaatttgttttcaatattctttgtaatatacactaatgttttcttttttttttctatttttctttcttctctttcttatttatctttttctttttt

SEQ ID NO: 7140 - DNA, 879 bp, Gossypium hirsutum
  Clone ID: GOSHI-09MAY01-C20091_1
ctggacaggtcgttattttgtgtgagatcaatctgttcttgagttgagaatgattcctgttgcactgcatccgtgggctgccaaattcaactccatctttgaagcgttgtcagtattgagtttttgttggagcatgggtggccttggcttctagtgggcacttgccgctaaacaaatttcgaggaaaattggggaaaaccatatttaagacgcgaaacttgtaaggagtaaaatgccttaattggttacttgggatggagataaaaacgtgttaataagatcatctatcgggtttggggctatgtcttgaagtgttggttggaaaaaaaacttggtttactatcctaattatctatccaatgctcatttgcctaagttgctgttaaaagtcagcagccggcagctgagactaaagtatatgatgtgtgctcgacccagttactctgtggatgagcttcagaggtgtcgttgacatggttatacaggcctgttctgcccccagtcccttgctagtatggctccccagtcatgccctaccacgaacaccttcccttctcgcggatccagcacgtctatcaactccactagatcgccgaccatgtggaaacaagtgtaactgtcgactgactcgggaatatccgagtcgccgtagcctctcaaatcgggggcaacggttcggaaacccatgttagataaagcgaggatttggtgacgccatgagtaccagagctcagggaagccatggaggaaaaggatgactggaccttcacctttttcagctatgtgaatgtttatgccattcacctcaaccattcggtgctgtaccccttccattatttttttgcttaattctcgtaaataccttgatttttctgggtt

SEQ ID NO: 7141 - DNA, 404 bp, Gossypium hirsutum
  Clone ID: LIB3272-009-P1-K1-C6
gagaaaaggaaaatggaagggataaagcaccaaatggttaaagtgaatggcataaacattcacatagctgaaaaaggtgaaggtccagtcatccttttcctccatggcttccctgagctttggtattcatggcgtcaccaaatcctcgctttatcttccatgggttaccgagccgttgctcccgatttgagaggctacggcgactcggatgctcccgactcagtcgagagttacacttgtttccacataatcggcgatttagtggagctgatagacgtactggatccggatgtaggcaaggtgtttgttgttgggcatgactggggagcttacatggcttggttattgtgtctgtttaggcctgataaagtgaaagcattggtgaatttgagtgtgccgttttt

SEQ ID NO: 7142 - DNA, 719 bp, Gossypium hirsutum
  Clone ID: GOSHI-09MAY01-C20051_1
aagtggcatcaaactagagtcgctcgtttatcagtcctgatgacaataatattgctgcaggctctgcgcatgggtccatctacatttggtcaatttccaaagctgacatggttagcactctgaaggaacatactgctcccatcctgtgttgtacatggagtgcaattggaaaaccattagcctctgctgataagaatggggttgtctgtacctggacatgatccgcacgggttgcgcatggaacaactcggaaagctgaagtagatgtttgatgcaggtacattcattcgttttaaagctttttcataaattttgaagatctgtagtctcatacaaatgtctatatatatatgcaaacataagcgtcgtaacatagttgaagtgtaaattattcaatcgtaattatgagaacgaagttggaatcagttgggtagaattttacagtctcatctttgggataaaaggaaggtgttgtaggattagaggaagagttcttgatgggatatgaagcttgcattgctataccacagagaccttgtttgtctttgatgccacgttccattcttatgtaacctttctcaccccaatcaggtccccatgagttctttactatccaattcttagttccatcaagggttgttccatatcccactgctgcaaccccatgggtcagctttattccacattgtccaatgtataccccctccgagtagaattgg

SEQ ID NO: 7143 - DNA, 742 bp, Gossypium hirsutum
  Clone ID: GOSHI-09MAY01-C20041_1
ttggttgtacagctctgctcggcgacgatctgatcgtcttcgtctgtctgattaacaccaacttcaatcaaaatcaatggctgcaatcttcgctcgtaactctctcaacgctctccgagctcgacaccttgctgtgtcagggcaagtgttgcagggttcacagcactacgggttgcgactcagttcacgctcatatggcacgcagaaagatgatgaagaaagagagcagcttgcaaaggagatttcaaaggactggagttctgttttcgagagaagcataaacacactgtttctaactgaaatggttcggggtctcatgctgacactcaaatacttctttgaaagaaaagttactattaactatccatttgagaagggtccattgagccctcgttttcgaggggagcatgctctccgccgatatccaactggagaggaacgttgcattgcctgtaaactttgtgaagcggtatgtcccgcacaggcaatcacaataaaagctgaagaacgagaagatggaagtcgtaggacaacgaagtatgacattgacatgaccaagtgtatctactgtgggctctgccaagaggcatgtcctgtcgatgcaatccgttgaaaggacccaactttgaatttgccaccgagactcatgaggagctgctgtatgacaaagagaagctgcttgagaacgtgaacgatgggaaaccgaaattgcaagaatctcgatctttttttttttctttta

SEQ ID NO: 7144 - DNA, 395 bp, Gossypium hirsutum
  unsure (1)..(395): unsure at all n locations
  Clone ID: LIB3196-035-P1-M1-E10
gnnnntttntgtagcttgggtttacagtccgatcggcgaaaaccttaatcgtcttcaagtaccgttagattaaccagcaacgaaaagaaaatcaatggctgcgatcttcgctcgcaactctctcaccgctctcagagctcgacatctcgctttgtcagggcaagcgttgcagggttcatcacaacactatgggctgcgactcggtgcacactcctatggcaccatggaagatgatgaagaaagagagcagcttgcaaaggagatttcgaaagactggagttctgttttcgagcgtagcataaacacattgtttctaactgaaatggttagggggctcatggnnacactcaagtacttctttgaaagaaaagttactattaactatccttttgaga

SEQ ID NO: 7145 - DNA, 470 bp, Gossypium hirsutum
  Clone ID: LIB3083-028-Q1-L1-C9
tggcggtcgttgtctcagaatcagcggactttttgggtcgtaggaacctggtatgagacggtcgagagcggaaggtaggtcgaccccgcctcggcggccggtgacgatagactcgacgaggagacgcccgagacaactagcagcgtaacccttagcggcgcttctcttctgaacatacttgcacccgttcgtatagccggctagaaattcagtaaagttaagcaccacccggacgatttagtcgaggccgcaaatacgtccgaactctccgtagaagtcctagacttcgaatttcctctagacattagactagaagatcttacccgaaatacacttctgacggtcccagagaaaatctcgcgtacgccacttccctaattagccgggaagaaggatacgttcgattctcgatgaaggcagacactaacccctcgtcaggcccgggagccgctcgtcgaaaacaacacgtt

SEQ ID NO: 7146 - DNA, 423 bp, Gossypium hirsutum
  Clone ID: LIB3083-027-Q1-L1-F9
tgctcagatcagcggacttgttgggtcgtaggacacctggtttcaggtaaccctccccggcgcttctcttctgaacatactcgcgcgcggtcgtatagccggctagaaattcagtaaagttaagcaccacccggacgacttagtcgaggccgcaaatacgtccgaactctccgtagaagtcctagacttcgaatttcctctagatattagactagaagatcttacccgaaatacacttctgacggtcccagaaaaaacctcgcgtacgccacttccctaattagccgggaagaaggatacgttcgattctcgatgaaggcagacactaaccccccgtcaggcccgggagccgctcgtcgaaaacaacactttggggttcctcgctcgaccacccggttacccgaggtacagacgcggagcatc

SEQ ID NO: 7147 - DNA, 692 bp, Gossypium hirsutum
  Clone ID: GOSHI-09MAY01-C20371_1
cccattcgtccgcccacgcgtccgatttttttctattttcagaaatacttcatacaacgcaatacacagaagaaaaaaaaaaggaaatggaaggtcttatcccttttgtttacagggctatagtccagtacaagagcggaaaagaagatcacgttttagcaacatggttcaacgagtcaccctcggcttcttacatgagactccccaccggagattctgatcgcttccaaatatccgatgatcgaatctttgaatcagataattatgggaagttttccacttcatcatcatcatcatcatcatcttccatggttgctccttctgctagtactaagattattttatcaaccggagttcaatctcctgctgtctgtcgtttgactcctcgccgcgtcgttacatgaaaccatcgcatacttatgggttaatctagggtctgggaatttcatgtatgtagaaaatatatatgtatttctggttacgttaatcattatgtatgggtacttaataagcgtatgaaaaatcccaaagggggatgcataccctcaaatgttaggggtgtagggaggccaaagggatgaccctatgccttgtgtattggacatagatggtaaatgtggagagatgattttattaatgttgaaggccacagggcttctatttgaatgttattggtaatcgacggcggaacc

SEQ ID NO: 7148 - DNA, 338 bp, Gossypium hirsutum
  Clone ID: uC-gsronu33B039h09b1
gataaagaacaaaagggaaatggaaggtcttatcccttttgtttacagggctatagtccagtacaagagcggtaaagaagatcacgttttagcaacatggttcaacgagtcaccctcggcttcttacatgagactccccaccggagattctgatcgcttccaaatatccgatgatcgaatctttgaatcagataattatgggaagttttgcacttgatcatcatcataatgatcatgtatcggtttctatagtctggacagtattcccattttattatgggctattgtgaacacaagggttttattgggccttacttttgggtatcgggaaatgtttg

SEQ ID NO: 7149 - DNA, 279 bp, Gossypium hirsutum
  Clone ID: uC-gsronu33B039g01b1
gttgtttctggagcatcttgatctgtctggatgtgctaacttaaccagtcgggacattctgaacgcgacatcaaatctgaaggatatgaaggaggaacagaagccaaattgttatcttccgatttttacatgagactccctatcttttattcttgattgtttccaaatatacgatgatcgaatctttgaatcagataattatgggaagttttccacttcattatcatcatcatcatcatcttccatggttgcttcttctgctagtactaagattatttt

SEQ ID NO: 7150 - DNA, 940 bp, Gossypium hirsutum
  Clone ID: GOSHI-09MAY01-C20361_1
gccctttctattggttcttttttgggttttcagacagtattggcttgggaggaaaatgactatccttatcgagaagcctgagctagtgtctcaatcagactgccagattcatgtggatgaaagtaaggaattggtgttggatggtggattcccagtgccgaaatctttgtcaggagaaggatttttggcaccagaggtcaattcatttggcaactcctttagggattacaatgcagaaagtgaaaggcaaaagagcgtggaggaattctacaagcagcaacatgttaaccagacatacgactttgtgcaaaagatgagggaagaatattcgaagctgaatagaatggaaatgagcatatgggaatgctgtgaattgctgaatgaggtggtggatgacagtgaccctgacctggatgaacctcaaattcagcacctcttgcagtcggctgaagctattagaaaagattatcctaatgaagattggctgcatttgactgccctcattcatgatcttgggaaggttcttcttctacctaaatttggagggcttccacaatgggctgttgttggcgacacatttcctcttgggtgtgcttttgatgaggccaatattcatcacaggtatttcaaggaaaacccagattacaacaatccctcttataacactaagaatggaatttactgggatggctgtcgccctgacaatgttacaatttcatgggggcatgatgattacatgtttttggtagccaaggaaaatggaaccactctaccttcagcagggctgttcattatccgatatcattcactttatcctttacataaggaggaagcgtacatgcagtttcttaatgatgaggataaggagaatctgaagtggcttagaatattcaacaagtatgacctgtacagcaagagcaaggtcgctgtggacgttgaa

SEQ ID NO: 7151 - DNA, 1019 bp, Gossypium hirsutum
  Clone ID: GOSHI-09MAY01-C20311_1
ctgaaattgagatgctatcccagttccgtcaccgccatcttgtttccttgattggttattgggatgagaagaacgagatgatcttgatttacgaatatatggagaatgggtacactcaagagtcatctctacggttcgggccatccaagtttaagttggaaacaaaggcttgaaatatgcattggagcagccagaggactccattaccttcacacgggctatgcaaaagcagttattcatcgtgatgtgaagtcggcaaatatcttacttgacgagaatctcatggccaaggttgcggatttcgggctgtcaaagacaggtcctgaacttgatcagacccatgtcagcacggcagttaaaggaagttttgggtaccttgaccctgagtatttcagaagacaacaactgacagagaaatctgatgtgtattcatttggcgtggtcttgtttgaagttctttgtgcaagaccagtgatcgatcccactcttccaagggaaatggtaaatctagctgaatgggcaatgaaatggcagaagaaaggacagctggagcaaataattgatcctagtctcaaaggaaacatcaggcctaattctctaaggaagtttggagaaactgccgagaaatgtttagctgattttggtgtcgacaggccctccatgggagatgttttatggaacctggagtatgctcttcaacttcaggaggccgttgttcaaggcgatcccgaagaaaacagtacaaacatgattggtgagctttctccacaaatcaacaatttcagtcagcttgatcccactggttcagcaaaatttgaggtgtcaagtgtggatgaccttctccgtgtttcaatgagtaaagtgttctcacagctggtgaagtctgaacgcaggtgatttccatgttacggaccgaagatccactgaattaagtctctcttttgacaatgcatacactgttttatccgatccaatacagcttgccaattttgagtagataaactgtctttcctttcctt

SEQ ID NO: 7152 - DNA, 639 bp, Gossypium hirsutum
  Clone ID: GOSHI-09MAY01-C20331_1
gacagctctaactgactctgccccagctgtacagcacagggccacttccatgcctactttccagcctgctacaaaccaaaatgatgtagctcctcacccaccttctgcaagttccgagactgtcacaaattttgactttgcgaactcattctctgcaaatgctcactctgcacccaatagcacaaactcccagtttcttcctcaagaaatgtcaactcaaaatcagggaagtgcttatagccaaacaacacagccaggtatctatggtcaacaggcacaatcaagtgctaatatgtacagccaaccgacacagccaagtgctaatccatacggccaacctgcacagcctggtgctaacgcatatgaccaagttggaccaacctagttctaatgcattatagccaatctgtgcagccgagtgttaacctttatagccaaccgcctcagctgggtgctaatccctacagccaacctgcacagtttaactctgggaacctccccggcagggtctcttgttccaattttttacagggtgctcacagatcacaaattacctgtggccaaaatatatagtttctaagggctaattcaaaaccggtcaagccacacaacggaatccacatacaggacactgttagt

SEQ ID NO: 7153 - DNA, 609 bp, Gossypium hirsutum
  unsure (1)..(609): unsure at all n locations
  Clone ID: AI054862.1
tccacttccatgcctactttccagcctgctacaaaccaaaatgaagtagctcagccaccttctgcaagttccgagacagtcacaaattttgactttgggaactcattctctgcaaatgcttactctgcacccaatagcacaaactcccagtttcttcctcaagaaatgtcaactcaaaatcagggaagtgcttatagccaaacaacacagccaggtatctatggtcaacaggcacattcaagtgctaatatgttcagccaaccgacacacncaagtgcntaatccgtacggccaacctgcactggctggtgctaacgcatatacncaagttggacaacnctagttctaatgcatatagcanatctgtgcagncgnagtgttaatccttatagccaaccgncacagcncaggtgctaatccctacagccaactgcacagtttaactctgggaacctatacggggaggttctctgttncagtttcttacagagtgctcaccanatacaaattacccgctgtacaaatacaatgattcctagtgcttanttcacaccaggtcaaagcagacgacggtactcctcatagcggagacttgcttgttcacaccct

SEQ ID NO: 7154 - DNA, 410 bp, Gossypium hirsutum
  Clone ID: GOSHI-09MAY01-C20281_1
taaacaaaatatttggttttaggtatttcaagaaaggtttgccaaagggcaaaataaattgcggtcccccggttctgtggccagaaattccaacgttttaaacaggcataaaaatggaaagaagaaaattaagattacaaaaacagaaatccagatatgccgcctattctaccaaaacttgcgttctagcaaccaattatcgtttatgctgataactatgattttctcttcttgcttgttgatttcgaaccatgctcatctttacctctctttttcccacttttattcgattggacttcgctcctgctggatttcacactgatgacaccgcctgaaagcaccttttcaccaccattttccaaagcatcctccagttcaccttctctgccctcaatcgcaaattgttggag

SEQ ID NO: 7155 - DNA, 1495 bp, Gossypium hirsutum
  Clone ID: GOSHI-09MAY01-C21841_1
gcgcccacgcgtccctaaatcctcctttgttctaacgcaaatttgaatcatgacagacacctcctccgatctccaaaaatacggcgtgccgttttacggagccggatgggttccttacaaccacatcaaatccaagctcgcctcacaagaaaagattgaagaggataagaaagaagaaaaagatccaactccatccaacgatgacgagatcactacacccctaaactacgttgttctcgctggcggtggcggtgaaggccgtagtggcattcccaatgcaatcgttgtttcccacgttaatttcacctccaattctctctccgatcaacctgtggttaagcatgaaactggttctgatttgccttatcgaatgactgttcatccgcatggagatggcattatctgtgcatttcaacagagctgcaggttgtttgagtggaaagaatctaacggaaatgaagcccacaaactgggtgtcaaggtatcagagaaagttctgatccagttagaggatgttgggcaacagttggcactgacatttaatagtgagggttctgtactggctgttggtggtgaggatggcagtttaagggttttcaagtggcctagcatgaaaatagttctcaatgaagcccaggctcattcatctgttaagaacttggattttagctgtgatggaaaatttcttgtgtcactgggaagtggcctttgtaggatttgggatgtaacttcgtcaaaagttgttgcttctctggcaaagggaaatgatgaggtttttgccttctgcagattttctcaaattaatgataagaatccacatctgtatattgctgcagtcacagactatggtggaagtattttaacatataacacaaccacatggaaaagaattcgctcaagccgagtagtccgggaagctatctctgcgttcaatgtctcgtctgatgggaagttccttgcagttggaacagtcggaggagacctttttatcatagattctgccaatatgcgggttcagatgatggttaaaaaagctcaccttggtttggttacagcattgacgttctcccctgattcaagggctttggtttctgcatcactggactcaagtgctaggttgaccccaatcaaggacaagacgagtagtggtggaatgacatggatgatcatattaatggtgctacttgcaattgctgtgtactttatgaaggagaaaggaattataccctaatgcaggcctgctaaaattgcaatcgaagatttgaccattgtgttaaaacttttgaaattgcttgtggcaaactttacatagattcttatcactgttcagtcaacttaaaaatgtgatatggatttctgatttaaatagtctaatcagctgactgcttcattcccaacacctgcctaatcagtatcctctgtcatagctcatgctatcttgcaattttttttcccttcgatccattggtactgacttctagagtctgtaaaagaa

SEQ ID NO: 7156 - DNA, 840 bp, Gossypium hirsutum
  Clone ID: GOSHI-09MAY01-C21861_2
gtccttactaaaggattattctttaatgaatggaactttgagagatcaagaaaaagagattgaacagttgaggaatgatcttcttcagcttaagcgcgagcatgagaagcaaaatgttcttgtgctaacactttcagggtttttagctgatcaaatgaggcttgaaaacgagaagctaaaagatgaaaatgcatcattgaggaagaatgccaatcctaattgtaacttaccacagcttgcagaggagaatgcaaaattatgaattgaaaataaagtactcaaggtgcagaatgatgctttatgtgggaagattatcagtgacgatgacaagaagcgtgaacaagaacggttagctaaattaccactactatttgaagatatgccctgtgttctttctcacttgacaaaatgtgctatattttatttcctagcacaacttgtctgtctttgtactttattttctgcttatcttcatgcactatatggctacttatggcatatcttgtgatagcagtgtagctttcatgtccttgacctctcttctttgatcttccatgatctcttttcttgttttcacacgtgttatcttccttttcatgggtgtatagccggtgggtacactgtaagtcggccaatattggccggtatgatagtgagcctccattgtgttatttgtaggggtaatcatataggagttacttcggtggtgcagtgatgttgctaattctcttcagttatggtctttgaatttggtcatgtgtatactacctcatgtattgttattctaatacatgaccagtggaatttcctcactatagcacgcataagaagtgttgatgt

SEQ ID NO: 7157 - DNA, 616 bp, Gossypium hirsutum
  Clone ID: GOSHI-09MAY01-C21861_1
ggcaatttcgtgggaggagcctcatccctctcaaagttccccagcgaagctgctctgatgctgatgaagattttccccagaattggagatcagcttctccgtcgctacaaccatgggatcctggatcttttctgtaccccgactgggctcagagccataatcagcctggaataagcagtggaggagttgtcccaaaccagatcagtaatcattctccaagcctaaaggaacttactaataatcattctattttgaaaaggaacctatcaagcgtatctggatcagagcgagctctaaggaaaaagagaatcgatcaggcatatcgggaaagatgtaagaatcacaaaatggaaatgcaatcgaatgtggagaaccttaaagacgaaaatgatttctttaaagaaagagaattcgtccttactaaaggattattccttaatgaatcgaactttgagagatcaagaaaaagagattgaacagttgaggaatgatcttcttcagcttaagcgcgagcatgagaagcaaaatgttcttgtgctaacactttcagggtttttagcattgttatgctgaagggattttatgttgtccaatacgaaaaaatgctaaccagttt

SEQ ID NO: 7158 - DNA, 411 bp, Gossypium hirsutum
  Clone ID: LIB3145-044-Q1-K1-E9
cccacgcgtccgcccacgcgtccgcccacgcgtccgctttaatgaatggaactttgagagatcaagaaaaagagattgaacagttgaggaatgatcttcttcagcttaagcgcgagcatgagaagcaaaatgttcttgtgctaacactttcagggtttttagcattgttatgctgaagggattttatgttgtccaatacgaaaaaattgctaaccagttttccaaaacttgctaataatttgatgcgccacgtcgttgtctacgtgtacccaagagcaatcccaagtatagtcaatgaaagccatgaagtctacttagtgagcatgtggtcaacagcttgctgcataaaaacaggattacttattttatattctggttttattttaaaaagatcatgcagttatttggttt

SEQ ID NO: 7159 - DNA, 357 bp, Gossypium hirsutum
  Clone ID: LIB3196-017-P1-M1-F8
gttgattttcgattatctcgtcatatatatgcggactagcgattataaatgcttctccagctgctaaaacaaatctatggacgaattttttcaggcaatttcgtgggaggagcctcatccctctcagaagttccccagcgaaagctgctctgatgctgatgaagatgtgatcaagtctaaggtttttttttcccagaattggagatcagcttgtccgtcgctacaaccatgggatcctggatctttactgtactccaactgggctcagagccataatcagcctggaataagcagtggaggagttgtcccaaaccagatcagtaatcatcctccaaccctaaaggaacttactaataa

SEQ ID NO: 7160 - DNA, 439 bp, Gossypium hirsutum
  Clone ID: GOSHI-09MAY01-C21501_2
cggacgcgtgggggggttttccccttttcccttcgcaagggcatagatcgcccatcgtcgcggctccaccttccccaaacgcacaccgcggtggccgacgagccagatatctcggaggcgtgggagcgtggcatggagtagcgcacgattcggaagcttggcgcgcatcgtacgctgcttggactcgaagcttgcggcgccgatttccttctgctgctggggttttgggttggctttatgttttgtgtattgggttgagagatgtgggttaggttttgggtaatctgttgggctttaactctgttttgtattgggttttaataggtgtttttatatttgggtttagtttttttatttaattttgtatatgtgtgggcctgggcataaattgggctcaacaatagttataatgatattttataattttataattttattt

SEQ ID NO: 7161 - DNA, 692 bp, Gossypium hirsutum
  unsure (1)..(692): unsure at all n locations
  Clone ID: AW187510.1
ggagaaaagaagggttttccccttttcccttcgcaagggcatagatcgcccatcgtcgcggctccaccttccccaaacgcacaccgcggtggccgacgagccaggtaaggccctcttacaatccttttttattgttattttttaaaactttgttttaatataggaaaaaagaaaaaaaaaaagcaaattcgtaacgaggggttgaggattaaaactcgaaaaagaataaaaattcataatcacctttgtttctattgggtcgtactaaaatattactcaaaaaatctgctatatctctccgtaatttctctttatttccaaaaaaaatcccccctttacggatatctcggaggtgtgggagcgtggcatggagtancgcacgattcggaagcttggcgcgcgtcgtacgctgcttggtctcgaagcttgcggcgccgatttccttctgcagctggggttttgggttggctttatgttttgtgtattgggttgaaaaatgtgggttangtnttgggtaatctgttgggctttgggtctgttttgtattgggttttaataggtgtttttatatntgggtttantntntttatttaattttgtatgtgtgaacctgggcatanattgggctcaacaataataacataacaaacatagcaataaagacattaacgatacgaaaatgcataatagac

SEQ ID NO: 7162 - DNA, 407 bp, Gossypium hirsutum
  Clone ID: LIB3146-048-Q1-K1-A6
cgcaagggcatagatcgcccatcgtcgcggctccaccttccccaaacgcacaccgcggtggccgacgagccagatatctcggaggtgtgggagcgtggcatggagtagcgcacgaatcggaagcttggcgcgcgtcgtacgctgcttggtctcgaagcttgcggcgccgatttccttctgcagctggggttttgggttggctttatgttttgtgtattgggttgagagatgtgggttaggttttgggtaatctgttgggctttgggtctgttttgtattgggttttaataggtgtttttatatttgggtttagtttttttatttaattttgtatgtgtgagcctgggcataaattgggctcaacaataataacataacaaacatagcaataaagacattaacgatac

SEQ ID NO: 7163 - DNA, 374 bp, Gossypium hirsutum
  unsure (1)..(374): unsure at all n locations
  Clone ID: LIB3543-029-Q1-K6-F12
ctccaccttccccaaacgcacaccgcggtggccgacgagccagatatctcggaggtgtgggagcttttctttttttatcncaccaatcnnnaacttggcgcgggggggcgcttttttttttcnaanctnncnncnccnatttccttctgcaactagagttttgggttggctttatgttttgtgtattgggttgagagatgtgggttaggttttgggtaatctgttgggctttgggtctgttttgtattgggttttaataggtgtttttatatttgggtttagtttttttatttaattttgtatgtgtgagcctgggcataaattgggctcaacaataataacataacaaacatagcaataaagacattaacgat

SEQ ID NO: 7164 - DNA, 294 bp, Gossypium hirsutum
  Clone ID: uC-gsflnu33B129h06b1
ttcactcgtacgcacaatcaaagggagaaaagagggggaccaccctttaacctccggaagggcatagatcggccatgggcgcggatccaccttccacaaatgcacaccgcggtggccgacgatgccacatatgtcggaggcgagggagcgtggcatgctgtatcgcacgattcggaagcttggcgcgcatcgtacgctgcttggactcgaagcttgcggcgccgattccctttgctgctggggcttaggcggcttatgtccgtgattggccgagagaagggatagggctttcac

SEQ ID NO: 7165 - DNA, 642 bp, Gossypium hirsutum
  Clone ID: GOSHI-09MAY01-C21461_1
aggaaaaagaaaataaaagagagccgcctcaaagatcttgaattcttcaaagagaaagcaaaaaaagaaaaattgtcacagattcaaagagagaaaaaagaaaacccaaaaaagaattaaaagcctttcaagcttcaactttttactacaacaactaacaaaaatagatgggatttttcaattacggcgttgccggcgttggtttcatcttgatcgggttctgggaattcatcaactccttaaacccaaccctaaacccgaatccaactccatcttcttcttcactttcaacccagatcaaatctgcctctatttctaaaactaaagaggaccctttttcttcttcaccatctttcatctttgtatcaatcttttccctttcgattttcttgaattctgtggtttcaatctttgatgctttcagttcaaaagatcgggtggggacggtgctccagttacaagtgctctcacttgctctgctcttcttgctttactctgctttgggtcttttaaataataagaaaggttcatacttttggcctgatcctgttcttgaattagttctgcttttagcttttgttgaagaatttttgttgtattacttgcaaagaaaggatacaagtgggattgagaatagatatt

SEQ ID NO: 7166 - DNA, 591 bp, Gossypium hirsutum
  Clone ID: GOSHI-09MAY01-C121439_1
tctcacgcgtccgcatgccagcacgggggtgcgttgaacttagccaatagtgaacccaaacccaagtcccgtaacttgaatcagaacccaaacccaaacgcgaaccctactgttttggctcccagagatgatggaggcaaagtaagctcaatggtgggccctgagaacacctatggctgaggcaaccaatgttgaagcagagaaagaatggaagtctcctgcagggtatccatctgatagaaagagagaaacgaggaaagctaaaggtaggccattgggggtacagtttgtatgttgctcatctgccaattaggattataaatgatttgggacctatgttactcatgtcttggatgagtttggagatataatatgttagtaggcaaaacttgaaaaagatctcactggtatcggatttctacacttgaatccgagtccaagttacatagcttaatactaacagtctgttttgtatcatgttttttctttttgtgtattataatcatgtttatacgttaataattcatgttatatagaatttgataggtgtagtaatttatttaccccccccccccccccccccccccccct

SEQ ID NO: 7167 - DNA, 391 bp, Gossypium hirsutum
  Clone ID: GOSHI-09MAY01-C121419_1
ttctttcgtccggctgccccaagacccaaatacaatcaaggaccgagaaacacacagtgattgccccccgtaccaatatctgaaccatgttcgaacttatccgacattcatgttcggcggatctctgggagcacatgttgctactgtcgcattcgtacggaactaaaggtaactgaaggctaggtctttgggattggtggttgacccacataacaccatagatagataatatgtatgtatatatttaattgcacaatcatggtctgtctcccaagtggctctgcacctttggtttattgttgctgaaatgctttaatgaaattgatctccttttgctggcaaacaaaatagcaccctctaattacaatttatatcctatattaaaaacatg

SEQ ID NO: 7168 - DNA, 566 bp, Gossypium hirsutum
  Clone ID: GOSHI-09MAY01-C21741_1
aaattcttaaaactaagagtagcaccagccgggggccaccacgccagccccttcccgacgttcaccctctaccggagggcctccgacgtccaccacgtcattcatccgccacccgctccccgacgcctgttgtgttatggatccagaagctgcacgaactgcccgagaatctctagatctggcatttcacatgtcaaatattctcgatacgggtcttgatcggcatactctttcggtcctcgttgctctctgtgatttgggtttaaaccctgaggctttggctgctgttgtcaaggaacttcaaagagaacctccaccatcaaccccggtttcatcttcttcatcacaagtaccttaacttcggagttcggtattttctaagtaaacttacgaggaatgccttagaagtttgagttttaatttggtttgattgatgtctttcagtagaaactttcttaggttttctcatctcgaacactattgtgcttagtgttcaccttgtgcgtagtctctgtatctaattcgatcttacctactatgtttgatcaattatatattcactctgg

SEQ ID NO: 7169 - DNA, 359 bp, Gossypium hirsutum
  Clone ID: LIB3083-071-Q1-L1-D3
gaaaacgctttcacatctctcttaactcttgtttcaagatctctcgaggtttcttttccccttttttgtacctgttgtgttatggatccagaaactgcacgaactgcccgagaatccctagatctggcatttcacatgtcaaatattcttgatacgggtctcgatcggcatactctctcggtcctcattgctctctgtgatttgggtttaaaccctgaggctttggctgctgttgtcaaggaacttcagagggaacctccaccatcaaccccgttgtcatcttcttcatcacaagtaccttaacttcggattttggtattttctagtaaacttacgagtaatgccctagaagtttgagt

SEQ ID NO: 7170 - DNA, 515 bp, Gossypium hirsutum
  Clone ID: GOSHI-09MAY01-C21731_1
attcggacggggctttttttctggtgccaaaagatctaaagtctgaaactgatggagaactccagaagagggcggatgaatcaatgggttttagagctgaggctggagagctgaaggatggcggcaatggtaatgttgaaactgaagaggagggtatcttgaaggattcatctttcaagcattcttccacagcggatgatgtctcggggaagactggtgcagatttactggccctctgcaaatttgctaaggtgcctactaaaacacgttcttccttgacattgaagaacttaaaaccggactcagtttcaaccattgggcaggaaggtgtttctgattttgatcctccatgtgctcctcaagccttgcttgaagacaactccctgggaggttcctctggtgatctgctattaaataaaactcaggattcgaaacctgattctgaactttcgaaagacttgtcagttcattcttttggcttggatcacatgtatggtgttgagcaggtaagtgta

SEQ ID NO: 7171 - DNA, 730 bp, Gossypium hirsutum
  Clone ID: GOSHI-09MAY01-C21181_1
atgttttcgactattctacactctcagcaattatagatggcacttggctttgtgtacatggtggccttgctcctgacgttcgaactgtcgatcagattagggtaattgaccggaactgtgaaatccctcatgaaggcccattctgcgatctcatgtggagtgatcctgaagatattgaaacatgggcagtcagtccacgtggagcaggttggctatttgggtccagggtcacatctgagttcaaccacataaacaagcttgatcttgtttgtcgagctcaccaacttgtgcaagaaggtcttaagtatatgtttcaagataaaggcctagtaactgtgtggtctgcaccgaattattgttaccgttgtgggaatgtagcttctatattgagcttcaatgagaatatggagagagaagtgaagttcttcactgaaacagaagagaataaccagatgcgagggccgaggaccggagtcccgtacttcttgtaatcgaaatgagttaacatactgcagtgcctgtaatattatccaagcatttgattattgaaagaaggtgtcaaaagaggaagccttgaaatacataaaatgctaggctgctagcagatggacctgtcctgaaaattttgtctgcttcatccaagctgcttctggatgttaatggatcatgtcatgtcgagtcttgtctcaaggttgctgtattaatatatgctttttccttggatgtcttt

SEQ ID NO: 7172 - DNA, 431 bp, Gossypium hirsutum
  Clone ID: LIB3493-038-P1-M1-F7
gaaaagtgaagtatttcactgaaacagaagagaataatgagatgagagggccaaggaccggagtcccgtatttcttgtaatcgaaaagagatacatactgcagtacttgtaatattatccaagcatttgattattgaaaggtgtcaaaggaggaagccttgaaatacataaaatgttttgcagatgggacctgccctggaaattgtctggtccaagccctgctttaacctcgaaatgttcctcttcgaccttcgacttcgtcttttccttcatttttcgcattcggtttttttttttttgttaatagatgctgcttctactttatgcttagctaatgtgtgtgtttttgaattgttggggatgtgtatttgtttcatttatgtatattggctctcaactttagggcttaaattggcttaatggtttctttt

SEQ ID NO: 7173 - DNA, 817 bp, Gossypium hirsutum
  Clone ID: GOSHI-09MAY01-C21161_1
cttcgctccaattttcccatctctttcgcaagagaaccaaaagagaagaaaaaataactactaaaaaatgcttgagcttaggctagttcagggttcgcttctaaagaaagtcttggaagcgattaaggacttggtcaacgatgccaacttcgactgttcggcgacggggttttctctgcaggccatggattcgagtcatgttgcgctggtggccctgttgctgagatcggaagggttcgagcactatcgctgcgacaggaacatttccatggggatgaatctcggtaacatgtccaagatgctgaaatgtgccggaaatgatgacatcatcacaatcaaggctgatgatggcagcgacactgttactttcatgttcgagagccccacccaagacaagatatcagattttgagatgaagctgatggatatggatagtgaacaccttgggatcccagaggcagagtaccatgctattgttaggatgccttcagctgagtttgctaggatttgcaaagatcttgctagcattggtgacaccgttgttatctctgttaccaaggaaggtgtgaagttttccacaaggggtgatatcggaactgccaatattgttctcaggcaaaataccactgtagataaacctgaagaagcgacgatcatagagatgaacgagccggtttcattgacatttgcattgaggtacatgaattcatttacaaaggctactccattgtcaagtacagtgacgattagcttatcttcggaattgccggttgtggttgagtacaagatagctgagaagggtcatattaggttttac

SEQ ID NO: 7174 - DNA, 288 bp, Gossypium hirsutum
  Clone ID: LIB3083-060-Q1-L1-B1
ggaagttatctgccttgaagtgaagaggatccagccggagagagaggggaactgcaaatattgctcttaggcaaaataccactgtagataaacctgaagaagcaacaattatagagatgaatgagccagtatcattgacatttgcattgaggtacatgaattcatttacaaaggctactccattgtcaaacatagtgacaatcagcttgtcatcagagctgcctgttgtggtcgagtataacatagctgagatgggttatattagggtctacttggcacccaagattg

SEQ ID NO: 7175 - DNA, 582 bp, Gossypium hirsutum
  Clone ID: GOSHI-09MAY01-C21371_7
ccttttcctcttacctttctgtgctttacttttgtgtttctatcgttctttcgttcagacagggggttcagtttgcagaacttcattatgcaatcagatcagacacttctaccatatagttaggtcgagtgggacagttgcttacactagtgtttcttcgtcttctaccattaacgcacgcgctctgtttcctaacagtgcccagtacaaggtgcctgcatacttgggtgcaatttcaggtttcgcatgctttatggctgctttggtgtcccttggaatttctatttcaattgtgcctcgacaagtgatgccatggactggtttgctcttgatgtatgagtggacgttttcaatcttctttctttcattcggagcatttcttcatttgatttatctgtggggaaaaagagaaccagggccagtttcctctcgtatggatcctattgattcggattctagaaaaggttatcgacaggcatcctcttgcgatattgttacttggtattatgggttgaggatggcttttttggctatcgcaggcccatccttaccatgtatttttggaatcaccgctctgttctg

SEQ ID NO: 7176 - DNA, 968 bp, Gossypium hirsutum
  Clone ID: GOSHI-09MAY01-C21371_6
ctgtttcctaacagtgcacagaacaaggtgcctgcatacttgggtgcaatttcagttttcgcatgctttatggctgctttggtgtcccttggaatttctatttccattgagcctcgacaagtgatacccatgtctggtcaattcatgcccttccaatccctcaagcttgacctgcctgaactgcaaggagaaccggaagaaatatccaaagaaaaggcttgtttggctgctgtccaggtgaatggaccagtgttggttgaagatacatgtctttgtttcaatgcactaaagggtcttccagggccctacgtcaagtggtttgtgcggggaggaggggccgtgaaggtttgaataacttgttggtggcttacgaggataagtcagcttatgctttatgcgcgttttcttttgcccttggtcctgatgttgaacctgttacctttctgggtaaaaccccgggtaaaatagttccggccggggggcccagtgactttggatgggatcctatttttcagcctgacggctgtgaccaaacttatgcggagatgccggaggaagagaagaacatgatttctcaccggtcaagggctcttgatgtggtgaaatcccactttgccggagcaggatacattttcagcacctccttcttaagaggtatatcaggaacggtggaaacagtgaatgcatgtttctcgcttgggaaacattgaagattacattgtatgtaactctatattcctagcgcttagtttggggaaaaaatcctgcttgcttcgttcctctcctggtattaaaaatcattgagaaccgcaatcttaacaccgcgaattataattgagcgccagtttcagtttattttgaacaattgagtacttctctacaagttgaaatggatgttcctatattgtcttgaactgtaatggtttatggtttaaacatcaattactggatttgtctgcatttacctt

SEQ ID NO: 7177 - DNA, 681 bp, Gossypium hirsutum
  Clone ID: GOSHI-09MAY01-C21371_4
gaataaaccctccctggtactggaaaggcaaaaatccaaatgatgagcttttggtcaaattccgtttgctgttacctttctgtgttctagtttgttactatcgttcttttcttcatgttagtggatacaaaattatttttctttttctaaatcaatgcatagatgagtgctgtcctgttcccaaaccatattagtctttttggtgcagacagggggctttcttttcagaacttcattatgcaatcacatcagacacctttacttcataattagatcaagtgggacagttgcctacagtggtgtatcttcatcatctaacattaatgttaataatccagttaggttccttcatcttttaagctgaattctttctggttcataatcagtctacggaaatatgctgtgaattgttatttcttctcttctttttttttttgatgtaacgttatcctgtttcataatggttcacagaccaaggtgcctgtctacctgggtggcatttctgtttttgtatgttttatggctgctgtggtgtcccttggaatttctatcgcaattgtgcctccacaagtgattgagtggacgtttacaatcttctttcttttgtttggagcttttcttcatttgatttatcagcgggaaggagaatagtgacgcaactgaccccagtttctgctgata

SEQ ID NO: 7178 - DNA, 855 bp, Gossypium hirsutum
  Clone ID: GOSHI-09MAY01-C21371_3
acatagactaacttgaactgccgaggaaaaaaaggagggtaaatggcggcggccccgcctccggcagtgttggtctcacggccggtaacgttcgtaactggaaatgccaagaagctggaagaagtgaaatccatcttgggtcaatccatccccttccaatccctcaagcttgacctgcctgaactgcaaggagaaccggaagaaatatccaaagaaaagcttgtttggctgctgtccaggtgaatggaccagtgttggttgaagatacatgtctttgtttcaatgcactaaagggtcttccagggccatacgtcaagtggtttttgcagaagattggccatgaaggtttgaataacttgttgatggcatacgaggataagtcagcttatgctttatgtgcgttttcttttgcccttggtcctgatgttgaacctgttacctttctgggaaaaaccccgggtaaaatagttccggccaggggacccaatgactttggatgggatcctatttttcagcctgacggctatgaccaaacttatgcggagatgccgaaggaagagaagaacaagatttctcaccggtcaagggctcttgatatggtgaaatcccactttgccgaagcaggatacaatttcagcacctccaactaaagagtgagccatatctgtctttgttgttaccattgtatggtagattcttagactgttacaagccttctccaccatgttcacttctgatttctataaagggtatatcaggaacggtggaaacagtgaaagcaagtttctcgcatggaaaccattggagattacattttatataaatctatattcctagtgcttaggttgggaaaaa

SEQ ID NO: 7179 - DNA, 955 bp, Gossypium hirsutum
  Clone ID: GOSHI-09MAY01-C21371_1
ttcggtctggcagaagttggggaacgactgtgaaaaaccctccctggtactggaggaggcaaaaatccaaatgatgagcttttggtcaaattccttttcctgttacctttctgtgttctagtttgttactatcgttcttttcttcatgttagtggatacaaaattatttttctttttctaaatcaatgcatagatgagtgctgtcctgttcccaaaccatattagtctttttggtgcagacagggggctttcttttcagaacttcattatgcaatcacatcagacacctttacttcataattagatcaagtgggacagttgcctacagtggtgtatcttcatcatctaacattaatgttaataatccaaccaaggtgcctgtctacctgggtggcatttctgtttttgtatgttttatggctgctgtggtgtcccttggaatttctatcacaattgtgcctcaacaagtgatgccatggactgggaaggagaatagtgacgcaactgaccccagtttctgctgatacagatttgtttaactctgattctaaaaaagatcatcgacaggcatcctcttgtgatattgtttcttggtactacgggttagggatggcctttctggctattgtggccccatccttgccatgtattttcgggatcaccactctgttcttgaggttgggtctaatggtagtcggagggattatattagcatcttttatgacatatgcttccgagcatctcgcaagtaggtcattcttgaaaggttgtgaagaccgggacaccacgcaatcgagggaatgtttcttatgttgatagaaggcttcaaaattgttcatggtgattaccaccactgcatttttccttttaatcttgcattttatttaacatacaatcacaacaattaatttgtagaatattgcagaaaattgtcaaattataaaaacaattttct

SEQ ID NO: 7180 - DNA, 532 bp, Gossypium hirsutum
  Clone ID: LIB3584-042-P1-K1-E12
cccacgcgtccgctttacttcataattagatcaagtggaacagttgcttacagtggtgtatcttcatcatctaacattaatgttaataatccaaccaaggtgcctgtctacctgggtggcatttctgtttttgtatgttttatggctgctgtggtgtcccttggaatttctatcgcaattgtgcctccacaatgagtggacgtttacaatcttctttcttttgtttggagcttttcttcatttgatttatcagcggggaaggagaatagtgacgcaactgaccccagtttctgctgatacagatttgtttaattccgatcctaaaaaagatcatctacaggcatcctcttgtgatattgtttcttggtactacgggttagggatggcctttctggttattgtggccccatccttgccatgtattttcgggatcaccgctctgttcttgaggttgggtctaatggtagtcggagggattatattagcatcttttatgacatatgcttcggagcatcttgcaattaggtcattc

SEQ ID NO: 7181 - DNA, 427 bp, Gossypium hirsutum
  Clone ID: LIB3146-022-Q1-K1-B4
ggacgcgtgggcggacgcgtgggcaaggtgcctgtctacctgggtggcatttctgttggtgtatgttttatggctgctgtggtgtcccttggaatttctatcacaattgtgcctcaacaagtgatgccatggactggtttgttcttgatgtatgagtggacgtttacaatcttctttcttttgtttggagcttttcttcatttgatttatcagcagggaaggagaatagtgacgcaactgaccccagtttctgctgatacagatttgtttaactctgattctaaaaaaagtttacaaatacataaaatattgtacatagtcatgataaaatacaatgtgagttctcttttcatattcgtctaacactgttggtttacaaaacttgtatgttcattttcagatcatcgacaggcattctcttgtgata

SEQ ID NO: 7182 - DNA, 639 bp, Gossypium hirsutum
  Clone ID: GOSHI-09MAY01-C21281_1
cttggagctagatgcattcttggttcagcatgatatggagaacgggtatatgtgggttttcaaggaaaggcccgaaaatgcacttggtaagatgcagttgaggagttacatgaatggtcactcccggcaaggggagcgcccgtttccgtttagtgttggtaagggttttgttagatctcatagaatgcagaggaaacactacaggggtctttccaatcctcaatgtttacatgggattgaagttgtgccatcaccaaacctctcaaatcttgatgatgaagagaagaggaggtggagagaacttaccggcagggatataaacttctctattcctcctgaagcaagtgattttgcagcttggagaaaccttacgagcacagaattcgagcttgagcgcccccctgctactttaaagagtagtttaaatgcccacactagaaaactgcttaacggtactggtttaaacctatcaactcagccgatagaacatagtaatggtaacgggatggatttatcacctgtctgtaataaacgaaaaaaggactatttccggcatggaaatgatgaagatccttgtttacccaataatttgcattctaacagagttttggatatgaaaattcaccggttcgagccaac

SEQ ID NO: 7183 - DNA, 787 bp, Gossypium hirsutum
  Clone ID: GOSHI-09MAY01-C21251_1
gaaatatatgcagcttttggtccgagttcagtctcgtattcagtcacgccggatccaaatgttagaaaatcaagcacgacgtcaagctcagtttaagaaagacaaggaggccgagagcggcttcggcaaatggacctttggccagtccgagacagggaatgaaaactgggatgatagcttgctgacaaaggaagaaatggaggcaagaatgcagagaaaggtggaggcagtcatcaaaagagaaagggccatggcgtatgcatattctcaccagctatggaaagatgcaatgaaatcacctcacacaggtgtacccaacattcggtccggtgtattcccatggtggtggaactggttagaacgtcgattaccaccaaccgatttacccgaaaaccaagccacaaagaccttccaatttacaccaacaatgccaaactccgaattaaagcctagtccgaggccacaatccagtcagttcacattcgacaacatcattgacatccctacaccgaaatcgacaaggtccaccattctccccaccacaaggccaatgcaagcaccaacacctccgagtaaacttgcgccgcttgcaaccaacgcagggttattaaactcaaagcattcacgaccccgacctaccataatcgattcaccatcgaacttaccactcaaagatgacgacagcctcacatgttgcccaccgttttcggtcccgaactacatgacaccaacagtttcagctaaagccaaagcgagagccaatggcaacatgaaagagaggttcatg

SEQ ID NO: 7184 - DNA, 626 bp, Gossypium hirsutum
  Clone ID: GOSHI-09MAY01-C21241_1
cccaacaagaaaagaagaaaaaaaaggggatttatatttcaatacaaatgaagctctatctttatatcattttgattctaatattggtgatgataaaccatggaagctgtgattcaaccattcatgttggtcatagggtaagcttacaatccctttggaatataatgatgggttcattggtaaagcttttctaatggactatggtgatgatactaagcaaatagaaccaagttttagagttgcattaagcactgaagctaacaaagggggatattcatgttctttagaggtttttcttggtgatgttaaggtatggaattctggtcattactccaagttttatacctctgatgtatgcttccttgaacttactgaagatggagatttacagttgaagggtcctaaaaaccggatgggttggcgaactggtacttctggacaaggtgtagagagattacaaatattgaggactggtaatttggtacttcttgatgttttgaaccagataaaatggcaaagtttcaatttcccaactgatgtaatgttatggggacaaagattagatgtatctacttggttaacttctttcccaaggaacacaacatcattctacacatttgaaatct

SEQ ID NO: 7185 - DNA, 538 bp, Gossypium hirsutum
  Clone ID: GOSHI-09MAY01-C21271_1
ctacgtgcaccccccggaccctccgggaggcgggtcaagccttcaaggccctctttccagccctcttagctcttcaacttttcggactacttataatcttatttttcattccattcccgagtatgtctctgattccaagcttctttggcagccgtcgcagcagcatctttgatcgcagtctctcttgacgtttgggatcctttcaaggacttccctttctcttctccttcttcatcactctccacgcgctcttctgaaacctcggcttttgtcaacacccgaatcgactggaaggaaaccccagaagctcacgtgttcaaggctgatgttccagggcttaagaaagaagaagtgaaagtggacgttgaagatgacagggtgcttcagataatctgggagaggaatgcatagaatgaagacaagaacgactcatggcatcgggtggaacgcagtagtggcaagttcatgaggagattcagactgcccgagaatgctaagattgatcacattaaggctttcatggaaaacggagtgctta

SEQ ID NO: 7186 - DNA, 1825 bp, Gossypium hirsutum
  Clone ID: GOSHI-09MAY01-C21201_1
ctgcactagtctaattgaaattttcatcgaaagagtatgtgatgaggatgtcctacgttgcaaaattggtgctggaagtaatcgagagatggacttcgacagttttcttgactttgttctggcccttgagaacaaagatactccagaagggttaacatatttgttccgttgtcttgatcttaatggtacgggattcctcacaacagcagatattcattctcttttcagagatgtacaccagaaatggattgaaggcggcaactacgaattgtgtatcgaagatgttcgggatgaaatatgggatatggtaaagccagccgatccattgaggattacgttggctgacctcctagcttgtaaacagggtgggactgtggccagcatgctcatagatgtgcgcgggttttgggcacatgataacagagagaaccttcttcaagaagaagagccagaggaagaatcgtgattgcatatttgatcaaactgctgcttcttttgcccatgcttccggctcttcttgcaagatgtactatgttgttgcaatgcttgtatgatttatgctctggaaagttgtcacaaactctgtaactcctcttcaaatttcaatctattgcattaaatagcaaatttacatattttccgataaattgtataaattactttcatcattgcacaattcatgcccaagggaatgtcaaatatataaaatcataatatgatccaagcaaaacatttacaagaatctgtcggtcggcgccgggcaactgacgtgtttaatctgctctacttatctgacggctattacaagaatttgttggttggcacctggcttgcttgcaactccggctgacatgtttaatgtgctctgctctacttattcgacggctaccaaagcccctgcttcttggatctctcaacttcaagcaatttgatagtactgagcacattttttcttttcatcagttaaggcctagcttcagaatttgattaaatccttcaatctctaagctgtgccattttacctgatggcttaacaactgatagtgcagccatcaccagaccatcgaggataacaagctctgaaggaactgatctcttacgccacagatatagtgggtagacgggttatctgttatgctactcggctaagcgccgctactccacctgtctatactcaactactgcatcataagtttccatggtaagtggactctccacaaagcatctgagttcatgccaaaacatgttggttcggtcgtgcaaaaaaggttccaaaggagcaagaaagttgtcgttgacaaaactgagctgtgtcgaagaggcggaagagccatcttcatgtctagagaagagaagcgaggacacaacatgaagaatgattgatggatctggatctccgaggatagccttaagctccctttgaatccatggttctattcttcgcagtagtttctctttctcaaaatcattcctaatcctaggaccattctgctgaaaaccattaccatgatatataggcacagcccgcacccgtcggttatacacactggcacgccattgaagcttcctttcggcgataacatgaggcgacatagtcccgggtcgcccaaaagatcgccgccaaggcaacggtctcgttctccggttaacatcgttcatttctcttctggtcctttcgatgatccgtcgacgatcagctacggtggaccgtggtcgtggaataactgatttgcagtcggagatagcaggtaactgctgtttgaggtatcttagagagcggacgcgtgggcggacgcgtgggcggacgcgtgggcggacgcgtggg

SEQ ID NO: 7187 - DNA, 407 bp, Gossypium hirsutum
  Clone ID: GOSHI-09MAY01-C122529_1
cggtaccggaactgaagtttcgagccaacccacctttccgtgatctcgtcgattttaccaactctgggaaacattggataaaactgaccttatatgggtaaaacacctactggcaaggagctagctcgcgagttacttatcgcaatatctagttctgtacccgatactgatctgaatgcagaacatgcatctaaaaatatagaagctacaaatggtgctgcagtaacaaagtctgatggagctgaaaaatataggtctgaactgatctctatatcctatgcccagtctcctgatgatcaagtgcccctggttgcgctcaggaaccatgtggggtaagtgaggactaaactgacatgggatatttaataaaatacagtgtgtagtgaatgctcttgtgaaactctttg

SEQ ID NO: 7188 - DNA, 544 bp, Gossypium hirsutum
  Clone ID: GOSHI-09MAY01-C22531_1
caaacttccacaaacaatcaaaaccatagaaaagttcctcttttcttctttttcatttaaagaacaaaaatgaaggctccactttcttcatcaacatcatcatcctctggtattcttagaaggtctcgtctctcaacttacttatacactttattagctttcattgttttcgttgctgtcatccatggagaatactccatcgccaattttggccgagttgacccaataatccccagcccagttttctccaccacaccagtgaagaaaagggagaaggtggtggcgcagctgccgtcatttgcggtggaggaaagtgaagaaggatgtgatatattcagtgggaagtgggtcaaggacgagttgactcggcctcactatgatgaatcggagtgtccatacatccagccacaattaacgtgtagagcacatgggagaccggatactgagtatcagaaatggagatggcaaccccatggctgtgatattcctagattcaatgccacattgatgctagagagcctaaggggaagagaatgatgtttgt

SEQ ID NO: 7189 - DNA, 389 bp, Gossypium hirsutum
  Clone ID: GOSHI-09MAY01-C22471_1
cccatatccaacaagtatccatggcagacccaaaacaggaagcgatagaagtcatccattcttggtctgctccgagatcactcagtactagtctcatgtattcgttttctcagagggatgacacagaagtgctggatgaacctctgtatggaacttttcttcgtgttactggtgttgaaaggccctaccgtgaagatgttctctctaagatggaatgcgatggtaataaagttgttgacaacattatttacggtcctggaaaaaacagataccggtattgtaagcatattgcaaagcaacgggtgcctggtttgccaaatgacttgctgcagaaaggaaagcactttatactgatacaaaatcctctcaatatactgtcatcctttgag

SEQ ID NO: 7190 - DNA, 645 bp, Gossypium hirsutum
  Clone ID: GOSHI-09MAY01-C22681_1
attgtacacctgtcatgaatggactgcctctatataccgagtatagaaacaataactaaattgatatttttggtcattaaataaatgagattgaaatggaaagtgtaaataccacaaattcaaatcccacgtcacaatataaatgagatcgtcaacatttatcatacttaaatctacatgacgcttgcgcggcccagcactcatcaatcaaaattgcatcaaacggaagacaaagctaattataacaaaattaagatcttaccataggttttgtaatgagatggggtcttctctaattaactgatgtgtactcaactttctttttcacattgatttgcattgcagtttaaaagtaatcctagtggcaatagagcttgattgatgaatcagcaccagcagtgaataaccagggctgccttggatggaacttacagtccattactcctcttccatcataactagtatgccctctcagaatttccaacggtacaattagcggattctggttaagatctgcataaaccatgccatgaaagatgtaggctgtgcaatcatccgagcatgatgcaaacagcgggtatgagcgatggaatgccactttggtaatgtctttaggatgacacttgagagttttgtaaggttttg

SEQ ID NO: 7191 - DNA, 287 bp, Gossypium hirsutum
  Clone ID: GOSHI-09MAY01-C122649_1
ccctctcgtccgggggaaggggaggaggaagtgggcggctatgttgagtgctatgcctgaataagcgggaaagggtatatttgtaaatatgagatcgtattggggtattttagtcaaatcactgtgaaataaagtggctgaccaaacattttgatgaactcacttgtcttctttacgttcttgggtaagcccatttgagggtagttttacaattttacccctatttgggtcaaaatgaatattcttttaaaatgatgcatatataaaaaaaaaagcaccaaatagag

SEQ ID NO: 7192 - DNA, 506 bp, Gossypium hirsutum
  Clone ID: GOSHI-09MAY01-C22611_1
gatcagtaattatactattgtttttttctacaaattaattaattaccttcattttaattcactacaagccctttaaccaaaaaatgggttgtggggagtctttccttttctttttctatactaaggtctaacgaacttaatcaacacgctgcagaaggattggagtagggattatagaaatgaggctttgaagccactgagaatgggctctttgaattgccatcggcaacgccgccaattctttcgcaagatgggcacatggtgagagtggccgccggcatgtgcatgtaaaaaggttgagccgccagtttcagtgccttgagttcttgtagttccttttgcaggctcctgttctcatctggcagtggctcacaacacttcttcaagaactcacaatccacctcagtttgcttaagctttgtccttgctctcctggtctggaaccatacttcaacttgtcttgggggcagggttaaatggtttgctaaagcttgcttttgcttaag

SEQ ID NO: 7193 - DNA, 703 bp, Gossypium hirsutum
  Clone ID: GOSHI-09MAY01-C22141_1
atttgaagcttcaatggcgatttcatctctccctgggattgaacctgtaagaggtcggtttaaagtttgtagcttctttcttgctggtgtttgtggtggattcaacaataagaaaatgataaatgcttgtgttttttcttcgttgaggaaaatttccaacgatatctacattgaatccaaggtactttttttattaatgtgcatttgcttgatgaagtagccaactggttttagtaattatctgcttgtcttttactccatcaaggcattgactgattaaatggtttgcaagcatggatattatacggctttacctcttatccttgaataagaagtgttaaaatgctatctaataaagtatatctttcccaaatgaagacataaggataagctagattgattagctattaacgaatggagatgtcaggtagaagaaaaggattatcgaacttcgaatttgtttaagcagtcttgcagtaataacttactttgccttagccatgaatccaggcttctttgccacaactcatgaccatttgatgctgatattattactggtaagttagcccggcatttgcaggccaagataaaatagtcctgaaacagctaataatgttattcgtattcctctaaccatattttcatctatgtgttttgactagtgcttaagaattaactggaatatgggaggtcccaatcttat

SEQ ID NO: 7194 - DNA, 545 bp, Gossypium hirsutum
  Clone ID: LIB3584-050-P1-K2-D11
gcaaattggctggatctagtaaaaggagggttcatagcaaacgttcagtgcgctgaagtctggtgcccgatgacaaaggagttttttgctgaatatttgaagaaagaaaattccaagaagaaacaggcactttatgtgatgaatcctaataagttcagggcatgtgagtttctcatacggttccatgaacgagagcgtggtgataagataattgtctttgctgacaatctttttgcactggttgagtatgcaatgaagctacgcaagcctatgatctatggtgctaccagccatcttgagaggacaaaaattctccaggcattcaagactagtcgtgatgtgaacactattttcctctcaaaggttggtgataactcaatagatattcctgaggcaaatgtgatcattcagatttcatcacatgctggttcaagacgtcaagaagcccagcgtttgggacgtattcttagggcaaagggtaaacttgaagataggatggcaggtggtaaagaagagtacaatgcatttttctattcccttgtttc

SEQ ID NO: 7195 - DNA, 351 bp, Gossypium hirsutum
  Clone ID: LIB3083-078-Q1-L1-B6
accagtgatttctatggcgatggaaaccctagatgacgagaaaccggaggaagatgaggtgatagataaataaaatgaagagggaagtgaaaagggttgtggtactcagcttaaagatattcccaatggcactttatgtgatgaatcctaataagttcagggcatgtgagtttctcatatggttccatgaatgagagcgtggtgataagataactgtctttgctgacaatctttttgcattggttgagtatgcaataaagctacgcaagcctataatctatggtgctaccagccatcttgagaggactaaaattctccaggcattcaagactagtcgtgatgtgaacacta

SEQ ID NO: 7196 - DNA, 825 bp, Gossypium hirsutum
  Clone ID: GOSHI-09MAY01-C22081_1
caattttatataataaattatctgttcatgtgattcgtttaaatgttacagaattagaagatgcgcgtgtttcttcacaatcatctaataaaagaaccctgctcatcctcacatatatctcagtatgttcaaaaaaaaaaaactcagtatatatataagccatgtatgtatgtagaagtttcagggtcttgttaagtccacgtcgccttttgggcctctccgtcgtcttttctacatacgacctacctccattttcttcccacaaaccagaaattcctcttcaattactacagtcaaagagagagagaaactaagagaaaccatgaattcagttattaccggtaatttcagacccgcgtttttcccgagtcaactcagtaaaaactcggcacaattcttgttcagacccttcaccacactcgtcttcacaagaagtttaaccgctaaagttcgtgccttcgttgaaaccaagccaacggcaccgattgcggtggagaaagaggagagcggcggcggcagcggcagctgtggtttagcttgtcccatttgttataacctattaatggtgattactgactcccctatatacgtgggatcaacagttgggactaatttgcaatgtaatacatgcaaaaagacttactctggtacccaaacgcatcttgacctcgttgcctcaagtgggtctaagcaatacgatgaatccatgccgctagccaccgaactcttcaggactccagtggtgtcctttctctacgagagaggctggcgtcaaaattttgtatttggcggctttccaggtccagagaaagagtttgatatggc

SEQ ID NO: 7197 - DNA, 612 bp, Gossypium hirsutum
  unsure (1)..(612): unsure at all n locations
  Clone ID: LIB3825-003-Q1-K6-D10
ttcctcttcaattactacagtcaaananaganagaaactaagagaaaccatgaattcagttattaccggcaccgattgaggtggagaaagaggagagcggcggcggcagcggcagctgtggtttagcttgtcccatttgttataacccattaacggggatcaacagttgggtctaatttgcaatgtaatacatgcaaaaagacttactctggtacccaaacgcatcttgaccttgttgcctcaagtgggtctaagcaatatgatgaatccatgccgctagccaccgaactcttcaggactccagtggtgtcctttctctacgagagaggctggcgtcaaaattttgtatttggcggctttccaggtccagagaaagagtttgatatggcaaagaattacctaaagcgagtgctaggtggaaagatcgttgatgctagttgtggcagcgggatgttcaccaggcttttcgccaagagtggattattttcacaggttattgctttggactactcagaaaacatgctgcgacaatgctatgagttcatcgagcaagaggaaaacttccccaaagagaaagtgaccttggtccgagctgatatctctcgacttcct

SEQ ID NO: 7198 - DNA, 538 bp, Gossypium hirsutum
  Clone ID: GOSHI-09MAY01-C22001_1
tatcgacggccgcgacatgaagcaaaaaacatggccggatcgatccgacggcgtccgcttcactgcttttcccttgtcgaaacccaacgacaatgaagaaaatatcatattatcgaggcgttccaagatcggttcaaaaccttcattatcgccgaccgacggccctgatttctcggctctcccttttgacatcttgacgaaaatcgcggcgtcgtttaattttccgaaccttctagcggcttcgctggtttgccggtcatggagggacgcgctccggccgttgagggaagcgatgatgctgctgcgttacgggaagcgattcaagcatggccgtggcggtgttcggcgtaatttggataaagctctcgactctttcttgaaaggcgctgcgcgtggatctacgcttgctatggtcgatgcgggcttatctactgggaaagggtctaaaagaagaagcaattgctttttaccagaaagccgccgcccttggcgaccctgccggccagtgtaatctggaatttcatacttgcacgctcaa

SEQ ID NO: 7199 - DNA, 592 bp, Gossypium hirsutum
  Clone ID: GOSHI-09MAY01-C22021_1
ggttaatgccgtgttatgggttgtggtcgcgatggctctggtgctcggaatagccgagagtttcgacttccatgagaaggatttagcatcggaggagagtctgtgggatttgtacgagaggtggagaagccatctcatggtttctcggagtctagacgagaaacacaagcgtttcaacgtgtttaaacaaaatgtcaaacatgtgctccacaccaataatgacaacaagccttataagttgatgctgaacaagtttgcagacatgacaaaccatgaatttcgaaatgcttatgccagttccaagatcagacatcataggatgttccaagggacaccccgtggaacaagcagtttcacgtatgaaaacgtgaacaatgtcccaacctccgttgattggagaaagaaaggtgctgtcaccgctgttaaagaccaaggccaatgtggtagctgttgggcattttcaagtgttgtagcagttgaaggaattaatcaaataaagacgaataaattagtgtctttatcagagcaagagttgatagactgtgacactgaaaaaaatcaaaggtgcaatggaagtttaatggacattgca

SEQ ID NO: 7200 - DNA, 641 bp, Gossypium hirsutum
  Clone ID: GOSHI-09MAY01-C122349_1
tgtgcttcttcctgaactttgtggtgcattcttaacccagtacttcttggaactggttaagactctctgttaatgccaccacctgaaggtgtgcaacctttttcaagcggttcaaagaagttattcttggttcatccctcatgcattggaaattttctccatgctatatactatcaagagcactcaagcttgatatggcgtcatcataaaccatgctggtatataaactgtttgaagcaggtagatttgaaagaaaggaatcgttctttggttcatcccttggtgcagtggaatttttcttgggctatatcctatcaagggtactcgggcttgatatggtgtcatcacgaaccatgcaggtatgagaactgtctcaaacagttaatttcgaagtttttctttagttcatcggttataatgaaaccttaccactcaaccatgttggtattagtttgtattacgtggcctccggatggatgagtattgaatatgagcatagcatgttttactgttcaacttttcttatatagtcggaggatcatattcttatatctatatttgaatatgtaatcggatactagtctgtatttacgttgcacatctgagtttcatccaaatcggcctatttggaaaaacattgc

SEQ ID NO: 7201 - DNA, 442 bp, Gossypium hirsutum
  Clone ID: GOSHI-09MAY01-C22201_1
attaaaaaaactgctttccatttttccctttttgtctgtgtgtttgagggttcagtcaatcgaagaagatgatgcacatgaccttgtactggggaaaggacgtgactctgctcatcgattcctggaagactgattcatggctgagttacctcctcactttgcttgcttgttttctcttctcttccttttaccagtacatggaagatcgacgcctccgtttcagatcccttgcttcctccaacccatccccgccttcctccgccggcgcttctgttcctctcctccccaaataccgccgctccgctaaattcgcgacggccttgctcttcgggatcaattcggctatcggttatctcctgatgttggccatcatgtctttcaacggaggcattttcttggctattgttttgggactggctggtgggtacctgattttaaggtc

SEQ ID NO: 7202 - DNA, 927 bp, Gossypium hirsutum
  Clone ID: GOSHI-09MAY01-C23991_1
ccgttaccaaacagttaaattctccctcactttattttccggttgtgtttgtctttccgcctatttgttctctgcaatccaagcgagttgtcaactcagtgtctcagatcaccggcgccgattttgaaaccatggaatcgttcaggagttgaaccggaactcagcgggatcagatattggtgcgagcaacaagtcttcagacatattcaaaacgtgctacaacctgcctccgagttctcaatccttcatgttggagcttcaacgagaaaatcatgtggcgtacttaacgaaaggattaacagggctcgggccttctttctgcgtattagatgccaatcgtccttggatttgttattggatacttcattcgattgctttactggacgagtttgtagatcctgaattggaagataatactattgattttcttagtcgttgtcagggtcctaatgggggttatgctggtggacctggacagatgcctcaccttgcaacaacatatgctgcagtcaattcacttgttactttgggtggtgacaaagcattgtcatcaattaataggtggtcaggttatgcaataattgaatttgaagtttttattggaagctatttaacagaagtttgcaatttccttcagagaaaaactatacatgtttttgcggcaaatgaaagatgccagtgggggattcagaatgcatgacggtggagaaattgatgttcgagcatgttatacagccatctcagttgcaagtctcctgaatattttggatgatgaacttgttcaaaatgttggaaattacatcttaagttgccagacttacgaaggtggcatttctggggaacctggttctgaagctcatggggggtacaccttttgtgggttggcgacaatgattttaatcaatgaggtcgatcgtctggatctgt

SEQ ID NO: 7203 - DNA, 387 bp, Gossypium hirsutum
  Clone ID: GOSHI-09MAY01-C23961_2
ctcaaagcaagaagtttttttatttgccattaaacgagaaactgaaagttttgaggaatgaaaacatagaggctacactcccatgtttgatgaggttcttgaccctgacaatcaagtgcatgtttgcgtgcaactatagtatcaagctttttttcccctgttggggtagcaggagactacaaagaggggtattacataggcgtggacgtgcctgaaaatgatcctgaatccgagaagccgtttaatgggcctaatgtttggccggcagatggtgttttgcctggttggaggcagactatggagaaattccatcatgaggcattagaggtgggaaaggcagtttcaaggatcatagcgcttgcacttgatctagaggttgatttcttt

SEQ ID NO: 7204 - DNA, 777 bp, Gossypium hirsutum
  unsure (1)..(777): unsure at all n locations
  Clone ID: AI727878.1
nctggtacgggcccctcgagctcacgttcgatacttgatatcgattcggcacgagctccatgtttgatgagtttcttgaccctgacaatcaagtgcatggagactacaaagaggggtattacataggcgtggacgtgcctgaaaatgatcctgaatccgagaagccgtttaatgggcctaatgtttggccggcagatggtgttttgcctggttggaggcagactatggagaaatttcatcatgaggcattagaggtgggaaaggcagtttcaaggatcatancgcttgcacttgacctaaaggttgatttctttgataagcctgaggtgcttgggaagcctattgccaccttgcgcttgctacactatgaagatcaattttctgatcccgcaaaaggaatatatggagctggagcccattctgacttcggatttattacactcttggcaaccgatgatgttatgggtctacaaatatgcaaggataaagatgcaaaacctcagatatgggagtatgtgacaccaataaaaggagctttcatagtcaaccttggggacatgctggagcgctggagcaactgtatgttcaagtccaccttgcacaaagttttggggaatggtcaagacagatattctattgcatactttgtggaaccctaccatgactgtctggttgaatgtttgcctacttgcaaaacagaaaanagtcctcccaagtttccccanatcangtgctcaacatatctgagcaaacgttacaaggacactcatgctaact

SEQ ID NO: 7205 - DNA, 388 bp, Gossypium hirsutum
  Clone ID: LIB3083-110-Q1-L1-A12
agaacaccaactgcgccaaaaagagaaagcaaaatggcaaatcagaagcaaagcggacccgaacctcctatcaaagtctcaaccatcaattgtatcgatctgtctaatcctgatattggtgaatccgttgctttactaaagcaggcttgcttggattgtggatttttctatgttgtaaatcatgggataagccaggaatttatggatgaagtatttgctcaaagcaagaagtttttttatttgccattaaacgagaaactgaaagttttgaggaatgagaaacatagaggctacactcccatgtttgatgaggttcttgaccctgacaatcaagtgcatggagactacaaagaggggtattacataggcgtggacgtgcctgaaaatg

SEQ ID NO: 7206 - DNA, 630 bp, Gossypium hirsutum
  Clone ID: GOSHI-09MAY01-C23841_1
cccagcgtccgcggccgcgtgggctaataactgtgatcaagatcaaatgcctgatgtaactgaagctatggcatcggaaactcaagataatctcgcaaatgcgtcttcatgtcttggtgaattggatgaagttgcaggatcttctgcagcagatgggcctgtttcttgtgattcagaggccttgatgctttcttctgtattaacttcaaattgtcagttccctgaactgactaatggtatcatttgttgcacattaaatactgaggacccagaagttccttgcaatgaagatgtgttctccaaacagctgtgcccatcggttgtttcctcaacacaacacgttttcaaagaagctggcaatccattatctgcatcttttaaagatttttctgggggtcagaaaactgatggaggtccctttctggttcagagagatcaaagagatcctgggcaatctattggagcctctcaaacgaaagaatcacaaatggtaccagaaatgggtcaacttcatccagttaacaattgcagagttaaatgcgaggattcttcatgtgtagcacctaaaaccgatggttttctagccaatgtttcacctcaaactaattccaaaaatattacctgaggcac

SEQ ID NO: 7207 - DNA, 564 bp, Gossypium hirsutum
  Clone ID: GOSHI-09MAY01-C23861_1
cttagaagctttgggaaagaaatcggaagatgttgatgcaaacctcagcaatattttcatcaaagcctgcgtgggtgaaagcagtacaccgcacatcctccaccgattccaattccatggctgctaccgtccccgcccccaagtgggctcagaagaccgtaactcttcctccccttcggcggggctgccatctcgttacgtctcagatattgaaggaaattaggccagatttatcagaatttaagtgtggccttgctcatctattcctgcaacacacgagtgcttctcttactatcaatgaaaattatgactcggacgttcgtgacgacaccgagacgttcctcaacaaaatagttcctgagggaagatctgcgccttggaagcatacgcttgaaggccctgatgacatgccagcccatatcaaatcatcaatgtttggctgcgccctcacgattcccattacagatggactgcttaacatgggaacattggcaggggatttggctttgtgagcatcggggagcaccaacagcttcgaaggtggtggtgacccttaatggcatc

SEQ ID NO: 7208 - DNA, 650 bp, Gossypium hirsutum
  Clone ID: GOSHI-09MAY01-C23591_1
cccagcgtccgagaatctctgcaagtttgtttttttttctctttcttccctcgcagttctaggctttttagttccaggcctggcctgtagacctgatccgattccaacaaattttcttttgttctattcttttaccctcgatcacaaatctcttcagatctctgtaccaatcgatcattcggcattgcaatcgataaggttggtatttctttacaatttccatgtcttgaatttatatcccattcatggatctttagactcttcacctttttcctctttcttgttcatcgaattctgtcaatttgcatgcaagtgcttgctttctttttaactcaattggagaagtaagctagcttaaattagctcctttcttgcttctttccctgattccatatacaagcaatgtcggaacccccagtgaaaccggttctccaaaagccacctggatacaaagacccaagctccccggccggtcagcgtcggttcaggccaccgccacggaaaccggttctcccaccttctttccatcccaagaaaagaaagactagttacggtcgtgcttgttgttgctgtttctgcatcttctttttgatcttccttctcctcattctcatttgcggcgctgttttctacctttggttcgaccctaa

SEQ ID NO: 7209 - DNA, 946 bp, Gossypium hirsutum
  Clone ID: GOSHI-09MAY01-C23581_2
cccacgcgtccgaaaacacttctttttttccttatttgattacaggtttaagaaaaaaaaaagaaaacggacgcgtgggaaaaagaaggcattggcaagcgataacgagccagcgaagctactgtgaccgcgtaccttcaacgagccgatgagcttcaaaaacatgagcctctccttgcttattactgtcgtttatatgcaatggaaaaaggattgaggataccccagagtgaaagaaccaaaaccaccaattctcttcttgtttctctcatgaagcagcttgaaaaggataagaaaacgctgaggttgggacctgaagatcatttacatctagagggctttgcattgaatgtctttggaaaggcagacaaacaagatcgtgctggacgagcagacctgaatacggcaaagacattttacgctgccagcattttcttcgagattataaaccagtttggtgaacttcagcctgatcttgagcagaaacagaagtatgccgcctggaaagctgctgatattaggaaagctttgaaagaaggaagaaagcccacctgtggccctcctaatggtgatgaagatttgtctgttctatcaagtacacatagcggttcatatgatcatggacctggtgaacttccagttaccagtcccaggcaagattctgatccgtcaccacagttccatgatgaaataaataaccagcaccaagctaatattccaccgtcaactcagttccatgataagattgaccggcagcattctttcgatattttagcatcacatccttcatttcctcctcgcagttacccttctcatggacaatcctttccacaagatcccaaagacgctttccttaccacctccacaagcagtccgaagaatctacatatccccatgcataccaccatcaaccctattcacaagaaccgcaccacatttgcacata

SEQ ID NO: 7210 - DNA, 663 bp, Gossypium hirsutum
  Clone ID: GOSHI-09MAY01-C23581_1
ctaaattttaggttaagcatattgcagggattaaaaccagaagttcacctttgtcataactttcaactacgaaggttcttgctcgtataaaacgacgtaggtcgtttatatgcaatggaaaaaggattgaggatacctcagaatgaaagaaccaaaaccaccaattctcttcttgtttctctcatgaagcaacttgaaaaggataagaaaacgctgaagttgggacctgaagatcatttacatctagagggctttgcattgaatgtctttggaaaggcagacaaacaagatcgtgctggacgagcagacctgaatacggcaaagacattttacgctgccagcattttcttcgagattataaaccagttcggtgaacttcagcctgatcttgagcagaaacagaagtatgcggtttggaaagctgctgatattaggaaagctttgaaagaaggaaggaagcccatcccgggccctccaaatggtgatgaagatttgtcaattccatcagctacatccgggtgttgcatatgatctcggacagcacgaacctgcagttaccagtccgagacaaatgtcagtacatcacctcaattccatgatgaagtaaataaccagcgttatattccaccacaatctcaattccatgataagtttgatggtcag

SEQ ID NO: 7211 - DNA, 438 bp, Gossypium hirsutum
  Clone ID: LIB3585-055-P1-K1-B10
ctcaaaacacttctttttttccttatttgattacaggtttaagaaaaaaaaaagaaggggggagaaaagaaggcaatggcaagcgataacgagccagcgaagctactgttaccgtaccttcaacgagccgatgagcttcaaaaacatgagcctctcgttgcttattactgtaaatccttttttattgttaatctttttatttatttatttgtggaagctaattagatcgttttttaaggctttgattttttttttgggttaaaggtcgtttatatgcaatggaaaaaggattgaggataccccagagtgaaagaaccaaaaccaccaattctcttcttgtttctctcatgaagcagcttgaaaaggataagaaaacgctgaggttgggacctgaagatcatttacatctagagggctttgcattgaatgtctttggaa

SEQ ID NO: 7212 - DNA, 417 bp, Gossypium hirsutum
  Clone ID: GOSHI-09MAY01-C23541_3
ttagaaatccctatttctgcaaaccctagggggagatccccagtaagtgagactccatttacctttatccaatcgccatggattctgcaactcgaagaagaagtcaaggaggcctcttcgaaggtctctacagagtcatcatgcgacgtaactctgtatacgtcacctttgtcatcgccggcgcttttctcggagaacgcgctgtggattatggagttcataggctctgggaatacaacaatgtcgggaaacgatatgaagacattccagtgctaggacagcggcaatcagaggaatgaaatcattatgcccttttctggatgttttgaagaagtcattgaggcttgggccagagcatatatctaattaggtagctatgctcattggtgcaataaactggtaattgtttttggttct

SEQ ID NO: 7213 - DNA, 487 bp, Gossypium hirsutum
  Clone ID: GOSHI-09MAY01-C23541_1
ctaatagcagatcccagcaagagccactctctctaccttaagaatcgccatggactacgcttctcgaagaagtcaaggaggcctattcgaaggtctctacagagtcatcatgcgccgtaactctgtctacgtcacatttgtcatcgccggcgctttcctcggagaacgggctgtggattatggagttcataagctctgggaatacaacaatgttgggaaacgatacaaagacatttctgtgctaggacagaggcaatcagaggaatgaactcatccttttctttctctttgtggatgttttgaagttttttatttgaggaatgggtatgagcatatatctatgatgtagcaatgctcattgttgcaataaaatgtcacttttttttttttgggggggggaggggaaacgtacatctttattaacaatgagtcgattgattgtctttgaaaatattgaatgattcagaatcgcggattatatgcaatg

SEQ ID NO: 7214 - DNA, 454 bp, Gossypium hirsutum
  Clone ID: uC-gsronu33B005d09b1
gcatatcccagcaagagccactctctctaccttaagaatcgccatggactacgcttctcgaagaagtcaaggaggcctattcgaaggtctctacagagtcatcatgcgccgtaactctgtctacgtcacatttgtcatcgccggcgctttcctcggagaacgggctgtggattatggagttcataagctctgggaatacaacaatgttggggtaaatttctaattctaagaataccagtttttattttgtattttacttcacagttgcttagttatttgcggattgtttggactctgatttgcatattcggtagttattatttcactgtcactttgcacaagcacactgggatttgtatctgaatgtattgaagagacgatagccccttttctctgtttgtcaagatgtttaaacctttgtagtaattaagactgccggcggcaatactttttt

SEQ ID NO: 7215 - DNA, 434 bp, Gossypium hirsutum
  Clone ID: LIB3148-049-Q1-K1-B1
ggcaggtcaaatagctataattgactacccataattacatattattgcaccttattgtaagttataattttttttcattaatcaaaggtttgatcttctaaataaaacaccaaaactataaatacataacataaaaaataaaaaaaagctatactaaaaaaacggactgaggataaatggagttcataagctctgggaatacaacaatgttgggaaacgatacaaagacatttctgtgctaggacagaggcaatcagaggaatgaactcatccttttctttctctttgtggatgttttgaagttttttatttgaggaatgggtatgagcatatatctatgatgtagcaatgctcattgttgcaataaaatgtcacttttttttttttggggggaggaggggaacgtacatctttattaacaatgagtcgattga

SEQ ID NO: 7216 - DNA, 973 bp, Gossypium hirsutum
  Clone ID: GOSHI-09MAY01-C23511_1
cggcaggtctattctggggattctgttctgccccttatgatgctcgtaaaagagtttaactggtactgctcaagcttcatttgtggtaaagggaacttacacatttaggcaaagtctgttggaaaattcggcttccaaagtggactcgttgctggtgtattcgccacaactcgctgtgggcttcagaaataccggaagcggaacgacccgttaaacactttaatagcgggtgctgttgccggtgctgccgttgctgctcagactagaaactggaacaatatcattggggtagcatgccttgtttcagctttcagtgtcgctgctgatcatatttccagagcaaattgaaatatctagtgacccaattcctaaattgtcattaaaaggcaatgagggcatgagcggaggagtttggattttgcaggagtaaacctcgtataatcatattattgctgctattgcattaaatagaatagggtaaaatgtttttttttaagctttgcaaagcactgtcaatcaaagcttacaacagacatgggaaattacaaaagatggcaaatacatgtcaaaaaaaggggaaaaaaacctctaaacgggacttaaactgaaactgctgctattgctaactatatatgttgggagttcttttcccagtccaaataatatttgattggccttttgccattgccaccttaaaatgatgattcattgttcctcctgccctccttatgatcaccaaatatacgttcccggaaatccgaaaccatcataggaatacccttcggagatagctttgggttcccaaccgagtagctccttggctctttagaaatcaggcctcctcttgtgtgggtcatcttctgtgttgggtcttaattctacctttgcatttggatcaatctgtttacttgtgcacacctgtaaatgagtaaccactgtcaaaacaagattttatatattttttttgtatttc

SEQ ID NO: 7217 - DNA, 518 bp, Gossypium hirsutum
  unsure (1)..(518): unsure at all n locations
  Clone ID: LIB3584-050-P1-K2-F12
cggacgcgtgggcggacgcgtgggtggaagaagagttcaccgccgttgttccctgctcttccctagccgtcgattccgtcctccgatttgctgcggcaggtgtcttctggggattctgttctgccccttatgatgctcgtaaaagaggtttaactggtattgctcaagcttcatttgtggcaaagtctgttggaaaattcggcttccaaagtggacttgttgccggtgtattcgccacaactcgctgtggacttcagaaataccggaagcggaacgacccgttaaacactttaatagcgggtgccattgctggggctgccgttgctgcgcagactagaaacttgaacaatatcattggggtagcatgccttgtttcagctntcagtgtcgctgctgatcatatttccagagcaaattgaaatatccagtgacccaattccaaaattgtcattaaaaggcaatgagggcatgagaggaggagtttggattttgcaggagtaaacctcatataatcatat

SEQ ID NO: 7218 - DNA, 496 bp, Gossypium hirsutum
  Clone ID: GOSHI-09MAY01-C23461_1
gaggaagctccgatctaaatgagtcagatattggaataataacaccatatcgccagcaggttctcaagatcaagaaagtgctcgaaacctgggacttgctagatgtaaaaggttgggcagtgttgcacaatttcagggccaagaaaggggagtcattattgcctctaccgttagatcaacagtccaacacagtgaggtcgacagaacttactgtctgggatttctgagcaatccaaaaagggttaatgttgcgattacccgggccaaatcattgctcatcattgtcggaaatccacacatcgtttgtaaggatccttactgggaaaaactggtgtggcattgtcatgaaaataactcatatcagggctgccccccaccagaaagggtgaaccatgactttgaagagtcatgttctgagactggattaagtaacgaaatagaaggttcacgttggaatgatgggacatgggattgttaatatgaaacaaaagctggt

SEQ ID NO: 7219 - DNA, 612 bp, Gossypium hirsutum
  Clone ID: GOSHI-09MAY01-C23401_1
aggcttacaagatttgactccataaacagtagcaaggattttggcagcgggttttcaaggtttgactccgtaaacaatagcgaagactttggcagcagattttccccacaacctgagacactcacgaggttcgactccataagtagcagcaaagactttggccatgggttctcttttgacgactcagatccatttggctccagcggtccatttaaagtctcatcagatcagcagagtccgaagaaaagttctgataattggcgtgctttctaattggtaatccaaaagttaaaatgataagaaaaaagataagtaattttccctcgggctcttatacaccttttcctgtttttgttgaggttttgttgggttgcctacctttttactatgtgctgttgtgtttaatattctgcagcatggaattggattgttgtaaagttgtgctgtattttttgttatatggcgacatttttttgaggggtgttggcatgccagaatagtgattggaaaataataaaacacacacaaaaaagtctccttttaagttgctgatcatcatggtaggtttgcttttgtaatctgcatggtgataattttatgttctgttagaaa

SEQ ID NO: 7220 - DNA, 612 bp, Gossypium hirsutum
  Clone ID: GOSHI-09MAY01-C23791_1
ccccgcgtcccgactcacggaggcgggagttgtttcgcccccaaattctctctttagttcttttttttttccaatttaaaaaaaaatctcattgtttagacactgagaatcaatctcaattctcaggtatttatttttgctgacaacaatggcgggtcagaggaatagctatgggaagcgggctcattctcactctggctattctgagaatggatcaaataagaggagaaatgcaggtgatgacagggaacaatttgttattgattcagacgataccgtatataggtatttgtgccctgcaagaaagataggaagcattattggaaggggaggggagattgttaagcaattaagagcagaaactaaatcaaagattagaattggtgaaacaattcctggttctgatgagcgcgtggttactatctatagctctagagatgagagaaatgcccttgaagatggggatacttttgtttctcctgctcaagatgctttattcagggtgcatgacaaagttgttgcagaagacttgcacagtgatgacgaatctgaaggccaccaaattactgctcggcttcttgtatcttctgatcagattgggtgtgttataag

SEQ ID NO: 7221 - DNA, 428 bp, Gossypium hirsutum
  Clone ID: uC-gsflnu33B023g12b1
gttatagctatgggaagcgggctcattctcactctggctattctgagaatggatcaaataagaggagaaatgcaggtgatgaacttgtacagatatctggggaagctgcagttgtgaagaaggctctgcatcaaattgcatctcgccttcatgagaacccttcacgatctcagcacttgcttgcttctgctgtgtcaaatgcatatcctgctgctggtgcaatgcttggtccagctgctggtgcccagatcgtagggataacttcattggttggaccttatggacgatacaaaggtgacactggagaatggccacgctctatggactcgggttcaagggatgagatggcattaaaagaattttcttttcgtttggtttgtccaactgcttatattggaggagtgattggcaaggtggtgcttttatca

SEQ ID NO: 7222 - DNA, 883 bp, Gossypium hirsutum
  Clone ID: GOSHI-09MAY01-C23661_1
ggcacgcgggcgatttctcccacaagcgctggaagagctgagaaaagaagagaagagaagaggttttgtcaatttgaaacaatggcgacgacagggcagccaaaacgacaaggacaacagcagcagcagcaacaacaacaaaataaaacgacggagaagagaaagccggtgtttgtgaaagtagatcagctaaaaccagggacaaaaggccacaccttagtcgccaaggtattgtcctctaacatggtccttcaaaagggtcgagccgcttctcgaaatctccgccaaacccgcatcgctgagtgccttgtaggagacgagaccggcactgtcctcttcactgctcgtaatgagcaagttgacttgatgaagcccgatgacactgtaattcttcgtaatgcgaagatcgatatgtttaagggttctatgaggctggctgtcgacaaatggggccgcatcgaggtcactgaccctgccaactttgttgttaaagaggataacaatctatcgcttgtcgagtatgagttggttagtgtgcttgaaaatgacgagattgctgagacctaagctgctggataccgaaagagttcttatggattgacctgatgattctggtttacccttcataatgttggcgagatgctattatggtacaattttcattgtgaacgtgttgggtttggtatacaaatcttgctgatggttggtcttctgcatcatactttttaacatctaatggtctagattaagtactagtggaatatgtacaagactgctttctagtgaacaaattgcatctggaaatttaagtgttgatagtaagatctttctaaatcgagttggtcgttggtttaaatgctttattgaatctcgtttgttcttc

SEQ ID NO: 7223 - DNA, 501 bp, Gossypium hirsutum
  Clone ID: GOSHI-09MAY01-C23151_1
tctagattttcagaaaacatgccttctgataagaagaaaaatgtattggttgggattcgattagatagtgaaagcagggatttgcttagttgggctcttggaaaagttgctgaacctggtgattgtgttgtagcagggcaggttacccggaattcagatcatgctttgggacagaaattgttattagagggttatttagaagcatatgaaggcctgtgttctataaagaaggttgatcttaaaggccagattcataaaggaaattcgatacgaaaggttttaattcgagaagcaataaactatggtgctgtagctctagttgtgggtatagacaagacgagtcctcttgggggctggacttccacggctagatactgcacgaagcggctgccaacaaccaccaatgttgtggccatcaacatgggaaaaatcgttttcgaaaggtccaacaagaatgaactatcacgtcttaaaggtgatccaagaccgagtctttatctg

SEQ ID NO: 7224 - DNA, 692 bp, Gossypium hirsutum
  Clone ID: GOSHI-09MAY01-C23101_1
tgaccagttccacaagcagttcgagaagccggaaccctagttccggcataaggtcaacaccggaccgatccgctttctctcctagcttttcttcctacactgcatcaactgcctctcgttcagggcggaatccagtaaaggttgcggcccggtccatcgctggagcttttgtcgcgtgttttacacctcccgagactgacgacagcaataatttaaaagtgtccaatgagtttggagctccttctgctgcgtcggaaacgtcaagaatgaggggtccgaatcgagggatttattccaattcaacgaaggagagagcgcctgggagcatgaaattcacgatggaggaaatttttaaggccacaaggaacttctcccctgctttcaagatcgggcagggtggattcggaacagtttataagggaaaacttgatgatggaactttggtcgctatcaaacgagctaaaaagagtgtatatgataagcatttgggtgtggaattccaaagtgaagtaacaacactggcacaagtggaacatttgaatttggttaggttttatgggtacttagagcatggagatgaaagagttgtggttgtcgagtatgtccccaatggaactctaagggaacacttggatggtgttaatggaaaagaacttgactttgcttcgaggcttgatatagccattgatgtg

SEQ ID NO: 7225 - DNA, 854 bp, Gossypium hirsutum
  Clone ID: GOSHI-09MAY01-C23041_1
tttcccctccattttcctcctctttctttctcttctctctctcaaacctccagcttggaagtcccatggagtttcctctttctatcttctcttctctatgcacctgaatctttcctttttcgcttcttaaccccctaaaaaagtctcctactttgttgaaatgtggtggagacataagggagttaatttccattccgtttttggaatttagttgaaggttttggatttctagggtttcttaccttaacatagaacagtattccggttccctgctttgtttggtggtgtttttagaaaatgccgccacatcgatccaagtccgagaaaaacgacggcatggcgaagcagcttcgtcgagatccctatgaggtgcttggggtctcgaggaactcgacggatcaggaaatcaagagcgcgtaccgaaaaatggccctcaagtaccatcctgataagaatggaaatgatcctgttgcagctgatatgttcaaggaggtcacattttcttacaatatattgtctgatccagataaaagacaccagtatgatacagctggttttgaggctgttgaagctgaaaaccaagaattggaactagatctttcaagcttgggggctgtgaacaccatgtttgctgcactttttagtaaactcggtgtgcctattaagaccactgtatctgccactgtcttggaggaggcacttaatggtgtgtgtcaccatccagacacctctgctggggccacctgtttccaggaagggtgaaaaaccatgtcccccctcctccccgttcaaataccaaaaaggaaccaaaatggtttgtttggccattcaatctctgaataaaacaagttcaa

SEQ ID NO: 7226 - DNA, 551 bp, Gossypium hirsutum
  Clone ID: GOSHI-09MAY01-C23071_1
cagcaacaacaatcgcttttactcaccctctttcccacgcaaacaaaaccaaaggaaaaacaagctttgaaaaaccgccatttctctcataaatttgttttattcctttcgtttaccaaaagatttaaataaaaaaggagaaatttatacgaaggaaaggtgcgtactgcgcacttttcctaatttctctgattttgaatttgtcttttttcctttgattgaagatttttatgtttttttgggctcgctatgtcgatgaattcgaggattttcttccgttttcttgtttggtggatcttcttcagcttcttttcaggattgatttcatcggcagtagttagattggattcaattgaaatatacaacacgcacgactggataacaaaaccgacggtttatttcgtctgcaaaggagagaacatgacggttttgccagatgtcaccaaagcaaatactgtctatactttcaagggtgaagaatcttggcagcctcttacagaactcacaagcgagaaatgcaagcggtgtggattctacgagaaggacacatt

SEQ ID NO: 7227 - DNA, 543 bp, Gossypium hirsutum
  Clone ID: GOSHI-09MAY01-C23031_1
tttattcaataatggtggtcccgacgtgggatgatgacacattaggagtggtgaattgagaaaggaaaacacgtgggggaacatgcagatgctcccaagtcccaacgccaacagatgaaaggcagagccaggtaggaaaattgaacactttagctcttttgttgaccccaacaaatcgacggtaatgaagatgatgatccaagcgggaagattctcgtgtcagaagatcatctccccgggacccactgatgggaactatccatgtctttgttagaaggtagttccagaaacatggccgttagtacaggttaacgaccaatcaccccgccatgcctgggtccctttgattccttcaaaaccatcaaatctcaactaccatttcctcatgcacacacataatgctctaccaaaacatcttttttttaccatgcaaaaaaaaaaaagaagaaggggtttttgctgcaattgggctcatgcgtgcatgttattgtaatatggcgcagatgggaccataagagctccgcggttacgccggatgaggat

SEQ ID NO: 7228 - DNA, 681 bp, Gossypium hirsutum
  Clone ID: GOSHI-09MAY01-C23391_1
cggagagatcaaagcctacaaacccagaatcttttactagaggctagagccaaagttcttaaacagtgagagcaaaaagaaaaaagagaggtgcgtgcggcacgatgatgtccggaggcggtgctggcggagtggagtggcacgttaggccacctaatccaaaaaatccaatcgtatttttcgatataaccataggttctatccccgccggtcgtatcaaaatggaactcttcgctgatattgcccctaaaaccgccgaaaatttccggcagctatgcactggcgaatacaggaaagctgggttgcctgttggttacaagggttgccaatttcatagggttattaaagattttatgattcaagctggagatttcctcaagggtgatggtagtggatgtacttccatttatgggctcaaatttgacgatgaaaatttcattgccaaacacactggtcctggtttgctgtcaatggcaaacagtggaccaaacaccaatggttgtcagttttttatcacatgtgcaaaatgcgagtggcttgataataagcatgttgtatttgggagggtgctcggagatagtcttcttgttgttcggaagattgagaatgtggctacaggaccgaacaatagccaaaactaccatgcattatacccgagtgcggggaaatgtaaacgtgttc

SEQ ID NO: 7229 - DNA, 541 bp, Gossypium hirsutum
  Clone ID: GOSHI-09MAY01-C23341_1
gcagtttttaagaggaatttgtttagtcgagtttcagcattgctgctaagcgagaggagagaagacagaattgatgattttgctcaacagatggaaattaatgggttttggccggttgacaagagagaagccattgtacaaacgttgctgaaaaatgtcgatgttaagaatgaatatcactgtagcatgaaattcgagactgcagaagaactttctctgcatatgccaacttgcagctttagggtaatgactggtgacaatgaagggtgcgacgatagattttcggctaataaatcagagaagcacgattccacttgccctttcaagataattccatgtgaacaaaagtgcccagatttcatcatgagacgtgatatggacagacactgcataaccgtctgtcctatgaagctcgtaaactgccctttcttttcagtgggatgcaaagcagccgtaccccattgtaagatcgatgaacatcaatctgaagaactccattatcacattctttatattcttaaggcttttacaagggagcatt

SEQ ID NO: 7230 - DNA, 964 bp, Gossypium hirsutum
  Clone ID: GOSHI-09MAY01-C98901_1
gaaaacctaattatgcacataataaagagagccatggggttgagttggtaaggttcaaatacttcgttagtaaggcttaagtttgaatcctatgcaagtcccaattgagatccttcacttaaaacattatgcacctaaaaaaaagaggagagggagatcaggttggaaataatgctaatataagctaagatggcacatgctatatcccactatcactaaatataagtttcagattttggtcctggattatttgataatattcatatctgttctacagtttaactatccttcacatattctggggttgtaaataaacttgagattccttcccttctgtggcagttcctgggcaacttgaggaatctgcgagattcacatgctgctcttgcggtcggatcatctgaaacggttgctggtgaaccctctcctgtaacaagaattatttccgagtgtgagtctgcgttgacatccttaaactgtgatcttgggattctctcagcttcaattgctcgtgagaaagccatgcaaggccagcaagtaaatttctgatgattgtagctagacagtaagaaagtactgaccgagtatctcactgtgtgtatgttccctagaagatgcaccattgtcatttattcaatatatgagcatctattcggatttggattaagacctgggtgttgagagctggctcatatgataaaatttgttttggtttaaaagcatggtgatcatcaaaggatggagtttgaattgatactttgggttcatgtagatgtagttgtaagttgcaagtgttgattcatcaatgtcatttgcaaaggtgtgaatctcccattcataaagagtgatattggattcttttggctcaattgtttgaagcaaggtgatacatatcatctacgatcagaatgctgtaatttcactgtttattagtttgaagcaatgcatagttggctggttatgc

SEQ ID NO: 7231 - DNA, 726 bp, Gossypium hirsutum
  Clone ID: GOSHI-09MAY01-C98851_1
gttttggatatgaaattcaccggttcgagccaactggatgaatgaatttagtggggtaatgaagaacgtatacgggcctgtaacagcagcgaaaacgatatatgaagatgatgaaagctttttgatcattgtcagcttgcccttttcagatcttccaagggtgaaagttgcttggagaaatactccctcacatggaatcgtaaagatatcatgtgtgagtacagcctgcatgccattcattaagagacaagataggacgtttaagttaacagatccagcacctgagcactgccctccgggggaatttattcgagaaattcccctaccgaaccgcattccggaaaatgctaaactggaagcataccatgatgagacaggaacaatgcttgagataatcgtgcccaagcatcgcgtaggacctgaagagcatgaggtacgtgtctgctttcggccctcgccgtggagtgaacgaccattcatggacctggaggaatctatattgtgatacatgtaaggatgttagtggttggtgcttcattgtttactaacctcattccatgaggaaatctatgaaattataaccgcaatcgttttagattatatggttatttttggtcttgccgtgcgtagtttgatattattaagaattcatctttgttgacataatcattgatttcatacatgtagaaccttgcatttaatctaattttttatttatggatcatg

SEQ ID NO: 7232 - DNA, 576 bp, Gossypium hirsutum
  Clone ID: GOSHI-09MAY01-C98581_1
cggccgcgtgggggaacactcatttgagcaaaagcttgggatcatcaaaaatcctactgctcattcttcacaatcccaaactcactccaagtctagtagagatgatgataataagcggacgcgtgggcaagaccaggtgatgatgaccaccacagatgccttgccctcgcctcgtgactacggaaacggaagctcttcttggttttggtagtgtcataacaatgatcatttcaatttgtatacacctacccctgtcaatgtcttggacttactagaccacgacgaccacgtctctcttgattttgtttggcatggctttgcctaaccttgtaatctctgcactcctttttgtcacctcaattattgttttctactttggattgtattgcaacatttattatttttttactactttccctgttttccttctttcttttgtgttatattacatggattgggattgcattgttataattaataattgattatcccttattcctcccgtttccctctattctagtctaatttattcataaaagtaaataaaagtttagtccaaattaagattatgctttt

SEQ ID NO: 7233 - DNA, 203 bp, Gossypium hirsutum
  Clone ID: GOSHI-09MAY01-C98551_1
tttccccttgctgactttacattttcatcctaaactaataaaattttgcttcttttttcataggagactttgctcggacaaaaatgggttggggccccccttttttttttttctctttttgcttgtctgctcttgttctgtgagtttattctactaaatggattcatatggaagaaacccatccttttgcttgcagctccttc

SEQ ID NO: 7234 - DNA, 871 bp, Gossypium hirsutum
  Clone ID: GOSHI-09MAY01-C98401_1
cggcgcgtgggaaaatcagaggaagacgaacaagtccacgaagaagaaagactgttggatgccctgatggatgttaaagatgagaaaggtgaaacactagatgatgaggaaatcattgatatcatgttgatgtacctgaatgcaggccatgaatcttctggccatactacgatgtgggcaactattttcctgcaacaacaccctgaatttctagaaaaagcaaaggcagagcaagagaggattgtgaagaaaagaccacccacccaaaaggtttaacccttaaggatattcgagaaatggaatacctttccaaggtgattgatgaaacacttcggttgataacattctcactgatggtcttccgtgaggcaaaaacagacgtcaaaataagcggttatactattccaaagggatggaaagtgttagcttggttcagaagcattcacttggatcctgagatttatccaaatccaaaagaatttgatccttctcgatgggatgactataacgccaaagcaggaactttccttcccttcggagcaggaagcaggttgtgccctggaaatgatcttgccaagcttgaaatttctatttttcttcaccatttcctcctcaactatcagttggaacggcataatcctgagagtaaaattaggtatctgcctcatacaaggcctaatgataattgcttggcagtgatcaagaaaaacctgccttcaccaccctagcaaggatattggaatttttagatggggttcaacagcaatcccatttcatcaattaaaataaacaatattgataatataataatattagcatctcctgtaagggactcttaaatgtagaatttgaatgaaaccaatgtgttact

SEQ ID NO: 7235 - DNA, 957 bp, Gossypium hirsutum
  Clone ID: GOSHI-09MAY01-C98181_1
tacctcttaaaaagcagaaggggtatttctcgaatggaaaaacatcccggcctatatcaagcatggcagaaggactattaggcctattgctccactttacaaggagccttgatcaagagaccattagtgtggtcaaggagcatcaaatcatgagcattttctgtgagcagctgagttttcctgcaaaacctagagtgaggcagcttgctgctgttggattgaagaacttgtctgaagctggaaggtcagttgcagctgcagactcggaaccaccacctccccaaggtttctgtgctcccttggtattcatgtgtgtaagggcatctccaaaaccttcgacttgtcccatacacaatgctccatgtgaaaacaataatcaactgtgcttactaaaatccaattgcatcagacccttggttgaccaccttcgcgatgaagatacctttgttcaaatagctgcaattgaggcactttcaactcttatgttagatacgggtaatggttacaaaagatccgtggatgagctagaaaagcaggatgtaatcatggctgtcatcgaacttttcaccgaaattcgtcctggagtgcttcaagagaaggcactttggatgatagagaaggcattgagagtggacggccctgcccataagtactccctcaatcaggcactggttagggctttggtggaagcttttaagcatggaaatgctaatgcaaagagacatgctcaggatgctcttaccaacctaaaacagatatcaggtgtaagcggaaaagcctctagtcactctcggccgcggaggtaagtagcaacacaaaatactcattatccctcgttttctatgtagacacagtataatgcttcaaatttgtacagcattcacatcacagccaccaaattttgtattcattcctgtatattattcatcattaatgaataatccatcatcctctttc

SEQ ID NO: 7236 - DNA, 494 bp, Gossypium hirsutum
  Clone ID: GOSHI-09MAY01-C98071_1
ggtgccaatttccatttagacgattttcagaatgatagtgtagcatagggaaaacaataacttcaatccaattgtttgttggaaacacaccacgattaaaccccaatacgccaatggataaaccacaaatactaacaattttcagacgcacaataataaaatgtatttatcacccaatgcagggggaaggatcgcattcactcgctgcagctttttcttctatcttctcttttcaggaaaaattatggggccaagaggaaacgttttcaaaaaccgagctgcaaacggcaatttaatccaactggaaactaatgggggggatggttctccactggtggtgatccctctataaaagaaaacctctggaggtgatgaggcaaaaaaggaggagaattggactgaagggtccccctgttgaaaccagcaatgccggaagagattgcgaagttgaggttgtagtcactccctagcaccggttgtgctgttgccaccgg

SEQ ID NO: 7237 - DNA, 575 bp, Gossypium hirsutum
  Clone ID: GOSHI-09MAY01-C98391_1
acccatcatgtctttgcgaaatcagtgctgaaaatgggaaatgcagttggagaagagcgcctcggttgccattaccggttaacaaattccataaaggcattagcttttgttccaccgtttctctaactcattctttcccccaacaataagatgttgggggtggcacaagctatgtatcaccttgcttgctctaaggcaagtccaacaacagattatcaagaaccccacaaattgtggttgcaaaacagaatcatgctttcatgccgagatgagcttgaagatgcctgctactgtacagttcttcatctgccagctcttgcatctaaatagtcttttgagaaactttgttagctttttatttgcagagtctcacaaggaaataaggtcacagagtgttttgtggatgctttagtttcttctttcgatcgataatccctcaaaatcgatcctctcattcagttaactattatgttggtgtctatgtattgaaattgttgttctgaaatagatttgtgcttcttttctctgtcagaatttgaaatgtgaattgtatgaataaattttttttatggagt

SEQ ID NO: 7238 - DNA, 595 bp, Gossypium hirsutum
  unsure (1)..(595): unsure at all n locations
  Clone ID: LIB3829-005-Q6-K6-F1
ngatggggnaatcttatatatgtattcaatgaagagtatcaccaaaagtacccatcatgtctttgcgaaatcagtgctgaaaatgggaaatgcagttggaggagagtgcctcggttgccattacctgttaacaaattccataaagtcattagcttttgttccnnaccgtttctctaactcattctttcccccaacaataagatgatgggggtggcacaagctatgtattaccttgcttgctctaaggcaagtccaacaacagattatcaagaaccccacaaatnntgtggttgcaaaacagaaatcatgctttcatgctgagatgagcttgaagatgcctgctactgtaccagttctttcattcttgccaaacttttttgctatttaaaaaggctttttgaaaaaacttgttggcttttattttgcaagtttaccaggaaaaaaggcccagaggtttggggaggccttaaatttttttttttgggaggaaaaacccccaaaaaaaaccccccttttaaaaaaaatatttttgggggggcttttttttaaaaaaaatgtttttcaaaaaaaaaaaaagggcttttttttttttttt

SEQ ID NO: 7239 - DNA, 583 bp, Gossypium hirsutum
  Clone ID: GOSHI-09MAY01-C99941_1
ctgaaaaagcagcattcccttcaaaagactccatccaatgctccacagtagtctgacagggttcctcaacccttaaagtgatgatgacgagcaagctcaaaggggatggtgacggtgatggtaataatggagagatggaaggcgacactgcacttaaaggtacccttttggctggagttttacttgcgggtgttgttggtggatttgctagtgccggatatgtctacaaggaccagatcaatgctttcttgaaccagctctccacttttattgaaggttatggacctgctggatatgctttgtttgtggcagtttatgcaggattggaagtccttgctattcctgccattccattgactatggctgctggtcttctttttggttctgtcattggcaccattttagtctctatcagtggaactgtggccgcaagtattgcctttttgattgctagatattttgctcgtgagcgtatactaaaactggtagaggggaacaaaaagttccttgcaattgacaaagcaattggagaaaatggcttcagagtggttaccctccttcgattgagccctttgctcccgtt

SEQ ID NO: 7240 - DNA, 820 bp, Gossypium hirsutum
  Clone ID: GOSHI-09MAY01-C99841_1
cgaaaaatgtgcattactgaaatttaatttattatccatgcttttaagccttccgtggaagggttcttctgatcgctgtgcatccagttgaattctcaacagatatgaaactacttcagccatgctgagggtggtttccggttcttctgccaagcagtcaatgctcaatttcaacatctggcgtgcaagtttcatccagaggtgtcctttcagttccagcagaagaaccccaaaggcatatatatccatctcaggtgtcaccaagccatactcaatgtattcaggtgccttgtaaccctttgttccgagagaactccacatcgatgattttctgctatcttctctttctgctgatcgagctagactgaagtttgaaatcttggccctcaaatctcgatcaagcagcacgttgtcactacaaatatctttatgcacatatgctggagtggtgaagttgtgaagataatgaagcccattagcaacatctaaagcaatatgaattctataaccccatacctggaatttctggcaactcttgttttgaagccattcttttaaagaaccattctccatgaactcataaacaaggtaaaagacaccagagtgctcacaagccccacgaaggcttattagattgaaatgattaatcctttgcagcaagcttacctctttatccacagccttgctcatttgttttatggctagcaattcaacaaaaaaaacacctcgataaacagaggcacccatcttgtatttgttgctgaaattttctgtggccgcctctagatctttgaaatcataaactttcaaattttgatct

SEQ ID NO: 7241 - DNA, 685 bp, Gossypium hirsutum
  Clone ID: GOSHI-09MAY01-C99581_1
ccatgaagaataaagaagccatattggaaactgcttgacttgaagttatcaggttatcaaaataccaacatcatttctgcttattttgtacatctaatgaaaataataaaacattttaatagcccatccaatgtcgaaaaaaaccagaatggaatgcccggtcaaacgactgtaggctactatagaatacaataaccccaacattcactctcacccttaacaatatagaaatacacagattatggcatggaagtaaattcgaagaacaatgctcaattgctcatgcatcatgagcaaataaatggagaaaagtctattcacaaaactgatcgtataagaaactggaaaatcatgtatcagaccctatgatatccctggcccaggaaattccaactggatatgatctgtgtaccttcgttttcatggtagggacttttttgacaggggaatctacatcggttttgtcagggtctactgttggtttctgatttggggctgactcattggtttcggtaaggaattgtagtcccttcaccgatttctcctcatatttcacagctgaatcgattgcaagctttgcaccaacatcctgaaaaaatttagtattcactccatctttaactccttcagcaaattggcatagataccaaagacctgaattagctacctcctgtttgctttcaag

SEQ ID NO: 7242 - DNA, 892 bp, Gossypium hirsutum
  Clone ID: GOSHI-09MAY01-C99541_1
cccggtcgaccccgcgtttggcatctttcaaccgcgggcaatacctaatagtagctgtttgcttactttgatctttcccctgtgcaaatggaggctgcgttggcagagctagagagagtccagcttcaaatccttcggcgaatatcgaagctagagctctctcacctgcctcaaaatgctgaacctatcctttcttcatcccctctcactaacggcgatgctagctccgatgttgaagcttgcctctctaatattctacgatccaatggcgtcaacgacttcattttcaagcgagtcgcctccgattactacgactggcctctcgagtcccgccgcgacgttctcggcgccgcctctgttcatcatctttgcaaaagcatcgttttgtgagacttgctcctgaggaaacatcaataaagttgactggctatgagcacaatgcagttacttgcatcggtatgcaaactgacattccagtaattttagatgaagccattgtaaagcttgatccagatttcttctggttgggtggaggcgaggttgatttgaagctgggaatcagaacctctgaatttataaactttgtcaaacctttcattgtcagctgcagtggcacctaattatctaccattgattccccaaactaaataaaaagaaattaaactcaagacaacttactaaagacttcaagaaaatccattcacatgggcatcctatccggtcgagaatgatgctttatcttttattggtttgttttggttatcaaattttggaagtcaattgagcaattggaaatgttaagtcctccggagacagccatgtactttggttatgtagtaaggtggaattgttagataggaatgaaaatttgttttttagggatcagagcctg

SEQ ID NO: 7243 - DNA, 796 bp, Gossypium hirsutum
  Clone ID: GOSHI-09MAY01-C99441_1
gcgttctggctgcagtaccttgaagtgctgtccacacattgcctcaaaagatttgaagttggaggtattgatttgacaaagttacttgctcaagagctgggtaaatcaaatcctatggtgaacctcagcttatctgatgttgagaaactaaaagagcaattctcgtgttgtgccgaagatgaagttgcttatgacagaatgctcagatcatgtgaaacagaggaacatactcttcctgatggacaggtgataagaattggaagggaaagatttactgttggtgaggcattgttccaaccatctatattgggcttagaagctcatggaattgttgagcagcttgttcgtagtattgcaacggtttcttctgagaaccagaagcaactgctagaaaataccgttctttgtggtgggactacatctatgactggttttgaatcaaggttccagaaagaagcaagcctctgctcatcagcaatccgtccttctctagtgaagcccccagaatatatgccagagaatttgtcagtgtattcagcatgggtaggaggtgcaattcttgctaaagtggtgtttccacaaaatcagcatgtaacaaaggcagattatgatgagactggaccttctgtggttcatagaaagtgtttttgactaatatttttttactcgagtgagcttttctgtctgtattatctcaggaatgctgctaatggcagtttaaacctgaaattgaggagaaaacaaagttgtaagtttatgtgactattgattggtaactgggtaatctcattaagtt

SEQ ID NO: 7244 - DNA, 913 bp, Gossypium hirsutum
  Clone ID: GOSHI-09MAY01-C99421_1
gataaatgaattgcttaatatggccatccttatagattgaacaggtgcagtacaatgtcaatgatggaaaaatccaatgtacaaaaacctcaacccaaatctatcgcaaattgtacagaagctcgcctgaacaggtctgctgtgtttcaccagagactggactccatgttggagacttcgattcaactcaggccttgaatgcggcagtcgaaaactgcagtgaacctctctgccctgtccatgcacgcattcatccatgttcgagactttagacgaacttggagattcaacacttcgcattaatgcagcagccgagcatcccaaaccgaagaaaaccccttttgcattagtccatgcatgcacagtgacatttaaatagcaaaatactatgccctgcactgaacacaattaactttctggatctctagagactgtaaatgaatggacaccaaaagcctgctttaagaacatgtgagctcagctccatgcaaaaacattttcaaacgaagaaaacaaatatcttgtgctgctttaagatcctttgtataattttaatttttttgccaaaaataatgaatcatgcaatcggtatacatatgaagaatccatattagcttttgcaaaacaaacctgcagggaacacgaaagagacactttagattaagaatgcatagttagtatatacgtagaggtttttaagggcaaaaaatccctgaaaaaaaagtgtatctccacacaaaaacgccctcgagtcgctttaaaaaaaaaatctgatctttgactaaagcaattgcataagcacatttaaatctgaatctactggcagtaatttcaaggaataaataagtttcacaaaataactgcaaatggcgtcttttgggttaaatcgttatgtttacctccccccgaacac

SEQ ID NO: 7245 - DNA, 627 bp, Gossypium hirsutum
  Clone ID: GOSHI-09MAY01-C99631_1
gcgttcgggtgatgtttacaaaagagcagaacactcggtgttggattggcatcactccaacttacgtcgtggtccaatcacaattgttcagaattctattctagcgcctgtgtttcgccgtccattgaatccagaagcagttgctgaaggcgagaaaattctgtccgcagctctgtcgaagatcgaatctttttggctcgacgataataggccttttttgctcggtgagaaccaaccatcaatagccgatcttagcctcgtttgtgacataatgcaagttaagcttgtgggtgagacggattggaacagattattgggtccttacaagaaagttcagcaatggatcgagaacacaagaaatgctacaaatcctcactttgatgaactgcataaggtcctgaaggaactcaaagaaaaactgcaaaattagcaattaaaagggtttagcaaataatgaaggtggtggagtctttgcgttcaagaatctgagaaatgaagaactgcattactatagtatgtataattagaacgtgtggtatgttttcagtcactaagaacaggggcttatgtttatataaacagatgctgtggtattgtaatggatgatgagtaaatattggcttatat

SEQ ID NO: 7246 - DNA, 1272 bp, Gossypium hirsutum
  Clone ID: GOSHI-09MAY01-C99041_1
cgaacccatcgggttccgagagccaaagaggttttccccatttggacctggaaggcttgatagggaatggaccgggacttcagcgccggtccgagatgaagtggatagttgtttggtcgaagaggagaggatacgggttcttggtgacccgcttacagaggaggaaatcgaggaattggttgaaaagtatcggcatagtgattgcgctcggcaaatcaatctggaatggcgtcacacacaacatgttggatgacattcataatcattggaagagagctgaagctgtaaggatcaagtgtttgggagtaccaactcttgatatggacaatgtttgttttctccttgaggaaaaatccggggggaaaatcatctaccgccacataaatatcctcattttgtataggggtccaaactatgatcccccaaacccaccagttatacctcttatgctatggaagccctatgctccctatttttccgaagctctgtgaaaaactttgctgatggcctgacgttcgaagaacccacggaattgagaaatagaggactcccctcccctgctcctatgaaactcaccaggaatggagtgtatgtaaatgtagtggccagggtccgggaggcattcgagactgaggaggtgattagactagactgcacccatgttggtactagtgactgcaaaaggatcggtgtaaagctaagggacttggttccttgtgtacctattttgttcaaggatgaacaaattatactctggagggggaagagagatcaggaacggaactctgacatttctgatgccaacgagaaatctgcgggtacttagtttagtttccgaaccggaaatctgatgcagtaatgtattgggctatcatttatttatgcttccaggccaaagaatgttggataggttgcttgttgattccgttgcctggaaaacccgtcgttttgatgaaaatcaatgtaccagttcgtttaagcaacctaattgtcgtcccctgtttgcattggtgcatccatcgtgtttcatttcagacgtcagctagtctgtttacaagtttgtaattgtcctgaaatttaaaatcagtattctttttcaggaaaaaaaccccctcttcataatataaaaatagaaggtcctttttgggaagtttgttgcaaagatatctttcattaactgaaacaatggaatgaaagaatgttttgccctaatccctttatatttgtagctactgtagccctttgttctataaaagaattgtcttaagcgct

SEQ ID NO: 7247 - DNA, 482 bp, Gossypium hirsutum
  Clone ID: GOSHI-09MAY01-C99351_1
cggacgcgtggggctaatttagatgttttgagggcaaagattcttgttgtggagagcacatttgtagataactcagtatcggttgagcatgccagagattatggacacgttcatctgtctgagataattaattacgcggacaagttcaataacagagcaattcttttgattcacttctcagctcggtatgcattagagactatccaggaagcaattgcggcgctgccttcacctctggctggccgagtttttgcacttacagaaggtttctaaaggaatggggttgaagataagatttgtgttgttgttcaggtgatccataattttctgtaacaaaacttgaagcttagtttatttgattttagagatagtgtcgaaaagatgtgggattgaactcccaacatttgctactccttctaaccctgcgctaaggttttctttgtaaaaaaaaatatatatatattactgtgtttttttttatc

SEQ ID NO: 7248 - DNA, 561 bp, Gossypium hirsutum
  Clone ID: GOSHI-09MAY01-C99211_1
cggccgcgtgggcggccgcgtgggcggacgcgtgggttgtgaagttagagtgattttgaaaggcttgggagttcgtatcgatgaacgagatgtttcaatgcattcagggttcaaagaggaattgaaagagctaataggagaagggtttaaaggtggattaccaagggtatttgtgggggaaaaatacatcggtggagctgaagaagtaaggcgaatgcatgaagaaggaaagctagagaaggctgtcgaagggtgtgaaatggtgggtgatgatggtgatggcaatgggggaggtagtggagcttgtgaagcttgtggggatatcagattcgtgccatgtgagacttgttcagggagttgtaaagtgtattatgaagatgatgaaagggaagaacaagaacaacaagaacaacaagaagaagatgatgatgagaatggaggtgaaaagggtgagtatggattccaaagatgtcctgattgtaatgaaaatggactcattcgatgtccaatttgctgctactgaattattacttcatgaaaaaacataaaatatttggcctt

SEQ ID NO: 7249 - DNA, 590 bp, Gossypium hirsutum
  Clone ID: GOSHI-09MAY01-C94451_1
atcccatcttcttgcttagataccataaggtcatggacaacaaaactggctaataggctaaatgtttgcgggctcatgaactgtcagtatgcaatcacagcttctggtgatgttttcttacttgaggcaaatccccgtgcttcacgtactgtaccatttgtttccaaggcaattgggcacccactggctaagtatgctgctcttgttgtgtcagggaagtcactttatgatctagatttcacaaaagaagtgactccaaaacatgtgtctgttaaggaagctgttcttccgtttgagaagtttcaaggctgtgatgtgttgttaggtcctgaaatgaaaagtacaggtgaggtgatgggcattgactttgagtttgcaatagcatttgcaaaagcccagattgctgcagggcagaagcttccactttccggcacggttttcctcagtttaaatgacttgacaaagccctatcttgaaagaatcgcaaaagctttcttggggctgggattccatattatttcaacatctgggacagctcactgtcttgaactaaaaggtatcccagtggaaccggtgctgaaaatgcacgc

SEQ ID NO: 7250 - DNA, 1059 bp, Gossypium hirsutum
  Clone ID: GOSHI-09MAY01-C94121_1
tttcactcaactgaagcaaccaaatgaagagtgagatattttccggaagaccaagtcttaggcgagatgaagaagaagagatcaaaggcaacagaagacgcagctgcagcctcccacaacaacaaggatgaatctcattacttgagagaagaagaagaagaagaagaagaagaagataagacggagattccacatgtgacccatggttatgatttggttaaaggaaaaatggatcatggaatggaagattatgttgttgtagaaagtaggagaatcaacggacatgacatacgactttatgcaattttcgatggtcattcaggtcgtgatgttgccaaatattttcatactcatctctttgacaagatgttgagccagtctgatttctggagaaacccggaaggagcgatcaaaagagcgtataaagaaatggatgatgagatattggaagatgttgctggttcaagaggtggttccactgctgttacagcgatattaatagatagaaagaagctaatggtggctaatgttggtgattctcgggctatattatgtggcggagatggggtgaaacaagtaacaatagatcatgagccgaataaggagaaacaagtagttgaaagtagaggaggatttgtgtcaaaaaagccagggaatgttcctcgagtggatgggcagttggctatgacaagggcctttggagatggaaaattgaaggaacatatcacttcagaacccgatgtgaggattgaaatcattgagccgaatactgttgagttcatcattttggctagtgatgggctctggaaggtaatgtcaaatgaagaagcttttgatgaaattagagagtatgatgatgcataggaagcatcccaagtactgatcaaagaagcattagccagggggagtcgagatgatatctcttgcattgttgtagcttttggttggtcatagtagtttctttttttcgcccaaagcaacttcatatttctccttgccttgtgtacgacatcacttcaacttatagtttatgatcaatattacttaaaaatctagaac

SEQ ID NO: 7251 - DNA, 353 bp, Gossypium hirsutum
  Clone ID: GOSHI-09MAY01-C94061_1
gaaggagaagacagtcgatacttccggttcattactcggataactatttttcattagtaccaggtgaagagatgtcaattaagatatcattcaaggtccctccaggtgtgtctccaagagtaacacttagaggctggaattaccatcatggagtgcacactgttctttaacttgattgaatgattctgattactcggtatctcatatttggtgaaagaaacccatttccgatttggtatatcaaaaattatttttcaagttgtgttatttttcgcatttatttcatattgatgcactaatctctgtattattctacagcatttaaatatgattacacaaatctggagtttatt

SEQ ID NO: 7252 - DNA, 300 bp, Gossypium hirsutum
  Clone ID: GOSHI-09MAY01-C94011_1
attaaattttatatcagatttttatggttctaattagtggtatccccccctcgtcttgttgaatcattgggaattgttttccccaagttagctcggggcccggtacccgtcggaggcatgttccccctttctcctgcccatttgggtatagctacccttattattttgagtacgacatgtatagggacttgacattttgttatgtgtcatattgatcagccaatgtgttggctcatgatgttattatgatctttttgtataggcccttgaggggtggcccatattaattatttgagttgt

SEQ ID NO: 7253 - DNA, 729 bp, Gossypium hirsutum
  Clone ID: GOSHI-09MAY01-C94351_1
acaaaaactgaatatactagttatacatcaggtaagaatcatatgatcgaaaagttgagaattcatatttaaccttatcataaaggtagcaacttcaagaattaactgaaacttatgcgtccttggaaataatatgtgaacccacacttatatattatcgacgttgaaaaagaaaatactagtaataattagagaaaagaagaaaagcttgtcctacaataatggaaaagagaaagtgtacgagaaattatgatgggcatagaatagaaattgcttcattttaagcagtgaaccgacggcaacgggttaagacgctgcaccctctagtgtatggattagcaacttcaccaatgccacaattatagtaggatcgacctggttgattgcatggaacagcattcatccttaaggcggcgtagctaatgtactttcttgcgcttaattctctgcggggtatatccaaatcggtttcttccaggcacttgccggggtgaccatgacatatttggtcactggagagacgtcggtcacggacctggagcttgctccagaacatggatcggctccaattctcggtggcatgggaagacgatgacaacgccgataaggctagaaagacggtgaggagggcagaagaaagacgaagattcatcagagaaaaaagggggggggggtgaggaagttatgcaaagaaataggtttgggtttttggtgacgcccacgcggccg

SEQ ID NO: 7254 - DNA, 262 bp, Gossypium hirsutum
  Clone ID: GOSHI-09MAY01-C94311_1
aatcaagtaagaatcagtaattattgattttcagtgaactgatgttaagcaaacaaatacatttatttccatcctaaattaaccataattcttatagtacaaattacaaaccaatatattgtaaagaagcaaatggatcagaactgaggtgtgggatggcaaggtaatgaatggccgaaactcaaaactctagttctttgcacttgattccgggatgcaccactcttacggatctaaaatcaaccttcatcgggtctatttg

SEQ ID NO: 7255 - DNA, 531 bp, Gossypium hirsutum
  Clone ID: GOSHI-09MAY01-C94301_1
aatgcaatgcctggtaattatttataaacatgtgaatacacattaaacttgttctcttcaaaacaacatgaagctcccatatccataaactaacaactgtaagtacaaatggtggtaagaataagaacccaccaagcgaaattctagattaacaaggaaattgatcttaatataggaattctctaggataagtcaccaaggtcataatcacatgcacacaaaaaagtttctagaaaaaatattaaaagcttcaaaatcacttgcgataattgaccaattattccagataaccagttttcagcgtttcctctttgaatgagcggcgatgaagttggcgtgtgaaactagttgttgtgtccaagaaataaagaacacatgtcatgatgcagcagcacataatgaagggtacccgaccaaagatccaaagcaatagggggaagcataagtaaaaggctcgtagcccgagcgaccaggaataacttcctctgtttaagtttcttgcagcatattcaacagattccacattgtcta

SEQ ID NO: 7256 - DNA, 759 bp, Gossypium hirsutum
  Clone ID: GOSHI-09MAY01-C94211_1
aagattgccatgaaccgatgagatctttggggagctcttcttggtgcttgtagagtcataaagagtcggaattgccaaaaggcagctaaaaatttctcgaattagacccccaaacggggctgtttatgttctgctgtgtaatatatatgcatattgcaaaaaatgggatagtctacatgagctaagggagtcaatgatgcatagaggaatcaggaagaccccaggctgcagtttgattgagatgaatggagttgttcacgaatttgtggccggcgaccggacacatcctcgatcaaaagaaatatacttgaagttagataatatgacaagggacttaaaactttcagggtattccccggacacttccgaggtgttccttgacataggagaggaagataccagcatagcaaaaggttggtgttggcttccgggttgagtagttcggaacctggggttaccttaaggtctgtgaagaaccttagaatgttatcgttagagaccgaactcgattcaatcatttcaggctcgaatcatgttcatgtaaagattattggttagagttgaattagacaagaactaacattcattcatttagtctggtctgagttaaacaacaatgatttgtactttgggttgtattaagaattattaaaccctcttttagtttggctaagttgtttctgatcagtgacgaatccaagtggcaactgccaataaaattttaaattaataatgataaaattacaccttagactcctt

SEQ ID NO: 7257 - DNA, 298 bp, Gossypium hirsutum
  Clone ID: GOSHI-09MAY01-C95351_1
cccacgcgtccggacgtgtacggcgtgcgtggagagggccatctctgagtcttgcggcgactgggcactcgctggaggctgctacggctaggttgagtggtgctagggtttctgctttcaatgttttggggctggggtttgtattgggcttattgttgtatttgttttattatttgtggggcctgggccatttgggcctattacaattttcatactactttattgtattgatcgttaagtatgttttatttttaaaaaaatgtttattgaatgttttaggaaaataatttatttttat

SEQ ID NO: 7258 - DNA, 813 bp, Gossypium hirsutum
  Clone ID: GOSHI-09MAY01-C96731_1
gtacgttgaggcggcagagcagcggtgtggatattgggtcaagggggaacagaaggtcctcctaagctacgtcgatatgcatctgtatcagagaatatcaatagccttgcttctcaatgcagtccaggaaatctagctcctctgaggcgaacaagcagtttgtcttttgatgagaagcttcttatacaggctctttacaaggtgttgatatatgtatcaaaagccagtcctattgtgctttatcttagggatgtcgacaagctcttgtctagatcacaaaggatttataatttgttccaaaagatgttaaagaaactttccgggaacgtgttgatcctcgggtcacgcgttgttgacctgaataatgatgacagggaatttgacgacaggttatcagccattttcccttacaacattgagatcaggcccccagcagatgaaaaacatcttgtaagctggaaatctcagctagaaaaggacatgaagatgatccaagctcaggataatagaaatcacatcatggaggtgctctcagcaaacgatcttgactgcgatgatctagattcgatctgcattgcagatacaatggcccttagtagatacatagaggaggttgtcgtatccgccatttcttatcatttgatgaataataaggaccctgaatacagaaatgggaaactcgtgatatcatcaaagagtttgtcgcatggattgagtatattccaggaagggaagtccattggtaaagacacattaaaacgggaaccacaatccgaaacattgaaggaaacaggagctggttcagtaggtgtg

SEQ ID NO: 7259 - DNA, 696 bp, Gossypium hirsutum
  Clone ID: GOSHI-09MAY01-C96041_1
taaaaaagttaaatcgttgcatgcccgtgtaaggaaccttggatacttaacatcggacgccccagttgttctatttccaacatcagcagcattctcatcagttgatactccatctggcattctgtaataggctttaacttatttacgcatcaaactaccaatacacaagaggcgtgttcttctacttaaaacaagaatgggatacaaatggataaacagatctcagtgggcctataatttacaaatacacccgaagattcctaaaaactaattacttttacgctacagcttcaggatagatccttaatttagttactgcaatctggataccatattggactccacaatttactagctagctgactgctgcgcaccttttcaccggacccgtctccagttgatttgcagacacggaccttaggcttcttatgttataccccctcagctggcgatggaataatagattcccttggtctgtctgccgtggcaagatgtttggacatgatggatgcctgctcctggattatgctccttgcttcaacaagttgagcttcaagctcaagctccctctctgttgcttcagaagtgacttcagcacctttttgcgcatcctgtaattgaaccatccgctcttttacagaagccatcttagtgcgaagactttcttctatttgatccctagccatgtgaaaagga

SEQ ID NO: 7260 - DNA, 516 bp, Gossypium hirsutum
  Clone ID: GOSHI-09MAY01-C97961_1
ggatgatgttgccttaccatttgttgtgcctgcaccgaaatacgggccaaaagacagaccagcaacagcacaggctatgagggaggcattagctgaactttcagaacgagaagcaaagagccttgcagaagtagaaattacagaaaatatgacggaagaggtatcagatgaagacaacgaggaagtaaacgaagcaactaattatgtcatagaggagaaagaagaagataaaacatatgccgagaagctctggagccaggttgactcatctcagagttcttgatccggcctcagcatccattataacctgtaacattcgagatttttatggccaagacattatatatcccttgtctaattcattatgtatcatatatatactgtaaaaggaaaaagaaaaagaccacagcctagtgcttttattgtaggaatatgaattacatggatcgtgagatccattttgtaagattttgattgttcatacctgttgtacgaattgctttgatcttcactttg

SEQ ID NO: 7261 - DNA, 733 bp, Gossypium hirsutum
  Clone ID: GOSHI-09MAY01-C97461_1
ccccgcgtccggttatatatgatgatattatggaccttcaaaactaaagatttatggatctttcaaaatttaaattatttattgtcgatggacctatatagagtaattaatgaggttgtgtgtttacatctttagggctgttaatgtcttttcttgtgcgtatctgatcaatttggttcgtcctgcacatcggcaaataccttcgaagcaccaaaaagcactttgctacagtggacttcgaggggcaatggcttttgcccttgccctgcaatctgttcatgatcttcaagaaggacacgggcagattatattcactgcaacaactgccatagttgttttgacggtgttgttaattggaggttcaacaggtacgatgctagaagctctgcaagttgtgggggatggccacgatgcccacttgggagaaggctttgagggtaataatggatatgttcctacatctcgcgaggaagatgaaacaacagggaataagttaaggatgaaactgaaagagttccacagaagtgcggcatcattctctgaaatagataggaattacctcaccccattcttcacgagccagaatggagattctgaagatgaggaggatgatccaatgcctagttctagaaggggagtataccacggacatagttgattctacaaagacaagcggatgacaacacatactggagaatactttgatttcattaatggtgactcgtaccgacct

SEQ ID NO: 7262 - DNA, 509 bp, Gossypium hirsutum
  unsure (1)..(509): unsure at all n locations
  Clone ID: LIB3825-026-Q6-N6-D3
atgaaaaaagaaagtatatatcactatnacacattaaacatgcattatctcctacataactccaacagcctaattttcttggcgaaacaattacaccatgttcatataatcctaatcctttgtcgacatcacgaaaaacaacgccaactatacacaacgcatgccatagatgtcatcttcatagcaaaggtaccctagaatgcaggacgagagaaatgaggtggtctttaattatgtacactactgcaattccctccaactggacatgcagtgcatcgtaaaatatttataaagttagttccatgtaccagcagatgtgttgtcatccgcttgtcttgtagtatcagctatgtccgtggtatattccccttctagaactaggcattggatcatcctcctcatcttcagaatctccattctggctcgtgaagaatggggtgaggtaattcctatctatttcagagaatgatgccgcacttctgtggaactctttcagtttcatccttaac

SEQ ID NO: 7263 - DNA, 569 bp, Gossypium hirsutum
  Clone ID: GOSHI-09MAY01-C97151_1
gtagcattagttttagaccataaatcgtcgaacatggatacaatcctgtgaaggttccttcagatttcttgttaggcatagcgcctattgatcaaattaatatcaaaaggaaaaaagagttgaaacaactaacaaacattagaatccatctactttgatagtttgggagcgaaaaagacagtcacaggaccatatgagtgcaccaacactcactacatgtgacattaaaagcatgggcaaatagattatagatatgctacttggactcaagtggtgtgagtagaggcacgcattttatatgggtatgtttgactttttcttttttggtaaatttttcactatattaacccaactcttcattttgcctaaataactactgtctgtactactgtgttttaactactgtatctgaatttatctccaacacatgctcgaacatgggcatcaagatatggtcctccaagagtcctccaaatacattcaattctagaaaaaattaaaaatactcaagtcagatgcctatgtccaacacttacacccgagtccgagttaacataaccttttcatga

SEQ ID NO: 7264 - DNA, 898 bp, Gossypium hirsutum
  Clone ID: GOSHI-09MAY01-C90911_1
cggccgcgtgggtgaaaaatttgatgcaaagttgtttctatcccgaatacaccaaggaacacctgcagcagacttggaagccggagctcttggtctaaaaacagatctccaaggacggactcaacagaggaaacagttggttaaagacaattttgactgctttgtctcatgcaaaaccacaattgatgatattgagtcaaaactgaagcgaattgaggaagatcctgaaggttcggggacaactcacttgtttaaatgcatgcaaggagtatgttcactggcagatcgtgcctttgagcctctatttgagagacaggctcaagcagagaagatcaggtctgttcaaggaatgcttcaaaggttcaggacgctttttaatttgccaagtacaattcgtgggagcattagtaagggcgaatatgacttggccgttagggaatacaagaaggcaaaatcaattgctctcccctcccatgtaaaaatactaaaacgagtccttgaagaggttgaaaaagtgatgcaagaattcaaaggcacgctttacaagtctatggaagatccacaaatagacctaaccagccttgagaatacagtaagggttgttgttggggcctgaacctgagtcagatccagtgtggcattatttaaatgtacagaatcatagaattcgagggttgcttgagaagtgcacttcagatcacgaagcacgaatggaaactttgcataatgagttacgtgaaaaagccatctcggatgcaaaatggctccaaattcaacaaaacttaagtcagtcatcagatgccaactactctttagggaacattgaactgcctatagaattgcaaccgctggccttgactggtgaagaggttgatgttcttagaggaaaatatatcaa

SEQ ID NO: 7265 - DNA, 552 bp, Gossypium hirsutum
  Clone ID: GOSHI-09MAY01-C90901_1
agtaataacaaaaatactattgcctcacatgcgtgggaacctatccaactatccactcatcttcactactattactatttatttttattaaacaacttttttaaaaatattttaattgaattatttttcatagaatgatattattaaggcattgtttatgggcactaatagaatattattaatattatttaaaattttttatgtttaataacaatatactaataatacgtattttataaatataagcttaattagtattatatatatgaaacaatattttcatttattttgaatgttgaaaaaataatatttaattaaaaactatttttatattgtttaatgaagagcaaaattgggagaaatttgtaggttttataaatggaaaaacaaatgcccccaaaatgtttgaagggccatatatgattttaacaaataattcccatttggttggagtactgaagtttagtagatcagcaaccattaattatattttcaaatattataatagtttcattggattttgcttacatccgcagggatcttcatggaaag

SEQ ID NO: 7266 - DNA, 731 bp, Gossypium hirsutum
  Clone ID: GOSHI-09MAY01-C90461_1
ctcttctcttcaaaatgttttgaggatctggatattcctatctgcttgaccggctatgaatgggggaaagggggaataatctcatgagaattcttaatgtagctgcatttgctgtgtctggatattcttcaacagaagggagaatttgcaaacccttcaatccattattaggggaaacatatgaggctgacttcccagataaaggcgtacgcttcttctcagagaaggtcagtcatcatcctatgattgtagcatgccactgtcagggtacaggatggaagttgtggggtgatagcaatttaaagagcaagttttggggtcgctctattcagctggatcctgggggtgtgttgacccttggagtttgatgatggagacgtgttccagtggagtaaggtgacgacatcaatatacaatctcatctgaggaaaggatgtactggtgatcactatggcaccatgcgaatagaggggaaccgtgacttttcatgtaagctgaaattcagggagcagtctatcatagatagaaaccctcaccaggtactgggtggagttcaagataggaatggaaggacagtggcttcattattggggaaatgggatgagagcatgcatttgcggtgggggattgtttgcaaggggaaaagacaggactctttgcagaaccctctgtctgaagcggacaagcctctaatactcaccgattaactaacactttgcatacatgatgag

SEQ ID NO: 7267 - DNA, 770 bp, Gossypium hirsutum
  Clone ID: GOSHI-09MAY01-C90641_1
gaacaacccattcatctccattttctctctctaggtcatagagatttcagcttgcttcccatcatcccagtccctcccattactccatataacttgttcatttgttctactctctagctagcctttttccccacaaatcaaatataatcttcgtttcctttacttttgggttcccatggcgtcggctttgactgttctcaggcggctctacctttccatctataattggctcgtcttcatcggctggtttcaggttctgtttttagcgttaaaggctttgaaagaatcaggtcatgaacatgtctataatgctgtcgaaaagcctctccttctagctcaatccgctgccgttatggagattcttcatggcttaataggtctggttaggtcaccggtgtcatcaactctgccgcagataggatcaagattgtatttaacttggggaattttatggagttttcctgagattcgaactcacattcttgttacttctttggtcatcagttgggccattacagagattattcgctattcattctttggcatgaaggaggcctttggttttgcaccttcatggcatttgtggcttaggtatagcacattcttggttttgtatccaactggcatcagcagtgaagttggtctgatctactttgccttgccatatatcaaggcttctgagaaatattgctttaaaatgccaaacaaggggaatttctcctttgattacttctatgctgcaattcttgcccttggaatctatgtcccat

SEQ ID NO: 7268 - DNA, 673 bp, Gossypium hirsutum
  Clone ID: GOSHI-09MAY01-C91941_1
ccaaagctcaatccatatgggcagaccttccattattgtatataaatttattggaaatttatgaaaattggtaggtaaaatgcaaaagggagatgcatccccagtaccaccatcatcaatcaagtttcaagccaacagtaatacaacagtagttccatgcatgagttttcatacagttgaatgttgaggaattttcatggcgatacaaagattaaagatatatgaccttctcttcatttctctctcttctacttcctactcctatctctctccacaatcacaaaaacccacttttctatcgttgcgtttgtccaagtcaattctttgtattgatgatatataatgaagttccctccagaaatattattgctcagtgcagttagttttcataatctccgacttgaattcatatcttctccacatacaaacaatctgaagtagagcggtataacttggcactataaacttaatttcctgaagcagttcttcgttccagtacaagatcatcagcagagtaataatccgcaatcaggcggtacatgtatgatggattatgccctccggtatcagttataaagagactaacaagcttcggtggcacatagtcaaatgttggattgacgacatgaagaaggggggcgccaatgccactccaaaatccaagcaatccgag

SEQ ID NO: 7269 - DNA, 256 bp, Gossypium hirsutum
  unsure (1)..(256): unsure at all n locations
  Clone ID: LIB3829-017-Q6-K6-G9
gcgttcgcccagcgtccggcggnttattactctgctgatgatcttgtactggaacgaagaactgcttcaggaaattaagtttatagtgccaagttataccggtaagagcctttatctggttgttgtgagccaattgcagctcaattattagttgtgtgctaatatgccccttgcctatattttaaactgtaaaaaccaaaaacatgtattcgagtaatcgaatattcagaatgcataacaacgacttcttagcttc

SEQ ID NO: 7270 - DNA, 479 bp, Gossypium hirsutum
  Clone ID: GOSHI-09MAY01-C91971_1
aaataagaaattgcataaattttaatattaaatgttaagcataaatctttgcatttttacccaattttcatacatgatgtcctattcatacaattatcatgtaataaggtgatcatgtcggaatgttaccagcattgaaagccaagtcggaagtgactggatcctaagattcagacacagcatccactgccgaagttgtgttaccattgccgccaatgataacactattcatactgctagtgaagtcgtatacatggcccattttagctcgtttggtcgccaagtaccgcttgttgtcctttgtaataggtgatagtagtggaacccgacctgcaattgctaatccgcggccccgtggtccactgtatttagcaggattgttcgtcataagcttcattgttcgcacaccagatccctaagtatctgtgcaccaatgccgtattctctagaatcaacaggcaacccaagctcaacatttg

SEQ ID NO: 7271 - DNA, 532 bp, Gossypium hirsutum
  Clone ID: GOSHI-09MAY01-C91891_2
ggtgtctaaacgacttggttttgcttatttattagttgcctgaacccgttttataggacaagagatgattcaggtttcacgtggtatatagatgtttaaagtttacaatgaaccgagacagcgaacagatgaaaccaggtttaagtttgacatcggtgaaatgcacgaacatgaagacccccttctatatggagattgatcatcgtcctgtatgtcactgttctgttctcatcactcaatttgaatacaaagtagctgagaagaacagctgagaagatcttcatctgcctataagcaaactctttacccagacaaatccgaggtcctgcctggaaagctgtaaacttgaaagggttttctagctggaacatgccattcttgtcaagccatctctcaggtctgaactcctccgcattgtcaccccaaatgaacctcattctacccattgcataaggctgataagcaatcatatcccctttccttgcacacaggaacggctgggtagagccttaaagtttcagttatagctgca

SEQ ID NO: 7272 - DNA, 1008 bp, Gossypium hirsutum
  Clone ID: GOSHI-09MAY01-C91891_1
atatgggttgatacctaaacgtttatttggatgcaattgcatagtgttcacttaacaatttatttagcacttccctgaactcattttcttcggacagagaaggttcaggtttcacgtggtatggatatatttaaagtgtggaattgctaggtacaatgaacggagccggttagtagatgaaacccttggtcgaacaagaagtaaggacctggttttaagtccgacatcggtgaaatgcacgaacatgaaggcccccgtctatatgaagattgatcatcgtcctgtatgtcactgctctattctcatcactcaatttgaatacgaagcaacggagaagaacagctgagaaaatcttcatctgtctataggcaaagtccttacccagacacactcgaggccctgcctggaaagctgtaaacttgaaagggctttctgatcggaacatgccgttcttgtcgagccatctctcgggtctgaactcctctgcatcatcaccccaaatgaacttcattctacccattgcataaggttgataaacaatcaaatcatctttcctcacactaaaaccatctggcagagtatcatcagagaaacatatctttccatccataggaactgccgggtagagccttatagtttcagttatagctgcatgaagatagtgcattttttctaaagcctcttctctcaggctagcagcgaattcatcaacatctttaacctccattgattttgttgcttccttcacttccacggcaacctttcttgaacatcaggatgtttgcaaagcatgtatataaaccacgacagagtggacgctgttgtgtcttttcccagcacctgtgaagttaataattgtatctctcaagtatttgggtcagtgtccttcacttggaggtatctagttaaatcgtcttccttttttattacagccgaatcgtcttggagtcgcgtagttgctcaatcttgttatggatcagcttatacacaaaattatcccacgcgccg

SEQ ID NO: 7273 - DNA, 483 bp, Gossypium hirsutum
  Clone ID: LIB3828-009-Q1-N6-G2
gacaatccaaaaattaaaatttcatttcagaacattacatcatgaggttaggttacaagccattgaggcttctaggaatagcaaatgatatagctcaagggcaggggcacctcatctacctccggtgactacgtcaaacttcattcaacactgtttctacttaaagcgtatgttgtataaacattgtcgatttgtttaagctggcttaactacatgctgtccacttgtataactgatcatcctcccataattaattcattgcattcatattccatttctctcttcttcttcttctttttatgtacatctattcgaattgagatttgagacatcgaaagactctggttttaagtccgacatcggtgaaatgcacgaacatgaaggcccccgtctatatgaagattgatcatcgtcctgtatgtcactgctctattctcatcactcaatttgaatacgaagcaacggagaagaacagctgagaaa

SEQ ID NO: 7274 - DNA, 491 bp, Gossypium hirsutum
  Clone ID: GOSHI-09MAY01-C91811_1
gttaaatctgtatacgtttattatcgtcggatttaacgaatgacccccacccccctgaagatgtaaattttcactgctttggtttcaccaaagtcaatcgtacctgcctgcacagtatacaagccttacaattgccactggctattttgccaaaagcctaatataatcagcaaactccattttctctacaaaattacaaatagcaataaactcttgaaccatttggctgccactttcatgatctgaaaacatattagcttctaagagtaatgagagaatgagggaaacaaaaaaaaaggtgttccccagagaagcttttctttttatgattacagagctccgtaaaggccccacggctgcatctgcaacgaattatcagcttcagttatggggaaaaaagcctctttcctggttatccgatcatttagtggctgcaagtttcagaactcgtcagctctggtagctttttttagacgatcagaaaatccacc

SEQ ID NO: 7275 - DNA, 454 bp, Gossypium hirsutum
  Clone ID: GOSHI-09MAY01-C91821_1
cggcttcaaaagccaaagccaaagaatgtaatcaagggaggcacacttcgcatattgtaatagagaaaaaggctatcaaaatcaagaggtgatttccgatttaaatcgctgggcacttttttattctatattttttttttctttctctttggctttattatttagttcttgttgttttttttatttttatttgaagacacgaataaaaaaggcgaagggcttaccttttcgaacgcgccatcgaagtccctagttcctttgtcgagatcggagttatagaggggattttgggggtaaaatcggcggtccttgaggtagggatccaagtggggttaactagcgaacagatcaccctccgtcgatcaccgtttggggtggtcaaatggcggctagggtcttttgaggcttggtgctaaagaggggtaaaaatcggccaaatgagcccacgcggccg

SEQ ID NO: 7276 - DNA, 746 bp, Gossypium hirsutum
  Clone ID: GOSHI-09MAY01-C91581_1
ggtctgggtatcaacctgactgcagctgatacgtgtatactttatgatagtgattggaacccacaaatggatttgcaagccatggatagatgtcatcgcattggacaaaccaaacctgttcatgtttacagacttgcaacagcacaatctgttgagtgtcgcattttgaaaagagcttatagtaagttgaagctagaacatgtggtgattggaaaagggcagttccaccaagaacggaagcagagtaatgatcttgttgaggaagaagatctacttgcactactccgggatgaagaaactgccgaggacaagatgattcagacagatatcagtgatgaggatcttgagaggattcttgatcgcagcgaccttattgctgatactagtgataaagagaaggcccaggctagtgctgatgcagttcccctcaaaggccctggttgggaggttgtgctacctactggtactggaggcatgctctcaacgctcaacagttaaatgggcatcgactacctcttttgattttttgtggtcaagctgaaatatagctctaaagaaaagctctctttttcattgaaccatggattatatgaatgtccgagggagctgattttgtaaatgccggcggtagacttacaaagtagaattagatagcatcggttattgattaattagttgtttaacaacctataactttaagcaaattgtcattttgaggtgaatttcaatttatggatttatgaatc

SEQ ID NO: 7277 - DNA, 899 bp, Gossypium hirsutum
  Clone ID: GOSHI-09MAY01-C91571_1
ggcctagcgggcatcgtcagctgcacagagctgggtatcttaagtacgccaatgacggtgtgtgacactcttgtgcttcttctgattacatgcatcgctccgaccctacgtgtgtgccaatctacactatattcattggccctaatgatgaacagcctttattgcttggttggacccactcgcatcttggcatctgggctgcagccaatcttatagctcatggcgtgtatactgggccaagacatatgagacctgtgtacaagtctatcaagttcaaggctccttccaattaccagttatgtaacctagggcgcatctttggctggattctatgatccctctgatgttacttcttgcttcccaaaggggtctcatgcaacctcacctgcctttcctcccatttgcagttctattgggtccctacatgctgcttttgtcggttcaggtgctaactgagattttgacctggcattggaagtcaccggtttggttggtgactccgattgtgtacgagggctaccgtgtgttgcaactgatgaggggattgaaactcggggctgaaatcgatgcaccagcatgggtgatgcactcaatcagaggcctggtctgttggtggatactggttcttggtatgcaactcatgagggttgcttggtttgttggttttactgctcaagctagtcaacaacaggtttcttcttctgcttctgatgctcaacactaaacacccaccagtaaaatgttaaaaacaaaattttgggttttgatagtatacgaatcaaatgaggcgtatgtacattttatcatacattcctttcaccctgaagaggactagtgaacatacttgtaagaaatgttatttacattgaatagattattataggaaaatgttagtattt

SEQ ID NO: 7278 - DNA, 1049 bp, Gossypium hirsutum
  Clone ID: GOSHI-09MAY01-C91511_1
accatctcttcataaaaccgtaccaaaaacacacacacacacacacacacacaaacacacacacacacagagggaaatcgggtcggatcccaaagatgggtgtaacaccaaaaatcgctccatccatgctttcatcggattttgctaacttagcatcagaggcaaagcgcatgcttgacttcggagctgattggcttcatatggatatcatggatgggcacttcgttccgaacctaaccattggtgctccagtcattgaaagtttaagaaagcacacaaaggcatatttggattgccaccttatggtcactaatccgattgattacgttgaacttttgggtaaagctggtgcatccggtttcacttttcatgttgaggtatcgaaagaaaactggcaagaacttatccaaaaaattaagttgaaaggcatgaggcctggtgtggcgttaaagcctggaacaccgattgaggaggtttatcctctgatcaacagcgaaaatcccgtggaaatggttcttgtgatgactgtggaacctggatttggtggacaaaagttcatgccagaaatgatggataaggtgcgcgtgctaaggaacaagtatccatctctcgatatagaggtcgatggcggattagggccttcaactattgatgtggctgcatcggctggagcaaattgcatagtggcagggagttcagtatttggagctccagagccagctacagttatatcccttatgagaaagagtgttttggaaaatcaggagaaaagttaaaaaacattgcaagatattgcatttgttggggggcggttcatgacaatatatgtgtacaatagattggtctcacttgataagttttgaaattcaataaaatgatacagatatatgaaaatttgataataaccatatattggatatgtatctgaaatttgagaaggaattgtataaaactgtgattctattttattcttattctttttcaatgattttctaataggaaagggataagatgacgaaaaatcacaatttcatacaatcttctctcat

SEQ ID NO: 7279 - DNA, 223 bp, Gossypium hirsutum
  Clone ID: GOSHI-09MAY01-C91611_1
gaaatgtatgattttgatggatgtcatgaatgttgaaggaatgacggttgatgtaatacatacaactttaaaggtatggcaatctggttcatcgaggttgttggtgttaatgagtgcggtcctgaaattttcctctgctgaaaaggaaatgttcagtcatttcaaaccagcatagttgaaccttgtatttcaaaattaacgttatcttcgaatgtattttatt

SEQ ID NO: 7280 - DNA, 751 bp, Gossypium hirsutum
  Clone ID: GOSHI-09MAY01-C91061_1
tcgcccagcgtccgctacactgaaatcgaggatagagagaatggcaaacccctcttccaaagctacagttcctggttcccgggagctgcaaacgtcatcaacttcacctggtggggctgctacctccaccaaatccgatgacggagctaacccctacgagcctcaagttatgggtttcttgaaagggtaggaatgcacgatcccaatgtagaaaactacagttccagagacttctactccaatttattatgcaacaccctcaagacccacactgtccgacgtggccacgtcacctgcttcgccaccgtcacacccgctgtcgccaattattttggtgggttacatggaggggccgttgcggcgatagcggaaagggtggcgattgcgacgactaggacggtggtcggtgaggataaggaaattttccttgttgatttggggatgtcttatctctctgctgctccgaaagatgcagagctgattgttgatggagctgtagtgaaaagtggaaggaatataactgcagtttctattgaattcaagatgaagaaaactgggaaactgctctttacttctcgtgctaccttccataattcaccccttgccaagttgtgaaattcccaaaacaatattatgcccttattatctcaatttccaactcatttttctcaataaaaatgtgcagtagacaaagtgatcctaggattccatgagatcattcttgtgcttataaatataatgttttattttc

SEQ ID NO: 7281 - DNA, 1086 bp, Gossypium hirsutum
  Clone ID: GOSHI-09MAY01-C91301_1
cagttgcgctccatgggagatgcaaagaacctgcttcagtatatgttcaattctctatggagatacaaggtgtcaattatgggaaaaagccatggaaatcaaagaaatgaaagaacaacttaaagaacttgtaggtctgttgcggcagagcgagctacgaagaaaagaagttgagaatgagctaagagagcaagctgatgccattgcattggctacggcagctacggggaactctccaaattcattgaaacatgttgctgatggcatgaacggttcattatctccaatgtctgtgccagcacagaaacagctgaaatatagcccaggtattgttaatggcccagccagagagtctgcagcattcataggtcaaacacgaaagatgttaccgcttgggcagttaccaatgaagaagttggtagctataggacaagctggcaatggcaaactgtggaggtggaaaagaagccatcaccagtggctcctacaattcaaatggaaatggcagaagccatggagactttcagaatggatcagacacagtgatgaaacaatgataagggcaaggcctcgttctcaagctctaacacatagagtctgatatttgatggtcaccagattacattggccatagtaatcttggttatatgtatgttcctaatccaaggtgcgggtgcagcctagaaaagaatgcagtgtactggaactggctgttggaacctgcatatgccgagttggtttagttgatttttttgagaatgtcaaagtataggtttgtaatattccaattttttggggggctcttattactgcatgcggagcatcttgtaaagaagtgttgatgctgccaatggggtgccaaatacgttgaagacattagcatgagattgtttcaacggtgataaaaataagtatattggatcttgcttgagctgtctctaaggttttggtgtatgttccatcaataacacacttttagggaagaaactgtttgtaagtcatagaaatttgtatgaaagctatagtctaattgtattttctttttcagttttccatttttttacccaaatttatatttcttggttc

SEQ ID NO: 7282 - DNA, 392 bp, Gossypium hirsutum
  Clone ID: GOSHI-09MAY01-C91291_1
gcagttttaacgccagccaaagctggcttctcatagggattctatatacagtcctgaatgcctttacaatgacaatgttcttgtttcggccattcccctgggaccatgagcccggggtccagaggttcatatggtagattctaacccctaaaagctaaaaacaagccaagcctcccaggttttgctaataccagtattcgtccttgggtcatagagaactaaccccctttcattcatgggttggcatctaaaattaaccctggattccttgttgtaattcttccccttcttctcgagcaaatggatatttcatgtttgatatgcagtttgtacccaaatggtatgtaatggtaaacatgttaagagttaaggctctttcagttgcctttttt

SEQ ID NO: 7283 - DNA, 779 bp, Gossypium hirsutum
  Clone ID: GOSHI-09MAY01-C91251_1
ggcctttccttgcttaccctaatctcaagtctcacatggcaactctctacactagaaacaactgtccattcattgtctggccaggaacacttactggcgctggtatacctcaattgtccaacactgggttcgagttagccccacaagcatggaatgccattactgttattgctccttggtcaggcagactctgggctcgaacccaatgctcaacctcctccggattgttcacttgtgccactgcaaactgtgggtcgggccaggttgcctgcaatggtgtaggtgctgtccctcctgcaacccttgtagagttctctctagccccaaatggaggccaagatttctatgatatcagcctagtagatggctttaacttgccgatttcagtaaccccccaaggcggctcgggtccaaactgccccataactagctgttcggcaaatgtgaatgcaatttgccccccagagctgattgttaaagcatcttgtgggaatgccatagcctgcaaaagcgcatgcctagctttcaatcagcctaaggactgttgctctggtgaatccaattcccccccgaaatgtgaaccccccaattactcgatggttttcaagaaccagggcccccaggcttatagttacgcttatgatgataaaactagcctttttccctgctctggggcccctaattcccttatccctttctgtccatgaacccttagcagcaggagtaggctttatctgttttgccttccttaataaagaaaatgttagtactgttgtttt

SEQ ID NO: 7284 - DNA, 921 bp, Gossypium hirsutum
  Clone ID: GOSHI-09MAY01-C92981_1
gtcctcaacacaatatttccattcttcaacaaatgaacaaatgctgtacaaatgatgcctactctaaggcatttgtttctttttttagtaaccaaaaaacaaatataaatatccagccgtaaatacatgtaaaaaataacccctattaatacaattaaataagactccatttgattgatttcatgcttttgtttcttttgctatctgtttcttgtttccctttctatccaaaaatttaccaaccaaatgaaacccttcgaaaattacctcgaaaatatcaaaatacaaatgctggaaaagggggagggtaaagagggttaaaaagttaagactggtgcatgctgccattgttgtatatgctcggaaatatcgtattcggatccaaggaacaaaactttttgatatttacatcgtcgacgaatcttcaggtcaaagttccacctcatgtagttgttcatctccaaaactaccattagctggaccaggcatgaacgatggtggaggttttcccggtgcttctcctgaaggtcttatttcgggtttactaggaggacttaatggatcatcaaagttgcctccactccacgagactgttcgtcgtgagtgtggtgatggataggcatcgggattcgttgtaatgacttcttgagggatgttatccatgcttgggaaccttggcctagtcactgccggcagagttctgggagattgacaaaagtcattgacactagaagtggaagtgggagtgctgggattattgttagtagcattctcttcttgtgcattttcagtaattgcctccattgattgttcgctcattgttgttgatatgggcatgggaataaagaactttgcatttgcggctgcagcaggtttaacggaggaaacagcaggtgactgaaataaattcacttggccacc

SEQ ID NO: 7285 - DNA, 540 bp, Gossypium hirsutum
  Clone ID: GOSHI-09MAY01-C92811_1
gatcacgaacgaagtgattgaataaataaaaattgatgcaacgcaaaaattcctcggaaattgaactaactaatttttacaaagcaaagcatattgaatgtacttgcatcaattcaaaaccacggatgccaagttggatccatcatgcataaatttctaggtagtaaggcggcatcgactaactcggtaacacccctctgcaccgactgaggtgggtccattacattctcctcctcttctgaaaagcactgtggtgctattccgctaatccggccgataacattctccacattggtagtaaccttgtgtttgaagtctgtagggttcatactaccccctccggcagaaggggcaaggggcatcccaagtggtcttctccaagaccatgaaagcatctcatcccggaaaaacatggctagctgataccacaaatgctgactttgtttgggcgagaccacggcctgcgctgcagcacacattgcagatacaataaggccttccacaccaaaatgagagaagaatgcttgcatgttccttgtc

SEQ ID NO: 7286 - DNA, 600 bp, Gossypium hirsutum
  Clone ID: LIB3828-018-Q1-N6-A1
gcggcccgcccttttttttttttttttttttttttttgcaacgcaaaaattcctcggaaattgaactaattaatttttacaaatatagattctttgtttctagttctaagtttctaaaacagaaaggatgtacattttactcccaaaacagaaagaatgtacttgcatcaattcaaaaccacggatgccaagttggatccatcatgcataaatttctaggtagtaaggcggcatcgactaactcagtaacacccctctgcaccgactggggggggtccattacattctcctcctcttcaaaaaagcactggggtgctattccgctaatccggccgataacattctccacattggtagtaatcttgtgcttgaagtctgtagggttcatactaccccctccggcagcaggggcaaggggcatcccaagtggtcttctccaagaccatgaaagcaactcatcacggaaaaacatggctagctgataccacaaatgctgagtttgtttgggcgagacaacagcctgcgctgcagcacacattgcagatacaataaggccttccacaccaaaatgagagaagaatgcttgcatgttccttgtca

SEQ ID NO: 7287 - DNA, 625 bp, Gossypium hirsutum
  Clone ID: GOSHI-09MAY01-C92411_1
tccgaaaaaaggattttcctttcatttcattccatttcggcctgaaatctgaaaatatgattaattttttggttttttaggttatatttacatgtaatttcaatgttaaccagttttgtgtttaaatttcgtctttgaaattttacattttcaatcgatcaactgtacataggatttgattaatgaagctaatagttgtgaattaacaaaagggaaaggttttaatgcctgctgtaatttgattgatttgaacactatatggtgtttaaggcaatcgattattttcattgttaaaatatacctctgtttgtctgttttagctcgttggatagtagctctataaatatttttttttgtcggctatgttgctgctgatgaatgttggatatgggttcgagttttctcatttaagttttacataaatttggaggtaatgttaattggactcaggtgtttttgtcagatatgtgtatgtatgcttcataagtgtgttctattatgtatttgggaatctttggaatatattaatgtcatatccatgccctagaatctgtttaacaattgcttgaaatacaagtttctgataccggtattttttgtaaaaattgaaaatccgagaacacct

SEQ ID NO: 7288 - DNA, 636 bp, Gossypium hirsutum
  Clone ID: GOSHI-09MAY01-C92421_1
gtcactttgtcttgatccctttcatggctcaagacacttgatccccatggtagttattggtcgactgttagcgcagcgtgacgtgactgttactataggtacagcaccttacaatgcaggcagtagtccaaaaatcagtggcccgggccattgaatcagggctccccatacgtttactgcaactccagtttcctggcacagaagtccggctcgccagacggggttgagaatatagacatgttgcattcaatggaggacttgatcaaattcgtcagtgccgcaaacaagatggaagaagcaatgctgaaattatttgagaagctaacaccacgccccaattgtattatttcagacataaacctgttttacacccgcaaaattgctaccaagttccaagttccaagggtatccttccacggattttgttgcttctgtcttctttgtttgcggaatatacagtcctcaaagataaatgagactgtaacctctgattctgaatacttcacggtgcctggtttgaccgacaaggtggaatttactagagtccagttgccacttgactatgatggatcctggaaggaaatttttgaaccgatgtgggaagctgaccgagcatcatacggagttgtcataaat

SEQ ID NO: 7289 - DNA, 694 bp, Gossypium hirsutum
  Clone ID: GOSHI-09MAY01-C92781_1
aaaaactaagcaccccattttccactcggttgaactctaattcccttttgcttaaacgccgatctaccaccaccatcggcgaccggtatgttcgaaccttggaaggatggcttttcagccttgagatccctttcagcttcgatttcaacaaagcgaaagaagaaatatgtggcctattcgtaaggtaaggctcctctttcactttttctttgttttctattacaatgatgaatagatcgaaggaaaatgaacccaggaaacgcaaaaaaaaaacttcaagaaagttaagcaaaaatcaccttttttgttttctttctatttggttgctatctattgtgtaaaaaaaatacattctttctgtcttgggctttatagccgatgaaacaataaagaaaaatacaaattttttccattttgtatttgctgttgcgtttgtctcttcttgcaggtatggggtatgcgtgacgcatgtacgagactgtatgttggcgtacagaggcgcgggcgtggctgtggtgccatgaggctgaaggctgctgttcggttgcggcgcaaagaagtagaaaccttagggtttttatttctaacatgttttgggccatttgggcttgtagctggtttgagctataggccattggtatgattttggactttggactttgatgatggactgttaatatttggatttttattt

SEQ ID NO: 7290 - DNA, 613 bp, Gossypium hirsutum
  Clone ID: GOSHI-09MAY01-C92641_1
gagggaaaataatatggatataagctgagaaaaacaacaaaagaaagtcattcatatatgtatacattcgactataactcttgtatggcaatgacataactttcaggttggataattgcagatggttatttgcatctgagaactatcaggcacgtcaccgtactgtctaatgaaggcttcttctccaccaaacctcaaatgctctctggatattgggatagtcatcccctttattcagaaaccgatggaaccagttgagcagaataacctgctgttgccgcaacgaaagcgtaagaattgtctgaccgagtccttcctcaattagttttttatctacagatctagaagcccttctcatccatctaaaatcttcgtaaagagcgtccaaccatgttgacagcagagagaatcggctgtctttgggcaccaagatgtttcctctaccaattgcgatacatagttgagcagtgatcctgctgatttcatgtcggtacatggtggggatcctggaatggagttctgcaagttccttttgatctgcccacaatttcacgaagtcatttgccatccttttatcgattagaatatcaactagccacaacaagttgtcagc

SEQ ID NO: 7291 - DNA, 1076 bp, Gossypium hirsutum
  Clone ID: GOSHI-09MAY01-C92661_1
gaatcgaccacttgcattgtcaactataatatatgaggtggtatttccacttttaaaattcagttacgataatttgcctaatgccacaatgaaatattgcttcctatattgttgtctgtatcctaaagattattgtatacctaaaaagagattagtggagtattggttttgtgaagggctattgaatgaatttgatagagttagtgacgctcaaatgcaaagtgacgacattatcagctctcttctgaatgcttgtttattggaaaatggtggtgaaatacatggagaagaatgtgtaaagatgcatgatatgatgcatgacatggctttatggattacaagcgaatccgaagcaacagagaataatttttttgtaaaagcaggggctcggttatgtaaagaaccaaatgttgtggcatgggaaagtgtaaaaagaatgtcaatgatggaaaataagattgaagatctcaaaggaactcccaaatgccctaaccttcgaaccttgtttcttagccagaatgagttgcaagtgatcagcgatggtttcttccaatttatgcctcgtctgactgttttggatttgtcaagaaatcttcgattacgagcgctacctaagggaatttcacaattggtttgtctagaatgtcttgacctatcatttactggtatatcagagttgccaatagggttgaaattgttgacaaaactaaaaatgttggactttagttacatgcacaatctcaaaaaaatcccacaacatttggtatctagtttttcgcagttgcaaatatttagaatgtggtggtcgggatgcggaggttatcctaatgaagacaatgttttgtacgggagtaatgaaaagcttatggaggagttgaacggtttgcaatatttgaatatactaacgatacataagaaagcacgtttcgtctagaaatattcctaagctttaatttgtttcgatgttagacccaagtattataacttttgtgattttagagaatcgaaaacgtttaatgttttatgctttgtgattttggggtttacccatttaagtgagtacaatgcttgtaatt

SEQ ID NO: 7292 - DNA, 542 bp, Gossypium hirsutum
  Clone ID: GOSHI-09MAY01-C92081_1
tgctaaacaccataaaatcatttataaacaaataaatgtcatatacaacaatatcaccaatcatcgtattatcagaatatatcatatcctagaattaatgcacatgtacatgaattttaatgtagttttcctacccatccatccactacacaccatatccaaccatacacaccatatcagaaggagtcgtagctcattgtggttaaaccatcgataaaagaaaataattgaagttatactgctaatcagattgtgtggataaaccaccagaatagtgttgtggacaaaccaccagaacaatatgcgagcaaatcgtgaaaacaccaaaattgcagatttaccgccataactctacagatctcctctatcttcgatcaactcaatctcgatgcaatgcataatgtcatttttatcaaaatagcataatcaaatacagtgcagtacaaaagtaagtcatatcatgctgtcaataattcagaataatggcatgctttattgttacgcaaatagaagatacaaaaaatagcagcatgctttcgggc

SEQ ID NO: 7293 - DNA, 764 bp, Gossypium hirsutum
  Clone ID: GOSHI-09MAY01-C92051_1
gcaaaagtaaaagcccaatccattaaaattcttcaaatcagtaaaacaagtaaattggggggtttagcggatttaatgcggaaacaccccccccattacaaggtgaagtttgcgtaataacaatttacaagtgggtttataaatgaggtttcagctacagttcgggaaaattttgcctcctcacccattgtcatcctagatcctctcatctcctctatctatacgtatataacaggcacactcaccacaaaaatgaacaaaaggaagccagtactaatactatgcaggggaaatattactgccccattctattagttagttcacaaatctaaatggaacaataaaagttctttttttctctttaggaaaaaaggggaaaaagttaaaacagacaatgttttagttgatggagcggcgcaaagcatcaggcaggcctggtagatctatacatgttcttcccctccgatgaacatttcagaattccaagctttcttcgcatccggctctttcttgtgagttcacttttcctttggtagcccaagattgtttagtcaaccaagcacatcctatagctaaaataaaacaaagaaggaaacaagttaccctgcgtataacgaatgattctgggattcaactcatgatccatttacagccatttcaggtgatgactttgatggtagcaacggacggggatcctctccacttaattgtctattgtctgaagggctatgcaggtaatctgaacagtttctaggagattcttt

SEQ ID NO: 7294 - DNA, 655 bp, Gossypium hirsutum
  Clone ID: GOSHI-09MAY01-C92371_1
actgaagaaagactataacgttctacagtaaagataaaaaattagtgaagaataaaacaaagctaacaaaagcaaaaaaaagtagagacgagcattggcatatacacaagcccgcaatactgaaagtatgtataatttaaaatgaaagagaagttgaattgcagtgaggctttattcggagtccttaaggctttcacgtgtaagccacattgccttctgaattatgaacactacatcatcctcatcttgctccaccagctgagaatctgatattgccactgattcccagtgtaacgctcctaagtatctctttatcacttccgctatcgagcgcttatcattataaatgatgtaaccttgaggcctcaagattcggtccatttctaacaacatatccacaatgctacatcccctcctttcgatatcagagaacacgggccaagcgtggatcagatcgtaagttctcgggtacgtcgagtagctttcgcaccagttatgcacacttcctaacagtcctctgtcatatactatcttgagagtgttgggtccatcttcgggcaccacattcataacccaaacctctttgttactcaacgcagctgcaaatgaacccaggtttgctttcatgtccatcacatttactaaacggtattcg

SEQ ID NO: 7295 - DNA, 1161 bp, Gossypium hirsutum
  Clone ID: GOSHI-09MAY01-C93921_1
cggacgcgtgggtcccgatataagtgaaagagtgggagtagaaaatccatggaagaggttaatcataaagctggcagttgtgtagagaagacagatggggatgacatggagagtgcaaagcccaagttaaagccgttgcactgggacaaagtacgagcgacctcggagagagctacagtgtgggaccagttaaaatcaagctcttttcaattgaatgaggacatgatggagaccctttttggctgcaattccacaaactcagtgcccagagaacctattagaagatcagttttgcctcctgttgaacgggaaaacagagtgttgaatccaaagaagtcacaaaatattgccatactgttgagagcactgagtgtaactcgagatgaggtgtcagaagctcttttagatggtaacccagaaagcttaggtgctgagcttttggagactttagtcaagatggctccatcaaaggagggcgaaataacacttctagagtacagcggggacatctcgaaactaggctctgcagaaagatttcttaagacaatacttgatatcccttttgccttcaaaagaattgaagccatgctctacagagctaactttgatacagaagtgaagtacttgaggaagtcttttcaaaccctagaggaagcaagcgaggaggtgaagaatagcaggttattcctcaaactcctagaggctgttctgaggacaggaaaccggatgaatgatggtaccaatcgtggtgatgctaaagcttttaaacttgatacccttttgaaacttgtcgatataaagggaacagatggaaaaaccacactcctacactttgtggctcaggagatcattagatctgaaggtgctggcactgactctgcaaatgggaatcttaaggaggatgattttaggaagcaaggattgcaggttgtaggtgggctgacaaaaacctcacaatgtcaaatagcagcaggaatggactcagatgtcctaagcagttacgtgtcgaagctcgaaatgggacttgagaaagtcagattggttttgcagtatgagaagccggatatgcaagggaatttcttcaactcgatgaggatgtttctaaaagatgctgaagaggagattgctaaaatcaggcatatgaagaaaagctttgttgct

SEQ ID NO: 7296 - DNA, 843 bp, Gossypium hirsutum
  Clone ID: GOSHI-09MAY01-C93821_1
gaacctaaaagcttataacttgttatttcttgttaatcatgaaaatgcttaacatttgggtggaggaagcaagaaccacacatttattcataactgctagtgtcatgcttgtaaagctttttacttcatgtacttctcgacagtacaattagtttaaatttttataatgaagtatattttgcagttgactgtcatatgtaaatgttgaaaaaaagaaaaaaaagaaggcaaagttgtgactattgtttttaattgagatgaattctaatgacattgtagtatttttcagtgatgaaggaaaggttaggaaggtgttgaaggtagagccactcccggatgggtctggtcacttttttaatcttggtgttcaaaacaaacttctaaacgtggacgaaaatgtttatatccccattacacggggagagttcactgtcctcaaatctgcattcagcttcattttgccatatcttttaggttggcacgcctttgccaattcaaccaaaccggacgatacaagtcgtgcaaataatgccaatcctagatatggaggagactacgaatggagtaggtagttcaaaattttgtcataggatgaggaggtttctaattttcgttatgctttccagattattctgaattttagcttagataaaattatctctgccttgtgttttgaagcgatgtagattgctctcttggctatcctatcatatggtattataatctgtccggactcgagagtaaatattggaaactgtgatgtgagctgtatcaattaggttttccaatttagacaagagtattcattgatcatgtaggctcaggctctctagtgaatggttt

SEQ ID NO: 7297 - DNA, 617 bp, Gossypium hirsutum
  Clone ID: GOSHI-09MAY01-C93541_1
gttccaaaacttgccatcttttttctcctgctccttcccctataagcatcttctttttcgccgcttcattaacattgtcattatttctcttttcatcgagaaaatcatgaagaggcaagggagcaatatagaggccatggctcaagcagctggaaaacatcaagttcgaaacaagagcaggagaggtttggatgccgatgagggagaagtagcgttatgtagcatgcagagtactttagtgtggtgggaggaatgggcgtacgtggatgagcaaatgtcatgggcatccatctggtcgcctttctgggatgtggattttgttgacatggcttatggtgcattgttcaacgatgttgcttgggatgatgatatttgggacttgaagaacgtcacggtcatacccaaacaatgagagttgggtgatcttctactttcaaagttgttctgggaatatcctgatttgggcttgtaacagtgtagctgtttgtcagcttttattaagttagctttgtttggatataaattggtacatcaagaactcaggtctgccttaaagatagatcacaacctctcattctgctctttactttgtctaattgtaattttataagttgcat

SEQ ID NO: 7298 - DNA, 671 bp, Gossypium hirsutum
  Clone ID: GOSHI-09MAY01-C93521_1
gacatgcctaagtttttcccagcaaaagaacacgtctttgcttcttcttcatgctttcatcagatcccatagttgatgaattagatggctgttcgggtccaaaattttccgaagaaaacatttgacgaaagctctgttcgttccctatcccatttatctgtcagttgcacaccgtggtggagtttgaacgagcagcaaattgaagagcctttaccccacaacgtaagcttgaaagtggaaactccgtctcaactctatcatcaagcgaagcatttagatcttcaactacctgaccaggaattgacaacggttcaagcaattggtcgaactcattgtgaagttggcgccattggagcgaccagttctcaacgtgatccatcagaatccgcaggtccagttgaaagttgtgagaaggataccgagggtcaagtgaagccggttttcttgggtaacaatccaaacactttattcagcccctctcatcagaattattacctctcaatggctggcactcaatatccatatgccaatgcttacttcaatgggctgtttactccttatggggccacaggctattatttctcgcccagttggggggaatgctcaactcgaattcactgctctcgatcttgcagaagatgagcccattatgtcaaccccgaacatttctt

SEQ ID NO: 7299 - DNA, 621 bp, Gossypium hirsutum
  Clone ID: LIB3825-008-Q1-K6-H6
aaacagactctttcagacaagtccttttgcaatagtattgcacaaggttagcatatatatatctttgaatcatcttaaacaagcaccccttatgcattcaaggtcttgcacttaatgtcatccattttttttaatgcagttgaccggaaaagaatggcgccaaattctcgaggaatatagacgaacacatcccgaagctcacggttcttgatcctccggatgctatacaacatttacacaatcgtcaatcgatgttacaatgtgttgcagatatgaatttatctgagacttacggaaaagttggtgttcctcgacagttggtcattaaaagagattcgtcatccattcccgatgctgtaaccaaagctgggttgatactaccccttgttgcgaaaccattggttgccgatggaagtgcaaagtcgcatgaactatcacttgcttacgatgaatactctcttcaaaaacttgaaccaccgctcgttcttcaagagtttgttaaccacggaggtgtacttttcaaggtttatatagttggagaagccataaaagtagtgaggcggctctctttacctgatgtaactaagagagaactctcgaaaatgccagtgttttccgttt

SEQ ID NO: 7300 - DNA, 620 bp, Gossypium hirsutum
  Clone ID: LIB3825-033-Q6-K6-A2
tatccccctcttcatttgcattttttttttctctttattgtaagctctgaatttctctttcacccacatgaggctgaacgacgagaacgacgaagaagaaggaccgaaaacgatgtcgcactgctccatcggacacttacaacaagagaaaagctttgttattgttggatacgctcttacttgtaagaaagttgagagctttttaaagccaaaactcgaaggtttagccagttgaccggaaaagaatggcgccaaattctagaggaatatagacgaacacatcccgaagtcacggttctcgatcctccggatgctatacaacatttacacaatcgtcaatcgatgttacaatgtgttgcagatatgaatttatctgacacttacggtaatttgtgctaaactttttgtcgacattcacatgctgatgtaaattaatattgatgttttaccatgcaggaaaagttggtgttcctcgacagttagtcattaaaagagattcgtcatccattcccgatgctgtaaccaaagctgggttgatactaccccttgttgcgaaaccattggttgccgatggaagtgcaaagtcacatgaactatcacttgcttacgatgaatactct

SEQ ID NO: 7301 - DNA, 314 bp, Gossypium hirsutum
  Clone ID: GOSHI-09MAY01-C93791_1
ctgacattgtgccaacagttgctgagggaagtccaaaagatgatttttatttggtcttaataaatggatttggcgaagttgttgtgaactatggacaaagcaagcggtagtgttacaaaagcgtttttatcttaacttgcaagcctgtttttcagttggactttctagtttgtggttttttttttttttggtttttaccaaaggaacctgaagtgttaatttgaaccctgtatctatgtagaaaaaacaaacattggtaagaagacaattatcttcgttgccatgtcgtttctatgcttagcaacatattgcag

SEQ ID NO: 7302 - DNA, 671 bp, Gossypium hirsutum
  Clone ID: GOSHI-09MAY01-C93761_1
gaatctgttccctttctttttctccttcttatggcttacaagttatagtttccagaaacaaggggaaataaaaaaaaatccattttgttttaggattttggtcttcttttatcttttgggtcatggagctaggtgattgttgtttaacatcaagtccagcaagcggagagaagcgaaagctgcataggacacagcaaaaggagaaaccattcagagggataaggatgaggaagtggggaaagtgggtcgctgaaatcagagaacccaacaagcggtccaggatttggcttggttcttacaccacccctgtagccgccgctcgtgcttatgacacagccgttttctacttgcggggtccttccgccaggctcaacttccctgacctcatattccaagaagacgagcttagggatatctcagccgcttccatacgcaagaaagcaaccgaggtgggggctaaagtcgacgctttacagacctcactccatcatgcttctgcttcatcatcggaatcatcgaaccctactcgggttttccgtaaacctgatttgaacaagtaccctgacagttctgatgaagattgagaaaacaatatgatagtgtaccataacccccaaacctacaactgtgcatactcgccacttttcttttcttttttccccacttatgtt

SEQ ID NO: 7303 - DNA, 177 bp, Gossypium hirsutum
  Clone ID: GOSHI-09MAY01-C93721_1
gggatttgcaagtgtgaatatataaggaaatgaggactttggcaatgggttatcatcatatgacatcttcattttcgtggcttgaatgtatggtttatgaatggggtgtaattagtcatttgtggtagaactgtgttggagatttggctttcaattgaaatggtctttaacttcatc

SEQ ID NO: 7304 - DNA, 598 bp, Gossypium hirsutum
  Clone ID: GOSHI-09MAY01-C93691_2
gatgaaaacaagcatttcattaacattagggtcattacctctctcatatatatgacaagacattgtgacaatataacttatacaacatatacatttcacatcaacccaaacccactaagagaaaccaactcatcactgcagaaaatgaatcgggctacttttctttcaggacttccatatgggcactactgaaacttcaagaccatttccctgcttggagagtcagttaaaatcctggagattttcatgaatgaacagtgatgttagttgctctgctcggcgattttcgtcggagcggtttttgtcatctcttttacctgttttgcttgatctttcaccttgtgagtcccattgctgttgctgttctgtccactgacctggatcttgcttttgaccatatttgcagtagtgggtcgttgcacttcgttacctaagctgtggcggtgagttcgggagcaagcttttgccttttcaacttgagtggcggggactaagtcaccgcagctcattctccgggtaagatttggtgactttggccgagtcagtggcagctgcttgggttcgaaagtaagaatgaaagatgcatgaaacatataaa

SEQ ID NO: 7305 - DNA, 564 bp, Gossypium hirsutum
  Clone ID: GOSHI-09MAY01-C93691_1
ggaatgaaacgggatacttttctttcaggacttccatatgggtactagtgaaacttcaagaccatttccctgcttggagagttagttaaaatcctgttttgcttgatctttcaccttgtgagtcccattgctgttgctgatctgtccactgacctggatcttgcttttgaccatatttgcagtagtgggtcgttgcacttcgttacctaagctgtggcggttagttcgggagcaagcttttgtcttttcaacttgagttgaggggactaagtcaccgcagctcattctccgggtaagatttggtgactttggccgagtcagtggcagcttcttgagttcgacctttggtagaggtccttcatagtagaaactaggtactggatttgctttgacaaccatgctctttctaagctccttgagggcttctgcttgctcttccttggtccttgcctcccactggcttctctcagcctccaaagctcggtatttttcctctaacttctggtaaaactccctccgcttttcagcacgttcagcacttctaaaagttggtgaagatccaac

SEQ ID NO: 7306 - DNA, 755 bp, Gossypium hirsutum
  Clone ID: GOSHI-09MAY01-C93641_1
cacaaaagttttgatccttggtttttgttcaataagtaattccgtcgttcctccttttacaattttcatggattttatcttccttgttgatatcatttttcttagagtaggtgaaaaaaaggggcggagggtaaatggggagaagaaagccaaagagcttatttaagatcaagacccaaaaaaaccatagatttagaaagcttttcacagacgctaaacatggaatctaataacctagacttgatagcatagtagggcagatcttattcactactgcaaaaccatctgcgaatggattaagactaaatcaaccacactttcttcgcagcccttcttcggttagggccctcgtcgccaccttcttccgtttctttttcctctggttgtcctctttgtttctccctctccctccaaccctttgctgcggcttcttctgctctcctttgcctttcttcttcctgtttccaagcttcctcttgctctctccttgcttcttcttctcttctcttctttgtctcccttctgctagcgccctcttcctcttctctccttcgagcatcctcttcctctctccttctggcctcctcttcctcttccgtactagcttcttcttcctcctctctcctcctggcctcttcttcaataatgtcctcttttaactcttcttcctccctctctatgctaatatctcctttaataacttcattttgtactccattagtttcttcttcttcttcttcttcttcttcttcttc

SEQ ID NO: 7307 - DNA, 555 bp, Gossypium hirsutum
  unsure (1)..(555): unsure at all n locations
  Clone ID: LIB3828-024-Q6-K6-C1
gggggggggggggggggngagaaaaaaggaggaagaagaagctaggaggagagaggagggaggaggagctaggagggaagaggaagaggaggccagaaggagagaggaagaggatgctcgtatttttttttttgaagaggaagctacnanatgggggggggggggggggagagaagaagaagcaaggagagagcatgaggaaggggggggacaggaagcagaaaggcaaaggagagcataagaagccgcagcaaagggttggagggagagggagaaacaaagaggacaaccagaggaaaaagaaacggaagaaggtggcgacgagggccctaaccgaagaagggctgcgaagaaagtgtggttgatttagtcttaatccattcgcagatggttttgcagtagtgaataagatctgccctactatgctatcaagtctaggttattagattccatgtttagcgtctgtgaaaagctttctaaatctatggtttttttgggtcttgatcttaaataagctctttggctttctttcaccatttccctccgccccttgtt

SEQ ID NO: 7308 - DNA, 671 bp, Gossypium hirsutum
  Clone ID: GOSHI-09MAY01-C93601_1
aagcaaagagctgaataggtaggttggcaaagaagggtcaaacaaaatattcaaccaggttcccatgcaaccatatccagatagcttcaaaaagtactgatttgcaattgctttatcctaattaaatatgataaaaccatttaacagagtagcttattgaagttcagcaacatgcacgcaaacagtatagaaaaagaagtcaactaattttgaaacatgttccaggttagcgatatgaagggacttttagctctcagcgatagggcaaagatgcaccaccaaaagaataccgggatgaaactgatgtagaagcagatgcagggttaacatcttgatgacgctgcatccggttatgatctactaaaacgtcagaaggatattgagaatacaatctctctgcttggttgctttctatcctccccaaatgatcagtttgaatcaggtgtgcttctcttggacgcgacaggtaagcatccaccaatggatcaccagaataacggccataatatggatccgcaatataggagtccaagatagaagcaacaacgccagatgtatttgcagttgctgcagaaactgtcggttgcatttctcgtgttgcgcccaaatcataagtccgatattctctttcagtcaagcgaagaggatcagagcgaactacatctctctgc

SEQ ID NO: 7309 - DNA, 886 bp, Gossypium hirsutum
  Clone ID: GOSHI-09MAY01-C93631_1
atcagagaattgtttataaagtacatcctgaatttacaactctaaggtcaacaaatatcaaatatataaacaagttacaacagagtcactgccgtgggtacaaaaatccccacaaagaatggtcagtaaagtctaaatcatgccaaaaaatatcccaacttccaccttgactgcatctggtatcgcttttgagtctcaaaacacctccaataactagctctaaacgaataactcttgtactgagaaactgtcgtctcctcacatcctaaaacgatcagtaaactaggaggcagagtcaattctatgagttaattgaattggttgcccaccatttagatactagcagaatcaatactgccccagctgaaccagcatcacactaatatcatcagatgagcctcgtgaaacagaaaggtcgacaagctttttacatgcagacaatggattttgcttattgatgcctacacatgaaggacgagcaatgtcaactgcttcttgattactaaccttatcccacaagccgtcagaggctaatattaagaactcgtattcaggtttgatggtaatgatctttgtctctggctcggctattacccactgtttaaggggctggtctccaatccctctggagacggctaggcaaccctgaatcctccaaacaccgcggcataagtccacatagccacccgaagtctcgattctgctcctttcatcctcccttgaaggtcggtgatcagaggtgagagcttcagcggcaccgcccctgctcataacagcacgaccggcccccgcggtggatacaataaggttcccattctggatcaaagctgtcacacaacatgtgccgccagagacgtcttccttaagaaactcagcatctgttttc

SEQ ID NO: 7310 - DNA, 764 bp, Gossypium hirsutum
  Clone ID: GOSHI-09MAY01-C93141_1
ggtaccaaaacaatgccgatatattcaccaatacggtactgattaataccatccaaaaattataatcattgctcatcaactataacttagcagttcatcaatctaaaatgaaaacataattcaaaaagaagcattggatgaaattcataacctgcatgaggctgccttcgatctttgaggaaatgttcctcagcaaaccatcatcgatatcaggaatctgtcatcggtgctcgaagatgagataacggaaaccaccagtcttacacgaatatgacttcgaacttcgcgcaagggttgttttcgatatggttcttaagatcagcatcccctttgaacttgaatgtatataaagcctgtctttgtgtcaacccaagaggatatattctgtatacttttagttcatctccacctcgaaggctttctggcctttccggtttccaaataggaacgtgtttccgaaacttgaaatgcgtgtgaacggcagcctccaaggcctttaaggtcatattccccggaccttaagaaaatagaatccatctcaaacctccctcgttctcgtacgtataaatgatatacggtttctgatcctttgttacacttgcagggacgtttcttggcatcagaatcttttcttctttctcccaaatggcggttgctatgtgaatgcacaaacggcatgacgaatgaaccgcagccatatcgagaagagccttgaaagtatcggtcggcccacgcgtccgaccacgcgtccgcccacgcggccg

SEQ ID NO: 7311 - DNA, 888 bp, Gossypium hirsutum
  Clone ID: GOSHI-09MAY01-C93111_1
ggatggcgaatatactcgatttgtacaggccattagcaagaatttgatttcagaacagcttacaaacaaactgaaactgcgtagtttttcttttgttgaaagatagcagaattaagaaagctattctaacatgcattcattcttcaggtaataggtcaaaattaactaggaagagcagcaaccagtcttctggttaacaggttgtcctcgtatctgcaccattggcggcctcgcattgtttaacgccggctgacttgccatcctgttcttaatatcaccagccatggccataaaagcttgctcaacattagtggcattttttgcactagtctccataaatggaatgccaaggtcatctgcaaaggccttggctgtttcataagaaaccacttttttagcagtaagatcacacttgtttcccaccagaagcttgttcacgttcccacttgcatagcgatcgatttcattcaaccattgcttcacattgttgaagctcgcttggtcggtaacatcataaactattataatgccatgtgcccctcggtagtagctgctagtgattgttcgaaaccgttcttgccctgcagtatcccaaatttgaagttttagagttttcccatcttgctccaccgtgcgtattttaaagtccacgccaattgtgcttatataactctccagatatgaatcatcagcaaacctcagaagaagacatgatttgccaactccagagtctccaatcagcaaaagcttgaataaatagtcatattcagcattcatgactgttggttttgcccgaaaacgagcctgccccttggtgtaaggatgggaacagttactgatgaaaaaggaaaaaaaaaagagagcttgttttgttttgtatatttagtg

SEQ ID NO: 7312 - DNA, 665 bp, Gossypium hirsutum
  Clone ID: GOSHI-09MAY01-C93131_1
aaacataaacagagtttaaaggctaaattcaaaaatagaaaatgagaaagggagcaatttaaaacacgcacaataggaaaaggaccgaaagagaaaattaccctagctgcccaaaacactgcccatcattgagccaatttgaaacaaagaataaaatgtgcagtggaatttaaaagaagtaataaatttaatttaaacacattgtaaaaattagggggtcaattgcgaaaagggtccattttgaagaaataaatggatgctgccgtttttcaaatcaaataaaccccttttctcaaatcctaaaaaataattcccctctgccattcccaaaatgtgccgcagcagcacctctgctctccatcatttccgacccacttcgctccgacaaccgcgaaatgaaagggttttccaacgacgccgcgacggtaagtcttcctccgctcccttttcttgcgttttgttttaaacaaaaccaaagaggaaaatgaaataaaaaacagtaaacaggaaagggaaaagacaaaaccccagtggtcaccttcaaaagatcgtttctttctcttttgattttttttctttaatttcggtacaaaaatttgctaaaaacctagttacagaaatcttttttttccttttttccctctttattatttcccacgcgtccg

SEQ ID NO: 7313 - DNA, 899 bp, Gossypium hirsutum
  Clone ID: GOSHI-09MAY01-C93001_1
acagataatctttgaaatgacattaattgtcgcaccataaacaaggcagcttttacagggtgaacttcgaatgttaatgtcaacaacggtttctcgtagttcaaacgattaaactacaagtttatcaaagatctagtcaccataaacagtaatactgaaatcaggaaaccatattaatatgcaacatttttacttcctagtccctactaaatctttatactaaagttcaactagaaccttcttagttccaagcccaccccaagagagttcagctaccgaaacaaaaggcaataacattaacatacactggaaagagctagcttgatattgcttattgagcaaccgagggccaaataggagaatataggctaggtagtcttcacaaagtgaggggttaacattttcccaatctccaggaaacctaccctttcttttccattaaaaatggtcttaagcttctcatcgcaaaagatctccttcctgttattgggattctggaggttttgggatttgatatagaaccagatctgcttaacagcttcagtacgggaagcctgttgagctccaaggaactgtcccaaggcaggagaaaccggggtaactttagaaatcccagtgggtcgagtctcggatcgaagagcagctggttttttagtcttgggttttgaagcggtcggctttttcggagttttctgagccacttttggagaagctgatttcgcagcagcagcagcataaaacttggctgctgtcgacggtaccgacgccgttgcagaggaagctaacagctccttgaaacctttgtaaagcctgaacatatttgatcgctagagatagtctcgcccggacgcgtgagctgtcgggtctgagtagaaatcgagattacgagggcgtctttc

SEQ ID NO: 7314 - DNA, 606 bp, Gossypium hirsutum
  unsure (1)..(606): unsure at all n locations
  Clone ID: uC-gsronu33B029e11b1
ctttatttgaaagaccgccctcgtaatctcgatttctccgtagacccgacagaaaaaggtcaaaggcgagactatctctagcgatcaaatatgttcaggctttacaaaggtttcaaggagctgttagcttcctctgcaacggcgtcggtaccgtcgacagcagccaagttttatgctgctgctgctgcgaaatcagcttctccaaaagtggctcagaaaactccgaaaaagccgaccgcttcaaaacccaagactaaaaaaccagctgctcttcgatccgagactcgacccagngggatttctaaagttacccccggtttctcctgctttgggacagttccttggagcgcaacaggtntcccgtacttaagctgtaagcagattctggtcctatatcaaatcccaaaacctccagaatcccaatacagnaagggagatcttttgcgatgagaagcttaagaccatttttaatggaaaagaaaggtaggtttcctggagattggaaaatgttacccctactttgtgagactacctgctaattctctattggccctggtgcacatagcacatcagctagcttttcaggtatgtatgttggctttgtcg

SEQ ID NO: 7315 - DNA, 976 bp, Gossypium hirsutum
  Clone ID: GOSHI-09MAY01-C93311_1
ttattttgccccccgttaaagctctcaagtctctcccttgaatccaattccttcaaagcttggttctcagacattcaaacccgtaaattttgagatcgaagaggtggaatttagcaatgtcagggctggaatcaggttcaggttctcggtatgttcatcagctactcggaccagagcttcagctgcaaccccaactgagggacaccaagcactcaccggacaaagaaggaaccgatcatggcggtaccaccaccagttctggtggtggagaaagaaggcctcgaggtcgtccagctggctctaagaataaacctaaaccaccgatcatcgtcactcgcgacagtccaaattcactaagatcccatgtgcttgaaatatcttctggttcggacatagttgactcggtagcaaactacgcacggcggcgcggtcggggtgtttgtgtgctcagtggaaccggggccgtcactaatgtcacattgcggcaaccggctgccccatccgggagtgtcataacactacatggacggttcgaggttttatctttaaccgtttatgataggttacctcttgacaaccaagaggaagagccagcagttcagcttcaaccagcagcttcacagacatctggagtgaccggcagtggtggtggagggcagttgggtgatggaggcaatggcaccaccagcaacagcggcggcgctactggaactggcggtggtggaggtgttcctttttataatttgggaagctatccttttccaggtgatgtattcgggtggagcggtactgcaacaaggcctaccttttagcctaagttttgcactctcggtaagtttgagttctttggacaaaacattaattttgaaatcatattctaaaaaaaaaaaaattttttttttgtttcccctttgtgggaattttctttttccttcaaaacatggttaatttaaaaatgaacagtagagattttatg

SEQ ID NO: 7316 - DNA, 610 bp, Gossypium hirsutum
  Clone ID: GOSHI-09MAY01-C93291_1
gttaaccgcacgaaaccttctgcaaacaaagaacgcacttcgtaacaaaaccctaatccccaaatagaatgatgttttccctaattcactctccatgaccaccactatcggcccaccttttatactcacccgccgttgatttttgcctgcgtctccggcagtcgccttttgcaggttgtggcttctgttgaaaggttggattttgaaggtctctactgtttgtcattgttgctcagccttcagtagcaacaatgggcagttcatttaatgctcaaatcttggtggaaaagctagccaagcttaataactcacaagcgagcatagagagtatcctttcagaaaataattgcagattctgtgcttctttggctatttaggacggcaaaacaagttgttgaaacttgggacagacaatttcattgctccccacgcgagcagagattggcctttctgtatcttgccaatgatattttgcagaatagcaggcgtaagggttcggaatttgttggtgaattttggaaggttcttcctaatgctcttcgtgatgtgattgaaaatggagacgagtttggcaggaatgctgcattgcgtttgatccgtatatgggaag

SEQ ID NO: 7317 - DNA, 617 bp, Gossypium hirsutum
  Clone ID: GOSHI-09MAY01-C88821_1
atctccagttttggtgtttgttgttgctgctttggtcttcgttgttatcaattcgttgaggcaaagacgacattatggactgcctgtatggccatttctcggcatgctaccgtcgttggtgtccggtcttcggtccgatttgtacgagtggatttcggacatactttgtgaacaaaatgggacgttcaggttcaaaggtccatggtttagtagtctcaattgtgtggttacggctgatcctaggaaccttgagcatcttcttaagtccaaattctctgttttccctaaagggccttattttcgtgataccgttcgagatcttctcggtgacgggatattcaacgccgacgacgagacgtggcaacgtcaaaggaaaacggcgagcatccagttccattcggcgaagtttcggcaattaacggccgagtcagtgttggaactcgtccatgcaaggctattgcccgtgttggaaaatgcagtgaaccaatcaatctccattgatcttcaagatgttcttttgagattaacgttcgataacgtttgcatgaccgccttcggcgtcgaccccgggtgtctccgtctcggattaccggaaataccgttcgccaaagcgttcg

SEQ ID NO: 7318 - DNA, 256 bp, Gossypium hirsutum
  Clone ID: GOSHI-09MAY01-C88481_1
gggggtgtttttttttttttttttttttttttttttttttttttttttttttttaaaaaaaaataatacatgtgtttatttcgctaaaaacagttacaaatggttactttcagaccccacatttcaaaggggggactcaacacaaacgataaatcaaaagaaatcttacaacattttttggaacctgaagggggcaagcaaaacaaaaattgcagtttggcgaataatacacagttatattcctactttaagcaat

SEQ ID NO: 7319 - DNA, 356 bp, Gossypium hirsutum
  Clone ID: GOSHI-09MAY01-C88791_1
ctagttctagatcgcgagtctgaaattggagacagagaaggaggtgtttgattttctgggatttccatggctgtgaaccttatgaaaggaatgctgtaaaaaagcgtagttgcatgaacttgtgatgcaggtatgctgcaaagcatttcatccataggagacagaaattcaagttttgccctactgtggaggcagcttaatgctgtccagtttggagggttttggtgaacagattcgtgtccatcaacactccattgttgctgtctcgttttgtttctgcgtcacagccttgtttggcaaaactaatgcatatttatgtacattaattcccttgtaaatggtagtacacaatccag

SEQ ID NO: 7320 - DNA, 975 bp, Gossypium hirsutum
  Clone ID: GOSHI-09MAY01-C88611_1
cccccgcgtccgggggacggtttattctcatacagcaacctcacagttcccagcccttaactcatccaaaaaggaacccaactgaaaggctgaatctttagagcttttttcttttcaagaaacaaaaaccaaaaattaaaaaaaatgcgagcttggttctcaggcggcagtagtgggaatgaggaggagcggggaaaagaagggtcatctcttttatcagattggaactcatatgctgcttcaaaagaagcagaagagggaactacaactgtgtttgggtttgatcttgagtctgctgcgaggtccgccaatgatactgtcactggtaccttcaatgttgtttcaaaaggggtgagagatctccctgggaatctccaatctgccacaagtagtgtcccttcaggaaaagcattcatctactttggtttatttctggcagctggggtctttttttgtttttattgcttttaccatgtttcttccagtcatggtgctcatgccccaaaaatttgcaatttgctttacccttggatgtggctttatcattggatcattctttgctctcagaggcccaaagaatcagttggcccacatgtcatcgaaagagaggcttccttttacattaggatttattggaagtatggtgggcaccatgtatgtttccatggtgcttcatagctacatcctttctgtgcttttttctgttgttcaggtccttgcacttgcatactatgctgtttcttacttccctggtgggtctgcttggctcggatttctcacctctgctcttacctcttcagtgtcgagatgttttgggaagtgcatggtttactttgactttgttttttcccttgtatacatctctgatagttgcgactttaatggtcttaggtacatagctttattgcttccatgttcacattattgttgttaccggtattttcctgaaagaaaaagttcgaagagtgtaccttt

SEQ ID NO: 7321 - DNA, 981 bp, Gossypium hirsutum
  Clone ID: GOSHI-09MAY01-C88121_1
cggacgcgtgggcggacgcgtgggttttgtgaaatgttaattgatatcataaaacattcattccttgccaaattcaatggtataaagcccattgaatactcagaatttcttgaagatctctgcaagcagactttaaatatgcaaactgaagacagcaagaaaaatctcacttttgttcctcttgctccagcttgtgtggtcattcgagtgctgactccagtatatgctgctcacctcccatacagccccttgctgtggagactcttttggatccttttcttgatttcagtaacctatgtcatgctcacaagcctaaaagtaatgatcgggatgggcctacagaaacatgcaacttggtatgttaataggtgtcgtaaaagaaaacaccatcttcacttcgactgattcaaaacaataaaaggtgaatatcatagagaagttctattgcattaatttggtgcttcttatcctaaatgggaaatatatgaaaaaccgctcagattattcgtgaaactggcagcaggatgtaacatatacatgagataccgcagtccacaccaaaagagcatattgtctagtcttgatactggggttttatatatacatgggtctttggtttaccctccaattttgtagagactgatgaaactgttggctttcgagagttattgctcttcatacaaaggtttaagtattactatccctccctactctgcaaatgcactccttcgggtctacttcaagtcttgttcagaaacgagtccgacttttaagagttggaataaaatggtcttatatctacctttatgctaatcacttgtggcattaccccccctatcgtccgagtcttatgtaatcccaatgataacatgttatttgaactcgggttgcgagagtatatttttctttcaatatttatccaaatagttggaggtttaaagaaaaaaaaaaaaaaaaaaaaaaaaaaaaaaaaaaaaacac

SEQ ID NO: 7322 - DNA, 642 bp, Gossypium hirsutum
  unsure (1)..(642): unsure at all n locations
  Clone ID: AI054515.1
aaacattcattccttgccaaattcaatggtataaagcccattgaatactcagaatttcttgaagatctctgcaagcagactttaaatatgcaaactgaagacagcaagaaaaatctcacttttgttcctcttgctccagcttgtgtggtcattcgagtgctgactccagtatatgctgctcacctcccatacagccccttgctgtggagactcttttggatccttttcttgatttcagtaacctatgtcatgctcacaagcctaaaagtaatgatcgggatgggcctacagaaacatgcaacttggtatgtaataggtgtcgtaaaagaaaacaccatcttcacttcgactgattcaaaacaatanaagattattcgtgaaactggcagcaggatgtaacatatacatgagataccgcagtccacaccaaaagagcatattgtctagtcttgatctgggggtttatatatcatgggtctttggntactctccaatttgtagagactgatgaaactgttggcttcgagaagtattgctcttcatacanagggttagtattactatcccttcctactctgcaatgcactnctcgcgtctacttcagtnttgtcagaacgagtcgactttagagtggnnataagg

SEQ ID NO: 7323 - DNA, 438 bp, Gossypium hirsutum
  Clone ID: uC-gsflmaxxa029g06b1
gaatacttttcttccagaaattgaacaatatcttttttttagtatgggtaatttcgtgcttttccctcacattttactgcctagcatctaatacattccaaaaccaatatcttatcacttccattgaactgtataaccgatgaacatctgtcagctttttccccatgacattattggcaattttttcccaatgtaaacaataaacaaaatgaaggaaaagggggagagtggaggaaggagcaaagaaaacaattgaacaaagtattaaccggttcttaccacacaagctggagcaagaggaacaaaagtgagatttttcttgctgtcttcagtttgcatatttaaagtctgaaaatgttggcatcgtgttactttaaaagttaataaaacaagttaaaagaagattttttaccctttcaataaaacagctaattaacg

SEQ ID NO: 7324 - DNA, 611 bp, Gossypium hirsutum
  Clone ID: GOSHI-09MAY01-C88091_1
aagagccagaatgaagaagaagaaagaagcccccatttcttcaaattttcgattttttattgattcatccacatttttttaaaaaaaaatcctccctttgattacatttcattaggctcttatagccgtttacatatttgctttttgcaattgtttgtttctgttatcttcgcctttttcttgcttctgtttttgtctgtttttttggcaggcaagatgaagtcaacgagaggagtttttgccatttcggtgcaaggcatagctggcggtggcagacctcgggcgttgtacgtgtcgaaggtgcacatgggcagtagcggcgaaaggaaaagcagggaactctagggttccctgatgttgtttaatttttgggcctaattgggccggctagggttttgaaaattggacttcgggattgggttaaaattttgtaaatggactctttttgtttatttggtttggaggcccgggaaaaattgggctactacaattatcataagtgttatcattcaatagtttgtagtttatcaccgttctgggtttttgtcttacttgttctgaatgattattaaaaaaaaatgatgcacacctatgttttgattcgcttcttc

SEQ ID NO: 7325 - DNA, 784 bp, Gossypium hirsutum
  Clone ID: GOSHI-09MAY01-C88041_1
aaaatatatacaaataaataaataaaaactcacagtccattacagtccaattacataaacaaaatagtccattaatcaatgccctacagcccaatatcaattactagcccgttaggcccagtattttgagaaaataccctagagcttcctcctcactttcgcgccgcaaccacagacgagccccaactccagactccgtacaacgcttccagcgaccacgccaagcctccgtacgccagctcagctcccgtacacacgccagcgcacctgtacctgcgaagaaagggacaaaccacaacagccaatacgtgcaagaaaacaacagacaaaaaaaattgtatattttattttcgtttttttcttttctcttcttctctcggttataaagccaaaagagaatcacttgtaatgggttatgcgaaaatacgcaacaaaaacacgaaaatagagataatatacatacaatagcaatcgaatacagagaagttgaatattcttcaaaaggtggttccctttttttatttttacgccttttttctttttattttgaaatcaataataaaagaaacataaagagagaacgaaaaggggtttacctcgctgctaggccgtcaatcctcccttgcttcgtcgaaatcgaagttaaaaggagaggattttgaggccaaagaacgatgtgccgaagccagaagcacgaaacgccttctcgatggaggtttgggtgtttgaaacggggctttagggttcggctagacgaagagggcagcaaagagtggaagaaggc

SEQ ID NO: 7326 - DNA, 433 bp, Gossypium hirsutum
  unsure (1)..(433): unsure at all n locations
  Clone ID: LIB3828-002-Q1-N6-D1
aaaacccaagttttataacatgtccaattacaaggccaataataaagcccagttacataatcaatgacccaataactaatgccctacagcccaatatcaattactagcccgttaggcccagtattcggagaaaggaaaccctagagtgtgctgatgacttacgcgccgcaaccaaagacgagccccagccccagtgccgtacgctcgtgcctncacgtcaacagccctcgtacacccacgccaagcgccaacacgaccctcgtacacgcgccaacacgacccccgtacacgcgccttgctccgtacctgcaagaagacaaacagagacaacagacgcaagaaaatagcaaaaatgggaatatttttattgtcttcttctctcggctataaaagcctgatattttttcgattggaaactccctttggatttttt

SEQ ID NO: 7327 - DNA, 690 bp, Gossypium hirsutum
  Clone ID: GOSHI-09MAY01-C88001_1
gggatatcaaagctggttctcatcctataatatagagattgatggggaaaagcactatcactatcaccatcacattttactaaatattttcatattcacaaataaattcattcctttctcttttactcttattttcttttttttacattaactcaaaaaacaaaaatggcaaagattgctttggtcattgttttgatctcaatgatcgtgctcgtttcaatccattccgtcgttggtgacaccgccgcaacgtcacctacagcatcaacagaatcaaacgctgcaaaagctgaggcaccaggtcatgagggacacgatagttccaatgaatcatggaccgactgggccaaggacaagatcagcggtattgggggcatgttcgcttcttcaccatcatcctcaccagcatcggaaccagcaccaacaccagcaagctcatcagcggaaacacccgaagtcaaggtttgagctgcacctgtagccacaagcttggtttaatatgggatatcaaagcatggttctcatcctataatatagagattgatgggaaaagcactatcactatcaccatcactactttatttttttttttattttttggatcaaacctttcatgtggtttgaacccattgttaataaaatgttataataataacaagaatgcaaatattattatcttttcaaaaacac

SEQ ID NO: 7328 - DNA, 578 bp, Gossypium hirsutum
  Clone ID: GOSHI-09MAY01-C88391_1
aaaaagaatatactatatttaaactacaattaaagttaaacgtgtataattacacaaatcaaaattcatacaaaatttgtatagttcaaaagcaacttggctattaatatttaaagatactagactgctgaggacttcaaatacaaaataaaaagaaatacagttaaaagaattaaaggcatttcagaacaaatttctctttcacatatccatctctctacatataaatctaattgatgacagcaacgttctgcattttagttgttaactctgttgcgctcaagcaattgagttgagcttccatttgttttaacacagttctcaatccactgcaagcctcaacaaagggttccgaagatgttggaaaactttcaacctcttgctgtatttcattgatcctacttgacattttctccaaggccagttttatttcgtcaatctcttgaggggggtaaagacaggctccaatctcatctatctctgctccgacaccttgacatatcttcaataatttctccaaagaacccacaaatttaccattgtcatttggggtttcaagtttaagcataccggggatt

SEQ ID NO: 7329 - DNA, 900 bp, Gossypium hirsutum
  Clone ID: GOSHI-09MAY01-C89981_1
ccttgtttctcttcaggttattgtaagcacggtaatgacagattattgatttactcttatatggagaatggaagcttggattattggttgcatgagagtgttgatgggtcgtcggttctcaaatgggacgtgagactcaagatagctcaaggagcagctcgtgggttggcatatttgcacaaggtttgcgaaccacacatagttcatagagacgtaaaatctagcaacatacttttggatgaaaaattcgaagcacatttagcagattttggtctctcgaggctacttcgcccgtacgatacccatgtcacaacagacttggtcggaacattgggttatattcctccagagtacagccagacactaaccgcaacctgcagaggtgatgtttacagttttggggttgttcttctcgagcttcttactggtagaagacccgtggaagtatgcaaaggaaaaaattgccgggatttggtgtcgtgggttttccaaatgaaattcgagaaacgagagtccgagattatagattcatcactatgggacaaggagctagaaaagcagctgttggacatgctcgaaatcgcctgcagatgtttagaccaggatccaaggcgaagacccttaatcgatgaagttgtttcatggctgaatagtatcggaaacgaggttgtttgtcaatgaacatccatcgatttgaaaaatcttagctgggagggtatacctgtaaagcagacaccgtcaaagtttcgataagttccgaaggattactgaccgaatcacttagaacaaagcattgcccatggtgtactaacgtttgagagtttgtatgcttaggctctttaagccattttcttctgtctgaaataagcaaattatagaatatctaattaccggtgttag

SEQ ID NO: 7330 - DNA, 581 bp, Gossypium hirsutum
  Clone ID: LIB3828-017-Q1-N6-G7
aaagccgaacttataacaacttagcacccaaaaaatttgatcctcaaacccatacaatcaatatccaaacaacccaaacccaaaaatgatctaattcaaaatatctcgatcccagaattaatataatcagttaattttaaaaactcaaatgaagttatgaagttttttcctctaagcaaggaaggcaatattaatatgcaatgcccattaattgattcatatttgatgctaatccgtcaaatattgaagtccggcccctctagccaagtaggcaggcaggcaggatcagcttgcttagcttactcgttgcgcaatgggtgctgctggctcgggtgccacttcggctgctgaatgcccattgccattggcaatgtggtaaggcttgtcgtcaattccccagaatttagcggtttttacatcatcctcagccattaatcgtgagaactcttcatggtcgtacttcagcgttccatttccaccaaattcaccggggaggtcctcgacgtcaaagtatgatttcatgagctccatgctgtctttgtttttagggtacacaaacttcaccttctgagctgttttcg

SEQ ID NO: 7331 - DNA, 511 bp, Gossypium hirsutum
  Clone ID: LIB3543-027-Q6-K6-H5
ggcattctataaggcaatcaagtttttcttgatccgaaacagctcagaaggtgaagtttgtgtacccctaaaaacaaatacagcatggagctcatgaaatcatactttgatgtcgaggacctccccggtgaatttggtggaaacggaacactgaagtacgaccatgaagagttctcacgattaatggctgaggatgatgtaaaaaccgctaaattctggggaattgacgacaagccttaccacattgccaatggcagtgggcattcagcagccgaagtggcacccgagccagcagcagcacccattgcgcaacgagtaagctaagcaagctgatcctgcctgcctgcctgcctacttcaatatttaacggattagcatcaaatatgaatcaattaatgggcattgcatattaacattgccttccttgcttagagcaaaaaacttcataacttcatttgagtttttaaaattaacggattatattaattctgggatcgagatattttgaatt

SEQ ID NO: 7332 - DNA, 1021 bp, Gossypium hirsutum
  Clone ID: GOSHI-09MAY01-C89561_1
cttgaaataaaatcttgctcagatccattttttcctccaacagctgtgtccttggaagtgtatgaacaacaaaaggagctaattttaattggggagagggttgtgcttgccactttggggtttgacctcaatgttcaccatccatataaacctcttgttgaggctatcaaagaaattcaaggttgctcagaatgctcttgcccaagttgcatggaattttgttaacgacgggttgaggacgtcgctctgcctccaatttaagcctcatcatattgcagctggtgctattttccttgctgccaagttcctcaaagtaaagcttccgtcagacggtgagaaggtctggtggcaagaatttgacgtcaccccacgccagttggaagaggttagcaatcaaatgctggagctttatgagcaaaaccgagttcccccgtctcagggtagtgaagtagaaggaggtggcgtcggtggtgatacatctcatcgaacaccggctaaacatccatcgggaagtgaggaaaaacaagtatcttcacggtcagtggccgaccactcatctgttgacaaacatggtatgtcaacaaggactgcccaaaatcaaaatagtgctaatggtgagatgggaggtgttattactgatcacaagttggatactgagaccaaggatggtaatcaacatcatgagctattaccgcataaggagcacatgagggaagtttcaaataaatctaggtctggaacggagcgaaccgggggagaagaccaggaaagaactggcggaagaaatgacactgcagaaaccggtgaatggagagatgagggagcatcacgtaagggtagcggtgtggttgggcgaaacttggacattcgggaaggacctgttggccagtcacccaaagaagctattaaaatagacaaaaataagttgaaggctgcgcttgagaaaagaaggaagtcgcgtggggaaacgatgaagaaaaaggatgtcatggacgaagacgatcttatcgagagggaacta

SEQ ID NO: 7333 - DNA, 581 bp, Gossypium hirsutum
  Clone ID: LIB3543-029-Q1-K6-B11
tttcccagcgtccgcccacgccgtgcggggtgggcgggagccatataaacctctagttgaggctataaagaaattcaaggttgcccagaatgctcttgctcaagttgcatggaattttgttaatgatgggctgaggacgtcgctctgcctgcaatttaagccccatcacattgcggccgggggcgttgggcttgctgccaagttcctcaaagtgaagcttccgtcagatggtgagaaggtctggtggcaagaatttgatgtcaccccacgccaattagaggaggttagtaatcaaatgctggaactttatgagcaaaatagagtacccccatctcaaggtagtgaagtagaaggaagtgctggtggtggtgcatctcatcgagccccagcaaaacatccttctggaagtgaggaaaaacaagcatcttcaaggtcagcagccgaccattcatctgcagacaatcatgggatgccttcaagaactgcacaaaatcaaagtaatgataatggcagtggagagatgggcagtgttatcaccgatcacaagatggatatggaaacccaggataatcaacatcctg

SEQ ID NO: 7334 - DNA, 822 bp, Gossypium hirsutum
  Clone ID: GOSHI-09MAY01-C89771_1
gtcgcttgcagtctcacagcttaacagtcacgcagatggagttctctcatgatgacaaccttcttttggcagtctcaagggatcgccagttctccactttcaaaatcaatagagcaggcaatgatgaaattgattacaagcttgtagctcggcaggaggctcataaaagaataatatgggcatgttcgtggaacccttttggtcatgaatcggcgacaggttctagggacaagacagtgaagatctggggtgtggagaaaacatcttcggttaagccacttttaactttaccgcagttcgacagtagtgtcactgccctgtcttgggttggtcttgaccgacaaagaaatgatgggcttcttgcagtgggaatggagagtggactccttcaaatttggagccttcatgttgaaagaagtgatgatagcattccaacaccaggtgtggccactgctcagatcatacggcttgatcctttcatgtgtcatgtttctgcagttaaccgtttggcgtggaagaaccctgagaacaatgaaaatagcgcaaacctgcagcttgcttcttgcggagctgatcattgtgtgaggttgtatgaggtaatcgttcactaatctgattaactacggtgtaccataaccatttttttcccctcaaataaaatacaactcgttttccttggaaaaaaaaaaaaaaaaaaaaaaaaaaaaaaaaaaaaaaaaaaaaaaaaaaaaaaaaaaaaaaaaaaaaaaaaaaaaaaaaaaaaaaaaaaaaaaaaaaaaggggggccgttttaaaggacccaattttacttccccgggcttg

SEQ ID NO: 7335 - DNA, 673 bp, Gossypium hirsutum
  Clone ID: GOSHI-09MAY01-C89651_1
gaagttaagaagtatattgaagagcgatctttcagaagattgttgaagcatgcttagaggaaacagcaattgtctatgttgatcatcttttaacacatgaaaaactacatcaaggaggaaactattgaacggatgagactagatgaggaggttcttatggatttcttcagggagtatattagtgtctcaaaagttgaaagcagaatccggatattgagtgatctaagagaccttgcttcagctgagagtcttgacacattcacactaatttattcaaatattcttgagcatcaacctgactgcccgcctgatgttgttgagaagcttgtttcactgcgggaaggcatcccacgcaaagatgcaaaggaggtggtgcaagaatgcaaagaaatctacgagaactcacttgttggtgggaagcctccaaggacaggatttgtgtttccaagggtcaaatgtttgacggcaactaaaggttatatatggcgtaaactcacttaaacattcccacttacccttctttttagattaggggttccttgccgccttttctaatttcttgcttcttgttcatgcatattctatgctgctattatttgtagtaataaatttgcttttttttttggttagtcaacggggatgaaaaatctcattattttgttatggaattttt

SEQ ID NO: 7336 - DNA, 602 bp, Gossypium hirsutum
  Clone ID: GOSHI-09MAY01-C89191_1
ctaagctaatagacatgtaaaaggatattcagtttatggttgtaaattgaaatttcaatatagaagatttatggtggtacaagttaagagactgtaactgcttcgttctccagcaattcagacaaaacctatctcccgaccacaacagaacaaatccaatctccacgattatttaaggccaaacctagataacgtgtaccgggtttggtgatgctgtgaaactcgtttgagatattgaagaagctagtggaatggaagaaagtgaccacgttgcgagaagatgggaggacttggacattgatatcttggtgaagatcttccagtctttcgacatcgttgagttaacttcaggcattgctacagtctgcacatcttggcgtatggcctgttgtgatcctctactttggagaacacttgatttatcgatgatgaagtcaaatttcatcaagattccattggagccttatgtatatgtggatgctcgttctgacaagacattgaatcatttgttgaagacatctttgagtctcagccaaggaaacataatgaccttgatttttcccttcaatctatatgtcagcgatgatctattgacctatact

SEQ ID NO: 7337 - DNA, 645 bp, Gossypium hirsutum
  unsure (1)..(645): unsure at all n locations
  Clone ID: LIB3543-047-Q6-K6-G7
ctttcttcttcttcttccaggagccgcacccggaggcgagctagtcagccagcagccatggacttggaattgaacttcgaaatcagccgcacagcagagttcattctaaataggaacttcacaagagttgctctgcagttcccagatgacttgttgaaacattcaacaaaagtcgttacttgtctaagaaacaagcttgggtctggtaataaagtcgggttattcgtaatggcagacacaacatttgggagttgttgtgttgatgaagtgggagcttctcatatcggtgctgattgcgttatacattatggccatacctgtctcagcccaacctcaactcttcctgcattctgtgtctttggaaaggcttcaatcagcatacctctttgtgtcgagaagttatcaagttactttgggaccaatggcaaacctattgtggttctttatgggttagagtatgcacatgcgatatcacatatcaaagaggcaatggtggaagctatgcctaagaccaaattggagctcattnttgctgatgttatgtgttccattattaatccattagaagatcataggaagtccgacgaacttggatatttgggcagctggtcatctgttaacagtttaggtgtggcaactggtact

SEQ ID NO: 7338 - DNA, 531 bp, Gossypium hirsutum
  Clone ID: LIB3543-047-Q6-K6-A7
cccatcgttcttgttcccgtaggcggacgcgtgggctatctatgatctttaagacttggactcgtaattgaactttcactacatccgcgcagaccaattcattctaacatcagtaatgcacaagagttgttttgcggttgccagatgacttgcatatacatttaacataacgtgcgacgtgggtaataaacaagctggggtctagtaataaagaactgttatacgcatggcaccacaacattagaaggtgcagtgtagatgaagaggcagcttatcatataggagctgattgcgatataattatagtcatacctgtctaaatgccaaccttgactgttcctgcgatgtgagcctttacaaaggcttcaatcatcatacctctttgtgacgagaatctgtcaagatgctttcagaccaaaggccaacctattgggggtctttatgggttagagtatgcacatgcgatatcacatatgacagaggcaatggtgggagctatgcctaataccaaaccggagctcattcttggtg

SEQ ID NO: 7339 - DNA, 610 bp, Gossypium hirsutum
  Clone ID: GOSHI-09MAY01-C89091_1
cggccgcgtgggtcaagatcgagaacggtgcgtttcacccgtgttaagctcctccgccccaccgatactctttcccttggccacgcttatcgccttatcacttctcaagaggtcatgaagttcatgagagccaagaaatatgcaaaaaccaaaaggggaatccatgaaaaaattgcagcaccatggacaagacaacctaacttcaggaggaaagtttgacgcacacatcaccaaccaagaactaaagaatgaaagacaaatctcacggacatcatctgtgaacgctgcttcaatgaggtcaaaatcatggcggccatcattacagagcatctctgaggctgtaggctaatagttttgttttcaagtttcttttcttaagtgcagattggttttaggaatggcaatgaactgcctcttttgttcaatgaaacccgaaattagggaaaatggaaattcaccaatcgaatgaaggtgataaccaaagatttcaacttgcaatcaaagctcccaaattgaaatctgtttcaagaaaaataaacatatgtatagcttctcagttcagaggaacattggatcctaaattgtattacaagtagtattcttatatgaa

SEQ ID NO: 7340 - DNA, 1065 bp, Gossypium hirsutum
  Clone ID: GOSHI-09MAY01-C89341_1
acccccgaaacaaaatataaaataaatcaataaacaaaaaatttaaaacacaaacagcccattttaatgtccttttacaagccaaatcatagcctaagcccaattacatgaccctataactaataccctagcccagttacaaaacaacccaaagctctaagactcaaacggcacagaaaccaagcccagaacattacaacttcggaaccctagggttctttctctcacgccgcagccgaactcagcccccacgcctccaacagccacgtcgacaaccccgtacgccaccctcatgcccagtgccagcacacgccccgtaccagtagttcgagtggcttcggattggtgcaacggcggaggcgttgagcgccgatgaacgccgtaatcggccatgaccgaagtgccatgaccatcgtcccttcgctcccatatttttcgcccttttccccttccggatattaatttacaatccaaacatcagataagctaagcgaagcttaacatccaacgctagacctagaattcagattcttcgaactcaagggagggagaaatggcggtctctatctccgcatcagcaactgttccttcgctgagtcgacgaagctcaactcagttatccccttattattgttcgtccaagctatctttctcatcttctcttcgatttcaacccattcgaatcgttaatagaatccgtttcctctcgctatcgtcctctgcaagttgaagcaaagaagcaaacatttaactcctttgatgatttgttggcaaattccgacaagcctgtactggttgacttttatgcaaccttggtgtggaccttgtcaattcatggttccggtcctcaacgaagtgagtgctactctgaaagataagattcaggttgtgaaaatcgacaccgagaagtacccaagcattgctgataaatacaatatacaaggattacccactttcatcatatttaaagatgggaagccccttgatcgttttgagggtgccttgggtgctgatcagctcattcaacgcattgaaacttcattgagtgtcaagcaatagccctgg

SEQ ID NO: 7341 - DNA, 998 bp, Gossypium hirsutum
  Clone ID: GOSHI-09MAY01-C89251_1
ttcttcgattctgatacactttcttggatctgttgaactgctttccctctctgcaacttcgtttccgcttcttctctctagattaaattttttgctattttctctttctatacaagaacaagttttagcaaggatgcgttctcctttttcactgaagcaggaatttctcaagaaatggatactgggtctccaaagatgtcgttcctcaaagaagaatatgagcatcttcgagagaaaaaaggttattaagttgtcagcagatgtagccatggcttctgcaagaaagggcacaacttgttggagtcgagctctcattgccgatgccgttaaagaaggcaatgctgacaaacatctagctgagaaaatattgggtccggcgtcagagaggcaaccgacgaagaaggttccactaggagcaatggcatacaacaagaggatcagaagcaagaagatcctgaaaaggagtagcgtaatccgaagaacaataaaatgtgcacctcaagcggctcgaccgagctctattgtgaaaacgttggttgggaaaagaagacaaattttgagaagtctaatccctgggggagaatttatgaatggcgtctctttgattgaggaaaccctagattatatcatatcactccgagctcaggttgatgtaatgcgaagtcttgccagtgcttcaaagctagtgaaccttaattaagagcatcaatggtaaattgctcttcagttaattatttaatatatctttataatatctttatttttttctcttgggcccaacgcttagctagctaaatgaaaggaaatgggaagctggaacagttgaggcatgcctgtacagatgaactatatatatgtaagccaatcaaggctttcatttcaatcttctacaagaccttgttgacttgcattaagtttttaatgacaagcataagtttcttatatatttgtagtttctatgcctagtttaaaaccaagtatattatgcttcatcttct

SEQ ID NO: 7342 - DNA, 564 bp, Gossypium hirsutum
  Clone ID: GOSHI-09MAY01-C84961_1
cctcgcttccgcggacgcgtgggcggacgcgtggggattaaaaaaatatccaatctttctctgctgattactaaaatggcccttcttcctctctacttcttctttctttccctttccggctcgagtggggagttctcaagtcaagcgggagtaaactacggtcagctggggaacaatctgccatctccgaagcaatcggttaagctaatccaatctctgggagccaaacgcgtcaaaatctacgatgcaaatcacgacatccttaatgctctcaatggcacaaaccttcaagtctgcatcatggtccccaacgagatcataaacaacatctccaccagtcaaaagctagctgattcctgcggcgaaaccaacgtcgtccctttttactccacgaccaaaatccggtacctccttgtcggcaatgaagtcatcagcggctcccctcaagacatctggcccaacatcgtgccggccatgcgtaaaataaagaaatcgttaaaagcccatggcctcgacaaaatcaaagtcagtacctcgatggcaatggatgtcttggaatcttcg

SEQ ID NO: 7343 - DNA, 772 bp, Gossypium hirsutum
  Clone ID: GOSHI-09MAY01-C84411_1
ctttcatacgtttgactctaaaccccctttctttaccagcaagaaaggcgaattctccctctaatgggagcttcgtcccaatttcaagtatattattattatttattgctttaaattgagcaccaccccacccttttttgttccataatctgaacgaaaagggaaaaaaagaaaaagaaaaaaaaaactgaagaaattatggaatccggtggatcaaaaagaagggtagtggttgtcggcggtgggattgccggttctatcctcgccagatctattcaattcaatgctgatcttacgattatcgacccgaaggagtatcttgagatcaaatgggcacaattaaggagcaaggtggaaccgtcatttgcggaaagagcggtggtgaactatagagatttctttaccaatggacgtattgttacgtctactgcgataaacattaccgaaaacgaagtattgactgctgatggccgtcatatcggttatgattttcctgtgattgccaccggacatagtgataatgttcccgtaactaggacggagagacttcattactatgatgcagaaaatcagaagatacaatccgctcgatctattttgatcgtcggaggaggtccgtctggtgttgaacttgccggagaaatttccacagactttcccgataagaaggttacactggttcataaaggaacaaggttgctggaatacattggaccaaaggcatctgataagggtttaagtttgctgaaatcaaagaaagtcgacataaaat

SEQ ID NO: 7344 - DNA, 750 bp, Gossypium hirsutum
  Clone ID: GOSHI-09MAY01-C84701_1
ctgatttccaaaaagtgacataagggtggggggaagaaccaaagtttgtgttttgttctctctcaagaatcaaagaacattttgtgcttttgtgagtcaagaaatgtatgcagaaactgggctatttttcccttacatgcaaaaagtttctcaagaatttcaccagtttgaagagttctgcgaaacccagaaatccaatgcttcaatgaacaacatgggtcagacctcagcaatatctgaatattacctgggaggcgaaggtgatctattcaaagctccggagcctatcattgaagaaccaattgtggaccttaatcccatgactgcagccatctcattaagcctttgtggtgaagatgttattacttcacaaggatttaaagctgctgatattgaatcaattcaaaacgagcagtttttagaggttctttatgagtgcgagaaggatctgatggcacgagcagtcatagaaacaccactatccgaggtcctggatgtaaagattcctttgaagacggatgaaaaccaaaatcatgaaaatgaagtgctctgtgatgtacagttccagaaaagtgtcagctcggattgtttaagctcaatggaagggatgcaaggggctgcaatgaagcctaattttctggatttccctggaatagattttggttctgcttatggaatgaggagagcatttagtgaaggagatatgaagactcttggcaatggtaatgtgagtgtcatccattctcctct

SEQ ID NO: 7345 - DNA, 586 bp, Gossypium hirsutum
  unsure (1)..(586): unsure at all n locations
  Clone ID: AI054810.1
tctcactctaccttttaattaggtttttctctctgtagaaaattaggcttcctttttatgagttggtggaaaaatccgtcttttttatggatcttcgtgtagacgacgcttcgatctccaagcgactcaaaccaacccagaagcaatcttgttgtttagattcttctttctgatgcaatggatattgaacaagttgaagatccaacaaccgttttgattgattctgagaaagctggtatgggcaccaaggggaagactaaaatatgctgtgacaagaagtgggaagaccatgtgaaggatgcttcaccagtgatcagggtatttctgtcagtatagcagggtctgaggatagtgacaatcccttcaagagttctacttctgcatcaatcaattcgaataatatcaatagttctaactctgatttgtcatatcctgatgatgatgaggattgtgatgactatgctgatgatgtttctgattatggtgacaatgatgattntttatatgaagatgattatgcaattatggcatcccattttgatatgtggatcttcctccgnggtanaggcttcatttcttgctgaag

SEQ ID NO: 7346 - DNA, 492 bp, Gossypium hirsutum
  unsure (1)..(492): unsure at all n locations
  Clone ID: LIB3582-027-P1-K1-B2
cactctaccttttaattaggtttttctctctgtagaaaattaggcttcctttttatgagttggtggaaaagtccgtcttttttatggatcttcgtgtagacgacgcttcgatctccaagcgactcaaaccaacccagattcttctttctgatgcaatggatattgaacaagttgaagatccaacaaccgttttgattgattctgagaaagctggtatgggcaccaaggggaagactaaaatatgctgtgacaagaagtgggaagaccatgtgaaggatgcttcagccagtgatcagggtatttctgtcagtatagcagggtctgaggatagtgacaatcccttcaagagttctacttctgcatcaatcaattcgaataatatcaatagttctaactctgatttgtcatatcctgatgatgatgaggattgtgatgactatgctgatgatgtntctgattatggtgacaatgatgatttttatatgaagatga

SEQ ID NO: 7347 - DNA, 546 bp, Gossypium hirsutum
  Clone ID: LIB3582-027-P1-K1-A4
gttcctcgtccagagtgttgttactcctgatggtacaaccagcaaagacataaccccggaaatgtttaacaaagaggatggtcgggttgtgaacgagttcaaaatgcgagtcatttacattcctgctaatccgccctctcctgttcctgaaggatctgaagaggggactcctcccagagcatcttcacaagaaaatgggaatcaaaattttgaagaggtatcaagatctttagaggatactaaagagaaatcctcagaggcgtggtctgcaatttcgaagttgacagacgagaaatcttctgctttgcaacaaaatcagaggctgcgtcaagaactggaacaaataagaaaagatattagcaaaagtcgtgccggtgagttctctctaatgtttgtgatgctagttggtcttcttggtgtcctggttggctattttgttaagagaggttaggaagaactgtattcggaaccaactcggattaaaaagtgtcggagtaagtagtaattagcggctgtttttgaaggttttgtttttatgactttttt

SEQ ID NO: 7348 - DNA, 532 bp, Gossypium hirsutum
  Clone ID: AI054732.1
aaatgtttaacaaagaggatggtcgggttgtgaacgagttcaaaatgcgagtcatttacattcctgctaatccgccctctcctgttcctgaaggatctgaagaggggactcctcccagagcatcttcacaagaaaatgggaatcaaaattttgaagaggtatcaagatctttagaggatactaaagagaaatcctcagaggtatgccatttctctgttgcttagttaatatttccaacttttttttttctatgaaagagtctttcatcttaatactaatagtactggcattttcctggttaccaccttactggttgctatctttactgagtaggctccttaacttttcctttttgtccaatctcctcgttgttttagaatatgaaatttgcatttcaattggggggggctaattggtattggtttacaatttggtttgtgcaattgcatgtttataacctaatgggaactgtggaaattttaagggcaagctaaagtgtgtcgtgataaagacaataaaatctggaaaagca

SEQ ID NO: 7349 - DNA, 476 bp, Gossypium hirsutum
  Clone ID: GOSHI-09MAY01-C85421_2
agtgtggtgtgtttgcaggagtaggggccataagtcccattggggaattcccgcatccagcctgcaatcgaagaaaagctcggctttccattgaaacttttgaaacctcagcttcctcttcaccttttggcaacagagtcttgacttgacctctcaacagagcctcaccagaaccaggagtcatcatcatgctcgtggctctactactccgctgcttacctataacagatggcggtgtttccgccgcaagcccatcaataggggagtcatctgttatatcaataagagcagacctttcgtgtggcttttccctatttccccttggaaagagggatattgctgttgttcaaagcagccaaagtctgggacctggtgactcgtcttgtagatgaaggggtctccattccgacgcgcggaaggatatttggggagctactcaaaagcaaattggacggacgcgtgggcgatagcatggg

SEQ ID NO: 7350 - DNA, 629 bp, Gossypium hirsutum
  Clone ID: LIB3582-060-P1-K1-D11
acaaaacaaagcccccttattgtccatttattctctgctagagtttcttttaaaacccctcattgctgccatctgactgccataccaccaccacatctggtggccggcaaggtgtcgaaggggcccttttctagcccccgtttggagcatccttgaagccagaaaccaaaactcaaagagccgaaagagaggagattttcaacccctcttggacccgatttcagcgacggcgacggagaggagggctccgacgacgtggctgcggggttctccggtgtcagaggcgtggaaggctggtggttggctcgaggggaggccaagggttcggcaccacgcgtggctgctgaaaaaataaagccaaaattggctataacaatgatgacccgccgatcttacaacccgccggtggtgaagggacatcagcagttgcaaaggcggcaactgacacacagaccgttgttaagtcaccagccaaaaagggtgaagaagaaaaggatggctctgcattgaaacatttgaaagctcagcttcctcttcaactttttgcaacagtcttgacttgaccacttaacaaagcctcaccagaaccagaagtcatcatcatgctcttggctctactactccgctgc

SEQ ID NO: 7351 - DNA, 646 bp, Gossypium hirsutum
  Clone ID: LIB3543-064-Q6-K6-A12
ccccgcgtccgcaaagaaaccggaagcggggttagccgaaaacaaccttttcgtttctgttcttttgttttttttgctatttactttactattgctttgtgttaatttccctctgcaggtgtcagaggcgtggaaggctggtggttggctcgaggggaggccaaggggtggggggggcgcgtggctgctgaaaaaaaaaggccaaaattggctataacaatgatgacccgccgatcttacaacccgccggtggtgaagggacatcagcagttgcaaaggcggcaactgacacacagaccgttgttaagtcaccagccaaaaagggtgaagaagaaaaggatggctctgcattgaaacatttgaaagctcagcttcctcttcaactttttgcaacagtcttgacttgaccacttaacaaagcctcaccagaaccagaagtcatcatcatgctcttggctctactactccgctgcttacctatagcagatgacggtgtttccattgcaagcccaacaataggtgagtagtcatttgttatatcaacaagagcagacctttcttgtggctgtttccgatttactaaaaaacagtgaagaagaataccatcacctgaaaggctaccgtatacccgcctgagtttggcatt

SEQ ID NO: 7352 - DNA, 816 bp, Gossypium hirsutum
  Clone ID: GOSHI-09MAY01-C85651_1
gtcgacccagccttcgcggcgcctgggtttgaatttgggtccgggcccggggatagcacattggattccccgggattaggaatttttagggatgggggaatccagaaacaaacatattcccacttacacaactggaaaggctgaaaagtccgaagtaactaaacgaaagcctaagctaagttagtatcgaatcgaaggaacgcagaggcatggcagacactgaagtgagctacgttgtgtctgatttcatcggcttcttaaacgcttctcctactgctttccatgccgtcgatgaggccaagaaacgtttgcaaaaggtagggtatgaacaagttatagagagagaggattggaaattagaagccggggaaagatacttcttcaccaggaatcattcaaccattgttgcttttgctattggtgaaaaatatgttgctggaaatggattccatgtagttggtgcgcatactgatagcccttgtctaaaattaaagcctgtttccaaggtaaaaaaagctgattatctggaggtgggtgtgcaaacgtatggaggtggcttgtggcatacatggtttgatcgcgacttgacagtcgcaggaagggtgatgataagagaagagaagggtggttccgtttcctattcacatcggctggttagaattgaagagcctataatgcgtgtccctaccctggctattcacttagacaggggtgttaatgatggattcaaggtcaacacacaaaatcatcttttacctgtcctggcaacatcagttaaggtggagctcaataaagagtttgctgaaaatggacatc

SEQ ID NO: 7353 - DNA, 474 bp, Gossypium hirsutum
  Clone ID: LIB3583-036-P1-K1-D6
cggacgcgtgggcggacgcgtgggattttttggcaggtaaaaatggaagtaaatttactctctctttttttttttgtggttattatggacttgagaagaactgtggtctgactagggattggggattttgttgttgtcagttactatataaaaagattgaaaggttatgtttttattgtgattagatgatgttttagttgttcatccactaatattttgtatgcttagatatgttgctggaaatggattccatgtagttggtgcgcatactgatagcccttgtctaaaattaaagcctgtttccaaggtaaaaaaaaaagtttgcccaataatttatgattgaaaaaaaaatgacttgtgggattgattaggtaaaaaaaagctgattatctggaggtgggtgtgcaaacgtatggaggtggcttgtggcatacatggtttgatcgcgacttgacagtcgcaggaagggtgatg

SEQ ID NO: 7354 - DNA, 647 bp, Gossypium hirsutum
  Clone ID: GOSHI-09MAY01-C85021_1
cccagcgtccgcccagcgtccgcccacgcgtccgcggacgcgtgggcgcagccttggcaaccaaatcatcgcaattttgcaatatattttcccccttttatttcccttgtccgaagaaacaacattgaaaaccctaaccctagccacatcttcacccaaatctttaattatttgcgcttttctcatcaaaattcatcaaatcatcggaatcgatggcagctaaaccgcttacaagtgaagcaatcgctctgacagaaaagaagatggacatgacattggatgatatcattaaaatgtcaaaaactagttcaaataaaaccaagaagcagcgaagggtactgaataaaggtccgaaaccttttaataatgctgctaaagcaaaggctttgaaggttcgacagtatatggattcgcggtcctctgtcagacagggagttctagctcaaagaagatcaaacatcccggggaatcaattccctttggcagctgaggctgcacgcagggctgcagttgccccagttcgaattaagaatgtaaatggcgtcagggtggctaatttgaacaaacctaggtaaataatggatcttctacaatattgatgacctctggaaagtggtcctggttaacttaattcaagttgcatgtta

SEQ ID NO: 7355 - DNA, 585 bp, Gossypium hirsutum
  unsure (1)..(585): unsure at all n locations
  Clone ID: AI054840.1
gcagccttggcacccaaatcatcgcaattttgcaatatttttcccccttttatttcccttgtccgaagaaacaacattgaaaaccctaaccctagccacatcttcacccaaatctttaattatttgcgcttttctcatcaaaattcatcaaatcatcggaatcgatggcagctaaaccgcttacaagtgaagcaattgctctgacagaaaagaagatggacatgacattggatgatatcattaaaatgtcaaaaactagttcaaataaaaccaagaagcagcgaagggtactgaataaaggtcagaaaccttttaataatgctgctaaagcaaagctttgaagggtcaacagttaggtnnnnncggtcctctgtcaacagggatttctagctannagaagatcaaacatcccggggaatcaatttcctttggcagctgaggctgcacgcagccttgcagttgccccagttcgaataagatgtanatgtgtcaaggtggctaatttgacaacctaggactgagtccacctgtcanaggagggctaaatgaggttttgagcaaacacgccacacacccgacagaaca

SEQ ID NO: 7356 - DNA, 585 bp, Gossypium hirsutum
  Clone ID: GOSHI-09MAY01-C85251_1
gtatctattagcctccccccttttgcggtccagttaacccccagaatgctcccttcgtcatttatgcgccaccatgaacggcgatctgcgcattcgaactccaaaggagtgatttttcagccttgagaccccatttggacttcgatttcaacgaagcgaaggggaaacgatggctaacttacaaggtacggggcgtgtgctggcactaggcgtgagggtggcgtacggggctgtcgacgtagaggcacgagcggcgttggggttgagacgttggcatcgtatggaggcattgtccggttgcggcgcaagcattaggctagagttttttgcttgctttaaattttgggccacttaggcctattgtatttgggctcgggcttatttgtaaatgggttgatttgggcttgtatagggtattagtttgggtcaaaaccggtaaatggactgttataggatttaagttttatttgggttttatatttattgttttgtgtttgcaatgggccgggcaaattggtctgcttacaaaagtctttaccatttatcgactacacacgatactatatgagattctatttggtacct

SEQ ID NO: 7357 - DNA, 325 bp, Gossypium hirsutum
  Clone ID: uC-gsflnu33B003g05b1
tccctgcccccttttgctgtccagttaacccccagaatgctcctttcttcatctatgcgccaccatgaacggcgatccgcgcattcgaactccaaaggagtgattttcagccttgagaccccattcggacttcgatttcaacgaagtgaaggggaaatgacagctaacttacatggtacgggcgctgtgctgacgtacgggggctgtgctggcgcaggcgtggctgttggaggatacggtggtcagggctgatgcctgtctgccgtgcgagtgctggaaagagaccctagtgtttcttgatccaaatttttcgtttcattctatg

SEQ ID NO: 7358 - DNA, 303 bp, Gossypium hirsutum
  Clone ID: uC-gsronu33B046c01b1
gccttgcgttcgaccacgcgtccgaccacgcgtacgagctcggatactgaggcttgggcgtggcgtcgatgttgaggcgctggcatcgtacggaggcattgtccggttgcggcgcaagcattaggctagggttttttgcctgctttaaattttgggccacttgggcctaattgatttgggctcgggtttgtttgtaaatgggctgatggactgttaaaggctggactattataatgttttttattgcaaataattttgatttatgcttgtacgggcctgggcttaattggcccattacaattt

SEQ ID NO: 7359 - DNA, 798 bp, Gossypium hirsutum
  Clone ID: GOSHI-09MAY01-C86901_1
cgggatggtgcttctaaagaaatatctgtctttagctgatcaagtcaaaattgtaagagcttgtcgagctctgggtttgggctcaggaggtttctatcaaccagctaccgtgatggagcgaagttgcatttgaaaatgatgtgccttggtaaaaactgggatcctgagacaggtaattatggagatctccgaccaattgaccgtgctgttccccctggtattcctcgcgaattctttcagttagttgagaaggtgataaaagattcacattccctcgtacaactaaagaccaaggctagccatgtagaacacattctcccatcgatgaaaccaaatatctgtatcgtgaatttctactcggcaagcggtcgactgggtctccatcaggataaggatgaaagtccggaaagtctacataaaggattacctgtgatatccttttccattggcgatgcagcagaatttttatacggtgaccaaagggaagtcgacaaggctgaaaaggttgaacttgaatctggtgatgtgcttgtatttggtgggagctctagactcatctttcatggcgtgactgcaattaagcaaaaaactgcacccgggagtctcttggaggaaacgaacctccgtccaggtcgtttaaatctaacttttagagagtattaaaatcctgtatagacatttgagctacaatcagtctttctaggtatgatcttttatgcaaccgactcttctaatctaaaaagaagaaatatctaaggttaaaaaaaaaaaaaaaaaaaaaaaaaaaaaaaaaaaaaa

SEQ ID NO: 7360 - DNA, 803 bp, Gossypium hirsutum
  Clone ID: GOSHI-09MAY01-C86881_1
cagcatatgggatgagtgtgtgggttacgttcatttccagctatatcctggcaggacagcttccaagacagcagtttggggtggtgcagagcaagatataccctgtttacttcagggcaatggcttatagtatagggatggctttgttggggcacttattgtggcacaggaaaagatcgatctcgagcccgccagaggtgtttcaagctattaatcttttgtcatcccttttcatggttttggtcaatggactgtatttggagcctaaagccacaaaggtgatgtttgagaggatgaaaatggagaaggaagacgggagaggaagacatgactttgtggctgagggaagcagggccactgagtcaccaagtgttgcagatccagtagctaaaaatagcaggaaaggcccctcaacggcaccagcaccagcaccagcagtagcacccactagttcagaacaggaagtgataaagcgcacaatgggtaggctgaatgtgaggctgaagaagctaaatacaaactcatcaatgcttaatattctcactttaatggctctcacctggcatcttgtttacctcggccaacgcctaaccttaaactgttgatgagatggatgctacttgatcctgtgtaaagatctagtctaggacagtttggttttgcaacacttgtttctgtggactttttagtaaaattttctgttcccaactcttttttctttatttatttttctcccccaaaagaaacccacattttaagcttcaaccccacttgttggagatcatataagaaccttctgtcgc

SEQ ID NO: 7361 - DNA, 530 bp, Gossypium hirsutum
  Clone ID: GOSHI-09MAY01-C86741_1
ccttgcagcattagtgtatgaattctaatgtgaaaagttccaaccaggagaacttgttggaggaagcaatggtgtgcatgggcagggactgctatcagcagacattcatctggtggggctgcatttctctcttaggcctaatctccagtttgctgctgttctttaggacccgacttgcttattatggctaccaaaggaacaggagtcgaacacaggtttcgtagattatatagctatgttgctcggatttgaagatgagtatcagattcggttctgctcatttttattaagtttatatatatatatatgtcatacacatgtttgagtgccatacacaagtatgagctaagatgtttgggagaaaatgagaagtcctagttccacactcccctcgattttcatgtaataagatctcttatttgtaatgcacttaaaagggtatcagccgtctaaacaaacttgagaaaatcaaaaaggacaaatgatgtactgaattatatatataatacaatttgtaaaatgttttaggg

SEQ ID NO: 7362 - DNA, 766 bp, Gossypium hirsutum
  Clone ID: GOSHI-09MAY01-C86371_1
cacgcgtccggattattagagcatccttcatattagtggtttttggttttaaatatggttagaattacattaagtgttgaaaatgaagttctgtattcttgattactacaaagaaacatgtcccttggcagaagagattgttagcagaaatgttgagattgcagtgctcaaagatcctcgaatggcagcctcgctccttcgcttgcattttcatgattgctttgttatgggatgtgatgcatcaattcttttggacaaccatggagacatcattagtgaaaagcaagcagggcctaacctcaattctgtacgtggattcaaagtcattgatgagattaagtacattttggaagaggcttgtcccctaactgtctcctgtgctgatattctagccattgctgctcgcgatgctgtcgctttgagaggaggcccaagatggaaggtttggttagggaggagagactccatgaaggcaagccttgatggtgcaaaccagttcatccctgccccaaattcctctctggagactcttatttccaacttcaacgaaccaggtctcgatttagaagatttggttgctttgtcaggtggccatacacttgggatggcaagatgtgtgagcttcagacaaagggtttatgacatcgaagaaaagcgtgtcaagttcaaaagataccggacatttcgatgaatcctacggtccatatgcccggattcaggaagggatgaagcgattgcaccgctcgatttttcaactcctgcaaag

SEQ ID NO: 7363 - DNA, 802 bp, Gossypium hirsutum
  Clone ID: GOSHI-09MAY01-C86241_1
tttcgtccacgcgtccggaccctaaatgagcgggggggggggggggtggggacaaagctcgcaatttgttagaaaaccgagcaagaaaactcttcctagacaaaattgccaggaagatcgatgctagcgtcggagaagagaggatggaaggtcttaacatgttgaggaaaatcaccaacgggtttatggaggggggcgaaggttttttttttgactgcctccctggtttacaaatttacaccttaatgatgaactcggcgggcgtgcaacatgagattttggtaaaactccacaaaataatgtctacatatactggctatccattggaattggagcttttgataacgctagcatcgatacatcctagtttggtccggacttcaaactgtagtgctaaatttttcagtgcggaggaggtgctggaacttgagaagatcaaattcgattttagaaaaggttccaaggtgatgtttgttttgaaccttgtttatcgaatcatcaagaatgaaaaggttctcatcttctgccacaatattgcccccatttatttgcttgcggaaatgtttgagaggatcttccgatggccgaagggtagagaaatattggtccttacaggagacttggagctattcgagagaggaagagtgatggacaagtttgaggaaccaggtggtgcttcaagggtacttctcgcttcaattactgcatgtgctgaaggcattagtttgacagctgcatcccgggtgattttgttggattcggaatggaacccttccaagacaaagcaggctattgcacgggc

SEQ ID NO: 7364 - DNA, 419 bp, Gossypium hirsutum
  Clone ID: GOSHI-09MAY01-C87951_1
gcttaaatcatctttagtggtgtccatcattagttggccaaccatctctttaagcttgttaccccacatattcagtctcaggtgagtatatgtggggtaacaagcttaaatcatctgagactgaatatgatttgagtgccatttacatagataccactcgtccccagggatgttatggaaccagaaaccagtcagcattgacagtgaaatcaaatggggaggtgtgcttttatgaaagatatttggacaaggatcggtggaaagagaatacagtaacttaccaaacccccatgaccacaaagtaaacatcatttgcatgattgatatatatcattggcaggttgaggtttattttcaagacatttgaacgtacgtttgattaacaagctaatgatagtcaataacaagttttttcctat

SEQ ID NO: 7365 - DNA, 187 bp, Gossypium hirsutum
  Clone ID: GOSHI-09MAY01-C87831_1
ttttttttttttttttttttcttttttacgaatcgaagcgacaaagggctgaatctcagtggatcgtggcagcaaggccactctgccacttacaataccccgtcgcgtatttaagtcgtctgcaaaggattctacccgccgctcggtgggaattacgctccagggaggcgcccgcgacttgtccgcc

SEQ ID NO: 7366 - DNA, 606 bp, Gossypium hirsutum
  Clone ID: GOSHI-09MAY01-C87411_1
cttaaaaatcgagatatgattagattttgcaaatactaaaaaaggttacttaaatgtataaatttaaacaatttaaaaaagaggcagtgtaattcaaaaagagttgacttaagtttttctaactcttatacaaagagtcgccataacatgtgtcaacaagtctattccaacgcttaataaaatgtccacccaaaagtatcggcataatgtttaagcgtagccttatgcatacctatctcaacactgaaattaaattattcattatatctatttcaaggggaactcatctccgatgtcagctcaacctccaatgtctgcaatttctggaagtctttgattcttcttttcagctttttcgttagcttcttccttctcatcttcaaacgctctaagcttgccacactctctgcagcatctattttggtagccatcaaagattcaaccgtcactctttccttctctatcttaacgcctaatccgcttgccatcatcttaaactgaaaaatttcttttgctttcaaaatgctggatttgtacagcttttctcgaacagccaacctagtatttccccgttttccttcaggaatgggtgctacatcatcccct

SEQ ID NO: 7367 - DNA, 621 bp, Gossypium hirsutum
  Clone ID: GOSHI-09MAY01-C87781_1
gatgataattgatgtttactattatttttaaaaggagacatcaaacaagtagtttccaaggaaaaccaaatagatgacaaagtaaatgttggtacccctttagtctaccgtggaaaatttaagacgaagcaacagtgacttcagtttatctgttattgcccataactttattttcataacaataagtcgagatgtcatataccgctgctagcagaaaaatcatggcctgccgtgcaaactgctacgcagcaacaagactgatcacaaccaaattcatcctgcaacagtggccacaaatatttctcattctacagtaacagctcatgttcaagtaggcaaacttccattttccaccttattctccacaacacagatttcaatacagaataaaacttcttaggtcatttcccaccaacttcagtattgaccattcacaagcaaacgcaaaaatgccaatgaagtgcccaatgccaaccatagatgcaacacgaggttttgcaatttagacatcaagatttttcccgcgcccccccccacgcggcccaaagcaactccagactaaacgtttcctcatactcaccatcattaatgcactggccacactggacgcaccgtggtatg

SEQ ID NO: 7368 - DNA, 1162 bp, Gossypium hirsutum
  Clone ID: GOSHI-09MAY01-C87671_1
ctaacatgaaatgtctggaaaaattcactcagttttcttgccgattgaacagattagccaaggaattcaatctgataaactcatctttcatcggtatggactgtgagagtttgaaaatcattgcaagacttgcacttagttgttcattattggcctttagtgctggattccctcatttctttcccaatcttcctgcttataaatatttaagaacttgtgaacgagagcactcacagcagagtaatttaagttcaatgttactgcaagatttgcttggccgtttattgcacattgaccaggaggtcagcatggatctctgtaaacttttagataatggaggatgtcccagaaaatgttcgcacctgcagtccggaaattatatattaaaaagtggacatgaggtaaagggtatactagatataataaggtatgcagtttccactgtgatgcatttgcaaattgagacaaacaggatacagaatgaggcaatcatatcccatgttacaaagaatggggtagaacttctattggaaattattaggaaatggcttcaaattccattccagatgccaaagcagttttttaatacaaggcctataattggttcagagctctttgtctacagtacagatagcagaaatcaaagtcagattactgtttcatcaggccttcacctctcattaaatctctgtcttcaactgagaaatgcctcacctgaattgtcacttggattgcctagattgtactgcgttcttcatagcagagtgtcttttcagaagcagtgccacagggaaagaaacgatgaagaaatggaatggcagtgtcaaccttgggaaagtgaggagatagtagaaatgaatgagaagttatttcagtatgtaacagagtgtgcaaagaagacgactagttatggtaagcttttcagggatgacgatatgaatgatcagatggtgtatgaatttgtgtgttttgaaccaaatgctaaagggcaaggattctcaagttgtgtacttgatgtatctcattttcctatgggttgttatagaatagaatggtatagctgttgtattgacaatgaaggatcttactggagtcttctgccgttgaactctagacctgtatttacagtgcaggaatctctctttgtttgaaaaaaaaaaaa

SEQ ID NO: 7369 - DNA, 217 bp, Gossypium hirsutum
  Clone ID: GOSHI-09MAY01-C87191_1
aaatgacagcaggaagaggaagaagaagtaagaagattagctgaggtgtgacagacccacatcgtggtggttggaaatttatcaattcagggatttcttccaatttgattgcttagaagggatggatgaatgattaaacatattcttatttttggattatttgtgttgacagcaactataatgttttaacgcctatactatacgtaattctctgtcc

SEQ ID NO: 7370 - DNA, 614 bp, Gossypium hirsutum
  Clone ID: GOSHI-09MAY01-C87091_1
gcaaccaaatagtgtctacaattaaacttggacccagatataggaattgtgaactttaactcactctccattaagtacataaattagaaatttttaattactaatgtacaaagtgaaataaaaaaaaaagtatcagattaagtgaagacaataaagttcttaatgttgcttatataacaatactaaatccaatctattttggtatacaactacatttccgaccactgtagtgtagacaacaacatcaaaaccttttttttattaagaattttttgttaaagaatctatatatatttgacttaaattcaactatcaactgttagtgattttcactgtctcggcaatagtctcctggaaattactcgtcccctgaaagtttcatcttctccgtaatttgaattaccaccagcaatactgttttcccttagggataccctattaactagccaaattcacatcttttcaagaggagatcaagtatgctatagccaagaccagaagactgcagatagagaatccattatttgtggtagctgatgaatatatcaactcaggaagataaccctgaactccaatgttataaactggggcgcccgcgtgggcggacgcgtggg

SEQ ID NO: 7371 - DNA, 781 bp, Gossypium hirsutum
  Clone ID: GOSHI-09MAY01-C87041_1
cggacgcgtgggcggacgcgtgggcggacgcgtgggcggacgcgtgggtttattgtgggaaagtgaatgtctatgataatatacctggttgtaaggcggaagcaatcttgcagtttgctgcaagcccagtctcatttccacaggaaactctagttgatcaaaggacctcgccattgtccattccatgccatgtacaggctgcaggtgataaagtaagccaacgttcaccaggggttatattgtcatcaatgcaagcagtgaaggttgcagaaaactgtcgatttcctcgagatgactgcaatgtatcttatgaagacagccttgaaggtgccactagcagaaacgcattgttgcaaagatatcttgagaaaaagaaagacaggtgaaggtttaagaacaagagaaaattggcaacatcttcatctcgtaccttagacatctacttgaatcaaatgggggatcagttctcaaatgagcagtcgaagcaaagtgaatcatattcttctacttaagctcgaccacctcacacaccgctttggtgcagctccatggaaaatcttcccaagattgccaatgtcactactcatcctgatggcaaagatatattcgaagtatgatgttggaccagcattcagcgattatagcccatgttgacatggatggcgctggagtgccgacagagtagctgtcttccttgtaagagttcgtagcattatgttaagacatgttgtatttgttgcggccattattattaatctaaatgaggaatttagttcaggtt

SEQ ID NO: 7372 - DNA, 744 bp, Gossypium hirsutum
  Clone ID: GOSHI-09MAY01-C80881_1
tttcgtccaatttgtaaagaatattttctcacacggtgtttgtgtcacttcccttaaaaccccacgatgagttccatggaaaatcgatttcaagcaatatgaactccgctgccaattacgaggaccacgaaacgatgttcgcggaatatgtgtttgtggaagtgaaggtatagccacttcttctagagacagaacggttaggttctggtctcttgattcgtcagataagcgtaagtatgtttcgtctaagatgctattagggcattcgagtttcgtcggtccgttggcttggattgcaccagatgaggagtttcctgaaggtagaattgtttccggtgggatggataccatggtttttgtttgggacttgaggactggagagaaagtgcagtcattgaagggtcaccaattgcaggttaccggtgttgtattggacggtggggatatcatttcctcatcggttgattgcactttaagacgatggaggaagggtcaacctgttgaatcctgggaggcacacaagtcagccattcaagctgtaataaagctgccttcaggagagctagtttcaggttcaactgacacaaccttgaaactttgcagaggcaagacttgtttgcacactttttctgggcatactgatactgttcggggtttggcagttatgcatggattggggattctttctgcgtctcatgatgggtccatcatgttatgggcacaaagtggtgaagtattaatggt

SEQ ID NO: 7373 - DNA, 930 bp, Gossypium hirsutum
  Clone ID: GOSHI-09MAY01-C80401_1
cttttctctgccatttttatattttcccagtttcagaagattacaatcatttcatcgtttaaattaatcaaataaagcttttcactttcactgttatttagttttagcttatagaggaggttggttgttggttgttttttttttttttgcttctttttttggggttatggcggagggttttgaaccctaccatgtcccacaacaaagcagaagagataagctaagaatcatggctcaaaatgaaccaacaacgggtgtttctctttcgggttgttcgggtttactccctttttatgacccacctttcctttcttccgatttgctaacttgcgccgctgccgccgccggaagccatgaatatcaccaccctcctccgtcgggtacaaaagatggtgtgaacttcacaggctttgttggtgggattttcaactcttctccttctttggatcacttgaactctagctccattcacgatatgaacaacaacagcgggcgactcaatttctttataccccacaaaacctgtcttatgatactaataacggtggtggtggggctggtgaagtggtggtttataagcctgaacctttatctctttcattatcttctcattatacccaccaaaactctagtatctatactgatatggttccagccatttttagtggtgctgatggttcaacatcgaactcagtcccactcggtcctttcactggctatgcttccattttgaaaggttcaaggtttttaaggccagcacaacagttattagaagagctttgtgatgttggtaagggaatttacactgaaaaagcatctctcatggagcttcctccattgcaaaattcccacactaaccctcttgacggcggagatagcggcggaagcggcggcggcggtgatggtcaaaggaaaaaatcaacacttatt

SEQ ID NO: 7374 - DNA, 664 bp, Gossypium hirsutum
  Clone ID: GOSHI-09MAY01-C80791_1
cgaaccgttgttgtcaccaactccgcctttttctttgatctcccaaaatctttgttttcagtgtcgtcctccaaaagtacctcttttgacagctttgttggttggttctaagctgggtacagataattactatcagcaatgggttctggaaacttgttcaagtcaataataaatatagtgaaagatgacaactcaaagaaagtaaaggggtcttctgcttctgaaaaatccagtggcttcaaatggaagaaacaccagcaaaaggcatccactagaccaggtctaattagtggaaattctaatactcttggcatgccaattgaggacttggcagctactaggattcaaactgcattcagggcctatagagctcgaaaacaattacgtcgattgaaaggtattgtaagattgcaggctcaaaccctaaatagttccatcaaaaagcaagctacaacaacattaaattatcttcactcgtggagcatcatacaggctcaaataaaagctcgtcgactctgtatggtaacagaaggccatcttaaacagaagaaaatagcaaatcaaataaagcttgaggcaaagctacatgacataaaagtagagtggtcttgcggccctgaaacaatggaagaaattctcacaaaaatacatcatagagaaaaat

SEQ ID NO: 7375 - DNA, 461 bp, Gossypium hirsutum
  Clone ID: LIB3585-051-P1-K1-D1
cccacgcgtccgcccacgcgtccggcaagggaacggggcgcaacatggggccccttcaatgaagtgaaatttatccttgaggcagtgctggaggtatttgccctggatcttgggtgtctgaatccctcctggagtggtgttcctcaggcaattcattcttggctttggttactcatggttaaaggggttattatatgagaagataagtgctctttggttttttatctccactctggtaatagctttgacatgcctccctttgacccttctgtaaaaaaagaagataaaaacaggtgttgtatctaggcagtagcaaacagttgtgaatgtgcaaaaatttcaaacaaatttacattaatttgagtgtcaaagggcttggagacttgtgtatgagtgaaagagcttcgaacttttccataagtgtggccttaataatgtaaatgccgtctgttgttgtttct

SEQ ID NO: 7376 - DNA, 219 bp, Gossypium hirsutum
  Clone ID: uC-gsflnu33B050c02b1
gagatagaaacaacaacagacggcatttacattattaaggccacactgatggaaaagtgtaaagctcttttcagtatacacaagttttcaagccctttgacacttaaattaatggaaatctgtttgaaatttttgcacattcacaactggttgtaactgtctactctgaaccctgttggaaaggagttgggactaaccctgttgggggagttgcctttg

SEQ ID NO: 7377 - DNA, 700 bp, Gossypium hirsutum
  Clone ID: GOSHI-09MAY01-C80391_1
gcggaatcttagcacttcagaagagagaccgctggcaaacgatggccctaataaagtttgcgaggagcttgtcaaatgcctgtccaccatattcttaagaatgagctcaaaaaaagagaaactctgctgctgacagttttccttcattatcaatgttaggctcccaagaaaatagtgatgtaacaaaatttcaggacccgtatggtatttgttcgaattttggaaggagagatattggtccttataagcatttgtttccaattgatgctggctcaatcaatctgaatcgaacttcaaattctttatttcttctgcgaaggctcaaactactccttggaagacttgccaccaccaacttgcagaacctaaatcatcaggagaagcttgccttttggataaatatctacaattcctgcatgatgaatgcattcttagaacatggagtacctgagagtccggagatggttgtggaattgatgagaaaggcaactataaatgttgggcgacgcctgctaaatgcaataactattgaacatttcattctcagattgccttaccactccaaatttaccttttaaagggtgccaagaacgatgaaatgactgccaggagcatgttcggattggaactatctgaaccattggtgacatttgccctctcatgtggaagctggtcctctctgctgtgcgagtatatactg

SEQ ID NO: 7378 - DNA, 429 bp, Gossypium hirsutum
  Clone ID: GOSHI-09MAY01-C81551_1
attttatttatagataatgtatagctagctctttggtgtggacggatttcttacaattcttttatttacatttggtgattaggtggtgtggcgtccgctggagcaagttcggctcaatcgaaaacatgggatatcgtaagctgcagcaacaacctcgtgtgtggctggagcatcactgataactctatacaaaggtccaacggtcttcagcccaattccacctctgaatagacccaccccgacgtgcgtttcattgggagatgcacatggaaagaactggacccttggttgtctctatctgattggtcattgcctatcctggtccggttggctggggttgcaagcaccggtcctgaagaagtgcccagctagactctgcgtgacgttctacacatgtttctttggtctcattcagttcctcggcattgc

SEQ ID NO: 7379 - DNA, 343 bp, Gossypium hirsutum
  Clone ID: LIB3493-038-P1-M1-G2
ggtttctacttgctgggcttagataacacatcaccaacctgtgcgtcagcaatccaaaactccgtcccagccattaccttcctaatggcagccatactacggatagagaaagttcggctaaatcgaaaagatgggatatcgaaagttgcaggaacaatcttgtgtgtggctggagcatcagtgataactctatacaaaggtccaacgatatacagcccaattccacctctgaatagacccaccccgacgttcgtttcattgggagatgcagaaggaaagaactggacccttggttgtctctatctgattggtcattgcctatcctggtctggttggctggtgt

SEQ ID NO: 7380 - DNA, 1023 bp, Gossypium hirsutum
  Clone ID: GOSHI-09MAY01-C81491_1
ataacgagaaatcattttcactgaaaactatggaggatggacctgtacttctttactcgaactctgttaatgctcgggaatctagaattccgtatccttggctggttttcaatgagaagataaaagtgaactctgttttcctgcgggattcaacagctgtctctgattcagtgcttctcctgtttggtggtagcatctcaagaggagatgttgatggacacttgaagatgttgggagggtatttagaatttttcatgcaacctgctatagctgaaaaatatctaagtttaaggagagaatttgatgagctgattcaaaataaattactgaatccccaaatagtcctacatcttcatcatgagctcatttctgcaatacggttgctggtttctgaggatcagtgtgatggaagatttgcattgggccgtccagatcttataccatcaaatatgcctgttgttccaccacaacgttctttgattccaaggacagagagtggtcccgggggtgataattctaaatgtcagctccaaacactggtcactagggcaggatatgctgcaccaatctacaagacaggtcaattggaaaacaatcagttccaagctactgttgagttcaatggtatgcaaatcatagggcagccttgcaacaccaagaagagtgcagaaaaggatgctgcagctgaggctttgcagtggctgatgagtggtacccggacaggccatgagtatatcaattatatgtcgatgtttctgaagaaaagcaagagggataactgatctacaatggctcgatctcccattgagggttttgtgtggaacaattatcccagcagatgtgttcaaaccttatttgttcttttggcatggttatattgacccttttttctgtggaaaacaaagtaattgcattgcggcatggaaagccaagactttaaccacaaatttgaaatttccggctgccatcatagtgatgcttttactaacaaaagcaggcccatggtggagctttaatctttga

SEQ ID NO: 7381 - DNA, 629 bp, Gossypium hirsutum
  Clone ID: GOSHI-09MAY01-C81701_1
cggacgcgtggggttattttccctattaggcgatcaccatggatgaacagccatctgcttcaaaatcaagaacacaaaaatccagaaagaggagcagagatggtaatcaaaatcctgggggggcaaaacatgagaatttgcaagtaaaaatccaactttttcaagaccaaccaaacaagattccacctttagttgcttatttcccatctggttacaaccctcaaactcaacaacgacaagatgaagaagaacccaattaccagaacaactcacccaaggtgccgaaggtcaaggtttttagaaacatggctcaaagaaagggtaataggcttcaagttgtgggtagccctggtgggtcaaatgtggattttgttgggtcaagttttacaggtgaggctgctgctgcacaagttcgtaggtactcacttggggttcttgataaagaggctgagactctcaaaattatccctattgctactaataagatatgtagattggaacctacagttagaactgccgagactgctaatgaaaaacttcgaattccacaaaaagtgaacttactgccaataaaatggacaagctgggagagcttactgcactttacggaacgagagagagacgaggac

SEQ ID NO: 7382 - DNA, 933 bp, Gossypium hirsutum
  Clone ID: GOSHI-09MAY01-C81651_1
cccacgcgtccgcccacgcgtccggaacgatcaggctcagatgatgaatcagccaccgcagatgatgatgaacacggttcaggtccaagttccagttcagccgcagatgatgaatcagtctcatcagttgatggcgtcggcggctcactctcaggcgatgaatcaattggcggcgtctcagtcgcagcctataaactccggtcctctgatgatgactcagccaccacctccgatgatgttgaatcgaagctacaagccttggcaatctcaggacccaaaccaaaaccctaaccctaacaagaaattctcttctttcaatcgtaataacaattggaaggggaaaaaagtttcattcggtaaagattcttggaagttcgagaataagcctttacccatgggttctgcttctgctatttcttctgttcccgctgcttccggttgttttactcaaggttacaaacctccaactcttaacgagctgcaaaatctgaatcggttaaaagccagaaaattctacggcaacaagaaggaaattcaataacagccacaaccggtttgctccttacgctccgcggaatacgacttcgtttataatccgagcgaaaaagtcaggtggaatagcatctttagtgtcgccatgtcctgtgactcccgccgttcttactacgccaatattttcaccatcgagggaggttttgggtgatatggccaaggaagaatggggtgtggatggttatgggtcgatgaaagggctgattcggcttcgatcaccataagctggtcatgatgactaggaagatgactatggtggaaatggtgggggttcgagtgacagcgatgtggaagaacatgtggaagcggagaggagattggaccatgatttacgtaggtttgagatgatatatccaagttattgaggtgattataacaatg

SEQ ID NO: 7383 - DNA, 400 bp, Gossypium hirsutum
  Clone ID: GOSHI-09MAY01-C81051_1
ggggcttgtcttcttgtttaaaaccacatgatccaacacaccttcttctccaaatggggttgctcttgaaatccctcctctctccattgaagaaactctggtttcgtctacactcagttcaaaaaaagagaagagggatatacattctgtatgaggatgtgaaatcatgcccttgtgaagatgtgcatgtgttatggtccatgctggtggaatcaaatgcatcttccatgttgcctgcaaagcaatgaaacatttcagaggctatatatccaccctttatgtatatatatatatataacatatttatgatgtttttatttctatgaaacaagggtttttttttcttgttttgaatatgtgccaaatacaccagaaatatatgaattagtacttttttttt

SEQ ID NO: 7384 - DNA, 903 bp, Gossypium hirsutum
  Clone ID: GOSHI-09MAY01-C81271_1
cggacgcgtgggttttaaagtgccatttgaattccatgctgctgccatgtctggttgcgaagtccagcgggaacaccttcaagttcgaccaggagaggctctagctgtaaattttgctttcatgcttcaccacatgcctgatgagagtgtcagcactgagaatcatcgtgaccgactcttgaggctagttaagagcctgtctccaaaggttgtaacccttgtggaacaggaatctaacacaaatactgctccattcttcgcaaggttcctggagacactaaactattacacagccatgtttgaatcaattgatgtgactctcccccgggaacataaagagcggatcgatgttgagcagcaatgcctggcaagggatgtcgttaacatcatagcttgtgagggggctgagagagttgaacgacatgaactcttggggaagtggaggtcaaggttcagaatggcagggttcactccttatcctctaagctccttggttaatgccaccataaaaaccctacttgagaactactgcgatagatataggcttgaagagagagatggggctctgtaccttggttggatgaatagggatttggttgcttcctgcgcatggaagtgatttacatttttgtccttttactctctttagtattgtcctcgcacatttgagaacaggggacttgaactgagggcctcttagtaccctgttcttgtaccattaatcaaggcctctggcatgcatggaagtgacaatgatgcttctattgttagtgttaattttaggagactgggccctacctttggtgcatagtcctctttcccttagctgccaagagcttataagcggggtttttttttaaccatgtacttgttataaattacaggttatgcacctttgcgagg

SEQ ID NO: 7385 - DNA, 740 bp, Gossypium hirsutum
  Clone ID: GOSHI-09MAY01-C82161_1
cttttagagctgacttcatcatatgaggcaaagctgaatgaggcattacaggacctgttgaagcatttttagatggagctaataatgagacctggccctcaataaagaaacttctccggcgtgaaactgtatcagctgtctctggactctctgatgccctctctggttttgacatggatgaaaaaaccaaggagaagatgctaacaagtttggaggatcatgcaagaggtgtggttgaagcaaaagctagagaagaagctggaagggcactgatccgtatgaaggaccggttttcgacgttgtttagtcacgattctgattcaatgccacgggtttggacaggcaaagaagatatccgagccatcactaaaacagctcgctctgcttccttgaagttgctatctgttatggctgcaatccggttggatgataatgctgataatattgagaacacactaacttctgccttggtggacacaaaaaataatgctgctgtaactgataggagcattacaacatttgatccactagcctcaagcacttgggagcaggttccaccagctaagacattgatcacacctgttcagtgcaagtctttgtggcgggcaattcagggctgagaccgagtacactgtcactcaggccatttctgctcaggaagcaaacaagcgtaccaacaactggctgccacctccatgggcaattggtgccttgatagtcttgggatttaatgaatttat

SEQ ID NO: 7386 - DNA, 549 bp, Gossypium hirsutum
  Clone ID: GOSHI-09MAY01-C82121_1
cccactgctacctctccacgcgtccgcccacgcgtccgcttttctctgcccgtttttgtttctcttacctatcaattgtcccttttttgcttgtaatttatcttcatggttgccatggtttctgcatatttcttcgtgtttctagctctctttggcatggttgcatctgaccctgatcatctccaggatctctgtgtagctaacaaagctgcaggaataaaggtgaatggatttccttgcaaggaggaagcgaatgttacggaagctgattttttctttagcggtttagccaatccaggagtcatcaacaattcagtgggatcagtggtaacaggagccaatgtggagaaaattccagggctcaacacccttggagtgtcacttgctcgcattgactatgaacctggtggccttaacccgccccacactcacccacgtgccactgagatcatctttgttctcgatggtgaattggatgttgggttcatcactacatcaaacaagttgatctccaaatccgtcaagaaaggcgacatatttgtcttcccc

SEQ ID NO: 7387 - DNA, 768 bp, Gossypium hirsutum
  Clone ID: GOSHI-09MAY01-C82061_1
cggacgcgtgggaacagagcctcaaacctgaaatctttaattataaatatataaagcctgtgtatcccaaatctaagactgctttgtctgacatgaaaacattatagaacgataataaagtattcaatgctacatcaaggtttcactcacaatggcagcttgtttcaattttcaacttccatttccttctcttctcataaccccatcttctcatcaaagccacaacaatgggataagctggaaaacccatgaatttagacctagaagaagcttaaaaatatgtgccttttctattaaaagacccaggagtgggagaaaggtaaagagtaatgaggaactgtgtaatgatataagggaatttgtagctgaggttgggcttccagagggtcatgttccttccttcaaagaactttctcagcatggaaggaatgatctggctaacattgttcgaaggagaggatacaagctcatccaaaagcttctttcgagctcaaccagaacccagatggacttatggcagatacaagcgtagttcaaaagcacaatgccaccagtgattcggaagatacttttgaaggtcaatatctaaagagggagaatgcaatcgaagttgttcctttgtcaaccaaagttttcaacatggagaataagttggttgcagaggatattgattccgataaccataattgcatgagggaaactacagtgtatacttcaggagatcaaatggaaatggaaagcactgtgcttgaagatgtttccgcatca

SEQ ID NO: 7388 - DNA, 742 bp, Gossypium hirsutum
  Clone ID: GOSHI-09MAY01-C82001_1
cccacgcgtccgcccacgcgtccgctttgtacttcatcactcacactccattttcaccaaatccaagcccaatttcaatttcgattgaaacccagatttttaataccccatatttattcatgggcggtaattttccttcttcttcaagtttatggctggctgctaatccgagtaagagatggggcgagcttttctttctttgttacactccattttggctcactctctgtttgggcatcgttgttcctttcaaactttacgagaactttacagaattggaatatttgctcctaggcttggtgtctgcaattccttcatttttgataccaatgctagttgttgggaaggctgacagcagcttgcattggaaggaccgttattgggttaaggccagtgtctggattgtaatatttagttacgtcgggaattatttttggacccattatttcttcacggttttaggagcttcttataccttcccatcttggaaaatgaacgatgtaccacacacgactttccttctcactcacgttgtcttcctgttttaccatgttacatcaaacatgacacttcgcagattaaggcactctattgctagcttgcccgagaatattcagttggctactgaggtggcatggatcttggccctttcttactccctttcacttcccgtgtcttctgctcgctcttacttcccgtactatgattttgtggatcgtgcgtctatgtataaagtgggatt

SEQ ID NO: 7389 - DNA, 902 bp, Gossypium hirsutum
  Clone ID: GOSHI-09MAY01-C82351_2
gcggccgccctttttttttttttttttttttttttttttttttttttttttttttttttttaaaataaaacaccacacttctttttcctgatttttttaattccatgcaaaaaaggggaaaaaaaaaagaagcagaacatatttttggttactataccccaaaacgtctaatctaagaatctgtccaggcagcaaaaacaggcatctgtggcatggaaattgcaggcctgagctgagccgaaggaatccaagaattcacagtatttggtgaagtagtgaacaacttggatgatggtggaggaggcattgcaaacgccataggtaaactgcttctctctgggctaccttctcttgagctgctcaaactagtcaccaatgaagaagcattggagaagtgagtagtccctatcttgctggaatcatccacctctctgtggccaaccagggttgctggtgccaatgagaaagcctgagccttaaaattctcaatgatgttgggctgttgctgttcagatgactgataaaggatcattttccagtctggttgacctccattgttctttggtgatatgttaatgttggtttcagcattggtgttaccagttaaaaggttgtcattaccaccaggtccgacatctttgtttcgcctagcgaattctccagcaagaagggtattgctagccatgattctttccacatcgtaccttgttatgtcgaagttagtcactacttcaccaaatactgtgaattcttggattccttcggctcagctcaggcctgcaatttccatgccacagatgcctgtttttgctgcctggacagattcttagattagacgtttttggttactataccccaaaacccacgcgtccgcccacgcgtccgcggacgcgtgggtcgac

SEQ ID NO: 7390 - DNA, 518 bp, Gossypium hirsutum
  Clone ID: GOSHI-09MAY01-C82351_1
cggacgcgtgggcggacgcgtgggttttggggtatagtaaccaaaaacgtctaatctaagaatctgtccaggcagcaaaaacaggcatctgtggcatggaaattgcaggcctgtgctgagccgaaggaatccaagaattcacagtatttggtgaagtagtgactaacttcgacataacaaggtacgatgtggaaagaatcatggctagcaatacccttcttgctggagaattcgctaggcgaaacaaagatgtcggacctggtggtaatgacaaccttttaactggtaacaccaatgctgaaaccaacattaacatatcaccaaagaacaatggaggtcaaccagactggaaaatgatcctttatcagtcatctgaacagcatcagcccaccatcattgagaattttaaggctcaggctttctcattggccccagaaaccatgggtggcctccgtgaggtggctgattcctgctagattgggtctactcacttgtgcaatgcttcttcattggtgact

SEQ ID NO: 7391 - DNA, 776 bp, Gossypium hirsutum
  Clone ID: GOSHI-09MAY01-C82301_1
agagttataatgatgtgtgttttattgagggtaaagatttaatgaggatcattacataattgacccaaataattgggcatttggcatggcatccacttcttaatatcttcattgggagacgcgacaactcatgaatttctcgtgaatggcattagtgtgttaaaattccccccaaggatgccaacaaattgatgaccagtttcccccacattttgtccttacaagacgaggcagtgctgagtcaggcacatgccaacaagccccacatctcaaacttaccattttgaaccaaaattcttaaattttcagggggaaaagcccataaatttcacagatctaaactcacacaccaaactaactgaaacaaaagaattttacagcctaaaaaacagcaacagcaacatcaacagcaacatcaacagtcaacaccagcaacaacaagccatatcaatgccctctaactagacttgtatgataatacaacaaggtggataagcaacaagcaaagcgatagaaccggcagatgctgggataagttaaaggtaaccgacgacgactgatcatatatttcagaaagaatcgaccggagcggccttcccccgactgtttaacgtgcatgacgaacggctctaaccatctttgatcatcatcatcgctcgtaaaacccctgaaaccgtgccaatgtaacaggtccgattcttggctagcaaccatgtgagacccatcagctggcaatctttaacttatcccagcatctgccagttctatcgctttgc

SEQ ID NO: 7392 - DNA, 659 bp, Gossypium hirsutum
  Clone ID: GOSHI-09MAY01-C82231_1
caagtctctccttttcttcctcttcttcttcctcatattgaactccgctcccatccaacgtaggcaagaaatctttttttcagaaatgttttcatgtgctccacatttcacttctttgaatttctctgaaatgttctaccctaagattataagctctatttgttcgccaaaggcggattttaaagtatttgcttctgcatcgaatgttaatgaggcgcccaattatataccagctgctcctattcttctccctgatggtgatggagtttggaagcagattccgggaggagttacagctgctaagggatttaaagcttcgggcttatatggtggattgcgggccaaaggagaaaaacctgatcttgcgcttgtcacctgtgacgttgatgccaatgttgcaggggcatttactacaaatgttgttgcagcagcaccggtggtgtattgccaaaatgtgttgaataatacgaaaacagcacgcgccgtgttaataaatgctggacaggccaatgctgcaacgggtgatgctggttaccaggatgtgatagaatgtgcaaatgcccttgctacgatcctgcaaataaagccagaggaagtattgattgaatccactggtgtgattggtcagagaataaagaagaagcacttttgagttccct

SEQ ID NO: 7393 - DNA, 695 bp, Gossypium hirsutum
  Clone ID: GOSHI-09MAY01-C83841_1
caaagttgcagctgctgtatcctctagggttgggtctgggtgggcctttctgcttccgcaatttttgtaggagaggcttccaaacgatcccgttgtccggcggcgcctcccctgccaagatgtcaatggagttctattcgttcgggccatataagatagaccccacggaagtcttctacaccacccccctttcctatgccatggtcaacctccgtcctgttgttcctggtcatgtacttgtctgcccaaggcgtgaagttaagcggtttgctgatctcactgttgaagagacccaagatttatggctaacagctcagaagattggtggaagacttgagtgcttccataaggcgtcatcactcacttttaccatccaagatgggccaaaggcagggcagacagttccccatgttcacattcatatacttccaaggaaagatggtgactttgagaggaatgatgaaatttatgatgaaatagatgtgaaagagaacgaactgaaggaaaagctcaacttagataaagaaaggaaggacagaagccgggaagagatgtgtaaagaagctgaggaatacaggtctctcttcatcttgcaatcttaagtcttgactgttgcgttgcatatgtaccaactgcagttttcattcacgtgcctggatgaagaatattatgtagttagtttatattcagtatgt

SEQ ID NO: 7394 - DNA, 548 bp, Gossypium hirsutum
  Clone ID: GOSHI-09MAY01-C83871_1
ggatcgtggccaatgacgcttcgggcactcagcagcccggccctgacgcctcattatgtattgcgtagtctaatagctcaatggtgtgaggcaaatggggttgaaccaccctagagacccagcactcgtcccagtaaaactacatctgcctgctcaccagctgagcgtactaagattgaaattctcctccgtaagctcgcatccagcagtcctgaagaccagagaatggctgcaggtgaaatccgtcttcttgccaaacgcattgcagataaccgtgtggccattgctgaagctggggccatacctctccttgtgagccttctttcaacacctgattcacgcatccaagaacatgctgttacagcacttcttaacctttctatttgtgaagataacaaagcatgttatcatatcctctggggcagttcctggtatagtccaggtgcttaagatggggtgcatggtagcttgagaggatgcagcagccactcttttagcctttcagtagttgatgaaaataggtgacaattgttgcctcggagcaatcc

SEQ ID NO: 7395 - DNA, 445 bp, Gossypium hirsutum
  unsure (1)..(445): unsure at all n locations
  Clone ID: LIB3493-037-P1-M1-E9
ggcattgaaccgcccaaaaggccgagtagttgggagcgcagtaaaaccaaatttggctgctcgcctgctgaacttaccaagattcaaattctcctctgtaagctctcatccagcaatcctgaagaccaaagaatggctgcaggtgaaatccgtcttcttgctaaacgcaatgcagataaccgtgtagccattgctgaagcgggggctatacctctccttgtaaaaatcctttcaacacctgactcacgcacccaagaacatgctgtgacagcacttcttaacctttctatttgtgaagataacaaaggaagtatcatatcctctggtgcagttcctggtattggccaggtgcttaagaaggggagcatggaagctagagaaaatgcancatccaccggtttcagcctttcagtagtggatgaaaaataagtggccattggcgcct

SEQ ID NO: 7396 - DNA, 707 bp, Gossypium hirsutum
  Clone ID: GOSHI-09MAY01-C83471_1
tcgacccacgcgtgcgaagagcttatttttggctttatttctcagacgaagtcatcagtctcacaaaggaagaaatctcagcttgtgggttacgtctaaacgaagaaaacaatgcctaacattgtttcagaggcaggactgcaaactagagctggccaatggtgggatagtattcccttccttacatcagccgtggttattgtttgcggggttatttacctcatttgcattttggttggatatgactccttttatgaagtatgcttcttgccagaggctattgtatcgcattttcaagtttaccggatatacacttccattatttttcatggttcgctgttacatgttttgttcaacatgttggctttggttcctttgggctctgaactggagagaatcatgggatctattcgattgttatacacaataattttgctagcaacaagcaatgctatatttcatctcatcattgcattggtggtagcccataatcctttccatccttttgagcatctcatgaatgagtgtgcaataggcttctctggaatcttattttctatgattgttatagagacaagtctgagcggagttcagtctaggagtgtgtttggtcttttcaatgttcctgctaaatggtatgcattcatcttattggtggtattccagctgcttatgacaaatgtctcgttacttggacacctctgtga

SEQ ID NO: 7397 - DNA, 668 bp, Gossypium hirsutum
  Clone ID: GOSHI-09MAY01-C83181_1
cttcaattttcgatctctctttttgtgtgtgtgggatcatccaaaaaccctctaaatttcctcagtgagaatgtcccgggtttatgtcgggaacttggatcctcgggtcatggagagggatctcgaagatgagtttagaattttcggtgttctccgcagtgtatgggtagctcgaaggggaggggggtatgcatttattgagtttgatgaccgcagggatgctatggatgcaatccgtgaattggacgaatggttggcgtgtggagctttctcataactctaaaggtgttggaggccgtggtgggcgccgtggtgggggtgaggatttgaagtgttatgagtgtggtgaacctggtcactttgttcgggaatgccgctcgcgcattggctcttggggcgacgggaatgggtgacgtcgaagccctagtcctcatcgtcgtaaaagtccaagttatgggtatgggcgcaggagctatagtccacatggcagaagatctccccagtgccatagcatatcaccctgtcgtggtcgcagctacagcaggtcacctccatatcgtcattctcgtcgtgattcaccttatgctaatggagattaaagcgggacctgaactgagcaaatctggaatgatatctatgaaaacaatttgtaatattgtagcacttat

SEQ ID NO: 7398 - DNA, 491 bp, Gossypium hirsutum
  Clone ID: GOSHI-09MAY01-C83281_1
cccacgcgtccgcgattctctccaacagagcatggacatagttttctcttggcaattcaggagagatagaccgaaagggaaggaagttgtgaaacatcaattacttgttgctgatcatgatcttcctaaatctgcagaagtgatgcaagttcttaatggtactgctaatagtttcagaatgtttaacatctatccaagatatttccgggttactggttctggagatttgcggtttctcgaacagttggttgaaaaggttagtggggatcttgttctcaatcatggaaatccagaatggtggtcttttcaggatattgatgcatcaagtggaactggatgctgtgagtttgctggaccagtggccataattgtatccgaggaaacaccgcagggcattcttggggatacattgagcaaatttagcatttggggtctttacattacttttgtgctagctgttggccgtttcatcagactacaatgttctgatc

SEQ ID NO: 7399 - DNA, 650 bp, Gossypium hirsutum
  Clone ID: GOSHI-09MAY01-C83211_1
cttgtatccgtagcggggtctttacaatgttatctttccaacctcagaattattagatgtggtactccttcatcctcagataaattgctaatgcagtgaaaggtttcgttggtagtttggatggcatttttctcatttcgggcataactactgtttctattgacttggtgaggcctatagaggaatcagtgatcacctgtagtgttaacctatctcaaatcctaccaaaagcattaaaacctctcggataagggctagaaaatttcaacttttccttttgatgatatgattgagaaagtatggagtggttggtaatttccatctagaaaaaaaattttgatttgttctcttgccatggtaataattggggattttatattccttccaagttgcaattgtgatgacccatattctagaccgtttatatatccaaaatgagtttgaccatcattccttcgggttaaataattttaattatatatgatacaatcttataaatatttataagcaagtttagtcttcattttatcctggttatacatgttaagatctatgtctctatattcttggttattttttaaggggatttggctttgacaatgaacttaagccttaattatctactggataattttttgggtaaaataacg

SEQ ID NO: 7400 - DNA, 247 bp, Gossypium hirsutum
  Clone ID: GOSHI-09MAY01-C58940_1
tcggtgttatttactaggggttcgaacctggattatttggattttcgtgtttggccatttagtgcaatgagctcgtgggactcattatggcgttttcatgttttatgctgaatcatgttcctttatattcaatagaattccagattttatcaaaaaaaccatacagaaaaaataaaaagcgtcaaaccatagaaaaaaaaaaatgttgatgacaaaaacagatgaagacatattgggtgatgatgac

SEQ ID NO: 7401 - DNA, 637 bp, Gossypium hirsutum
  Clone ID: GOSHI-09MAY01-C58860_1
caacacctccaaatttcccttaaacccttcctttttacctcaatcaacgctgcttttcaagcccgcaaaatagttcccttccttaagaaatgtgtggcggtgctatcatatctgagttcatcccacggaaagtggccgccacgtgaccgccgccgatatctggcctaactcccctttcgtgaaaatcaatggcttttgctcttaccgcgaccactcagtctaccatttcaaaagatcccaacccgaaccgccatcgtcgttaggtgatgaacaagtggagaagaaaccgaaaaggcagaggaaaaatctttacagaggcataaggcaacggccgtggggcatatgggcggccgagattcgcgaccctcgaaaaggggttcgtgtttggctgggcactttcaacactgccgaggaagcggcccgcgcctacgaccgtgaagctcgcaaaatcaggggcaagaaagccaaggtcaatttccccaacgaagacgactccttctccaccccgtacaatctgaaccgttccacgcccaattcgaacccttgcgtttatcaacagcatataaacagtaactatggattcaactacgatttgaatgaaatcggtgggtacgcaactgacccgatcgtatatctg

SEQ ID NO: 7402 - DNA, 654 bp, Gossypium hirsutum
  Clone ID: GOSHI-09MAY01-C58830_1
ctcacgcgtccgcggacgcgtggggggtaagctgcctatgacatggtacccacaagagtatgtctcaaatttgccaatgacggacatggccatgcgttcaagcccaaacagaaactaccctggaagaacctacaagttctacaaaggtccagtagtgtatccgtacggtcacggattgagttacaccaactttgttcataccattgctagtgcacccaaagctgtcacggaccctcttgatggccaccgccattcagggaatgctaccatttcagggaaggcgatcaaagtaaatcatgtgagatgcaacaagctctcggttgggcttcaagtcgacgtgaaaaatacgggttccaaggacggtactcacaccatgcttggattctcgaagccacctgctgggcattgggctccacaaaaacagctggtggcctttgccaaagtgcatgttccagcaaggtcacaacgacgagtaggaatcaacattcatgtgtgcaagtttttaagtgttgtggataggtctggggttcgaagaatcccaactggtgttcacaatctacatatcggtggcgctaagcattctttatctcttcagcctgttactttaggggtaatcaagtcctagacttctccaggcaaaagaagggatgcatt

SEQ ID NO: 7403 - DNA, 923 bp, Gossypium hirsutum
  Clone ID: GOSHI-09MAY01-C58820_1
tcgtttagattctaacaatgctacttgtaatggagatacatctgaagtgcagatgacgaaagtttttaaagattccggtaaagatgccgagtgtatcattgatgtagaagatggtgaaagttcaggaaggtcaaatgacgtaagttgtggactagagagaacaactggtacaagaaaaacatggtgttcaccaaatcttggcacattgaacattgtaatcgccgataaatacaatgataggaccaaaaccaggtcaggcatcgagtccacacctaaagaaaaaggatcaaagcctttcttccgtaagcaaaggtgtggagatcttcctcaggccaaaggtgcttttaatttattctatcagcgctttggctggatcagtgggttattgagacatctccaaagtccggtgcacttgcaatttagttgctcattgcaacttacacttgctttactgatagctatttttctaattgtgccttttgtgctttattcgagttgagagcaagtggctgttatgtgctgttgatcaagacaagaggcttcggattccctttggaggcatacattgcgagctttaacctctttcccagtcattttcaagatctgggtgaaacttcatctggagctaagcttgaacaagaaaggttggttgccatcttcattgctacactgtaaatgcattgatagtcttttatataaaaatatatatatatggttgaaggattatttggtagcatagagagggtctggaacagtcaattctcatgtgagctaagctttcatgtgctttaaataataaatatttacattaagtaagaaggggtgtcagttgtagcattatgaacttaccctacctttgtaaagcaaaaaaggatgctttgccctcacatttactccaaattaatatttgaaaggcttgtttc

SEQ ID NO: 7404 - DNA, 374 bp, Gossypium hirsutum
  unsure (1)..(374): unsure at all n locations
  Clone ID: LIB3149-054-Q1-K1-F12
cttcctcaggccaaaggtgcttttaatttattctatcagcactttggctggatcagtgggtgattgagacatctccaaagtccggtgcacttgcaatttagttgctcattgcaacttacacttgctttactgattgctatttttctatttgtgccttttgtgctttattcgagttgagagcaagtggctgtcatgtgctgttgatcaagagaggtgttgtatctattcccccagggttcggattccctttggaggcatacattgcgagctttaacctctntccctgtcattttcaagatctgggtgaaacttcatctcgagctaagcttgaacaagaaaggttggttgccatcttcattgctacactgtaaatg

SEQ ID NO: 7405 - DNA, 588 bp, Gossypium hirsutum
  Clone ID: GOSHI-09MAY01-C58500_1
tccgcccagcgtccgcggacgcgtgggagttgatgtttacgcattcggggtagtgttattagagttactaacaggtcaaagaatcagcgacttacaatattacaaaggccagaatttcttatcagactggttccatcctctagccgcattagattcgaatcaaatcatgacaaatatttatcaattgcttgatccatgtttagcctccggcaaagtccgggactatactcatcaactccaagccatggctcgagccactttcttgtgcctaagtcatgatccagaatcacgacacccgatgtcaaagatacttagaattcttgaaggaggagataccaacgttcctttgagtttagacctgaactcgatcggcaatcgaagcggccatttacgtgggttgaaaactcaaacacaaccagaatctacgagacggcattctcgaaaactttcgcattgaccgaatcgtttcgaaagaccgaaaccgatgcttgtatagtttgagagtatcatcacattgattcctccttctccttttcatgtaatttcttcttcttttttacaatctactaccattatttgcttttattt

SEQ ID NO: 7406 - DNA, 511 bp, Gossypium hirsutum
  Clone ID: GOSHI-09MAY01-C58660_1
tttttattttggcttttgacgtcaaggtgaccccgttggctcgagaactagcagatgaattgggtgtgaggatgaatattgctgatatcatttatcacttattcgacgcaattcaaagcatatatggatggtctcaaagaggagagaaagagggaagcagcggatgaagcagtcttcccttgtgttttgaagattttacctaactgcattttcaacaagaaggatccaattgtcttgggggtggatatccttgaaggcattttaagggttgggacgccaatttgtattcctcaaagagaattcattgatattggtcgaatagcttcgattgagaataaccatagaccagttgattctgccaagaaaggccagaaggtagccattaagatagttggatccaataccgaggagcaacagaaaatgtatggaaggcattttgagcttgaagatgagcttgttagtcatatttctagaagatcgatcgatattctcaaagctaattatcgggatg

SEQ ID NO: 7407 - DNA, 666 bp, Gossypium hirsutum
  Clone ID: GOSHI-09MAY01-C58080_1
gaaggatgctatttctgctggtgttgatggctatgatgctgatgtaaagaatgctgtgaggaaagctgcacatggtttgcgattaactagagaagcagctatgtcaattgcgagcaaggctgtccgtaaggttttcttgaattatgtgaaacggtctcgatcggtcgataatcggacggaatctgcaagagaacttaaaaagttgattgcctttaacaccttgcgtgtcacagaattggtggcagacatcaagggggaatcttctgatattccatcagaagaacctgctaaagaggaagtaaaagaagttgacgaggatgatgaatgggaatcccttcagacacttaggaaaataaaacctatcatggatcttaatgcatagttgggcaagccgcgccgggcagagataacactcaaagatgacctctccgaaagagaccgtatggacctctacaaaacatacttgttatattgtctgacaggtgaagtcaccaggattccttttggtgctcaaatcaccacgaagaaggatgattcagagtatgttctactgaaccagcttggtgggatccttggtttgacgagtgaggagacagtagaagtccatcggagtttggcggagcaagcttttaagcaacaagctgaagtgaatttagctgatggaca

SEQ ID NO: 7408 - DNA, 625 bp, Gossypium hirsutum
  Clone ID: GOSHI-09MAY01-C58060_1
aaaatggcgccgttttatccccaaatttccccctgaaacgcctaattccccccaaatcggtatcctcaaaaccctttaggtgtttctctctgccgcttttgctactttccaatattcccaggtttttgttgtaataagtttcaatctgtagccatgggaaaattaaaaagaaggcccccaaaattgctggcatgaagaaaatagtcactcaaaaagctattaaacagtagttgtttcttttctttctctatttgattacagagaaattactttttttcctctctgtaaacaaacgggattttggattttggatttcgcattagccgtttaattgattggcttaaatggatttggaaattgaaaatagaatagcagctattctcttaaaagaggcaaccgaattgaaacggcaagcgggcaacgaaggtgttcatgtttatcttcagcagccaaaagtgagaagttttctccacccttaactttacaaatttgtattgatgacagaagtagcagaagaaaggtattcagctccttctgttgcaaggtcttccttgtttaaaactctgtcaattgaaaaggcagttatccgcggaatacttttatcaactttggatgatcctaatac

SEQ ID NO: 7409 - DNA, 724 bp, Gossypium hirsutum
  Clone ID: GOSHI-09MAY01-C58360_1
tatacttctttgcattatttgaaaccatctcgaagctattaggatattcacggctaaactttgttgtcactgccaaagtagctgataaagaagccttgaaaagatatgatggagagttgattgagtttggtgctacttcaccaatgtttgatattttagccacccttgcaatgttgaatttgtttggtatctttggggcactcaagaaggtcatcttggatgtagatgaggacttacaggttttggagaaatttgggttgcaaattctcctctgctttgttttggttacaatcaacttgcctgtataccaagcactctttttcaggaatgacaatggcaagatgccaagtagagttacttacaagtctatgattttcgccatgctagcctgtactgcaaccatgtgtttttaaaaaaaaacacaagtgttgaagtttgattctttcaataagtttgattttatatattgaggtatatgagattctagaataaatgtgtcgttaagaggatcacaacaatttactagttgtatttaaacaagtaaatggttttgtcgaggagtgttgaagttggccagcatgctgcttgttgcaccagaaacagctcgagccagtgaagttgcagcagaagatcaagccactgtttcattttgttatttttgaattgatgatttgtaacttagttgaaaacaaaacaagttgtacctgatgttttaggtactgat

SEQ ID NO: 7410 - DNA, 414 bp, Gossypium hirsutum
  Clone ID: GOSHI-09MAY01-C58290_1
aagaaattccaagttctggataaatacccttatctatatgaagttagaaaaatatctcgggcaaagggaacctttgaaaagcccaaaaatggagggtgaggtggttagttctcttttaggtattttatgtgatggtgttgactgtttagtctctggggatcatgctgatgaatttaaggattatttctcaaaaatcatgatggagagggagatagcagccacgatgaaagtgtttgatggtgggtgttcggccataattgtgggaagatggggtgaaagaacaaagacagaaactttattgaggaaggtggtataaaagctgtttctgccgacggaaattggttcaatttcaattaaatggatcatataggccctttaatttatttcttttggtctaaataagtcttttattca

SEQ ID NO: 7411 - DNA, 691 bp, Gossypium hirsutum
  Clone ID: GOSHI-09MAY01-C58250_1
cggccgcctgggcggccgcggggggcggcggggggggtcaattattccacaaatccaaattctcaaaaatgaatggctatctttgttacacactcatccctccctattcactctctatcttctacaactaaaacccctctctctccctctcccttctcatactcccaactatggcaactcttcagtctctggctttggcctctcctgtctctcactcttccctcaaccaaccacgctctctctctggaatgccatcttgggttgctcaccggagcgccaattcacaattcaatgggcaatctttacaagtggctcaatcgcgaatatcacctacaagatggaactctaagagatgcagccccatagtaatgatggttaaaccaaaaattcaattcattcaaggaactgatgagcagacaataccagatgtaaggttaacaaagtccagagatggtacaaatggtatggctatattcagattcgaccaaccgtccgtgtttgattcatctagtgaagttggtgacatcactggattctacatgattgatgaggaaggagttcttcagtcggttgatgtgaatgccaaatttgtgaatgggaagcctgcagggattgaagcaaagtacataatgcgaacaccaccggagtgggataggttcatgagattcatggagcgatattctaaatgaaa

SEQ ID NO: 7412 - DNA, 524 bp, Gossypium hirsutum
  Clone ID: GOSHI-09MAY01-C58240_1
gggtgcttcattttaaattgctgagcggtggattataacttggaaactattacatttttgtttagttgtctctgtaatgagaacatttttgtttccttcacaatgaggtgtttaagactcaaagtttgtctatggagattcttggttctatggtgattttgcttgtaatacttacgtagctcgtaaacctgattaagttctatatttgtattcttatttttatcgattctttaaaatattcaaacttaagcttgaaatctgttttaaataagtaattctttgtattctttcaacagaatatttatttatttatttataagtttgtaaaaatatattttcatttaaaaaaaaaaaaaaaaaaaaaaaaaaaaaaaaaaataaaaaaaaaaaaaaataaaaaaaaaaaaaaaaataaaaaaaataaaaattaataaaaaaaaaaaaataattaaaataaattaagggggcggcccttttaagggatccaattttacttcccgggttttggccagattaattttttt

SEQ ID NO: 7413 - DNA, 226 bp, Gossypium hirsutum
  unsure (1)..(226): unsure at all n locations
  Clone ID: LIB3149-044-Q1-K1-A9
cgggcggggngcttcattttaaattgctcacctgttttttataatttttaaactatcacatttttcggtacttagctctgtaatgagagcattggggtttccttcacaatgaggtgtttaaaactcaaagtttgtctatggagattcttggttctatggtgattttgcttgtaatacttacgtagctcgtaaacctgattaaattctatatttgtattctcatttt

SEQ ID NO: 7414 - DNA, 440 bp, Gossypium hirsutum
  Clone ID: GOSHI-09MAY01-C58260_1
cggacgcgtgggattggtttcaccaaactaagaaataaaagcaactctcttcctcgcctgtccattttcttggaaaattttccctttttccctttttcccgtccgcttctttctctccaaacatgggcatctcatggagcaacacaagcaatagcaaccggaggagaaaccaagcttacctccatggccctccacctcctccacctttctattatccccaagaacccactttccttcctcctccgccacctccaccgccatcccagccttctactacccacccttatcctgcgcatactccacccccaccgcctccaattcccaacaattactactgttccccaccctacaacccctgctgttactcaaaccctgtcatgggtcgttaccctattcaatatcctccatatttcgccaaccaagctagtgcctggcccccg

SEQ ID NO: 7415 - DNA, 584 bp, Gossypium hirsutum
  Clone ID: GOSHI-09MAY01-C59990_1
atgacaatctgtctgtccgtctgcagctgcgtgactgtctgtctctgccatgtctctctccccatgccgggcccagaggggcttcagctctcgctcagcctgttctgctcgctcaaggggctgcagcaggggaggcttcagcagcaggagccttaattcctttggggggtgcctgggaggctctcgtgggagtacctgggggtcagggggaaggctgggggtgcagtttggggagtggagtgctgggcctgggctctccctgtgccctccggggggcatccaagaagtgaccattaaccagaatctgctgaccccactgaagattgagatcgacccccagttccaggtggtgcggacgcaggagacccaggagatcaggaccctcaacaaccagtttgcttccttcattgacaaggtgcggttcctggagcagcataacaaggtcctggagaccaagtggcacctgctgcagcaacaggggttgagtggcagccagcagggcctggagcctgtctttgaggcctgcctggatcagctcatgaagcagctgcagcagctccagggagaacgaggggctctggatg

SEQ ID NO: 7416 - DNA, 679 bp, Gossypium hirsutum
  Clone ID: GOSHI-09MAY01-C59840_1
ttcttcacctatggtacatggtttggagtgaaaggattggtggctgccagaaagaacttcaataacttgtctagtatccagaaggcctgcaattttctgctgtccaaacagctcccctcaggtggctggggagaaagttatctttcatgtcaaaacaaggtttactcaaatgttgagggcaacaaaccacatatggtaaacactggctgggctatgttggctctaattgatgctgggcaggccgagagagatccaacaccactccacaaaggagctaaatatttgataaattcccaaatggaggacggtgatttcccgcaacaggaaattatgggagtgttcaacaggaattgtatgatcagttactccgcgtatcgcagcattttccctatttgggcattaggcgaatatcggactcgagtgttgcagctgcggacaacgtcgtagaaccatggtaataactatagttgttgctactgctattatatgttcaccattgttaatcgatgctggtgctatttagtttatggtaaaagttgctttagcaacaatcccttttgtggaaacacaaaggataccaatggggttagctagtttgggagttcatattaaagacattgcagtgttttctgtagctaaataatagattttaaatagaaataacttacattaagaggtg

SEQ ID NO: 7417 - DNA, 385 bp, Gossypium hirsutum
  Clone ID: GOSHI-09MAY01-C59860_1
cccacgcgtccgtttctttgtctactgttttgccatggagagcaatttttttatcctcgtaatcttattccaaaccgtcggcttagctttatcgaccccccaaaaatatgagtcaattttcaacttcggtgactccctaagcgacactggcaatttacttctctccggtgcccttgtatttccggtcatcgggcagctaccttacggtgaaaccttctttcaacacgcaacggggcggtgctctgacggacgtcttattatcgacttcattgctgaggcattcagtttgccttatttgcaaccttacctagcagtaaaacaaggccagagttctccacatggagtcaacttcgcattctccggagctactgcacttgatgctgag

SEQ ID NO: 7418 - DNA, 685 bp, Gossypium hirsutum
  Clone ID: GOSHI-09MAY01-C59540_1
atacttaacagccacttgtttcatcccacctgggcattaggttgacttcaaagatgcctcagttactgagaaacattaatgggatcatcgaggccttcaggcgctacgcaaggacggagggcagctgcacagcgctcacccgaggggagctgaaaagactcttggagcaagagtttgccgatgtgattgtgaaaccccacgatccagccactgtggacgaggtcctgcgtctgctggatgaagaccacacagggactgtggaattcaaggaattcctggtcttggtgtttaaagtcgcccaggcctgtttcaagacactgagcgagagtcctgagggagcctgcagctctcaagagtctggaagcctccattctggggcctggcaggagctgagtgaaggacagagaagtggcactgaagtgggaagggcagggaaagggcagcattatgaggggagcagccatggacagagcaagcagccttccagagggcagagcaggcctggggctcagacccagggtcaggccactggctctgcgtgggtcagcagctatgacaggcaagctgagtcccagagccaggagagaacaagtccgcagatacaatgctctgggcacacagagcagacccagagagctggtgaaggcaagaggcatcagaccacacagatgaggccagagagaga

SEQ ID NO: 7419 - DNA, 367 bp, Gossypium hirsutum
  Clone ID: GOSHI-09MAY01-C59670_1
atctacattgcctggaggaagcctaacgaagtcaggcatccagctgcccacccctgagcccaagattcttcccaggaacacaaacgtaggagacatatgctcctggaagcaccagcctttatctcttcaccttcaagtcccctttctcaagaatcctctgttcttcgccctctaaagtcttggtacatctaggacccaggcatcttgctttccagccacaaagagacagatgaagatgcagaaaggaaatgttctccttacattttgtctactattgcatttagaagccgcaataaatcccagtgggactcgcacctctgccaacactggacccactgtgacctccagtgggatcagcacagtcatg

SEQ ID NO: 7420 - DNA, 479 bp, Gossypium hirsutum
  Clone ID: GOSHI-09MAY01-C59110_2
gatcagccattagctcccttgctgcacatttgtgagcaagtaaaaatgcttcttgcaccttgcttcatgttctgtgctcttgttctctcttttgttgctgcctcttgcaccaacaattggtatcatgagcctatgtcttacgggaccattgattttgcttcccctgcttgttgaaaagaaagaagctgtcaaagcacaagcaagtcattaaggactgcttgtagagaagataatatcggctcaaacttataagatccccaaactagcttgaataagctgaaggaggagtttaaaggaaaggtgtgagctttccaaatgtgcaagcttagcaagatgtcaaagctgcaagcttagcaaagtgcgagcctgatgaagacacctgttgaagacaatatgcaaagatgtgagtctgtcaaaagggtgagctcaacaacatgtggaagctcaatgcgtggtggataagtgcaaggcttttgaaa

SEQ ID NO: 7421 - DNA, 960 bp, Gossypium hirsutum
  Clone ID: GOSHI-09MAY01-C59110_1
gtttaggtggcttgtttatgtgtacaagcaatgttttaatagtcccaatgctgattagtggggttagttgactatttggtgattatttgactataaatgtatgttttttctagttgaatgaatgagctgaatgagctatcagccattagctcccttgctgcacatttgtgagcaagtaacaatgctttttgcaccttgctttatgttctgtgctcttggtctctcggttgttgctgccacttgttccaacaatttggtatcatgagcctaagtcttaagggaccattgattttgcttcccctgctcaacatcggacctccaaacaagcttcaataagctgaaggaggagtttcaaggaaaggtgtgagctttccaaatgtgcaagcttagcaagatgtcaaagctgcaagcttagcaaagtgcgagctgatgaagacacctgtggaagacaatatgcaaagatgtgagtctgtcaaaggtgtgagttcagcaacatgtggaagctcaatgtgtgttgtattgttgcaagccaaaatggcagaatgaaggcaagcaactatactcaggaactgtttgtgcaagaagaaacaagttgtcaaccaaggctgtgaaggagaaaaactccatttggtgaacaaatctttggcacaaaagactgggatagtcaagtgtgtaagtcagatttgttgtttgtgaatgaggccaaggttgaaaatgaattggtcagcttgaatcaaagcatctaagagctgccaagttcaaaaaaacttgatgaatgactggtattgcagcatggactccaaggaggactgttaaaaatggccaaccatgctgctattatgtttttgttaaaatgcatggtactatgatgattctgtaatttactttggttgagaatgaactttgatgttgatgtcttgatgggttggttgagctgataaatcagcttatccatgtgtt

SEQ ID NO: 7422 - DNA, 349 bp, Gossypium hirsutum
  Clone ID: LIB3272-026-P1-K1-G4
gagctatcagccattagctcccttgctgcacatttgtgagcaagtaaaaatgcttcttgcaccttgcttcatgttctgggctcttgttctctcttttgtggctgcatcttgcaccaacaattaccctggtggcttggtaaatttgccgaagttgaaaggtctattttaaataccgcaccctgtcatttccttcttaagataccatcattttcatttctttcaaaggatggccttgaaaaatattaatctggagaggtccaagctggtggatacaaatggaaacccgtactgtgtcccaatgggaacacgaacacaaatgtgtaagaacacccttctctatacctgggtt

SEQ ID NO: 7423 - DNA, 917 bp, Gossypium hirsutum
  Clone ID: GOSHI-09MAY01-C54850_1
acatgaactggaagcataattagaacatgaaacgttccaaatatattgcttaccaactttcgtatgtattacggaatttagattaatctttagtcaaatcaggaagaaacaaacaacatatggcaataatgaaattacctcccaaatgtgggcctttttttacattaaaatatcattttagatgcctactgctattggctagtactactatatatgccacacactgcgaaataataactaagccaagttgacccgaatagctaaaccccctttctgtcactgtaacagtgcgacgaatacgggatattcggactatgaatttgacgtaatcgtcgtaggggcgggcgtcatggggagctccacggcgtaccaactagccaaaagaggccaaaaaacgctactcctcgagcagtttgactttctccaccatcgaggttcgtctcacggcgagtcacgcaccatacgagcaacgtaccctgaagactactacttcggcttggtcgatgagtcctatcggttgtgggagcaggctcaatctgaaatcgggttcaaggtttacttcaaggcccaacagttcgacatgggtccatccgacgccaagagtctcctttctgtgatcgctacttgtcgaaagaacgccatcccgtaccaagtcctcgatcaccgggaagtccgctgaatgattttccggacggatcgatataccggaggactggattggcgtgtcgtgcgagcttggcggcatcatcaagcccaccaaggcagtgtcaatgttccaaatgctggctttcaagaatggtgcatgccttaaggacaacatcaagtggtagcataacaaagatggtgaccgaggattgaggtagctgcaagcaatggtgaaattttgggggtaaaaatggtgtgacagtgggtggtgg

SEQ ID NO: 7424 - DNA, 723 bp, Gossypium hirsutum
  Clone ID: GOSHI-09MAY01-C54860_1
atccgcttatctgaactcaattcatttcggcagccgctcaatccgccgcattaacctgcgtattcttccttttaagatttaatcctacgattcgcgctgtgggggacctctgatcgcaattcgcggctttcgagttcccaccgtcatcataatctccaggtcttctactacatgctggcgtgtgattattaagaaagggaaaaaaataaaattaatgaaaaaacataaaaatacaaacaaagatttccttttttctgttgtatgtctccatctgtttatttattccccgtggttgtgaaatttggtggttacaattacggagcagaagcgcgtgaacggatatgcagaagagtgggagtctgtcgagaagtagtaatagtccttcagtgagagtgtcgtcgccgcctccgccgccttctcagcagtcggtgaggcggctgagcttgtgctcccaaatagcaacccactcttccccaattgtgttcccagagaaacgtactaagaagctcaaggcttcctccaaacgcagcgaagcccctgtcacggatgatcagactgataaatctaagggggaagagcatcgaatcgacatcggaggggatgaaaagtctgatttacttgggtatgtggtttacacagggaagctcattttggataagagaaagataccccaaatattgctaatcccgccgatgtagagcagaattcttctaccgatattga

SEQ ID NO: 7425 - DNA, 461 bp, Gossypium hirsutum
  Clone ID: GOSHI-09MAY01-C54090_1
ctttttgcctcttagctagctcattatctttttcatacaaagtaaccgaatttggggtcttattcgtgataacgactacttccatggattaaattgcatttgttttaacttctttctcttcacctggttaaaaatcttttcaaaaatgcaaaacccttctacggttacccaagaatctggccctgctgccttcgatctcgtcacacaattgggtcacttagcattcaacaagagctttcgcagctcaaacactgatgggttttgttcatttaagccaaatcacgtgtatttttcaggcttcagagactcaatttctcagaaaaagcgcagagttgctgctgctgcttcactcagtttgggtgctcgaaacagcgtttcttcgagcgttaggaggattctgaatgatttttacagagcaatcaagtttcactgagatagaatcccaattggatctgctttta

SEQ ID NO: 7426 - DNA, 1474 bp, Gossypium hirsutum
  Clone ID: GOSHI-09MAY01-C54200_1
ccgggcccgaaattccgggggggcccgacgcgtccgggcatctcctttcccctcttcttcctccactgtcctctttcgctgcctaacctaaacaaagcaatggctttccttccgcccatcaccactttcgcagccgccctcctcctcttcctccacaccccactcgccacgtcatcccccctcaaccttactggcgactccctttcaccctacgaagtcctccaaggctacaacttccccgttgggcttctcccacaaggcgtcttaaagtacgatttagatgaatccaccggtcggttccatgcctacttagagggttcgtgtagcttctcactggaagggtcttatcaactcaaatacaaatccacgatcagcgggatcatctccaacaacaggctcaaaaacctgagtggaatcagtgtcaaggtcctgtttttatggctcaacatcgtggaggttgttagagatgaagatgagctggaattttcggtggggattgcatctgctagctttcctattgacaatttttacgagtgcccacagtgcggctgcggattggagtgcgttgatagtaaggggcaagtaagcaaacttagaaataagtcttctttttcttcaatttagaggaatttgtgggggtagaataaattaactgcggaggttcatgaaaacgatttggatgaaccttgggttaaattgaattgggtttttagttaatatatcgaaattgatggactcaacttttttaatgggtttagaccttgaactcatatttatttgttgctgtttttgtggttggtattggtttcatcctttaaatgcttggtttagggaagaactgatcaaccacacgttagtgatatgagcaagataatttagaataggttaaaacattagtgcgacatttcttaatgctatgagccagatagtttagaatgctaagaccatgttaaacagatccccatcctgttattctgcattttaccatggaagttattcacaagatcatgtactctaaacaatttcggaagactgaattcctgtaactattaagctatgttgatcagattcgtggctaagcatcaaatttcgggtatgagtacaacacaggcaggctgatgtttttctagccttttttcagatatatatacttctaggttgatcttagtattcgtatgtatctgatatttcaagaaaaatgaagagttggaatgaggtaaagagggcagaatggaggactacagcagagatcgcaatagcaaatgttgtgggaactgaagtagtaattgaggactagggattaagtaatatgtggaagtgagaattgtaatcagagcttagaatccctatccaaactcgttaaaacttttgaagtgctattttgagactatctatatgaacttcccactatggaactataggaaagatctttgttacgcagaaaacttcaatgggaaaaattgtcttttaagtt

SEQ ID NO: 7427 - DNA, 475 bp, Gossypium hirsutum
  Clone ID: GOSHI-09MAY01-C55940_1
acgcgtccgaaaaaaaatcgaaccccccttctctctattgctttccatggcgaactcggtggctgattcacgtagcaacagggcagcggttcaagccaccaacgacgatgcttcagccagtaaactgtcatgcgttaaaaagggatacatgaaagatgactacatccatttgtttgtcagaagacctgtgaggagatctcctattattaaccgtggttattttgcacgttgggctgctttcaggaagcttctatatcagtttcttgattgtgagggatctaatagtgaaaagggtaaaacaaggaggcagatactatcacttggtgctggatttgataccacctattttcagttgcaggatgagggaaaagcaccgtatctatacgtggaactggattttaaagaggtaaccagcaaaaaggcttcccttattgaatcctacagtcagttgagggacaaaattggtgcaacagca

SEQ ID NO: 7428 - DNA, 375 bp, Gossypium hirsutum
  Clone ID: GOSHI-09MAY01-C55820_1
caagaggtagcaatggcgtcagtcaaggctgctggcactcaactctttgggcaggtcaagaaggaagccactgatgcttcctccaagtccaaacccgctgcttccaagccccgccgccaaaaaggctgctccaaagcctcaggaacctaacaagaagaagggaaaaggtgggaaagcagcgaccaagcagtagttgccagccccaagtcaagcgcagacttttacgacttcagaccctgatgatctaacttaactataatactatacatgcatatgttatgctcacgaaacctaatcaattagggttccctgtaagctatggtgagaaagatattgcgctaattaaatcaagacagcatctatgtaattatcatt

SEQ ID NO: 7429 - DNA, 1015 bp, Gossypium hirsutum
  Clone ID: GOSHI-09MAY01-C55430_1
gcaaattttgccgtcaaaccaaacaggaaaaagtaagcgaaaattcaccattcaaacgtaccgaacaagctaaaatgcgccccgaattcgcgtcaccgtcttcttcttcatcttcgtcggccgatcgtcggttaaacgctctggtccgacacctcgcaaccccatcaatggtatctcaaaccgcagtagcattttctcccacctccgggtttcatggagactccgttttctctcacgtcgttcgcgcccctgaagatcccattctcggagtgactgttgcatataacaaagatcccagccccgttaagttgaatttaggagtcggtgcttatcgaactgaggaagggaagcctcttgttcttaatgtggtgagaaaagctgaacaaatgttgttgaacgataaatcacgtgttaaggaatatcttcccattgttggaatagctgagtttaataaattaagtgctaaacttatttttggtgctgacagccctgctattcgagagaatcgggttactacagttcagtgtttatctgggacgggttcattgagagttggagctgaatttttggctaggcattatcatcaaaaaactatatacattccacagccaacatggggaaatcaccccaaggtttttactttggcaggattatctgtgaaaacttaccgctattatgatccaacaacacgcggaatgaatttccaggggttattggaggaccttggctctgccccttctggatcaattgtgcttcttcatgcatgtgctcataatcccactggagtcgatcccacccttcagcagtgggagcaaattaggcagttgatgagatcgaaggcattgttacctttctttgatagtgcttatcagggttttgccagtggaaatcttgatgaagatgcacagtcgattcgtatgtttgttgctgatggtggtgaatgctttgtagctcagaggtatgcaaagaacatgggccctctatggcgaacgtgttggtgcattgaagtgtgtct

SEQ ID NO: 7430 - DNA, 996 bp, Gossypium hirsutum
  Clone ID: GOSHI-09MAY01-C55320_1
gccaagctcctaatacgactcactatatgggataatgctggtacccgcctgcatggtacccgtgtccgtgatattcccgggtcagaccccacgtccgtccggagaaaccttcccatcttgtgagaacctagataagcttttagcatttagagcaattcaatatttccgcgaagtttaaatttaaagcgaagatatctttgctaagtagattcaatcgagttacctgcgccaagtgtgggattgatttcaaagaaggataaccgagaaaggtatcgatgtgaagcggttcggtgagcttttgatgtcgtctggggtcgtgttgaatgatgatgtccattgggtcacctttcatagtggatacgacttcgggtacttgcttaagcttttgacttgcaggagtttgcctgatagtcaagctgggtttttcgatttgatcaagatatatttccccatggtatatgatatcaagcacatgatgaagttttgcaacagccttcatggtggtttgaacaagctcgccgagttgttggaagtggaaagagtcggtgtgtgccatcaagctggttccgatagtttgctcacctcgtgcacctttaggaagttgagagataactttttcaacggctccacagagaaatatgcaggtgtattgtatggcctaggtgtccagaatggacagaatactaattagaagaaaataattggaaaaaaatgttgatggatgtagactatttagagcttgagcctgaattttctttgtatacattgtcaaaaaaaaaggtattgttgatttagctgtgacttttctccttttgcttgcattgtaactgaaaccttaactggtttttccggttgaagtccagtgtaaattatgcagttagtgtttctatctttttcaataataatcataatcatttgcatcttaataaaaaaaaataactctttgtatgccctgatatgttgatttataattgtaataaacattatggcgggcgg

SEQ ID NO: 7431 - DNA, 395 bp, Gossypium hirsutum
  unsure (1)..(395): unsure at all n locations
  Clone ID: LIB3543-028-Q1-K6-C8
ctccgcatataataataacatgatattattgaaaaaaatggacacttactgcataatttacacctggccttaaactggaaaaaaccagttaaggtttcagttccaatgcaggcaaaaggggaaaaagtcacagctaaatcaacaatcctttttttttgattggaccaaaattattgggggggggggccgacatcaaccccatgatgaagttttgcaccagccttcatgggggtttgaacaagctcgccgagttgttggaagtggaaagagtcggtgtgggccatcaagctggttccgatggttggctcacctcatgcacctttgggaggttgggagataactttttcaacggttctccngagaattttgctggtgnttggtttggcctcggggtc

SEQ ID NO: 7432 - DNA, 422 bp, Gossypium hirsutum
  Clone ID: GOSHI-09MAY01-C56720_1
gaaatggagaatggtgaggcatttagagtctgcagtgcacgtattggaagttcaagcatttggaggaacaacgccatggaagctttctccatgtctgctcgtgaagaagatgatgaagaagacctgaaatgggctgccatcgagaaactgcctacatatttgcgtgtaaggagagggatattcacagaaggtgaaggtcaatcaagggaaaaaaaaaaaaattacacaacaaatttgaaacttatgttattcataaaaaaaaaacaaaaaaaaaaaaaaaaaaaaaaaaaaaaaaaaaaaaaaaaaaaaaaaaaaaaaaaaaaaaaaaaaaaaaaaaaaaaaaaaaaaaaaaaaaaaaatggggggggccctttaaagggaccaaattttaaaaccgggggttggaaaaagataattttttt

SEQ ID NO: 7433 - DNA, 703 bp, Gossypium hirsutum
  Clone ID: GOSHI-09MAY01-C56190_1
accagttggtaggtagagcttgtggttgatagagagaaaagatgttttacttgtaaaagacctgactctctaaacacttatctctctctctctctctctctcaaaatcatactagaaaagagcaaaaaaggtatagagcaagtgaacgttgtgtggacagtgctggggggttggtgtgtgcgctttctattatggatagctatgaagcaaccagaattgtgttctcaagaatccaaaaccttgaaccagaaaacgcttccaaaatcatgggtctactgctgattcaggaccatggggagaaggagaggattcgtttagcctttggtcctgaagcttcacttcagtctgtcatcctcaaggccaaaaaagagcttggtcttccttctaactctccttctacaccttcaaccccatcatctccttctcctttccttgccaacaacccgaatcctgttaatattcaaaggcaaagctctgctgcttccaggctcctacccaacggggaatcaatctgccatcttctctcaccatccctactaacctctctacttcttctgggacttcttcttggagtcctttggctgaacttccaaaccctgatgagttgattagtccaagcagggggtctttaaatccttcctctttgccctctatggaaaccgaggagctactgatatgggatgagaacttaaagacaactagc

SEQ ID NO: 7434 - DNA, 264 bp, Gossypium hirsutum
  unsure (1)..(264): unsure at all n locations
  Clone ID: LIB3165-060-Q1-K1-B6
cccacgcgtncgnccacgcgtncgnccacgcgttcgcccacgcgtncgctctctctcaaaatcatactagaaaagagcaaaaaaggtatagagcaagtgaacgttgtttggacagtgctggggggttggtgtgtgcgctttctattatggatagctatgaagcaaccagaattgtgttctcaagaatccaaaaccttgaaccagaaaacgcttccaaaatcatgggtctactgctgattcaggaccatggggagaaggagatga

SEQ ID NO: 7435 - DNA, 440 bp, Gossypium hirsutum
  Clone ID: GOSHI-09MAY01-C56050_1
gaaaatgctatcatttttctcttccccttcaccgaaatatgcagcaattaaagggttttgatgctggaaaatttcagcaacatatggcgccgtgcttagtttccaggttcgctcgggttggacgccgtcagagatattatccccctatcgagttaacgtcatcggaataggtaaactcaagtgattcgagtctatggcatgtatagggttttaatgtgagtatgtaatattatgatttagccaaaggcattggcttgttattaaggtagtattagtcatgtaaattggcctatgtccgctaatgacgctatgggcccatatgattattcttatgcatgtatgttattatctcttgtgatgtggcttacaacatgtatgcctagagattgaattgggattcattgatgagctagtaactaatgcaggattaagtgattggt

SEQ ID NO: 7436 - DNA, 329 bp, Gossypium hirsutum
  Clone ID: GOSHI-09MAY01-C57450_1
aacattttctcctacttgtatctgagttcttttctaggaggaactgagaattggagaacttaatcaccacctatagttttccatttgattattgataatatattttccatttctattgtatgatttgaatgtttgtagtttctatcatgaaatctgtacagctttccacttcttttccataggaaaagattttgctgccattgtacattaattgttcttacatccctgaattctgaacctttatttttcttttgatttatcaaaaaaatatatattatgatatttaaaaatattactatttgtattgttatttatataatcgtattttt

SEQ ID NO: 7437 - DNA, 573 bp, Gossypium hirsutum
  Clone ID: GOSHI-09MAY01-C57750_3
tgtcattcctgttgttctggttgaaaacactgggagatgtaataaaaatgacatagacgaaaagattcttcccaatggagaagcttgggttccaaacttggtaaaagccatcacaggtgttgcaacaaataagagtcgagcaattgtagttagcaagaagttggttgatgggtctgacgcaaacgacaagggaaaattatggatacctgttattcttggggttcagtggttggttctcaaatggattcaaggagcaataaagaaggatattgcaactggcagtggacctctatgaatgggatatctggcaagttccaagtttctatttgagtctggttagagattcattatcatattagcttttgctttactctcaaggtttattcttcttaaactcaagttcattttggtttgttgagtatgcgtatgctttggcagacattatcggtatggaatgttgtttagttgtttgtaggattagaacttagtttctgccgattcttctggtttttgttttcttgaactacctacctacctacctacctacctatatatatattgatgttttcatgc

SEQ ID NO: 7438 - DNA, 712 bp, Gossypium hirsutum
  Clone ID: GOSHI-09MAY01-C57750_2
cccacgcgtccgcccacgcggccgcctgggcgctcgcgcgggcgggcgcgcgggcttgctgggtgggcggaaaaacaaacactacgctgataagataaccttctctttgtacacccaaacttccaccaaccgccaccataataacctctacaatttcttcagttgcacttctcaagctaggccgttttctgtgatgggtactcctttgcctcgtgaatggctcggccttcaacaattccccgctgctacacaaacgaaattgttcgagttgttgggaaaattgaagcaagagaatgtcaacactttgactatcgttgttatgggcaaaggcggtgtagggaagtcttccactatcaattctctcattggagagcaagttgttcgagttactgctttccagtccgaggggctgagacccgtgatggtttcacgctcatgggctgggtttacattgaatgtaattgatacgcctggactcgtggaggctggatatgtcaatcaccaagctcttgagttgatcaaagggtttcttttgaataagaccatagatgttctactttatgttgaccgcctagatgtatatagagtggacaacttggataagcagatcattagggctatcaccaacagttttggaaaagaaatttggcggaaaagtttgcttgtactcactcatgcaacagcttgtccaccagatggactgcattatgat

SEQ ID NO: 7439 - DNA, 1225 bp, Gossypium hirsutum
  Clone ID: GOSHI-09MAY01-C57750_1
aaaaaacctccccaaagtcttcctcctttcctttctcatccttctcaagttgcgtccccgaagataggccgtttgcggtaatgggtactcctctccctcgtgaatgggtcggccttcaacaattccccgctgctactcagacgaaattgtttgagttgttgggaaaattgaagcaaaagaatgtcaatactttgactatcctagttatgggcaaaggcggagtaggaaagtcttctactatcaattctcttattggggagcaagttgttcgagtcactgctttccagtcagaggggctgagacccgtaatggcttcacgctcctgggcagggtttacattgaatgtaattgatacaccaggacttgtagaggctggctatgtcaatcaccaagctcttcagttgatcaaagggtttcttttgaataagaccatagatgttttgctttatgttgatcgcctggacgcctatagagtggatgacttggataagcagatcatcagggctatcacaaacagttttggaaaagaaatatggcgcaaaagtttgcttgttctcactcatgcacagctttgtccaccagatggactgagttatgatgttttttcttctaaaagatcagagggtgtcctaaaggcgatccgtatcggagctcgtattaggaaaaaggattttgatgattctgtcattcctgttgttttggttgaaaatagtgggaggtgcaataaaaatgacagtgacgaaaagattcttccgaatgatgatgcttggatcccaaacttagtaaaagccatcacaagtgttgcaacaaataagagtcaagctattgttgttagcaagaagctggtagatgggtctgacgctagtgagaaaggaaaattgtggattccagttattcttgggcttcagtggtttgttatcaaatggattcaaggagctataaaaagggatattgcaactggcaacgggcctatatgagagccacatgaatgtgaactgctggaatgcaagttgcatttggtctcgttaaagtttctatataatattttagttttcttctatttttttggtaaaaagtacaaagaatcctctgaagttggttttgctatttgctataagtatggttttgggaggcagagtaagtagtggttggacggatgggatattgttgaggtattgtaggatataagcattaaatgcaagccatggttcttttgtttcacttc

SEQ ID NO: 7440 - DNA, 546 bp, Gossypium hirsutum
  unsure (1)..(546): unsure at all n locations
  Clone ID: LIB3582-019-P1-K1-H1
cccacgcgtccgggaaagtcttctactatcaattctcttattggggagcaagttgttcgagtcactgctttccagtcagaggggttgagacccgtaatggcttcacgctcctgggcagggtttacattgaatgtaattgatacaccaggacttgtagaggctggctatgtcaatcaccaagctcttcagttgatcaaagggtttgtagtttgatgaagcagtctaacttagaatcttattatttttccacgatgaatttagttctcaatgaagctagtaattttagttttacttttactacattgttatggtttattttggtcaaaaacaaagtctattaatcatcattcaggtttcttttgaataagaccatagatgttttgctttatgttgatcgcctggacgcctatagagtggatgacttggataagcagatcatcagggctatcacaaacagttttggaaaagaaatatggcgcanaaatttgcttgttctcactcatgcacagctttgtccaccagatggactgagttatgatgtttttt

SEQ ID NO: 7441 - DNA, 661 bp, Gossypium hirsutum
  Clone ID: GOSHI-09MAY01-C57150_1
taaaaacacaaaggacagtgatgaacaccacaaactagaaacttcacctgtgttgcttgaaaaggttgattatagtaaccgtggttctgattcagattccaagggaagtgataagcgcagaactaagcacaaggatggtaagagaaagcataaacggtccgagaggcgtaaagtcacttcagacgacgatgattctagttatgattccgaaatcgatgacaggaaagaagctaagaggaggaaaaaggaagaaaagagattaagaaaggaagaaaaacgtaaacgtagcgaggaacggcgtcgcaaaagagaagcacggcgtgcagagaagctcaaaacaaaacgtcacgacgatgattctagttcagatggagagcatgcaggaactggaaagtctcgtccaggtgatgacgaggaggaggcagaaactgaacagaagaagcttgagatcgagttgaggaagaaggctcttgaatcgctcaaagcaaagaagggtatcagtcactgaatcttttcatgttttggacggtaatatgtcattttattgttgttaagcagacaccattggagtttcatacgagtttttatgtttcaatttggagtgaactttacatttatgcagaatgtggctcaagattaatggtgatttgacattttgttt

SEQ ID NO: 7442 - DNA, 417 bp, Gossypium hirsutum
  Clone ID: GOSHI-09MAY01-C57160_1
gttaaaggttgcctctagacataatactgcaataaaatatagaacgaaaagacagtatctgaaagtatatgggtcaagttgtaatatatttttacaacgaagtaggtgagtactccgaggattgtacctaatacaggcgagcgctagatcaattttaacctaaatactaaaagatctagttagtactttaaataaattatactatgagagcataaaagaggggttttttaagtgttcagaataagaaattaaaataacatatagtaaataaaattaggagatagaagagtaaatgaaatcttgattatgggtgattagcttgcttcgataatcctcatcgactgttacctcaggtttctcgtcaatcaactagtcgctaccctagcaggatctttcaatctttcactaatataacga

SEQ ID NO: 7443 - DNA, 852 bp, Gossypium hirsutum
  Clone ID: GOSHI-09MAY01-C57290_1
gcgttccgctttgtttgcgagctagccgacgcaccgtcccttcctcctccgcagtttgcttctaaaggtaaaaatcttgtggctgacgtggataaagggaagttgctgccatgggcgttcaagattatgcagagtcaaagttgaagccatctgttgatttaactggatctgcaaaagaatgtagtaacgggccatccattggtgttatagacatcggggtcagtcaaagtgccttccttttccgagttgcattgccgggcatcaggagcgatcaaagtaagttaaaatgtgagatccaacgtgatggaaaggttctgatacagggtatagtaacacaaggcagtgaagtgctgcagggattatcgagtgtgtgccagatgacagttgagaagttatgctctcctgggccattcaccatttcatttaatctgcctggaccagttgatccgcgattgttttctcccaagttccgtcctgatggcattctggaagtggtggtcatgagatacaggaggccaagtgatccagtggatgcctgggctccaccttcttgagatccttgcatcaaattatcaagttcaggaaaaggcatcatgtttaaagttgggtttgaagtttgttttgagtcatagaatcaagtggttgaatggtatggacattactctctcccaacgtgtttttatcttttaataaccagacattgataggagaaatgagattaaggattagtcaagaaacaaaccttatagagaagtagatgacagtacaagtgaattaacattccagattctccagtgaagcaactactactccctgaaaattatattaaaaaaccaacttgactttattatt

SEQ ID NO: 7444 - DNA, 383 bp, Gossypium hirsutum
  Clone ID: LIB3149-029-Q1-K1-E1
gtgatttcattagaagcgctttgtttgcgagctagccgacgcaccgtcccttcctcctccgcagtttgcttctaaagttcatcaattccaatctggacttttaggtaaaaatcttgtggctgacgtggataaagggaagttgctgcaatgggcgttcaagattatgcagagtcaaagttgaagccatctgttgatttaactggatctgcaaaagaatgtagtaacgggccatctattggtgttatagacatcggtgtcagtcaaagtgcctttcttttccgagttgcattgccggggatcaggagcgatcaaagtaagttaaaatgtgagatccaacgtgatggaaaggttctgatacagggtatagtaacgcaaggcagtga

SEQ ID NO: 7445 - DNA, 360 bp, Gossypium hirsutum
  Clone ID: uC-gsflmaxxa045f01b1
ttctctttcgtccggctttgtttgcgagctagccgacgcaccgtcccttcctcctccgcagtttgcttctaaagaacctgaggttgattaagatcgcagatcgcagctcttaaacaaataaattacaccatttcttgccattcttcattagctgtaggtattagtaaaataaagctcttttacaactgtggagctcctcattatttttcgaaatactagtctttaattgggaggaaaaataaacaaatgaaagagactttttgcatttcagttcatcaattccaatctggacttttaggtaaaaactttgtggctgacgtggataaagggaaggtgctgcatggggtgttcaagattatg

SEQ ID NO: 7446 - DNA, 798 bp, Gossypium hirsutum
  Clone ID: GOSHI-09MAY01-C50550_1
gcttattaaagatggctccaactaacgaagaagagcgtaagctgaaggatttcactgacgagtccccattcaagctaggtccagccgagaaattcctcaaggctgtgctcgacataccttttgccttcaagagggtcgtcccctggctcctctttgctaatcccgactccgaattcgagtacctgaaaaggtcttttgaaactggggaggccgcttgtggagagttacggaataccaaaatgtttcttaagcttttggaggcagcgcttaaaacagggaaccgtatgaatgttggtaccaaccgaggggacgcccatgctttcaagctcgacacactcttaaagctcgttgatgtaaagggtacagacggaaaaaccacgcttctgcattttgttgtgcaggaaatcatcacagctgaaggttctcgtctttccaatgccaatcagaacccgaaagctgagaaaatacaacagtccgatcttcaagatgatgttgagtttcgtaaacttggcctggaagttgtgtccggtttaagtggggagctaaccaacgtgaagaaagctgccgctatggactcagatcttctcagcattgatgttgcaaaacttgcaaccggcatttctaaaatccgagaagtcataaaactaaatgaagaggttgctttgaaagacagctgccggaaattctcggaatcaatgaacgagttcctaaagaaggcggaagaagagatcgtacagattcaagcacaagatcgagttgccctctcgatggtaaaggagataaccgagtactttcacg

SEQ ID NO: 7447 - DNA, 537 bp, Gossypium hirsutum
  Clone ID: uC-gsronu33B136d05b1
gttaccttgaaaccgaaactgaaacctttgcattgggataaagttcgagcgagttcggatcgggctatggtgtgggatcaaataaaagcaagctcatttcagttgaatgaggaaatgatcgagacgttgtttacggcgaataatttgaattcggctactaaagaaagcggtcgtaggcagagtttgccgtctgttaatcaagaaaatcgtgttctcgatccgaagaagtctcaaaacattgcgattctattgagggcattgaatgttaccattgaagaagtctgtgaagctctcatggaaggtaattcagacactcttgggactgagctcctagaaagcttattaaagatgtctccaacaaacgaagaaaagcgtaagctgaaagatttcactgatgagtccccattcaagctaggtccggctgacaaattactcaggctgtgctcgacataccttttgccttcagagggtcgatgcgatgctttacattgctaaattcgactctgaaatcgagtacctgaaaaggtcttttgaaac

SEQ ID NO: 7448 - DNA, 578 bp, Gossypium hirsutum
  Clone ID: GOSHI-09MAY01-C50450_1
cttacgcgtccggcatccttttggttaatattgcagccaccgtatttgcctgtcagtactacaatgatcaacttcagcttccatggtggggggttctattagcatgtggcattgccattgtattcacacttccaataggcatcattacagccattacaaaccagacaccaggtttgaacatcatcaccgaatatataatcgggtatatatatccaggatatcctgtagctaatatgtgcttcaaggtgtacggatatataagcatgacacaggccattaccttcctgcaagacttcaagcttggtcactatatgaaaattccacctagaacaatgttcatggcacagatcgtgggaaccctcattgcttgctttgtgtacctgggaactgcctggtggctgatggagaacatccctgatatttgcgacacaacggcctccaacagcgtgtggacatgtccaagtgataccgtgttttatgatgcttctgtcatctggggtttaatagcaccccgcagaattttccgggacttgggaccttacgaggcagtcaattggttcttccttgcaagaacagtg

SEQ ID NO: 7449 - DNA, 555 bp, Gossypium hirsutum
  Clone ID: GOSHI-09MAY01-C50170_1
tttgttaagcactacagggtttgatcatggtcacgagttctcatcgttcgatgatgctgatccatttgggtcaacggggccatttaggacatcactggagagtcagacaccaaggagagatgccaataaatggagtgcgttttagatataaaagtatataatataatataaattggattaaatggactaatggggttgtggttatcatgttaagccttgtaggtgaagaagggggtggtcatttgtgtggcggctttgattcttttattagtataaatagcgactggtaatggagtggttgtggcagtgtctttattgttttttttcttttctgcaactttataccgttgctcgttttgtcttttctttgaactggttgtttttagttgtagaagcttcaatcatccttgttcatggacaggtctggactcacgaaatgttgttgtttcaaattagttggtaataatcattggacgtgatatcgaacgtaaaatttgtataaactcatttctcatgcacttccgttttttgttatgggttctggcttcctttttt

SEQ ID NO: 7450 - DNA, 501 bp, Gossypium hirsutum
  Clone ID: GOSHI-09MAY01-C50060_1
gcaggatgtatcggcccaagccgagaccggccagctcgtgaacctaagggaagtattgggtgcgtttccgatgaacaacgtgactaggatgttactagggaggcaatatttcggggccgtatccgccggcccaagtgaagccatggagttcatgcacataacacatgaattgttttggctcttaggtgtgatctatttgggggattatttgcccatttggaggtgggtggatccttatggatgtgagaaaaggatgagggaagtagagaaaagagtggatgatttccataaaaggatcattgaagaacataggagggcaagggaattgaaaaacaaagaatatggaaaggatgatgattatggtgaagaaatggattttgttgatgttttattgtcattacctggtgaaggtggaaagcctcatttggggggttctgggtttttagcgctaattcaggatatgatagctgcggcaacagatacatcggctgtgaccaacga

SEQ ID NO: 7451 - DNA, 774 bp, Gossypium hirsutum
  Clone ID: GOSHI-09MAY01-C50380_1
gaaaaacatgggcttgcgttttgccgacctcttagatcgactttctactgagtttcctgagatgaggttcagatatacatcccctcaccctaaagattttccagatgaattgctgtatctgatgcacgaccgccataatatctgcaagtatatacatttgcctgcccaaacagggagtaccacagtgctttaaagaatgcgtcgggggtatagtagggaggcttatttagagcttgttcagaagatacgcagaatcattccggatgttggaataagcagtgattttatatgtggtttctgtggcgaaacagagaaggaacacgcagatacactaagcctaataaggctgttgggtacgatatggcatacatgtttgcttacagcatgagggagaaaacccatgcccatagaaactacattgatgatgttccggaagaagtcaagcaaaggaggcttactgaactgattgaagctttccgtgagagtacaggtcagcgatatgattctcagggtggaaccatccaacttgtgttggttgaaggaccaaacaggagagctccagataaagagcttatcggcaaaagcgataaaggccatagagttgcatttggtaatcatcctttgctggatcgggagaagcaaacagataacaaaaggaatcctgtgctcggtgaccgcgtagaagtccatataacaaagtcttcgagagcatcactttttggcgaaacagttgctataactaaattaagcgcattttacgacaatgtggatgaa

SEQ ID NO: 7452 - DNA, 782 bp, Gossypium hirsutum
  Clone ID: GOSHI-09MAY01-C50300_1
ttcccacgcgtccgctattccccagtctcaattattatcaatcaataccagcttcccttatccgccctttgtttttatatagcttttggattcaatctgaagattggagcctcgggttctgttttgataaggggcatttgagtttaagagttgatcttttgtttgtccgacaatggcgactgctattgggatgattggtgggaagggttgttcctcgtggatgcaagttaaggaaaagggaaagaagaagatggccaacagagttagagtttattgttcttctgctccgtcggtgatggatccttataaaactctcaggatccaacccggcgcctctgaatctgaggtcaaaaaggccttcaggcaacttgcccttcagtatcatccggacgtttgcagaggaagcaattgtggggttcagtttcaaacgatcaatgaagcttatgatatattgatgagtagattgagaggagaaccaaaggcagcagaagtgtatgaggaagagatagatgagccaatgagaggaatggatgattcagattgggatttgtgggaagaatggatgggatgggaaggagctggtattcgtgactattcttcccatatcaatccctacatttgatccttcaactgtacattacctctcttttttctttgtggaaatccaaatactactggtggctgtgcccccccccttctgtgtatataaaaacaaactctaattgtatcaatttctcatgaaaaaaagcatcacaagttaaataaataaattcgattttatc

SEQ ID NO: 7453 - DNA, 507 bp, Gossypium hirsutum
  Clone ID: GOSHI-09MAY01-C50270_1
cgactgagctgattggatgaaattgcaaacagctgaaggggatggaggtggaaaagagtggagagatacttggagagctcagccaccatcgatggagataagctgcctttgagattttcacgcctaatcatgcatggtctccgcgttgaactcatcgaaaccaatcgcgtcgttttctcttttaagggccacccctcgtctgttgaacgagggaaattacttgcatagtggagccgtagcgacatttgtagacttggtttcctccgcagcaatatacactgctggaggtaccttcgttggaacttcagttgagatcaatatttctttcatggatgctgctcatgctgatgaggatattgagatagaagcaaaggctttacatgttgggaaggctgttgctgtcctcagtgctgagtttaagaagaaaagtactggtaaaattatagctcaaggtcgtcatactatgtatctacctctaccaaagtaaatgtagataacatattaatg

SEQ ID NO: 7454 - DNA, 579 bp, Gossypium hirsutum
  Clone ID: GOSHI-09MAY01-C50220_1
cggcgcgacccacgcgaacggattggtcgtgctctgaattatttacatcatgtggttggtgtttgtcatcgcgatattaagcctcaaaatttactggtcaatccccacactcaccagttgaagatatgtgattttggtagtgcaaaaatgttggtaccaggcgaacctaacatatcatatatatgctcaagatattatagggctccagaacttatattcggggcgacggtgtataacactgctattgatatgtggtctgttggttgtgtcatggctgagcttctgcttggacatccgctatttcctggtgaaagtggtgtcgatcaactagtggaaattattaagatactgggaacaccgaccagagaagaaattaaatgcatgaatccaaattacactgaatttaagttccctcagatcaaagctcatccatggcataagatatttcacaagcaatttccccctgctgcggtggatcttgtgtcaaggctgcttcaatattcaccaaacatacgttgcacctctttggaggcatgtgcacaccctttcttcgataatttaagggaccctaatgtatgc

SEQ ID NO: 7455 - DNA, 401 bp, Gossypium hirsutum
  unsure (1)..(401): unsure at all n locations
  Clone ID: LIB3146-036-P1-K1-G1
cccacgcgtncgnccacgcgtncgnccacgcgtncgctcttagaatgagaacatccccaggcccttattctgacctatcaatatcaatggctgaattggggctcaagaaagaagtaagagagatgctacccgtcattatatacaaggagaccttctctatacgagatactcaatgcgccgtatgccttggggaataccaagcggaggataaacttcaacagatacctgcatgtggtcatacatttcacatggactgcattgaccattggcttgccaaccacaccacttgtccactctgccgtctttctgtcctcacttctgataaattgcctgttattcaagctgcaaatcctcaggtgtcatctaatccagtcaatagtaatggattagctgttcaaaca

SEQ ID NO: 7456 - DNA, 305 bp, Gossypium hirsutum
  Clone ID: LIB3146-036-P1-K1-G2
ttttcctcactgactcacctaattcattgctcgaatgcgacacgttcgaagaggctaaagttcaaccccaaaacgatccgaggtattgataggaagagttcaatgattagagtaaagacagagaggctgccaagttttatatacatggaggccgtgtgtatacgacctgctcaatccgccgtaagcttagttgagttccatgagttggataaacttaaacagatacctgcatgagtgcatacatttcacatggactgcattgaccattggcttgccaaccacaccacttgtccactctgccgtct

SEQ ID NO: 7457 - DNA, 294 bp, Gossypium hirsutum
  Clone ID: GOSHI-09MAY01-C51850_1
cccacgcgtccgcctcgacttaagacctaggtaagcttttcccacatactgtgaatatcggtgttaagaatcttggaaagatataagtaaatccaaacatccattataggatactgtcgaaaaatatggttactatcttcctcatattgacgacaccgagggcattgagcatccatcgccactttcttatgcttaaggttgacgactaggaataaaattccaggagattctccatactggtattggaacttttggaggggatgtataaattccatagtttcctgtagaaatttt

SEQ ID NO: 7458 - DNA, 491 bp, Gossypium hirsutum
  Clone ID: GOSHI-09MAY01-C51570_1
gaaatcatcaaattcaaaggctttcaagtgccaccagctgagcttgagtccctccttataagccatccatcaattgcagatgcagctgtagttccgcaaaaagatgaagttgctggtgaagttccggttgcatttgtggttcgatcaaatggttttgaactcactgaagaagctgtcaaggaattcattgctaaacaggtggtttactacaagagattgcataaggtgcactttgttcatgcaattcccaagtctccttcaggaaagattttgagaaaagatctgagagccaagctggctgctgcagcacctaatacccacattccatgaaaatttcttctataatctatttggcttttaaattgcaacgccttttgctgattttgctttaacttaagcttttaatgtttctaactcaagaggtcctgaaaagaaaaaattagtatggcgatgatcctatgtcatatttaagtttgttctctttttctcat

SEQ ID NO: 7459 - DNA, 403 bp, Gossypium hirsutum
  Clone ID: LIB3146-028-Q1-K1-C2
cacatctcagtttcccagcattcatgttaaggaaaaatgggcaaaaaatctctatcttgcttgtctatgctatggaaggactgtatcatgaaatccatgtcattggtgacaattttactgagggataaaagggtggattttgttttcttcccctaattttatctgttatttgctttctctcgatgttccatgttaaatgtttagaggaggggagtacactagggatgtctaaatatacctcaagcccttgctatttagtttttgtattttaaaaatgtataagtgttcacaccctttgctccttttaaatattacttatgtgtaatattttcttgatataaagtaatgatgtggaattaaaatgatgttcttttcaatgttgtggaattattttgaaaatata

SEQ ID NO: 7460 - DNA, 370 bp, Gossypium hirsutum
  unsure (1)..(370): unsure at all n locations
  Clone ID: LIB3272-060-P1-N1-E2
gggaaaagaacattttaactccacatcattactttatatcaagaaaatattacacataagtaatatttaataggagcaaagggtgttaacacttatacatttttaaaatacaaaaactagattgcaacttttttatagtacaagggcttgagatatatttagacatccctagtgtactcccctcctctaaacatttaacatggaacatcgngagaaagcaaataacagataaaattaggggaaaaaaacaaaatccacctttttatccttcagaaaatttgtcaccaatgacatggatttcatgatacagtccttccatagcatagacaagaaagatagagattttttgcccatttttccttaacatgta

SEQ ID NO: 7461 - DNA, 668 bp, Gossypium hirsutum
  Clone ID: GOSHI-09MAY01-C51740_1
tgccattcgtccgactagccttaaccctctctccggcgcctctgtccccctctctcgctggagaataaatttgtctgttttcttgaagcacaagaataatgcctgagaaaatatcagaggacttatttaacaatctagtagagaccattgcagatagtgtctctaagcagaaatctgtgtccttttttgaggaagagaaatcaaactcggttgtctctggcttcaagcggcttcttggacggctgaggccggcccaccatattttggggggtggaaaacctgctgatgtttggttatggaggaacaagaagacctcagcctgctttttagctagtgcaacgttcatacgggctctatgtgcctggcttacgtacccttgcctgcctcttctatcctttgctttggtgcttggcatgcttgcgcagtctgtttggtcaaatgcctcgggtttacttaacaggtcatcttctcaagtgccacaccttgttttgcctgatgaattatttgttagcattgggaggtcagttggtgctgaggtgaacagaggcttacaatatctgcaggatgtttcatgtcagggaaacttgaaacaatttcttgtgattgcagtaagcttgtgggttgctgctgttattggaagtggtgcaactttttgaccgttttgtaca

SEQ ID NO: 7462 - DNA, 399 bp, Gossypium hirsutum
  Clone ID: LIB3146-033-Q1-K1-E2
cccacgcgtccgcccacgcgtccgagttctagatcgcgagcgcccacgcgtccgatcacccgctagcctcaaacgtatcatcaacatctctctctcgctctctctctgttgagttgttatatgtgtctactgagaagccaaagcaaacggaactttttttttttctgtgtgtggggctataaggttaagcatcaagactccatttttgaattttttttccataaatattgcaaaatataatattaaaagtgaacttcaaattatttgttaggtgttaatattttgatgagatttcagggctgttctgtttattccaggagaataaatttgtctgttttcttgaagcacaagaataatgcctgagaaaataacaacagaggacttatttaacaatctagt

SEQ ID NO: 7463 - DNA, 434 bp, Gossypium hirsutum
  Clone ID: GOSHI-09MAY01-C51770_1
tttacgcgtccgaccgaattgatgtgaagcgggatgagtgtaggcaaaacaatgatgagatgattggtccagattggttagaaggaagccctcctcgacttacctgcgttggaaagtgcatatttcttgggatttcaagcattggttaccattcattcatattccacaatggtaggtgctgtgctgacttattgtttaatttgagtctcttgtacctcttagagttttatattgcacagcctatacctgaagcatcatctgtcatcacacagacacagctagattaatagtattactcttccctttttctttttcctccctaagaccagaaatgattttgatttcattgattatcagtaaatcctaatatatatacatacaaaactcctaagtcgactagatgtgtgtttggaagcctttaaaaaaataaataa

SEQ ID NO: 7464 - DNA, 290 bp, Gossypium hirsutum
  Clone ID: GOSHI-09MAY01-C51720_1
cccacgcgtccgcaactcccttgctgaaccctgttatgggcttaattgattcttgggtctgatacttaccaagttcaagtaatgctcaaaatttgaaactagaaggctctttgtcaacatgtcagtcagattgtgttttatgccaattttaagaatccaaacatccccttaaatatccacctctcaaacaaaatgataacgaatgtttatatgctttgttctctcgtgatgcatttgatctttggtaagatgtataacactttggctatcgcaatatacaacagttgctc

SEQ ID NO: 7465 - DNA, 656 bp, Gossypium hirsutum
  Clone ID: GOSHI-09MAY01-C51600_1
gtcccttctatatctcttcttcccatcattcatgcctctctctccccttccatttttttttttgttacatcaatcataacttttcattcctttgaacacaaacccaagaaaataaagagtgacttccttccttcctccctgcgtttttgttctctatttagcttaagaaatttatacacattttcttatgaaacatacggagcccgggaggtgcaaagagttttctatggtgaaatggaggatgaggaggaggcggactgcttgcagtggcggaggcagcaccggtggtcgatcagttagaatgaagatcaaaaggttgcaaaagctaattccgggagggaaattgatgcaaccggatcgcctgttcttgaggacggcagattatatactgcatttgcgcttacaacttaatcttctgcaagctctttccaagatttgccaaccctcaatttaatctctccttttctttttataagggtaaaggtaaaagttatttaaagattggatgatgttaactaaacactccaataattcagtcgacattaatattcaaatatttatgtagattatatataatatagaatttatatggcattggctgccttgccatataccaatgtactctcttccttcttcttcttcttctttttttctta

SEQ ID NO: 7466 - DNA, 530 bp, Gossypium hirsutum
  Clone ID: GOSHI-09MAY01-C51620_2
caatattttcacctttttttttttcaattaatttctcaaaaagaaactaaaaacctaagtgacgccgaaatttactacaagatgccgaagaagatgggtgtaaacagcaaagccgaggcggcgcgtgcgcgcaagagcgccgccgaatccgatcggaaagagcgtgaagcacgggagaaagaagagaattactggcgcgaagccgagggtcccaaatccagggcggccaagaaacgcgaggaagacgcagagaaacgagctgaagccgctgctcgccgtgcggaggcgcgtcgtcagcggagatggaggagaaagagatagataagcgatgaagaaaccagataagaaggcgaaccgtgtggcaattcccgtccctaaggtgacggaagcgcaactacaggaaaggaagaggggacaacgaatggcgaaaaaagcggaggaggccgaaacagagtcggacggcggcggaagaagagtatgagaggatggtattagtgacgaatacgaatagggatgaatccctgaatgag

SEQ ID NO: 7467 - DNA, 596 bp, Gossypium hirsutum
  Clone ID: GOSHI-09MAY01-C51620_1
ttcttcaatattttcagtgacgcccaaatttattacaagatgccgaagaagatgggtgtaaacagcaaagccgaggcggcgcgtgcgcgcaagagcgccactgaagccgaacgaaaagatcgggaagcacgggagaaagaagagcagtactggcgcgaagccgagggtcctaaatctaaggccaccaagaaacgcgaggaagaagccgagaaacgagctgaagccgccgctcgcaaggctgaggcacgccgtcaagccgaaatggaggagaaagagatcgaaaaggcgttgaagaaaccggataagaaggccaaccgtgtggcgattccggtgccgaaggtgaccgaagcggagctacagaagaggaaggaggaggagcaagcggagatggcgaagaaagcggaggaggcgaagaagagacagagtaggaccgcggccgaagaggagtatgagaggatggtgttagtgacaaacatgaatagggatgattcgttgattgaagccaggagtgtcgaggaggcgattgcgccgatgtctgtggcggacacccttcccccggatccccatcctgagaggccgcttagggctgccttcaa

SEQ ID NO: 7468 - DNA, 997 bp, Gossypium hirsutum
  Clone ID: GOSHI-09MAY01-C51140_1
gagagagagactagttctctctctctggagatgttgtccgtattttcgcagattgtgtcggatgatgctgtactaccgatgcgtgattgcatcgttcaggccttggagaaacttacggtcgatcaaggaatgccgccttctccggattcttgggtaatctaacttttttttccacatgaatagttcaaatcttcaatttgtaatatattagggaattgtgttttcccacttgtttgtggcttgtttttggttgcttaggttacaagtaacataatcgaaccggctttgcaattgtgggatggcaacaatcaagagaaacttgtttcccaagaaaccttcttggaagaattcaagaaagttgcggaacgtgtggctcaaaatctcaaggaacaacccgtaatcgtcgcccatagtgagaacactttcgatgggagcggcattaaaagactattaaccaacaagttcgaactagacaagttgcttaatacggctttagaaaatgtcccgaaagatcgtaatggtaaagtatcaaaggagtacttgcgcgtcgtgctagacgtagtggcaccatctgccagtttacctccaataggtgcagttgaacagatcgaccaggtcgttgccgatgcttttgacatgataaacgcggacgacgggaaagcggttaaagaagatgagttcaagaaactattgacggagatcttaggaagcgtcatgctgcagttagaaggcaacccggtctcgatttcttcgaattctgtcgttcacgagcctctcgcatcgtcctcatcgttactgcaaccatcatcctagttgcatatcactaatattaagggtgacaaaagaaaaaagggacaataaattttggttaattttaagttaaaaaactcttagtagcttttaagttgaattatgtgcagtttcactggtttgtatcgtgctaatgaaaatatattaccataatacatgcaaatacagtacaaaatacaatattttc

SEQ ID NO: 7469 - DNA, 612 bp, Gossypium hirsutum
  unsure (1)..(612): unsure at all n locations
  Clone ID: AI728930.1
ctaccgatgcgtgattgcatcattaaggccttggagaaacttacggtcgatcaaggaatgccaccttcttcggattcttgggttacaagtaacataatcgaaccggctttgcaattgtgggatggcaacaaccaagagaaacctgtttcccaagaaaccttcttggaagaattcaagaaagttgcggaacgtgtggctcaaaatctcaaggaacaacctgtaatcgtcgcccatagtgagaacactttcgatgggagcggcattaaaagactactatccaacaagttcgaactaaacaagttgcttaatacggctttagagaatgtcccgaaagatcgtaacggtaaagtatcaaaggagtacttgcgcgttgtgctaaacgtantggcaccttctgccagtttacctccaataggtgcagttgaacagatcgacaaggtcgttgccgatgctttagacatgataaacgcggacgacgggaaagcggttaaagaaaatgagttcaagaaactattgacggagatcttagggagtgtcatgctgcacttaaaaggcaacccgatctcaatttcttcgaattctgtcgttcacgagcctctcgcatcatcctct

SEQ ID NO: 7470 - DNA, 979 bp, Gossypium hirsutum
  Clone ID: GOSHI-09MAY01-C51130_1
taatgatctcacgaagctggttcagcactgcaggttacttcagcgtctctggatactggattgtattggagacaagggactcggagttgtggcttcgacttgtaaagaattgcaggaattgagggttttcccatcggatccatttgatgccggaaatgctgcagtgacagaggaaggtttggtccttatatcatcaggatgtcctaagctcaactcattgctgtatttctgtcatcagatgacgaatgctgccctcatcactgtagccaagaattgcacaaattttatccgtttcaggttgtgcatccttgaccccgtaaaagctgaccctgtaaccaatcagccattggatgaaggttttggggcaattgtccggtctaacaagagtctgaagcggttatcactctctggccttctgactgatcaggtttttctttacataggaatgtatgccgagcagctcgagatgctgtccatcgcttttgccgccgacagtgacaaaggaatgctctacgtgttgaatggttgcaagaaacttcgcaagctagagatcagggactgcccctttggtgacgcagcacttctagaggacgtgggaaagtatgaaacaatgcgatccctttggatgtcctcctgtgaagttaccctcggaggctgcaagtcagttgctgagaagatgccgagcctaaatgtggagatcatagatgagtgtgaacaaatggaatttaaccttgtcgacaagcagaaggtagacaagatgtatctgtatcgaacattagtcgggcataggaaagatgcaccagaatatgtgtggattttgtaggtgcattggtttggctcagccattatttatctttgcttatttaagtagttgtacgttgttagcgcccccgcggccgatgtattattagcttgtggtgatctagcctttatgctattgttgtaatccttgttatttataaatggatctgttttaagt

SEQ ID NO: 7471 - DNA, 430 bp, Gossypium hirsutum
  Clone ID: LIB3829-004-Q6-N6-A7
gattctgaaaaaacttaaaacagaccatttataaataacaggggttacaaaatagcaaatctcttgtacattaaacaacaatagcataaaggctagatcaccacaagctaataatacattaaaatcggttctcctaacaacgtacaactacttaaataagcaaagataaataatgggtgagccaaaccaatgcacctacaaaatccacacatattctggggcatctttcctatgcccgactaatgttcgatacagatacatcttgtctaccttctgcttgtcgtcaaggttaaattccatttgttcactctcatctatgatctccacatttaggctcgggattttcgcaagctagagattagggactgcccctttggtgacgcaggacttttagaggacgtgggaaagtatgaaaaaatgggatcccttt

SEQ ID NO: 7472 - DNA, 421 bp, Gossypium hirsutum
  Clone ID: GOSHI-09MAY01-C51370_1
cccacgcgtccgccgaaattgatgagctaaccgtggatacgtcgggagaagatggttagtttgggatcaagagcttcactttgctgtgaagataggtccgaccttttgcctgacctaatcaaaacattgaaagctttacgcttgaagacactaaaagctgagattacaacgcttggtgggcgtgtaaagaatagttctgtttataaccggagaggaagactccagtagtagcgctgagcagcagcagcttctgctgcagtattgtattagttcaatacaagaagcattgaaagcggtgatggagaagacttccgtggacgaggcttcttcagggaatgtgaagagacatagaaccaacatcggtgtcctggaacataggtctctttagcttacaaaagaccgcgaatacgtactttttttt

SEQ ID NO: 7473 - DNA, 553 bp, Gossypium hirsutum
  Clone ID: GOSHI-09MAY01-C52470_1
aagacgagtcaagcatcttggtctttgttagaaataaatgagcattgcttaaactagaactgcctgtttctgtcgtggttgtaataggcccattttgcccgggccaattagaatacaaaatagaaattaaaaaccaaaaaaaaaacacacacacacaaataaagaacccaaaatcagaagtccaatgtccgattacaaatatttgggcaaaaactaacttaaacccaaaatcccttaatataaacttaacccagttacataaaatttgacccaattaaataaatcctaaaacctaattctaataacccaaacccgaggcccaatacacccaaaaggaaactcagcagcctgagaaagccagaagcttctggagtaagccagaatggcaccagaaggtcatcttctcactagaaatccccacgctcggcctccacgtcatcagggtcgttcctccgtacggccgttctaaatcttttaaggtgtagtcaagcaccgtcaatggcataatcggggcggtgtttgcatgcggctggtcaccaaatgatggtggttc

SEQ ID NO: 7474 - DNA, 674 bp, Gossypium hirsutum
  Clone ID: GOSHI-09MAY01-C52760_1
caaaaacctaaaagagagatgcgatattattgacttagctgtggaaatggatcggatactgagacccggtggatatcttttggtccaagacaccatggaaaatattaagaagctcaatccagtactccgttcacttcactggtcaacaacactttatcaaggccaatttcttgttggcgagaagggcttttggcgtccgagtgagaatgataaccgaaaaagaaacatgagcagctatcctggttcttccactcccaatttgtcctcgattaagattggacttcaactctgcaacattcaaatacttctttaccctaaattcaatcctatagaagaaggatgagtttatagcatttaaatagcttatctgtcgattaaattatccgagttttgcttggccatgaacaacaggtccagcagaggttttggacagttacgttagacggactcgaagtgagtgttgtattcaacccaagtatatgccatttccttcacattttgttaattattcaggggatcatagatcttgtactaatatctgaatgtatcagacaatgatattttcttttaaaaaatttagagtctgaataatgttagatgaacagctggaaagggagaaaaaaaaagcatttggtctcggcttcttcaaaaaaaaaaagcccacgcgtccgcgc

SEQ ID NO: 7475 - DNA, 1117 bp, Gossypium hirsutum
  Clone ID: GOSHI-09MAY01-C52710_1
cggacgcgtgggcggacgcgtgggcggacccggcggccgcgatggcggagcagcagcaactagagccatggaccgacctcagtggcaaagtggtgatggtgacgggggcatcttctggtttaggtcgtgacttttgtcttgacttgagtaaagccggctgtcgtatcgtggctgccgcgcgccgcgtcgatcgccttaaatccctctgtgatgaaatcaatcacctcacctttcctttttccggaccccagcctagtggccctcgagctttcgctgtcgagctcgacgtatgtgctgacggatccaccatacagagctctgtgaaagcggcctgggatgcctttgggaggatcgatgctttaataaataacgctggcgttagaggtaatgtgaaggatcctttggaattgactgaggaggaatggaatcaaaacatcagaaccaatctaacagggtcttggttggtgtcaaaatatgtttgcatgctcatgcgtgatgcaaaacaaggaggatctgtaatcaatatatcttccattgctggtcttaatcgtgggcaactacctggaggtttggcttatgcttcctcaaaagcaggcctaaacaccatgacaaagaccatggccatggaactggggatgcataaaatccgagtgaactcaatatcacctgggcttttcaaatctgagatcacagaaggccttctgaagaaggcttggctacaagaagtggctacaaaaatcaaccctttaagaacatttggtacggcagatcccgcattaacctcgctagttagatacttaatccatgattcttcggaatacgtaacaggtaacatattcatcgttgatgccgggtctaccttacccggtgttcccatattttcttcgctttgaagcacaattggaatactaaatgtttgtattccttgataagaagctaccagaatataggttttgtattggtaaaactcttaaactatatagcggaagctatgccttcttgtaagattgtaaataaaggatggaagtgatctaatccttccttgcttttcacccttgtaataagatttttgaagtttgtttgctaccttcactatcagcaagacactggattttct

SEQ ID NO: 7476 - DNA, 510 bp, Gossypium hirsutum
  Clone ID: uC-gsronu33B049c07b1
atctgatttggcgatggcggagcagcaacaactagagccatggaccgacctcagtggcaacgtggtgatggtgacgggggcatcttctggtttaggtcgtgacttttgtcttgacttgagtaaagctggctgtcgtatcgtggctgccgcgcgccgcgtcgatcgccttaaatccatctgtgatgaaatcaatcacctcagctttcctttttccggaacccagccttagtggccctcgaagctttcgctgtcgagtctcgacattatgtgctgacggattcaccattacgtagctttgtaaagttggcttgtgattccttttggaggaatcgttcttttattaaatattatcgctgccctttatgtggatttttaatgtctcttttgtttttttcttaattaggatttgactcttatatttttctacactcacttattttgtcatttttttttttacttctcattacttatttctttttactttttttttttttttttatatttttattt

SEQ ID NO: 7477 - DNA, 535 bp, Gossypium hirsutum
  Clone ID: GOSHI-09MAY01-C52120_1
ttttgccaggaacccagagtgtcatccatgggtgccttactaaagaaggcataaacttcaaacttggcagagcccttcccctgatgatcgaagacaccattgaggaattctgcaggaaactcatgtcaaaggctagtttgacagacttcaatgaaatgttttgggcagttcatcctggaggaccggcgatacttaaccgcttggagagcactcttaaactgaacaaggggaaactagaatgtagcaggaaagctttgaaggacttcggaaatgtgagcaccaatcccattttctatgtgatggaatacatgagggaagagttgaagagaggaggagcagaagaatgggggcttgccttagcatttggtcctgcccccccccccgaaggcttttttcttcgcagcctgtaactacatgacattcatattgggaagttggtactttgttttctaatctttataatgccaacagccccttgttaaaaaaaaaaaaaaaaaaaaaaaaaaaaaaaaaaaaaaaaaaaaaaacccccggc

SEQ ID NO: 7478 - DNA, 352 bp, Gossypium hirsutum
  Clone ID: LIB3146-039-Q1-K1-D9
ggaaactagaatgtagcacgaaagctttgaaggactgcagaaatgtgagcagcaataccattttctatgtgatggaatacatgagggaagagttgaaaagaggaggaggagaagaatgggggcttgcctttcaatcagggcgggaactactggggaaggcctcttgcgtatcagcctgaaactacatgacatgcatatggggaagttgttgctttgttttctaatctttataatgccggcggccacttgagaacatctcatcgctatctctctctctatatatatatatatatatattcatatatcgcgcttgttttagttgacatgacatggaaaatgacattgagctcgt

SEQ ID NO: 7479 - DNA, 361 bp, Gossypium hirsutum
  unsure (1)..(361): unsure at all n locations
  Clone ID: LIB3493-008-P1-M1-B3
agataccaatttgaaaagttaattgaaacttgagaggaattgaacatatggttatcaaagataaagaactcaatgtcattttccatgtcatgtcaactaaaacaagcacaatatatgaatatatatatatatatatatatatagagagagagagagagagagagagtttacaagttgctgttggcattataaagattagaaaacaaagtaacaacttcccaatatgaatgtcatgtagttacaggctgcgaagaagaatgccttcaaaagtaattccaggaccaaatgctaaggcaagcccccattcttctcctcctnctctctttaactcttcccttatgtattccatcacatagaaaat

SEQ ID NO: 7480 - DNA, 557 bp, Gossypium hirsutum
  unsure (1)..(557): unsure at all n locations
  Clone ID: LIB3146-038-P1-K1-G2
ntcggacccgacgcgnttccggaacggccatatctaggaaggggaagccnnggatgagttngtngtttcctttggacccagtgccanntgctagaaaggtgtgattanngatgacnntggcttnngtggagacctgnnagaagtnntagcctatgctatgaangnnatgaggnnagatctatctatactnnngaggtggaacccaatnntttgcggagaattgatatngnngatgaacnnatgaganngtgaagnnaaaagagnnnacctgcangnnaaatggtcaccccaatagcnntggttttaattggaacctnnttggatgttanntcccttctggctggagggtgttactttaccgnnatgatganntggtcttgggattttcttgatgaaatgatttnngacggattagttttaatcttcaatggtggctcaaatcaaaacttggagtanctgagggaagaaggttcaatctcagcttccatgttcacanncgtatgaacggnggtaccaaaagggcttgtggggggaagaagaaatcatgtttttgattc

SEQ ID NO: 7481 - DNA, 341 bp, Gossypium hirsutum
  Clone ID: LIB3146-038-P1-K1-G6
gaacgccaactaagaaagaagccggatgagttggtttcctttgacagtgccaatgttaaaaggggggtagcataatgggcttgtggagactgagaatttacccttgcttgaaagaaaggagatcatctatactgagggggaccaattttgcggagatgatttggatgaacatgagagtgaagaaaagagacctgcagaaatggtcacaatagctggttttattgaacctttggatgttatcccttctgctggaggtgttactaccgatgatgatggtcttgattttcttgatgatgatttgacggattagttttatcttcaatgtggctcatcaaaacttg

SEQ ID NO: 7482 - DNA, 726 bp, Gossypium hirsutum
  Clone ID: GOSHI-09MAY01-C52300_1
tacttttccgtaattgaagcaggaaccagcaagcccaaactgcgattacaaacttctgtgggggaaaacatggcgggagcagctgaaccacaaaaacgccagagcgggagaccgttcccaccatcggcgagaggtccgcctcctcctcctcgccctcgctttgaacctgttgatcgcgaaaagacttgtcctctattgcttcgcgttttcactaagattggtggtcatcattctaaagaagattttgcagtgagaggcaaggaacccaaggatgaggttcagatttatacatggaaggatgctacgcttcgtgagttgactgatctggtgaaagaggtagctccagcagcaaggagaagagatgcaaggctgtcctttgcatttgtatatcctgacaagaatggacgttttgtggtgagagaggtgggaaagaccttttcttgcggtaatgtgaggcgattagatgacagctaaaccttgggtgtacttagctttgagattggagattacttggatgtggctattatgtcagcggagctttcttctgtccgattagtgacttggatcgggaggtgctgcaatgcatttccctcgagtttatcctactatgttaaggaaatcatcaagtttgatgcaagtattgtgtgattgaactttgtaaaatgtttaaaaggaagtaaaccatgtaaaaaaccaaaaatggacaataaaatgtaaatacaatag

SEQ ID NO: 7483 - DNA, 430 bp, Gossypium hirsutum
  unsure (1)..(430): unsure at all n locations
  Clone ID: LIB3582-013-P1-K1-F6
cccacgcgtccgcggacgcgtggggatgggnnnggcatcatctaaagaaaatttggcatggagagggagggaccccaaggttgaggttcaaattaatccatggaaggatgctacccttcgtgagtggactgatctggtgaaagaggtacctccagcaccaaggagaagagatgcagggctgccctttgcatttgtatatcctgacaagaatggacgttttgtggtgagagaggtggaaaagaccttttcttacagtaatgtgaggctataagaccacaaaaccccctgggaacacctcttttaaaaaagtggagattactggaatgtgcctattatgtcatcggagctttcttctgcccaataagtgacttggatcgggaggtgctgcaatgcatcccccatgagtttatcctactatgggaggaaatca

SEQ ID NO: 7484 - DNA, 427 bp, Gossypium hirsutum
  Clone ID: GOSHI-09MAY01-C52250_1
tcttgcttccttgcgtatgcttcgggtatatttgagaacttatgcacttgagcaaatggtccaagctgcaagctcctctgctggacttcggaccatcaagcgggttgagcaaaccttacaagatcttggggttaatttaaagccaaaggttccaacaaaggccgtttgtgctgagcatcttgaattaagaaaagaaattctaacgttgctaaatctccagaaacagttgcaatacaaggaggcagaaggttcatctttccgtgatggttcctatggtgatatgccaggcactgcaaagcggtcacaacgtgctgctgatcaggaccgcccatttgtccccgccaccattagttttggagtaattccaggtgatggggttgtcaagagggagcaaaaacgaaagggacctgggagaacatctgagact

SEQ ID NO: 7485 - DNA, 474 bp, Gossypium hirsutum
  Clone ID: LIB3584-040-P1-K1-G8
ctctgatgcgaggaaaactgatcaaagatccaggacattcacgaaaaatatggtcgattgttttagctctttcaccatactgagggcaatttgtattactgacaagctgacggtgctgcatattagccctcgtcggcaaataattccatgaaattctccatattgtaaccttaattttgtttggtagatttaggagctagagttttttgtagaaattcatgtagccagtttgtaaagcctaagctctaggaatttcctccaaaatttgtaataatttataggtgctgcgaaccgaaaactcgcctcagtacgcgcctctctagaccaagagatcatcgtaaagtgtgcgtgctaaaggaatgtggaggattttcccagcatcatccgctgaaaaggtgtagacttgagacgttctatgatcccgtgcctcatcggaccacaaccaaagcagaaagttggtaattttcatattta

SEQ ID NO: 7486 - DNA, 418 bp, Gossypium hirsutum
  Clone ID: LIB3146-057-Q1-K1-F7
ctagtcttaaagtggtagaggtgatcggcttcagaggttttaaaatcgatgtggatttcgttgcatatctacttgagcatgggaaagtgatggagaagattactattaattgttgccatccaagttgggctgggcaaataattccatgaaattctccatattgtaaccttaattttgtttggtagatttaggagctagagttttttgtagaaattcatgtagccagtttgtaaagcctaagctctaggaatttcctccaaaatttgtaataatttataggtgctgcgaaccgaaaactcgcctcagtacgcgcctctctagaccaagagatcatcgtaaagtgtgcgtgctaaaggaatgtggaggattttcccagcatcatccgctgaaaaggtgtagacttgagacgttctatgat

SEQ ID NO: 7487 - DNA, 434 bp, Gossypium hirsutum
  unsure (1)..(434): unsure at all n locations
  Clone ID: uC-gsflnu33B073h03b1
cagcatgttcaacttctttgcatttattcttcaaaacccattttaaatctcccaaaaacctcttcttttatccaaattctatccattttcagaccaaagtttccaccttttcttccaacaacttaacattattctttaaaaacagcaaaactctttacggtacttggaaactcaagtctncagaagaagaagaaacagctgttgttgtacatgaacgagaagaaacaactgtttgcgaacaagagtctgtttttgttcctgtttctccttcagacactctcagaatgtacttccagattcctgctcaaggattgacaatgagacggtttaaaggttatgaaattaagcatggatgatgaataatgattttttgccaagaagaaggcagttgaggatgccttggaagcaaaacaaatagtaaccaatagctttgt

SEQ ID NO: 7488 - DNA, 436 bp, Gossypium hirsutum
  Clone ID: LIB3146-057-Q1-K1-D10
cccacgcgtccgcccacgcgtccttttttcttccaacaacttaaccttatcctgtgaaaaggcagcaaaactctttacggtacttggaaactcaagtctgcagaagaagaagaaacagctgttgttgaacaagaacgagaagaaacaactgtagccgaacaagagtctgtttctgttcctgtttctccttcagacactctcagaatgtacttccaggcagatggaatgttgaatgaagctgaaattccgaaggtgaccaaggcattagagggagcagaaggcgtttccgatttgaaggttcaagtccttgagggtattggtactgttgagttaacgaaacagactacggttcaagctaccggagtagcatccaatttggtggagctcatacaaggcgcaggattcaagttacaaacattgaatttgaagtttgatg

SEQ ID NO: 7489 - DNA, 804 bp, Gossypium hirsutum
  Clone ID: GOSHI-09MAY01-C53750_1
gctgctcggagctccatacacgatccgaaaccgatagagattcaaattaaaggagaatgtgcggggacgttacaaactgggacgaagaagcatatagggagagtatattaagggaaagagagatccaaactcgaaccgtattccgaaccgtttgggctccttcctttaaccctaaccccgaatgcgtcgtggtcgcctccagcgacggttccatcgcttcttactccatttcttcctgtgtttccaaacacccgattggtttctgcagtgctagggctcaacggttgttaccggctgagccggagggtttccttgaagggcatgatggacctgcgtatgacgtgaaattctacggcaatggcgaagattctttgttgttaagttgtggtgacgatggtaaaattaaaggaggccggtggaaggaatttactgaatctgaggtgcctattacctttcaaggaaaccatatgaagccagtgcttgatttgatcaatccacaagataaaggtccatggggtgctctctctccaattcccgagaataatgccattgctgttgatcctcaggggggatccatcttttctgctgctggtgattcttgtgcatattgctgggatgtggagaagagtgaaatcaaaatggtatttaagggacacacagactatttgcattgtattctatcacatgcctcttccagtcagattataactggatcagaggatgggactgcacgaatatgggattgcaaaagtggtaagtgcattaaagtaattgacccactaaaggacaagaagttgaggggcg

SEQ ID NO: 7490 - DNA, 397 bp, Gossypium hirsutum
  Clone ID: GOSHI-09MAY01-C53730_2
atcaggctcagttcctctgccaggcaagcaaagggaggttgaaggaagatgaagctagaaagtattttcagcatcttattaatgctgtggattactgccacagcagggatgtttaccatcgagacctcaagaatacggaaaccagcagcaaaccaacaggcagaccagcatccaagctgaaccagagaagcaacagcattttgtttattttgttcatttgtaacttgatttagttcctttgtaatttatacttaaagttagtaggagtagttgttgatttatatttaatgttatagctggtatgtcagctacattttgtgtgcaattctaactaagctttagtcatgtattagtgggagcagttatacattagagaactgccatatttcattgtaac

SEQ ID NO: 7491 - DNA, 793 bp, Gossypium hirsutum
  Clone ID: GOSHI-09MAY01-C53730_1
agggagcttgttacaaatacttttaatgtcaacaacattctatttcagcgtatacttttttttattcttgctatgtctggtgtttggtattgcaggcagagctcgagtcttttaaaatggaatatgcaaatgcacgactggaatgtaatacagctgatgaacgtgctaatatattggcttctgaagtcattggtttggaagagaaggcacttcgattaaggtcaaatgagctaaaattggagaggcaattggagaactcacaggctgaaatttcatctttcaacaaaccagcatgcagaccaacatccaagctgaaccagataagcagcagcattttgtttattttgttcatttgtaacttgattcagttgcaatgtaatttatacttaaagtaagtaggagtagttgttgatttatgtttgatgttatagctggtatgtcagctacattttgtgtgtaattctagctaggctttagtcatgtattagtgggagcagttatacattaggtaactgccatatttcattgtaacataaatgcttctcaagtcaatgaaaaagatctggtttttggagataaaaaaaaaaaaaaaaaaaaaaaaaaaaaaaaaaaaaaaaaaaaaaaaaaaaaaaaaaaaaaaaaaaaaaaaaaaaaaaaaaaaaaaaaaaaaataaaaaaaaaaaaaaaaaaaaaaaaaaaggggggggcctatttaaagggccaatgtttaaaaaccgtgatttccaggaaataactttttttatggggccccaaaaattattcccttgggccg

SEQ ID NO: 7492 - DNA, 805 bp, Gossypium hirsutum
  Clone ID: GOSHI-09MAY01-C53690_1
tatttttgtcggtgaaagcagtccattccatgcagaatctgtgcatatgagtgacaaaattggaagaaagaattgcactcttgttgaggtagatttctatttgccgagttgattctttcccgtttcttcaactttggtttcagtctcaaactttgaaggcagtgagcattcataagtttggctgaatatcgtcacccagaatcattaaattttttcgttggtttttgttcattatcaggttaaagcatgtggctcattggtaacagaagagcacccattggccatgctggtcccaattgaattctttctaatgggatttggtttccaaagacaaccacattttgcttcatcatcaagcaatggttcaaacccttcaagtccatcaagccattcctgcatagctcctgaacttcttctcccctgagggtctagggatcaagctcaaaccaatcaaaacccgtgcagatattgaaatttgatgagtctcgaagctgctgcttatcgattttacacgtatcgaatgtaacagtgcaggagtaggatttgacattttttgttcattctatcaggttgtagaataccttttgaggtttggcagatataattctttgattgtgtgggtgggaggttctttcaatggagtttattgtagataaacattgattggatatttggctcttaaaaacaggataggatattcatttttttgagaggaaagcattagattcattttgttattaaacctttaaactttgtacacatgaaaccccttgttgaaatgaaaaatcagaattgtttttcaatt

SEQ ID NO: 7493 - DNA, 912 bp, Gossypium hirsutum
  Clone ID: GOSHI-09MAY01-C53670_1
acacttgactcctttatggaatatgattctttgcttgagtcaccaatctcgatgactcaaatttctcgcaacatggaatatgatcaaaggagtgtgactcggaagctttggaaatatgaaaatggaggtgtagatgtatcgcttaaggatggtttgttctctgcagtgactcaaggacgttccatatgtgactcaccttctgatcttcacgaacttagcaataatgggtcggagttcacggaggagttttcaggattcttgtatagaagtcctagaaatgtgttgccaagaagtgccactcccagtcctcagagatcgcgttcacggattaacgtagaggccctctttacaactccaaggaagctcatccactcacttcaagatcctaatgaattgaactcagattactccgagaaacaattcaggaggttcagaagtccatgctcagagaaatttggaggtagtccaaccacaaaccgtaacagttttcgtcgtggtattatcaatgaggtcaaacgcaaagcacgttcgtataccgatggtgaagatcatggtgtctctgaatctgtatcatcaactgatgacagtcctgctgagcttgatgtcctacggtctactgatgcagcccctaagaacaagaaagaaactctcgagtaccccaatgagaaagtaggtaagaacatggctcctaaattgtttctgggcctctttttgattataattgcagtcctcacttgtttatggtggactgaaggtgaggatgaaagctctctatgttgttccaacataggttcactcaactctgttgtatcaaacttgtcctagtgaattaggaacagtgttaagaacaatgttggagaacaggctctttacaatgccttttcaggtaacaatattagctgagcattctgc

SEQ ID NO: 7494 - DNA, 1295 bp, Gossypium hirsutum
  Clone ID: GOSHI-09MAY01-C53600_1
gttgatttgaaccttgaaatatgagagagctctggggggtaactctcaatcattcagaagaactgctagagatggtggaattgatagcttatttgggacgaaggacatggctgctgctgattccaactgccagggtgcagtggctgctgagggatcatctgttggactgatcaatgcagtccagccagcttgcagcaatgcagcatctgctgattccacgatgagcagcaaaactgattcaattctgtgttttacagcaaggcaagcccattcaagcgtatcattttctggccttactggagagagtagtgcaggagattaccaagattgtggggcttcgtcaatgcttctcatgggagaaccttcttggtgtcctccatgtgctgagagctccttccaatcagcaactcgaagcaatgcggtcatgcgttacaaggaaaagaagaagacacggaagtttgataagcaagtgagatatgcctctcgcaaggcaacggctgatgtgagaaagcgcgtaaagggacgctttgtcaaagccggcgatgcctatgattatgatccattgaaccataccagaagctgctgagaggctccaggtttccatcagaagttggatgcaattccccgaaaaaaaattgccatgaataaatcgcagtggcatggtccccagtagaaagctcgatggatcacatgacatcttgtggcaagatcttcccagattgtctttgctgtcaaaccaagctgtgggtttccagcacctgcgataaaacgtacaagcaagctcacctcagttctttttagtacaaaatgagagtgctaattgatcctcccaagtcgtattttatgttccagtgttggtttatgctaacaagttttaaccttaagctgttctctgcgcttctataaaagcggcggcggctgctgccgccatgacatgctaacttaaaatgtccaatcacagctgaatctcatgcagctgtaattttgttcttcttgcttcctattcatatatgcatagcttagatcctttgaatgtacagtataggatttaactgttttgcacttgggatgaaatcttttgttacctgtacaaagtagaaaaaaagcaaaaattcgttacattcttttgttaccgctaactgaatgcgaacagagattatttttatattttaaaaaaataatctctaatctatccagtcttcaagctggggactttgtacagctgctgaggtttttcccacttttggtccaaggaactcccggaatccagtagtcacattgggttccaattattc

SEQ ID NO: 7495 - DNA, 565 bp, Gossypium hirsutum
  Clone ID: AI727890.1
gaaaacactgatgcaaggctagaggcaatgagtttggtaaatggtgttcgtaattctttcttctactctttcatttcatcatcaagtcttaactctgaagttggattttagctttaccattcactaaaacaggttaagctacagtcaactacaacctgtgtctgtgtcgcgtagtaaaccaaaaaaaaagtcgccttttctttctttgtctccctctgccgcgctgctgctggctgctggagttcccgacgattgtaactagaaaaagtagctggaatatttgaagtcctgagaatttagatatgaagaaagcttgttccattcagggaccacttaaagaggaattcaccttttccactacttctgctcccttcaaaagttgtcacgcctctactattgttgaggtagataaagaccattttttggctgcttattttggaggaagctatgaaggagcacctgatgtgaaaatttggttgcagaaatacaaagatggctgctggtatccaccccttgttatcgacgaacaacctaatgttccaatgtggaatcctgtgctatttat

SEQ ID NO: 7496 - DNA, 376 bp, Gossypium hirsutum
  Clone ID: LIB3146-053-Q1-K1-F1
cccacgcgtccgcccacgcgtccgcccacgcgtccgtgaaggagcacctgatgtgaaaatgggggtgcagaaatacaaagatggctgctggtatccaccccttgttatcgacgaacaacctaatgttccaatgtggaatcctgtgctatttaaacttccatccgaggagttgttgttattctataaagtaggccaagaggttcaaaagtggagtggatgcatgaagcgatcatatgataaaggtgttacttggacaaagagagagcaactccctactggcatactaggaccttctaagaataagcctatcttgcttgaaaatggggttttgctctgcggatcgtccgtagagagttggaattcttgggggtcatgg

SEQ ID NO: 7497 - DNA, 1268 bp, Gossypium hirsutum
  Clone ID: GOSHI-09MAY01-C53380_1
cattaatgagatgctggttttgttttcttgtctgttgcaattgttgcagcattgcgggaaggtttgcagcttacacgcatttatgttatcctttattgtgcaagtaagatgctttatgcattgctggtcttaccttattatcttttgatcgaactgttagtataattatgaccaaaagaactgatgttatggagtaattggctggatatgatgcacagatgtttctgatttaacatatgcagatgttactgatggagaaatataagataaaaagaactcttataagcgtgtcatctcttaaccatcttcaactgtaaaaaatggaacaattatatgattcaagtggaagtgattgaatcgaaccaagttgaactctgcagacggttaaagtgtatcatgtcttacctttttcttttcctttatcctctcccccctccgggggggattcttacagctttaaccatcatgaactgtaaaagtgaaatataccctacaagcggatgtgattgaaccaaaccaagttgactctgaagatggataaagcgtatcatctcttactttttcttttcatttatccttttctcctcatgaatgaattgttacagcttttacaatcttgaactgtaataatgaaacaattgtatgatacaagcggatgtgattgaaccaaaccaagtcgacgctgaaggctcatcaaagtgagaggtatggttgtttatatgaaataatcatgatggatggctgtctgggtttgctgttaaagatatatatgagctaataatgatttgaaggaattaactgacaattagaacgcaagttggagttagtagtgttagctgttacttttctaacatgggaactgttaaaaagcagaactgatgagtggtgcccggcctaatgctatagaccaaattttcataactacgaagcttgttgtcgggatgatgatgatgatgacgttgaacaaatgatatggcatatggggtgggtggtgattctactgcgaaatgggtgaaaactatgcactgagtttctccgtgcagaattgtctctttgattcctgaaaacttttctttctcaaggaaaaagcatacattaaatggagcctgaatattcaaaatacatatacttccgaattttgaattgatttaaatatatataattaaaattgggacctttgcttcacatgtgtagaattctttgtgaattgaagtattgatttttattatgtaaatcttctttgttcttaacgttattatttataggat

SEQ ID NO: 7498 - DNA, 601 bp, Gossypium hirsutum
  unsure (1)..(601): unsure at all n locations
  Clone ID: LIB3584-011-P1-K1-C1
ccgggtcgnacccacgcttttttgtgttaagctgtaagaaccattcatgaggacaaaggggtgaaggaaaaggaaaagnaaaaagaaagnaaagagtaagagatgatacgcttataagagttccttttatcttatatttctccgtcagtaacatctgcatatgttaaatcagaaacatctgtgcatcatatccagccaattactccataacatgaattcttttggtcataattatactaacagttcgatcaaaagaaaataaggcaagaccagcaatgccccacgcgtccgggggaattcccgtctaccaaaaccctcctcctcccccttcttctcctccttttccattcgctcaacagcccttggattcatccttaccctcctccccttcttatttggctactaccaaaattggtaacaccagcttgaacccctttcagtctcagggattggtgagatcaagatttatgtcaaggtttccagcttaacgaagcatgagagctccaaggatgcggaggactactacacttcatgctcgctttgttcacgctgctgagttatcgggtggtcctgaaagagctacgcccaagtcggttccttg

SEQ ID NO: 7499 - DNA, 431 bp, Gossypium hirsutum
  Clone ID: LIB3146-056-Q1-K1-C6
gattgaaccaaaccaagttgactctgaagatggataaagcgtatcatctctcttactttttcttttcatttatccttttctcctcattaaggaattcttacagcttttaccatcttgaactgtaagaatgaaacaattgtttggtacaagcggctgtgattgaaccaaaccaagccgaccctgaaggctcatcaacttgagaggtatggttgtttatatgaaatgatcatgatggatggttttctgggtttgctgttaataatgatttgaaggaattaactgacaattagaacgcaattgagagttagtagtgttagctgttgttacttttctaacaagggaacggttaaaaagcagaactgatgagtggtgccccgcctactgctgtagaccaaaatttcataactacgaagcttcttgtcgggatgatg

SEQ ID NO: 7500 - DNA, 555 bp, Gossypium hirsutum
  Clone ID: GOSHI-09MAY01-C53230_1
catggatggaagaagatcctagagaagctatacttaagtacgctgatgttgctgaaaaagacccaaagttcattgctcctgcatatgctgaaacccagccagaacctgtttttgcaaagtcagattttgaggatgaagagaaatgatctgattgtgctgatatgtatgatctctatgttacccaagttaatatggctccgacggaactcattgaattgaactggctatctggaaggatggatccttgaacttactgcccatggtgaatcattgtaaaagattaggctactatagccctgtttgactttcatggtgaggatagtatctttaatgaaatctacttttagctttaagggatagtgttaaattttattaatgatgattggtttgaccttcgtggtcaaagagggtaggttagtttgcgaagctttgatgtgtaagctgatagaagaacagatgtcccagtaacatttatagctaaatacaatgaccaagaatatgagttgctctatagactgtgcgatttaactattgacatttacaaggattcacgag

SEQ ID NO: 7501 - DNA, 761 bp, Gossypium hirsutum
  Clone ID: GOSHI-09MAY01-C48830_1
gcgctcaatcgctcatccgccaaaagttgttcctcctttcatttcaaaaagaaaaaaagagagtcgaaattcgatataaaagattaatgttataaattccatttctttttcaaaatttcattttattttattttttgttttttttttcaccaatccattttcaataacaatggagaagagcattcaattcaaatcccaaatccttcactacacaaccaatagtttcttaaacccatttctcgaatccaccatttctcttcaagctttcaattgttcatggaaatctcccattttcaccgtttctcctttgctttcacccaaaacccagatccaaaaaccaattatttgcgcaagaagaagcaaaagaagaaaggggtctgacagatcgacaaagctcgcactcgagttgctgtcaattttggcttcgaatctcaggatcttacctcaaccgttggatctgatcgttcaaaatttagttgctgcagatgaagaagggcttgggtttttgaacggcttcaatggagtaagatttaaaggatggaaaaagccaacaatgcgaagaagaaacgggaagaaaattttagggttcttagtaattttagggtcttgtattctttgcttgttgtttgggaaagagataagtagtgatatgctttttgggatcttagggttaatcttttttgtgtttgcattgattaaagagtggagaagggggtttaaagcttgggtttttggggtctgttgtgttggggtttctgttg

SEQ ID NO: 7502 - DNA, 504 bp, Gossypium hirsutum
  Clone ID: GOSHI-09MAY01-C48590_1
ttcccttttggggtgtgggaaattttgcaggaaatgggtgaccagaaagacaagaaggacatcaaggactcacctggtcctatccctgtcaaggactcacctggtcctatccctgaaggttgggttttgtataccaagttcagaaaagaggtattgaagtcaagacctacttttgtccagccactgagcaagaattctacacttatgaggatcttatgagatacgtgaggtatgccaaagctgccaagctttccatctatagtcctgagtttgaggaatacatgaagaaaaaaggccaaagctagtttcattttggagaagaacatgaagatgaagataaaaaaatgagccagcttgagtgaaatctgcagcaaaatgtcatgtttaattcaataaatgttgatgggttgtgtttccatttcgcaatgtttgtgtcagtgtgattttcatttcattatatgtactgtgtcgttcaatgataaaatttgcttttggttttagttg

SEQ ID NO: 7503 - DNA, 857 bp, Gossypium hirsutum
  unsure (1)..(857): unsure at all n locations
  Clone ID: AI054762.1
gatagacctttgacgatcctttggcagatgaattaatggttttttatgagagaatgggtgacacacttgcacaccaatacagtggttctgcagctcacaataaggtattctctgagagacggggtcagtggaaagcagcaacccagtcccaagaagtcttttagaactcttcaacgatattatagcaatgcatatatggatgcacagaaacaagatgcaattaatttattccttgggaatttccaaccccagcctggaaaacctgctctttgggaattggattcaaatcagcattacgggtcatttttcccaagatctctttctgatggaaacattcttcgtcaaagtgagtcacctatgtcagccaggaatgacaagcaagagaaacttaccaactcaactttgcctaatcgatcacaagggacaagtaatggccattcagagtcatcacctgagatttcaacttgtggaagaaagatatcantattcaggtatacgcnctcaatggccccaaaggcagtgttcggacagtgcanatgatcgctcccttgatctgacatgttgctncgaacattgggtggatcactgctcttacttgtgacatgactgcttcaattggcgaaatctgtacgcgaaccttttagaacctaggctacaacctttagtgatgcgcatcttaaagttgatgatatagcgaaccccatcacctggaatgtcggtaagaccgcnagcacgcttcttgtgatcattcattctgagcatccaattgccgtatgggcaaattctaattgtgttccacattggaatattacnttatcgtataggaacaacttttcgtaaatccctttgcttccgtt

SEQ ID NO: 7504 - DNA, 617 bp, Gossypium hirsutum
  unsure (1)..(617): unsure at all n locations
  Clone ID: AW186893.1
gagaatgtttgctccgaacatggggatggattcagctgctctaactttgttgacatagactggctttcatctgccggaaattcatgtgacggcgaaccatttgagaggtactttttcattttctataatccatgtatgttctaaagcttgatctttgaagctacagtagcatgagatgttcgcatagaaaatgcataaacctttagctctatggtattttctgttgtaaacttgtcctcaatcctgccacgtattttctattcatgaatcaaggtagagtttagtaccataatgtacaacaaggatgcacacgcacaaaaagggcattgttaatacacggcttgctcaatgttgtacatggatgttaacggtagatattctgcattttttaaactaataagccaggtttctcaatttttaatcgctataaactatgttactccctcaggtgtgtatgctagatatgaatacgtgcccgacaagaatntattcaaaattttattagttttactgttatttaaaggatcataatcatatgcccatatctggatatgcatcagccacaggtgcttanaagaaaaatgaagagtcngagcaacnaagactacnaacagtac

SEQ ID NO: 7505 - DNA, 424 bp, Gossypium hirsutum
  Clone ID: LIB3135-047-Q1-K1-A8
ctcaactttgcctaatcgatcacaaggagcaagtaatggccattcagagtcatcaccggagagttcaacttgtggaagagatatatcatattcaaggtatacgccctcaatgccccaaaggcagctgttcggacaggtgcaaatcgaccgctcccttggatctgacaatatttgctccgaacatggggatggattcagctgttctaactttgttgacatagactggctttcatctgccggaaattcatgcgatggcgaaccattcgagaggtcactagtgctcacaagctctctagttgatggcccgtcatctgaaaatgttgtcaatggaatattaggcgaaacaaccccatccacctgtgaaaacggatcgagtatgaaagaaacacagcagaaaggaaccaagctatcctttgctgatatg

SEQ ID NO: 7506 - DNA, 435 bp, Gossypium hirsutum
  Clone ID: GOSHI-09MAY01-C48780_1
gagagagagagaaaatcacagcttggtagtatccgtctttgctgctgcaatgttggcagagagacgagagagggcagcagctggtttaatccaaaaatactctctctgtctctcctcactgctcatagattggcagccgaattaagccacattcgcatcaattaccactcttaattatttgattctccccctaagtctctattggaagacgagcaatgagctttgggtccttttggtttgggttattatgttaggaattagttattagttattctgggtttcttggtctgctttctttgtctcgttcgttatcaataatcatcgatcgtccggtcaatcacctatggccccgaatagcgatcctactaaatgcaagaggctttatcaagtttggaaggggaccaatagattcttttgtcgtgggagattgatctt

SEQ ID NO: 7507 - DNA, 330 bp, Gossypium hirsutum
  Clone ID: LIB3493-013-P1-M1-F3
acgcagacgcgtgggttacttggtgaagaggccatgaatatcagttagactggccgaaatgagagatagagaaagaattctgaggctaaatcgacttcatggcttgagtgcttgacggcggtagcaatatgttatgcgaaaccataagaaaaagggctgatagcatagttttttttaggctaaaagtttgctgcgttttggaagaaaaacgattaaaagagggagtgtaacagccaacaaaacgacgccgcacagggggaggaaccaaggtccgcgtgttaacccggctggggccccgaattggtgcctttgcgcctataatggtttatt

SEQ ID NO: 7508 - DNA, 186 bp, Gossypium hirsutum
  Clone ID: LIB3135-048-Q1-K1-E5
tcgctttttcttatggtttcgcataacatattgctaccgccgtcaagcactcaagccatgaagtcgattgagcctcaaaattctttctctaactccgatttcaacaaagcaaaggaagattcatggcaactttacaaagtaagatttcttctttcactcttctttatattttgaaatacaatattg

SEQ ID NO: 7509 - DNA, 556 bp, Gossypium hirsutum
  Clone ID: GOSHI-09MAY01-C48620_1
aagaaacaataccttaaaatgcaatacatagatgaacaaattactaacaatgtaaaaccaagatttcggccctcccaacttctctcatccccatttttattattttataattcgaaaaatgttttaccaaacaaagcaattttaaaaagtctctttcgtcaaaacgcatcgttggagtttcaaccacccaacgtaaaatgcaaattctaggattattaatgttacaaaaacatttacaattacatctaattttacaaacctcaaaacattaaaaccatgactgaacctaacttaaattacaacatttcactcgaaaccccactccacatatcagcaaatcagttgacctcttaggaacccttcaacactgaccataccaacttgcttaggcatggctcaaagtacatcatactgatacagtgaactgacttgacaactcttccttgtaagagcatggacacaattatgatccctttctggcagagtcagcctgatcaagtcgagctgctctccaggaaatcaaattagttgattttagtaataaactgaaacctaa

SEQ ID NO: 7510 - DNA, 382 bp, Gossypium hirsutum
  Clone ID: LIB3149-020-Q1-K1-G1
ataattcgaaaaattgttttaccgaacaaagcaattttaaaaagtctccctttcgaccacccaacgtaaaatgcaaattctaggattattaatgttacaaaaacatttacaattacatctaattttacaaacctcacaacattaaaaccatgactgaacctaacttaaattacaacatttcactcgaatcccccactgcccacatcttcaagttcaacgtcccaggatacaataaggaggatataaaagtgcagatacaagatgggaatattatgcatataaaaggagagggtattaaagaggagagtcacacgaaagatactgtttggcatgttgcggagagagggacagggaaagctgaattttctcgggaaattgaatt

SEQ ID NO: 7511 - DNA, 329 bp, Gossypium hirsutum
  Clone ID: LIB3135-047-Q1-K1-H7
cccacgcgtccgggcagatggtatattgggtcacccattcaggcgcctcttttggaggcctgcaatcttccgtgaatgggcagcatccccccctctcatggattggctcgaatcccccactgcccacatcttcaagttcaacgtcccaggatacaataaggaggatataaaagtgcagatacaagatgggaatattatgcatataaaaggagagggtattaaagaggagagtcacacgaaagatactgtttggcatgttgcggagagagggacagggaaagctgaattttctcagaaaattgaattgccagaaaatgtgaagattgagc

SEQ ID NO: 7512 - DNA, 738 bp, Gossypium hirsutum
  Clone ID: GOSHI-09MAY01-C48050_1
ggcgtatcgatcgattcctgctcctcagatcgttaagaaatctgaagacccatatgctataacagacaatgattggagttgggaagataaagcaatactcaaacatccttgagaagccccttagcaagggcaaacaagaggttagcttgagtgcctttacatttttgttctctgagcttgttcagtacaatcaaactcgggttgacaacattgctgaattagaaagaaggctggaggatgcagggtatgctgttggggctcgagttcttgaacttttatgccatagggataaggggaatagaagggagacacgattgttgggtattttatcctttgtgcacagcactgtctggaaggtgttatttggaaaggtggctgactctcttgagaagggcactgaacatgaagacgaatacatgatcagtgagaaagacctccttgtgaacaagtttatttcaattccaagagacatggggacctttaattgtggggcatttgttgctggaatagtgaggggtgttctggacggtgcaggatttccaccagttgtaacagctcattttgttcccgtaaagggtcagcaaaaacctcaacaactattttgataaagtttgctgaacacgtattgccgacagaacaaggttagttgattcgtatgcccagttatcttgggttggccaatgtccatgttgtgcaacagtggcaaggaagcagtgaatttcacgtggttcattgatc

SEQ ID NO: 7513 - DNA, 476 bp, Gossypium hirsutum
  Clone ID: LIB3583-024-P1-K1-F5
cttagcagccaaacggaaaacaaaattttatttttccagtagaaaaatgatcggaaccgggaagattaagcagtatgccaacgtcctcgacaagcccctcggcaagggaaaacaagaggttagcttaagtgcgtttgctttcttgttttcggagcttgttcagtacaatcaaacacaggttgataacatttctgaattagaaacaaggctggaggatgcgggttacgctgttggggctcgagttctggaacttttatgtcatagggataagggaaatagaagagagacccgattgttgggtattttatcttttgtgcacagcaccgtgtggaaggtgttatttggaaaggtggctgactcacttgagaagggcactgaacatgaagatgagtacatgattagtgagaaggaactcctagtgaacaggtttatttcaattccaaatgacatggggacatttcattgtggggcatttg

SEQ ID NO: 7514 - DNA, 416 bp, Gossypium hirsutum
  Clone ID: LIB3135-040-Q1-K1-C9
ctaaatcctgtcagaaccaccttcctgtgttaatagacatagggtatagagttataagctggagttttctagcagccaaacagaaaataatatttttttttcctgtggacaatgattggagttgggaagataaagcaatactcaaacatccttgagaagcccctcagcaagggcaaacaagaggttagcttgagtgcctttgcatttttgttctctgagcttattcagtaatcaaactcgggttgaccattgctgaattagaaagaaggttggaagattaagggtatgctgttggggcataacttttatcctgttggtggttatcttttcaagctggaaaagcctaatgcttatcacttctttaagttctagtgttaattaatgtttttattccattgtttgttattttattcata

SEQ ID NO: 7515 - DNA, 911 bp, Gossypium hirsutum
  Clone ID: GOSHI-09MAY01-C48370_1
ctttatttcaactaattcccttacccactccaaaaatcctatataaaatccccaatcaaataataatagaaaaagtagctacccttcgctttcctcttctgttcctggaaccctagcccttcaagaaacaccatcaaagcttgcaagtttcaataatggatgaatctggggagtacccaaaggagtactacaccagcaacggcaaccccaggagactgacttcaacatcctcatcttcttcgtcaacgacgagcgttcacgttaccgccttggatggcctcgtcaacgtcaactccctcttcaccatcgccgtctttgtgggcctttctttggccactccgggccaacacagtctcgagaaccgagccccctgcgacgccggcattgacgtagctaaaaagctcttggtcttcgaggtcgtctccttcagcttcttccttttctcctccctggtggctcagggtctaaagctcgccatcaatttgttgaacagcaaagatgtggatgaagctttcagggcacacattaaccttaaagtattgaggtttgggatgatgggctccgccgtcgggtccgtcatggggtgcttgtttctgatgctttcgatggtgaacgtgatcgagatccggctggggttgttgtcttgcggcagccagtcctccattcatgccacggcggctttagtcattctggtttcttctgctctcttgatttacatttccactgctgtttatgctttcttgcattgaatcatttaaaacaaatcggtggctgtaaacttcacttagccttggtaaacaaatattgtaaaaaaaatcgtgggttgcttgcttttgttttcgttttatttttgattgagttaaattgagaattcaaggatccaatgattagttttacttctgttaattctc

SEQ ID NO: 7516 - DNA, 677 bp, Gossypium hirsutum
  Clone ID: GOSHI-09MAY01-C49970_1
ctttttcttttttttctttatattttctcttccactaatactaataacccccaaagctaaaacctttgagcttctctttcatggcgtcctcaagggaaggtcactacagaggtgtaaggaagagaccgtggggaagatacgcagctgaaatacgtgatccatggaagaaaacaagggtttggttaggtacattcgacacacccgaagaagctgcactcgcttacgacggagcagctaggtccctccgtggtgccaaagctaaaaccaacttccccacaccgtcttcctcttcttctccgccgccggctctttctcttgatcttaatctcgcttctcataatccccatcgttgggctttagcttcacctcatcaccatcaccgttttgccgccgtcggtgatttccttcaagctggtggtattaaagatatgaactttggtcccgacccatcgtcttcgacgagacccaatgtcctctccgtttcaacttcccctccggtgaccgcaaatggtaacacggcgtcgtttcttgggattgttcgacgtggtttgcctatagatttgaatgagccacctccactgtggctgtgaatgtggtttttcttctctaggcattttgcaggctccctttttaacctttaacccttccttaggcatctttgctacttctgtttagta

SEQ ID NO: 7517 - DNA, 659 bp, Gossypium hirsutum
  Clone ID: GOSHI-09MAY01-C49910_1
agggtcccttcccctctcttgcctggtaaaaaagaaagttataactaagctaattgacaattctcagcaaccacaaagctcaaaaaacgataccaatgttgttgggctggctcttggtcctccacaatcatctatcatagggttccaaaatattggttcttcaatgcagccatcaaatcttaatcctttcaacgattggacgaagaaccacgataagggagttgaggactttttatcagaggaagagattcgcgtaagaagtaatgaaatgctcgagaatgaagaaatgcagcaccttctccgtcttttcaatatgggaggtaatgcttccattaatatgacagaagacagtgggtacgggttcccaaattacataccatccccaatgccaaactttgtagacgaagaccgttcacgttctggcaaagctgttgtagggtggttgaagattaaggccgcaatgagatggggattctttatccgaaagaaagctgctgagagacgggcacagatagttgagctagaagaagaagaagaagagctatgaagtctatttttcatttttaagtggaaaggctctcatttccgactggtttcggaagttgctagaactccatgaatgccagagaaaaactagtgacaccatggggaatctctta

SEQ ID NO: 7518 - DNA, 297 bp, Gossypium hirsutum
  Clone ID: uC-gsflnu33B089g04b1
cctacttgtccgcagcaccttctccgtcttttcaatatgggaggtaatgcttccattaatatgacagaagacagtgggtacgggttcccaaattacataccatccccaatgccaaactttgtagacgaagaccgttcacgttctggcaaagctgttgtagggtggttgatagatatggcctccttgcgatggttctattacttcccttatctaacttatcaacaacctgtatttttttcttttttcatattcttcttttatattctcctaaattttctcttttgactggctcattct

SEQ ID NO: 7519 - DNA, 524 bp, Gossypium hirsutum
  Clone ID: GOSHI-09MAY01-C49840_1
ctttaatttctcctgtttcttcagttccagtgcgacatcaggttcgtgacattcaacataatctcaggaacatcaatgtcttgtcctcatgtttctggtgcagctgcctacgttaaatcatttcatcccacatggtctcctgctgctattcaatctgcccttatgaccacagccgcccccatgagctctggcatcaacatggaagctgaatttgcattcggttcaggccatttgaatcctttaaaagctgcatatccaggtctagtttacgatgcttatgaaaccgattacataaacttcttatgcggactaggttacgccactcggctaatacaattattatccaaagacaactccacttgtcctaaagacactaatgggacagtttcggaactaaactacccttccttaggtctttccacttcgccattgaaaccattcagccgtaccttcaaaaggaccgtcacacacgtgggatctccgacggcggtttacagagctcacctgagtttccgacaggtacg

SEQ ID NO: 7520 - DNA, 692 bp, Gossypium hirsutum
  Clone ID: GOSHI-09MAY01-C49860_4
tttgagccttggtgcttcttcctatatgaaccatgagtctggcatctttacagaatttgcacacaaaagaaacaacaaatcatacgaagtacattcattcaatccattgattgaaaatgaaatagaatgggaaaacaaaggaatttacataccagaatgagtgaagagaatggaggctaaaatgcataagactgcatagagaaagcttaaacagtggggccttgactccatggctagggttgtaacagagatgagcaagggttgggggatgatccaggctgaataaatatataagaagaggggcaaagcacatctggtggacagggagaaggaaaaaggagtgaaacaaggtgggggcagaaaggggaaccgtcaacatagggaaactaaagaagatccaaaggcaatcaatgctgtaatcagattctaataatttctttcagcttcgtagaatatatgcttgcttgggcatggggaaaattggagggttttcaacttttgattttgcttgctttctactcagacaaagaatactacttatttgatattcattaagcatccgatgaaaataagggtgcgtttggttcgctgtattggattagaggtgtattgggattagaagtgtattggattagaggtgtaatagctaattcactgtttggttgaatgtaatggaatagaggcgtaatagt

SEQ ID NO: 7521 - DNA, 544 bp, Gossypium hirsutum
  Clone ID: GOSHI-09MAY01-C49860_3
ctttttctcttttttgtttcaatctgccctccaaaaaaaaatcttgaaaatggatccgtttttatatgcgatccccccagaaaaaaacaaaccatattttcctattatcctattgccctccctgctgttcgtggcttgttgcaggtaccactagcgagaagacatgcgcagaggctactgaacgtgggcggttgctgcgacgtggggcatacggcgccggtttgctgctaaccacttagggtttctatgtttggctaatttgggctagtgctattgggccgaatggtattgggtcatttggatttaggttatttgtaaaaatggactgtttagggcacgtttggtttgctgtattggattagaggtgtattggattagaggtgtaatggaatagaggtgtaatagcaaatcaactgtttggttgaatgtaatggaatataggcgtaatagtaatcttgtgtttggttgaatggaatagaggtgtaatagcataatggaaaaaactaaaatgactagaatacccttagcataaatttattttggt

SEQ ID NO: 7522 - DNA, 810 bp, Gossypium hirsutum
  Clone ID: GOSHI-09MAY01-C49860_1
ctcttcaataaaaaagtatggtggtataaaattcctaaaactttttgaatagcaaccagtctcttcttttcccattcttttatatttcaaaatattcttttggctgaagctatattttctacaacgttttcaaaaagcagcaatcaatgtagacttatctctggaacagcggatttggtcatacgcaattaatcaaagctggcactattttctaccaggaaatgctgcagagtgcagtagccaaactaggcaggctcgttcttgatatttttcggccctaagtgaaataataaattttgaacccctttcaaccctgggttttggacggccgtacttctagacgacccccagggtcgggcctgcaactaggtgatatcacattgctcatacgccacagatcgtccaaattgaatcagttacatatgtgataaagtgagttcttatgaatcttttatacatatgaaacttctcataaattttgattatggataattttcttagagtttcaaaaccgtcttttccggtaacactaagggcacgtttggttcgctgtattggattagaggtgtaggtgtattggattagaggtgtaatagcaaatcaactgtttggttgaatctaatggaatagaggcgtaatagtaatcctgtgtttggaatagaggtggaatggaatagaggcgtaatagtaaatttgtatattctctcagttgctatattttttagttttcttactttaaaaaaaaaatataataaataatgttgtacgttaaaaaaattttttattttagtaacgcatgcattaaaattt

SEQ ID NO: 7523 - DNA, 593 bp, Gossypium hirsutum
  Clone ID: LIB3828-003-Q1-K6-A1
ctaatattgtgtgctgcgccactgttcactcattgtgaaaaatccaagagctgtatgcctgcacaacacccggacacaagatatattctctggacttatgtgggggcatgcacagtcctaggaaatgccgtggcattccaaaagctaaggcatacttaaacgctggatttgcactataagatttactaccacaactacatattgctgatcttagcggttaaaactccctcattagcttatgataggtgctcttaataaaaaaatgacgtaaaaaaatgactcttccaaacccgtatttaaaaaaatccctccctaagctatactgcgcataatgagtgtcaacgcaacctcatctgaaaaggtacagtgaactaaatttactcatctatttctagcttatacatctttgaaatcaaaagctaagagcacgtttggttcgctgtattggattagaggtgtattggattggattagaggtgtaatggagtcgaggtgttatagcaaatcaactgtttggttgaatgtaatggaatagatgcgtattattaaaactgccctaggttgaatgtataaaaaaaaaaaaaaaggcggcc

SEQ ID NO: 7524 - DNA, 491 bp, Gossypium hirsutum
  Clone ID: uC-gsronu33B050b01b1
ttcacgcgtccgcaatgacttcatatttacagccacaaaacttgggatgattgaagtttggttaaaagaaaggataagtagagttggtgccattaaaatgaacagcaaaggacatgcaaaggttacatctctggtttcagacatggatggtggaatgctttttgctgcttcctctgatggcaaaatccaggcttgggctctggactaaactgggtttctttttgtaaagaagaatgattagcaatcgatcaacaaaaaatcttacagcacgtttggttcgctgtattggattagaggtgtattggattagatgtgtaatggaatagaggtgtaatggaaaagctgtgtaatagcaaatcaactgtttggttgaatgtaatggaatagaggcgtaatagtaatcctgtgtttggttgaatgtaatagaggtgtaatagcataatgaaaaaactaaaatgactagaatacccttagcagaaatttgttttggt

SEQ ID NO: 7525 - DNA, 466 bp, Gossypium hirsutum
  unsure (1)..(466): unsure at all n locations
  Clone ID: LIB3493-011-P1-M1-A11
tggagtcaaggccccactgtttaagctttctctatgcagtcctaatcatttcagcctccattctcttcactcactctgatgccagactcatggttcatatatggaagaaggaccaaggctcaaacctccatgaaaagctaaaaacaacggatcgtatcggcttcgatggtgatccatatacccttgactcacctttctacctaccacattctgactcattatcaccactactttctcagcctgaccactctccttcatttaccccacaatcgcctttcaaccctctgccaccttcggcgagttacggcctaccaacacctncaccaccgagtaacatcatcaacagcccaccaacacctncaccaccgagtaacatcatccatagtccgccagcaaatccaccggaagcagcttctcccgagcatgggttcaatccacctagcattttcttaagtccacctcaaca

SEQ ID NO: 7526 - DNA, 454 bp, Gossypium hirsutum
  unsure (1)..(454): unsure at all n locations
  Clone ID: LIB3135-058-Q1-K1-B12
catattagatgatccttttgatgatcctccccagttgtctgagttgattcctggtgcttctcctgaaggaaaaccaaaggatgaggttgatgatgatgttcggcttgaagatgattgggttcccatggatgaacaactaggtgcttcggagcttgaggaggttctccgtgcaaaggatgcccattcgagagcagttgtacttgaaagtattggggatattcctgatgctgaaattaagcctcctgagaatgttctatttgtttgtaaattgaatccagttactgaagtgagtgcttattttgtattcagtgttggcaataagtgtgtgtacgtgtattcattgatttgtttcacttattttgactttgattggagaagtttatcagagaggactgacaaggataagttggctgagaacatgcgggtgctttcatttntacagcattttactatt

SEQ ID NO: 7527 - DNA, 265 bp, Gossypium hirsutum
  unsure (1)..(265): unsure at all n locations
  Clone ID: LIB3135-058-Q1-K1-D2
agtaccattagatcatcggcgttcctagaatgtgagctatgtgtatcgtgcatattatgcccttactatacctttcttacaggaagaataagatgatcaactctcacgctgaaaataagcctcctgagaatgttctacttgtttgtaaattgaatccagttactggagtgagtgcttattttgtattcanngntggccataagtgtgtgtacgcgtattcattgatttgtttcacttaatttcgacttttgattgggagaagttt

SEQ ID NO: 7528 - DNA, 521 bp, Gossypium hirsutum
  Clone ID: GOSHI-09MAY01-C49780_1
taaatacaatagatatggcaacctctgtggagtgtgggcgggaagttaggttccggcgatccttatggtccctggtggaatgtatggtcccttgttgcggcttacagccttcaatgtcaggcacagtttctagtgacacggaatcaagccatggctcaatcactacttcaacgtcaatttcaacttcaacatcaaccatcacggggactttcttcgggtacaggaaggggcgcgtgagcttctgcctgcaggtgacagccgaagctctccgcttttactgttggagttgggtgtccctactgcataccttgccagagagatgcagtacggtctgctgaggatagcgctggaagtgcgactgactagagcaaagagtgatgcggcctttataacgtccccgtttggtccatgtactgcaattggaagaaatggtggggtttgccattatgaggaagatgagcgactttgatgcggtggtgcttaagctcatgcagtccgtgtcggtgggagccggagttttg

SEQ ID NO: 7529 - DNA, 797 bp, Gossypium hirsutum
  Clone ID: GOSHI-09MAY01-C49640_1
ggaagaccggggcgacccacgcgtacacccacgcgtccgcatggtgatcttctcacacttttgaacgtgtaccatgcttgcaaacagaacaactaggatcgatcctggtgctatgagaatttcatcaaccatagagcgctgaaggctgctgttaatgttagacaacagctcgggcgcattatgtccaggtttaatctcaagctgtgcagcactgatttcaacagccgcgactactatgtcaacattagaaaggccatgcttgctgggtatttcatgcaggtagctcatctggaggcgcacggggcactacttgacagtttaagacaaccaggtggtgcacttgcatccatcaaattgcctggatcacaagccagagtgggtcatctacaacgagtatgtcctgacaagccggaattttattcgtactgtgacagatattcgtggtgaatggttagtcgatatagcaccacattattatgatctcgaaaacttcccacagtgtgaggcaaagcgagtcctcgaaaagctttacagaaaaaaggagaaggatcgggaggagagtcgaaacaggagatgaagtgctacgaccatacaagttgttttgacatgaatttttcttcaacggtgctatttgggagttattacgtagtatgttagttgataaattggaagaagcaaaaatttcttgtaacatcatgtggaacttcttcccctagctatcttgtattttgtactagcactccaaatttgttcttttaaccttcttttttaatcatttaaagaacactgaaatgatc

SEQ ID NO: 7530 - DNA, 490 bp, Gossypium hirsutum
  Clone ID: uC-gsflnu33B070c07b1
tttggtagacaagaaaaaaagaagaaaagaatggcaaagtgtttcaacgtggttcagaagcagaagagagcccaaatagcggagagaaaaagattaattcatggtgaccctgcaacaaagaagctaaagaacaaatcccaatcactctccgtctctggaaaacgcaaacgcaagcttctcaaaaaatggcgcagggagcaaaaggaggttatagagaagggtttggtgactatggaagatgtggaaatggtggctgctgaaggtttggaattttcttttcctcctttttttaagtggttgatttcatgtctgttttgtacttcaaaaactgcaattactgctgaaggtttggaattttactaatttgggttagctgttaggtgctgaatgctgattgataaactcaaaaacacattatatttataagcttataagctatattataaaagctgtttgatattataatataagtttttaagtttaccctgca

SEQ ID NO: 7531 - DNA, 440 bp, Gossypium hirsutum
  Clone ID: LIB3135-054-Q1-K1-D1
gctatagggttttggtagacaaggaaaaaagaagaaaagaatggcaaagtgtttcaacgtgggtcagaagcagaagagagcccaaatagcggagagaaaaagattaattcatggtgaccctgcaactaagaagctaaagaacaaatcccaatcactctccgtctctggaaaacgcaaacgcaagcttctcaaaaaatggcgcagggagcaaaaggaggttatagagaagggtttggtgactatggaagatgtggaaatggtggctgctgaaggtacaactgaagatggaggcacatgccaagatgccaccatcaaagtgccaacaaagttccccatgaagaagaatttgaagctcaaacgcattaatcgaaaagggaaaaagaaaggtggtagttcaaaggctgggattgaagctgcttcagtggattccatgatagaat

SEQ ID NO: 7532 - DNA, 685 bp, Gossypium hirsutum
  Clone ID: GOSHI-09MAY01-C49380_1
ctccaaccaagaagctcaatattagataatgatcatggacctaatttagctcaaagattgcacactgggcactcagaaaatacttctggtcctcagtcagtaaaactgcaaccacaagaggctgcaggaaatgggaatatggttgccatccaaggtgttcatcatagctcaactacctcgggagggagctttgaccttgagacgtctcttgattctctacttccatgtgatatgctcaatgaaatgggaggcccaagcccctacaacggagggagtgaaactactttttctggtttggttcaatctttagatgtgtctcccgattctgatcaagagagtgcttcaacaagagcaatgggtaatattgaactctttgatggtgtagactgtctgacaaaatctcagcttttagagactgttgaaagacatgagctggcccatgggagatgattaaagggtgtctaggacttgaatgcggcaagaaatctagtattgtgaaaaatacaagtgtggagattgtagttcatgaagatgcttttgactcgatctatggcaaaaatggctgcaaccttgctcgtctcaaagagatctcaggtgcaaaggttgaagtacatgaaccttgtggtggtgaaagtgaggggagggtgttgatatctgtgactccacatcaaacccttatagcaca

SEQ ID NO: 7533 - DNA, 643 bp, Gossypium hirsutum
  Clone ID: GOSHI-09MAY01-C49350_1
atttttactctctgtgttggaaatgcttggggagaagctgcattgcttttagccgctggtgcaacaggaaatcgttctgctcttccttcgtcgacaataatgattaggcagccaattgctagatttcaaggtcaagcaacagatgttgaccttgcaagaaaggaagtaaagaatgtgaaaacagagttggttaaactctatgccaaacatatgggaaaatcaactgagcagattgaagaagatataaggcgcccaaaatattttagccctagtgaagcagttgaatatggcatcatagataacgtattgtacaatgaaaggagcagtgaagacagtggtgtggtttctgaccttaaaaaggctcaacttatctgaacataggagaacttgtacctgtgacagttaaaactactcaggggagcgatagactgagttgaaggatatttttactgcagcagtatagaccgagttgaaggaggacaagagaagctcagaactgtgtgtactttttttccggggaatgcggtctcttcatttgtaccacacatttttttcaataagtagtatgtttagttataacacaagtaattgcaattaaattttggttccccttttctttcttcttccccctttaaaaaaaaaa

SEQ ID NO: 7534 - DNA, 527 bp, Gossypium hirsutum
  Clone ID: LIB3825-026-Q6-N6-D1
ggaaagggggaaccaaaatttaattgcaattacttgggttataactaaacatattatttattgaaaaaaaagggtgctacaaaagaaaaaaccgcattccccgtaaaaaaaatacacagttctgagctttttttggcctccttaaactcggtctatactggtgcagaaaaaatatctttcaattgagtctattgctcccctgacaacaaagggcatcatgggttttctaaatgtctataacatataaaatgacatgtagtcaatcatacaattcggattcaaaattatacctgagtagttttaactgtcacaggtacaagttctcccatgttcaaataagttgagcctttttaaggtcaaaaacaacaccactgtcttcactgctcctttcatttacaatacctgcaaattataaaaattggaaaaatatatagtccaaaaatgcaagaaaattagtccagaacaaataaccacttcgagtttgaaaaccttatctatgatgccatattcaactgcttcactggggc

SEQ ID NO: 7535 - DNA, 1069 bp, Gossypium hirsutum
  Clone ID: GOSHI-09MAY01-C49320_1
acgcactgacccactccgccttctccttgttacttggaaaaaaaagttttcctagaaaatttctgtttagctctagatgataaatatcgaccaagaagaaacaagtagcgttagagaaatcagaccaaaaagcagaagaatcatgggaggaggaggaccagatgatgaagatgatgaggatgaggatatgaagtggccgccatggctgagacctctgcttcaaacaagcttctttggtcaatgcaagctgcacccagatgctcataagagtgaatgcaacatgtattgcttggaatgcatgaatggagcgctttgttcactttgccttgcttatcacaaggaccatagaaccattcagataaggagatcatcgtaccatgatgtgataagggtttcagagattcagaaactgatagacataacagggattcaaacatacataataaacagtgcccggatagtgttcttgcgtccgagaccacagcctaggctgggcaaaggtgttacgaatacctgccatgtctgccaccgcggcctccttgattccttcaccttctgctctcttggttgcaaggtggttgggacatcgaagaagttgattaagaaaggaaaattatccacagaaatggagtactcagaaggtgagtcgctaaacataagtgttagcattggagggtataccagaacatacagcaaagcttcacgccatcgacgccgccacctacggccaggaggaggaagggagtacctcatcgagctcctatgggaggctcattataggatagtagtataaatattatagtcaaaactctttgttatagtattgtgaaacatattgtgtatatacattttacagaaaagagaaaagatataggaagtaatgtcgacgtctgagcctttgtgttttgaggccggtgttggaatcccaatcacacatacaagaaaaaagggaaatagtgaagataaataaggggaaaagttttaagatgagtaggttgatgtgcagccttttgatactgtattcatatttgtatataattttatattaagatgaagcagagttgataat

SEQ ID NO: 7536 - DNA, 606 bp, Gossypium hirsutum
  Clone ID: GOSHI-09MAY01-C49260_1
tgatgggaagcaatttgatcttccagtgatgtttccgggagtaacatcagtgaaaattccattattgtctgggacatctctagacaggttccactgtctaatgaggtttatgcagaagcctacacttgtccttgtgttaggtaccatccattcgatccctattttgtggcccaatcaaatgggaattatacattttttcttcaaaacctcccttcaagctagacaagtataaaaggtatgaaagccatggagtgtttggatttccaattaagtgcaatttcagcttggatggggagaagcttgcctctggttcctcacatgggtctatatacttgtataactcccgatcgtcggtgcttgtcaagaagatcaaggcatacgaggaagcttgtgtagacatcgctttccaccctatcttgtctaatgtaattgcttcatgcagttggaatggagatgtttcagtgtttgagtgagactatgtacaataaaacatcatcttatttgtcattaaggtgtaagatgctttatgagatcaaaactgtctaatgctccggacttggaaggcatttggtctacacctattaaggagaaggcgggggggggggg

SEQ ID NO: 7537 - DNA, 696 bp, Gossypium hirsutum
  Clone ID: GOSHI-09MAY01-C44960_1
ccgggagagaaattattaaagaaggttgttatctgatgtcaacacttttgaaccaagggatacagattcagtgttatgaagctatcttaggtgggtcgttggcaagattgattttgactcgtatagggggagaattttttgccacggttattcaggcagctctggagttgtatttcatggtagcttggttgatattttactttgtggtgaagtctagggaagctaatacagaaggtaggaggtatgggaggagagaattggaggctttgattgatggacttggaggaaaattcaatcggaaaaaatgggggaaattttcatttgctgctataactttcgattctgacactgaagatgcctgaagatatcggcaacattttcaatgcttcgagtcttcctgtttttgcagagctagtgatgcaatactgccatagtttcggtctaagaacctgccaatgcattgcatgtacttttttatgagggaacacaatatatacttgtgtatacttgctaccacattgcttctgtgtgtatattctgttgcaaccagttgtttcttactgccttgcagtacttgttccttgctggtatcaatgagaatggtaattgtttctcatgctccaaatcttgctgtcgctgttttactctcacccttgcctttgtgcttaaaaaaaaaaaaaaaaaaaaaaaaataaa

SEQ ID NO: 7538 - DNA, 446 bp, Gossypium hirsutum
  Clone ID: GOSHI-09MAY01-C44820_1
ttggcacacacataaagagaaacatgttttgagaatggccaccactaagacaacccttttgcttgctgttttgtgtcttttcctagtttgcgagattgggatgctaatggttgaagcccaagttcaaaggccagaatgcgaggggaagtgtgcatcaaggtgcagcaagtcatggaagccgaagatgtgccttaaaacatgcaacgcttgctgcaacacctgcgatgggtgtgtgccccctggccctactgctaacaaggaagtatgcccttgctatgccaagtacaagaatggcaagtgcccttgaatcacttctttctattttctaaacacgcattcctttcatggattcattctaaattatcacttgtatttatgagaggggctcttgtgttcttcaatatctcttaaacaaagagagaaaagaaaaaaaatgtattcactta

SEQ ID NO: 7539 - DNA, 380 bp, Gossypium hirsutum
  unsure (1)..(380): unsure at all n locations
  Clone ID: LIB3148-031-Q1-K1-E6
ggnnagnnggcgtccgctagaatcttcttaaatacaatatttgaatttgttgtacaagagcttggcattgaatttgattagcaacatctgttcactaactgttacctttctatatttgtagatggatcaaaagagttttcttggtagctttgtatttgaactatatatgtatttagtctaaatacaacttaattaaacataaattcgcaaaaaaaacatgcaacgcttgctgcaacaacctgaaatgggtgtgtgccccctggccctactgctaacaaaggaagtatgcccttgctattgccaagacaaagaatggcaagggcccttgaatcacttctttctatgttctaaaacacgcatcncggtcatgggattcattc

SEQ ID NO: 7540 - DNA, 838 bp, Gossypium hirsutum
  Clone ID: GOSHI-09MAY01-C44590_1
gtcaattcatcagccaagttatcgtattcttggattgcttgaccgattgatatttttgtctcgtggacaaactgtttacagtggttcaccgacgaatttgccactgtatttctcggagttcgggtatccgatacccgagaacgagaacaaaacggattttgccctggacttaatccgagaactcgaagggtcccctggaggaacaaaaagtttggtcgaattcaacgagacatggcaaagcatgaagcataccagagactccgagccggatgaactaggcttgtcattaaaagaagcaattagcgccagtatatctcgaggcaaactcgtcccaggtgctacaaatgatgtcaattcatcttccatggttccaacatttgcaaatccattttggaaagaaatggtggtattgtcaaatcgatccatcctaaattcaagacggatgccggagttgttcggaattcgtttggcagcagttctagtgacagggttcattttagcgacagtattttggcaacttgataattcaccaaaaggggtgcaagaaagactagggtttttcgcattcgcaatgtcgacaacatattacacttgtgccgatgctcttccagtttttctccaagaaaggtacattttcatgagagaaactgcttacaacgcttacaggagattatcatacgtcatatcaaatgctttagtgacgctaccgggcttgattttgctctcgtttgctttctccatgacaacattttgggcagtagggctagaccgcggattatcaggattcttattctatttcctaattatggttgcttcgttttggtccggaagttcattc

SEQ ID NO: 7541 - DNA, 387 bp, Gossypium hirsutum
  Clone ID: GOSHI-09MAY01-C44530_1
gcccgacccacgcgtccgcttttctctatcttagagaaactactgctttaattaatttatttaatattaataaattaaatcagggaaataccacacaagaaaagcaaagaaagatggcacgccaagtatttgtcatggcccttgctttcatggctgttgttggggcatttgctgccaattcttcaccttccgcgtcgccatcttcttctcctgctgccagccccgcaggtggcccagctagcgaccttgctttttcccctggtgtcgagagtccaaatgaaagcgaggacccaagtgaggaaccaagcgaggacccaagcgaaggcccagaggcggacgaacccgctgctgactctctagatgccgactattctggtggtgatgccc

SEQ ID NO: 7542 - DNA, 920 bp, Gossypium hirsutum
  Clone ID: GOSHI-09MAY01-C44450_1
gcttaagtcaaagaacacacgccttattaacctgcttttagcactgatggttggtgggtgtggcgcgggtgttcctcttatgaagaaggtccccgctgctgttctttggggttattttgctttcatggccattgaaagcttgcccggaaatcaattttgggagagaatattactgctgttcactgctccaagtcgaagatacaacgtgctggaggagtatcatgcaacctttgttgagacagttcccttcaaaactattgccactttcaccttgttccagacaatatacttgcttgtatgctttggcataacatggatccctctagctggagtcctttttccactggtgatcatgcttcttgtgccaccgaggcaatacttgctccccatgtttttcaaagctgtccatcttcaagaccttgatgctgcagaatttgaggaagcaccgcccattccgtacatggcatttgaagaccgggaacttgagggaaggaccactactactgtggatggtgcagaaattctggatcaagttgtcacgacaagtcgtggagaaatccgccgtatgcagagtcccaatacatcttcagtcttcgaaaaggagtatagcccccagattaggcaactgagccccagcttaactgaaaaagggcttgaattaagtccaactcctagtcctgctccatctacacttggacatagcagtcgtgattcatcatcaagctaaaatatacatgcatacatacacaactaaggaaaagcatgctctccatttctgattctgatctctagaggtattgtacttagtttatcgcgagactagaggtgccttactctggttctgtgcaatgaatgttgctatcaaggtaaaagcaaagcaaccctccacttttaaaaaaaaaaaaaaaaaaaaaaaaaaa

SEQ ID NO: 7543 - DNA, 379 bp, Gossypium hirsutum
  Clone ID: GOSHI-09MAY01-C44760_1
cggacgcgtgggttcatttctctgaatgtacttttgtctccatacaaagttgagatgcccctgagcatttgatcccttcacgggttttggtgggagctgttaagggttgtttattctaatggggaatggcccaaaaaacaactgcatgtcagcatcccacaagctcttcaaggacaaggcaaagaaccgggtggatgatctgcaggggatgttcttggatctgcaatttgcgaggaaagagagccgtggcgttgatgttgcaatccttgaggagcaactccatcagatgctccgtgaatggaaagctgagctcaatgaaccttctccagcttcttcattgcaacaaggtgggagtcttggttcattttcatcggacatt

SEQ ID NO: 7544 - DNA, 726 bp, Gossypium hirsutum
  Clone ID: GOSHI-09MAY01-C44090_1
tggagatctgaatccacaaggggagaaatcaaatgcttcatatgatatgagattctttgggtttgatgcaagcgaaaacgaagacttatttggagatgggcctttgcccgagtgggtggggtggggagaatcatcagatttgaaactaggtggttcaagcaaaaacccatttctagatgatgacagctcagatgtcaatcagccaagtcatatcgagacgacggtcacttatgtctttcccctgtcgaatggagaccccatacttccaaatgtttccctggactccatggatctgagtgacggatcagtgagcagtgatacaagtcagaaatctccaccagcagtgccctctttgttcggagaggatgtcgaattcgtaggggtggaattagaaggtacagagaaggcaatggaacaagctttaaaagaaggaatagttggggaagcttggaccgttaaagaggaacattattccaaaggtaccacagaaggagaattcggacgacgatggggctggaatgaaggagttcaatgatgcaaactattggaaggttgatcaagaggtcgctgttttagagtaatggtggttgagtcgaaagtaagatcgacatcacagttttgttcgctctgagggctgaagcagcaaaactcacatgtatttggttcttctcgttgccctgatttaaggtaagggcttctcaatattatttatgttagtctttatgg

SEQ ID NO: 7545 - DNA, 411 bp, Gossypium hirsutum
  unsure (1)..(411): unsure at all n locations
  Clone ID: LIB3148-021-Q1-K1-E2
ggaccgttaaagaggaacattattccaaaggtaccacataaggagaattcggacgacgatggggctggaatgaaggagttcaatgatgcaaactattggaaggttgatcaagaggtcgctgttttagagtaatggtggttgagtcgaaagtaagatcgacatcacagttttgttcgctctgagggctgaagcagcaaaactcacatgtacattataatttttttttctttccactgttatttactgttttatgttcctttaattgttagcgttaactcctctttattgttgttttaatgttttcattatttgaaggtatttggttcttctcgttgccctgatttaaggtaagggcttctcaatattatgttagtctttatggaattttaatgcaatcatatntggttgtaa

SEQ ID NO: 7546 - DNA, 935 bp, Gossypium hirsutum
  Clone ID: GOSHI-09MAY01-C44080_1
cgtccggaaacacccctttcttttctttcgttctttttttccccttgttttcttattgtcatttgtgcctctttttttttcattacaagaaatggcttttagtgggacgacagagaaatgcaggtcttgtgataagactgttcatttcattgaaatggtatctgttgatggtgtaccttatcataagacttgttttagatgcagtcattgcaaaggccttcttgtgatgggaagccattgtcaaagggaaggaaacctttattgcaagcctcactttgagcaattctttaggggaaccgggagttacacttccaaagacaagcccaatggactgcaaagggcaccaagcaaagttgcatcccttttctctggcacacaagacaaatgtggagtctgtaagaaaacttgttatcctttagaaaaggtgactgtggaaggtgaaatataccataaaaactgctttaggtgtgcacatggaggttgttttcttacaacatcgtcatatgccgcattggacggtttcctgtattgcaagcaccatttcgctcaattgtttaaggaaaaaggcagttacagtcatctaactaagacatcttcgatgaagagaagcccctctggcgggaaattcgatgccgaatctgattcggaaccgaaatcggaatataacagaaccggaaccgaagctcaacctgatccatgaaggaaaatactttgatttgaaccttcatgggacaatatttgtggtttaaaatctcagtataattttggtgtttgatatttatatatagatatatgcatgtgtcttgatttagtcccatgaagatgttcaatgtggggtctaaaggtgttgtttgatattttattaaacactaattgttgttttaaattatgtgaaaaactttatcaaaggggaattaaaatgttaccttatattt

SEQ ID NO: 7547 - DNA, 278 bp, Gossypium hirsutum
  Clone ID: GOSHI-09MAY01-C44060_1
cccacgcgtccggtggtggctattatccttaaaagtactcgatcaccattgcaattcaccaagagcattaatattgtcactactagtactaaaagaaataagtgtaatttggttacaaaaaccaaaaccttgaaagatatggcaagaaactttggaatcgaaatggatggtcttaaaagttgtatcatatgatattcgaatgaatccatcgtttcctaatgatttacatgtaacactttgttcataagcattttatcaatctaaatttatttataaca

SEQ ID NO: 7548 - DNA, 547 bp, Gossypium hirsutum
  Clone ID: GOSHI-09MAY01-C44000_1
tccacgcgtccgcccacgcgtccgcccacgcgtccgctgaagagctaaatgcgttgctttactcggatgatgatagttattatactgatgatgaagttactcccgcagttcattctccttgtacaatgacagctcaccccgagcaattggagggaggaggaactgaaagtgttgctagctctattggaccaactaaaaagcgaaaactgctcgatgacggtaatgattacctgccgttgcttacagacgctgctagttcagtaaatcctagcagatgttctgagtatgtggatgatgcagattctagctgtgccaatatggaatcctcttcaagtaataagagactgagaatcgaaaaaattcatgagaccgtgagtgttctacgaagcttaattccaagtggggaaggcaaagatgcaatcatggttcttgatgaagctattgattacttgaaatcccttaaactcaaagccaaaaccttgggacttaatgctctatgatgttgccaacgccattgccactcttcttatttgtgttagcggtagca

SEQ ID NO: 7549 - DNA, 438 bp, Gossypium hirsutum
  Clone ID: LIB3148-028-Q1-K1-D6
cacacccgtccgcccacccgtccgaaccttcaaaaggaggaaactgcactggcagcacatccggtacatcctgtaaaatatcacaagaccacaaaagaatgctcagaattctctaaatcagccttacacagtggacacaccgcttcctcgcacagagttctacgcgcaagattaccatagtaaccagtgatcgttccatatattaattcgatcaccattcccaaccctccacacaatcccttctccaatcaactcacgtgcattgcaaatgcttctccaggtaaatgatagtgacatcaatcaactcggaacttgggcggagtcagataatcatctacactatcatcaacgcttgggtattttgcaactcatattttggaaacatggcatgtatagacgactttatgtattatggcgtaaacaaatatatagtatgtt

SEQ ID NO: 7550 - DNA, 373 bp, Gossypium hirsutum
  Clone ID: LIB3148-023-Q1-K1-B7
cccacgcgtccgacttgcagcacatctcatacatcctgtaaaatatcacaagaccgcaggagaatgctcagaattctctaaatcagccttacacagtggacacaccgcttgctcgcacagagttctacgcgcaagattaccatagtaaccagtgatcgttccatatattaattcgatcaccattcccaacccttcacacaatcccttctgcaatcaactcacgtgcattgcaaatgcttttccaggtaaatgattgatcaagaaagacgagaagaatacctcatacggagaaaagagaaagccgtttattaaattgcaaaatcacgatattttgctccgattgacatctatcaactcggaacttgttcggagt

SEQ ID NO: 7551 - DNA, 884 bp, Gossypium hirsutum
  Clone ID: GOSHI-09MAY01-C45950_1
ttcacgcgtccgcgacgatttcccgatggaagtcctccgtgccacacaattaactttcctcgatataaggttcaaccgaatcaaaggcgtcgttccggcgacaggtttcaaattagacctcgacgttctcttcatcaacaacaacaatttcaggcaacgtctaccggaaaatttaggtgatacaccggcgttatacataacatttgcaaacaacaagttcaccggtcggatcccgccaagtattggcaaagctaaaaacctcctcgaagtactattcctcaacaacgaactcactggttgtttaccgtacgagatcggctacttacaaaacgccaccgtttttgacgtcggaatgaataaactaaccgggccgataccacattcgttcggttgtttgaaaaagatggagcaactcaatttagccggcaatgaattttacggcgaagtaccggaaatcgtttgccggttatcgaatcttcaaaacttgtctttgtcgagtaattatttcacccaagtcggaccggcatgccgggatttggtaatgaagaagaagctcaacgttaagaacaactgtatcttggatttgccggagcaacgatcaaaagccgattgtgctatgtttttctcgagaaaactgatttgtgatagaacagaatctttcaaattgattccttgtatggcagggaaaaatgggtttcattcaaattccactgaagaatctgagaaaaaagaatctactggctctggtttttcttcgccgtcagctactacttatggtgttcttaaacctcatcggttatgaacaaaacgaaaatataataaggttaaatatgttataagcccctgtactctttcctaatttaaaatttagtcattttactttt

SEQ ID NO: 7552 - DNA, 569 bp, Gossypium hirsutum
  Clone ID: GOSHI-09MAY01-C45890_1
cccacgcgtccgaggaactgtaccatattaaccagcgcactaaacagagtaaagaaggtttcgtctacggagttcggccatccttgttggtctgcaacttctgtagttactagcgggaaacaaatggcaaccaacacaagttttcaactgttttcatcatctaaggataaacccagtttgggtttagggttcttggagtcctcggagccgcagctgccacctccgtcctccctctgtcgaagtcctctcctcagaggtttcttcttctgtgaaatacactgtggagcctgtctacttggatggccttactttactcaagggaagggtgagtactaaagaggttcttgggttgcctaactcggatttagtccctggaatatatgaagggggacttaagctatgggaaggtttcatttgaccttgttaaagctctgcgctctgagattcaaaatggttgtctatcatttgagggaaaacgagtgttagagcttggatgtggtcacggacttcctgggatatttgcatgtctcgagagtgcagctgaggtgcattttcaggacttcaatgct

SEQ ID NO: 7553 - DNA, 793 bp, Gossypium hirsutum
  Clone ID: GOSHI-09MAY01-C45500_1
ctctcgcgtccgtggggctgagcatgcaggatgttcttttcctggcaaatgacatgaatgttgcagaatactttgatgcaactctttcaagtggtgctgacgtaaagctagctgccaactggatcatgggtgatattgctgcctatatgaagaacgaaaagctgtccattaatgatatcaaacttacaccacaagagctagccgagctgatagcttccattaaaagtgggacaatcagtggaaagattggaaaagagatactatctgagctgctagccaaaggtggaactgtgaagggactcatagaagagaaggatctcattcagatagctgatcctgttgagatcgggaaaatgatagataaagtgatttctgagaatccaaaacagctagaacaatatcgcggcgggaaaactaagctgcagggcttttttgccggccaagtaatgaaactatcaaaaggcaaagcaaaccctggcctgttgaacaaaatccttttggagaaattaaatggccaaagctgattgtattttagccaaatctgtcctgcttgttgatacagctacagcaaactgcaaggtgaaggaacatattgaagtctgaatcctttgctgagttttcaaatattgagttcatataatactttgccccattttgtagatcaaatcaccctttcttttatataagaattatgcatcaattgaaaggaacaaatggcttttagagattgatagatgccctcttgtctttttgactgatttatttttagcagttaagtaatatttttaaggtt

SEQ ID NO: 7554 - DNA, 516 bp, Gossypium hirsutum
  Clone ID: GOSHI-09MAY01-C45480_1
gcaatttgcaaatctgccaaaaaaaaaacaaaacgagagggtgcgaattaggtttacaaatatggagcaaaagaagaatcaaccatgaaaacaacaacaacaaagcagctataagagatgaagatggatataaaggcgtcccaattcatagccaagtgatgaagataaagcgagagtttgagaagatcaagcacccgtcattgcaacaagctgatatgagacgagtgcttcgggagatcaccaggcaacgctcccgttcccctctcggattagctgagagacctatagctgttggccattcctagaaccttccatcaccttgtagaagcaaaagtaagaggaaatagttactttcatgcccaccaacagctttttaggattagattggatttttcttttcttttttaattacgcccctgtttatggatctatctgttgtagatatgtttatggagaaaacacttcctctgtttcttccctatattaattaataacttaaaaggtcttgttgtttgg

SEQ ID NO: 7555 - DNA, 389 bp, Gossypium hirsutum
  Clone ID: GOSHI-09MAY01-C45470_2
acatacacacatacatacatataaacaccaaatatgaaaaatcccaccttttttctcttgttttctactaccttctgcttgtttcagtgagcagtgatgttatccatgattcttgtgacaaagctgcgaagggtgatcccaatatcaagtttgacttttgtgtatcaagttttgaagggaaccccaaagctaaaacggctaccggggttgcggatttggttaaagtagccattgaaactgctcatggctaatgcgacgagcactggtttgataatatctaagcttttggataacaaaacccttgatacatatgcaaggaattgcttagaagattgctctgagctttattcaggtgcagggtctagtatacaaagtggtgggaaagcttt

SEQ ID NO: 7556 - DNA, 393 bp, Gossypium hirsutum
  Clone ID: LIB3148-040-Q1-K1-A9
cggacgcgtgggcggacgcgtgggcggactcgtgggaagacgcatggctaatgcgacgagcattgtttcaataatatctaatcttttggataacaaaacccttgatacatatgcaaggcattgcttagaagattgctctgagctttattcaggtgcagggtctagtatacaaagtggtgggaaagcttttgaaggtaaagattatggaactgctaatgctgaaataagttcagccatggatgcaccggatacttgtgaagaacagtttaaagagaagaaagggtatgtgtcaccattgacaaaggaaaacaacaatttctttcagctacttgcaatcatactttcattcatgaatctggtaccaaaatgatgaacaatatactaatacttaat

SEQ ID NO: 7557 - DNA, 405 bp, Gossypium hirsutum
  Clone ID: GOSHI-09MAY01-C45740_1
tccacgcgtccgggttgcttgagttgcagccacgacattgtggactatatgtagcattgtctaccatgaatgccgacaaggagagatgggatcgtgcagctgacttgaggaaagccatggtggaagcaggcttcagaaaagttccagcttatagcttcattgatcccatgtaaaaatcgtgtgaaaacagaagatgtctctattctttaactaatcacatgcattctgcagcagcaatatcgatggtaaatgctaatcaaaatattagagaattcattcttagattgaacaatcaaatatgatgcaaacaaatcagcatgatgatatttatatatgaaagacaaatgaaattcatgcttgctttgcttaaaaaaaataaactaaaataaatttttaattataaat

SEQ ID NO: 7558 - DNA, 789 bp, Gossypium hirsutum
  Clone ID: GOSHI-09MAY01-C45000_1
acccttccccctcgcgttctggcactttcagcatgagatccagtagccatggcactatatgcgataggtgggtcgatttgtgctcctgtgtgggaggagatagtttttcgaggtttccttctcccttccttgaccagatacatgcctgtatggagtgcaatactggtaagttcagttgcctttgctctggcacattttaatgtacagagaatgttgccgcttattttcctaggaatggtgatgggtgttgtttttgcacggtcgacgaatctattgccatctatgcttctgcacagcctctggaatggccttgtgttcttggatttaatgagataatcaatcttgtcttctcatgttagctttggctgatccagtgctagtgaagcatatgcgtcaggccaattttctggggtatgcttgttacaggatattcttgattgaatgaatgcctaggaattacaggtctccaactgaatggtacaagcaacacgaatgcgattcagttgatccaacatggctccacagaactgctccactgttctgtttgtccactataccagggacattaaaagcaaccgaacggaatgaagaatgcatgtccattttggccaaaggcagccttcaatcttggaactgtaaactgcaaattgattggtagatgaggactctttctttatggtagattataatcttgggctttcattgtgctaggtgttggaaatcattctattttggaggccagggtactaactctatcatgttttaccaaaataaaaaaaaaaaaaaaat

SEQ ID NO: 7559 - DNA, 424 bp, Gossypium hirsutum
  Clone ID: LIB3148-033-Q1-K1-G10
cttgagagggaagtggctctttgatgttgctctaggatgcctcatgttccctttcgtcaaccaattatctcagttcaatctgaccttgttgccccttatgccttctacacctgtaaccctttcaagtgttgaacagtcaattttagcaagagatccagtagccatggcactatatgcgatagttgtttcgatttgtgctcctgtgtgggaggagatagtttttcgaggtttccttctcccttccttgaccagatacatgcctgtatggagtgcaatactggtctccaactgaatggtacaagcaacacgaatgcgattcagttgatccaacatggctccacagaactgctccactgtttgtgtttgtccactataccagggacattaaaagcaaccgaacggaatgaagattgcatgtccattt

SEQ ID NO: 7560 - DNA, 656 bp, Gossypium hirsutum
  Clone ID: GOSHI-09MAY01-C45330_1
cccacgcgtccgagctgtttgcttactctctctcgtttgtttcaaaacccctagccgcttccttaaatctctgtgtctctctcataattttccttgttattcttccccttcaagtgaaagcattataatggcattctctagcaaacttggaagcctttttaggcaaaatgggcaaaccccaatgatatcttcgatgcttaattcacttcgttgcatgtcgacatcaaccaagaagcttttcattggaggtctttcatatggaactgatgaccaaagtctcagggaagcattctctggattcggtgacgttactgaagctcgggttatcgccgatagagacactgggaggtccaggggcttcggttttgttaactttgctgacgatgaatctgccagcaatgccttgtcagccatggatggacaagaactccaagggagaaatattcgagtaagttatgccaatgaaagacctagcggccctcgttcatttggcaacaatggtggtttcggtggcagtagaggctttggtggtggatccagagacgattcaagcttctaggcgcccgtaccatcatctgtccgcggacatgcctccatagctaataggcatttagttttgagaatgtgttcatttggtttcaaggatttgcttgact

SEQ ID NO: 7561 - DNA, 428 bp, Gossypium hirsutum
  Clone ID: LIB3272-053-P1-K1-G3
cttaaaccctagcagcttcattcgtttcttgctgtttctctcacaaatttctttgtcctttttctcttcttaaagttacattagcatattatggcattttctagcaaacttggaagccttctgaggttaaatgggcaaatcccagctacatccattcttagctctattcactgcatgtccacatcaaccaaaaagctttttattggaggcctttcatatggaactgatgatcaaactctcaaggaagcattttccgggtttggtgatgtgacagaagctaagattatcatcgatagagacactgggaggtctaggggcttcggttttgtaaactttgctgatgatgaatctgccagcaatgccttgtcagccatggatggtcaggaactcaatggccgaaatattcgagtaagttatgccaatgaaag

SEQ ID NO: 7562 - DNA, 640 bp, Gossypium hirsutum
  Clone ID: GOSHI-09MAY01-C45320_1
gcatcaactagaaaatgaactgaaggaaaaagcgagggatctcagaaggagctcaaaaagaagcaacagcagtttgaggattggtacaataaatatatgcagcgaagaacaccggaggagttggatccaacgaggacagacgacaactctaacaatgatgctgttactgaaaggcaacttatggtggaagcagtgaaaaagaggttgggagaagaggaagaggcgtacaggattttacgtattcaggtgagggagaagtctttagtgagccttaaccgcccacgcgtccggctcttcagagcaatgtcaactattgccgttgcttgttcaaaaatgtatggggagttaagggccatatcacgttcaaggaatccaaatcatagctcataaaacttaatagtatgtttaagcaattttctatgtataatgtgttcgatgtgctttatatggatacatctcgcaccaacagaaaggtatagaatgaactctaaaatggtgtgttaccgggattcttcattttttttttaagtactctatatgcggcatatattcagaaatgagtgtgaatatatgatactccatatatgtataattgaagtttttactccatgtaccaaagctccttggtttgatgtttttg

SEQ ID NO: 7563 - DNA, 604 bp, Gossypium hirsutum
  Clone ID: GOSHI-09MAY01-C45230_1
acctgtagacatggtggaagcgatgggctacatgcatatgttcattcccttgatcatgctgttactgatatgaaaatattccttgaaaagttttagctgaaaatcctgggcttccatgcttttgctttggtcattcaactggtggtgcaattgtccttaaagcagtacttgatccaaagattgaagcccaagtatcaggcattatactgacttctccagctgtaggcgtacagccatctcatccgatttttgtggtacttgccccagttgtatcatttctattgccaagataccaagtcagtatcaccaataagaagaacatgccagtttgtagggacccagaggcgctggtggccaagtattcggatccactggtgtatacaggacctctccgagtgagaactggttatgaaattcttagaactacatcctacttgcagcagaatatgaacagattgagggttcctttgcttgttctccatggcaccgatgacactgtaactgatcctcaagcttctcagaaactgtatgaagcagcttgcctcaacagacaaaacgatcaaattgtttgaaggcctgttacatgatctcctttttgaactgg

SEQ ID NO: 7564 - DNA, 449 bp, Gossypium hirsutum
  Clone ID: GOSHI-09MAY01-C46940_1
ctaggaaattccatgatatcttccaagctgtaatttttatctttgaaggaagatctagtagccatagttttctgtaaaagtccttatagtcggcttgtaaagcataagctctaggatcatcttcagtcccgtccgatagtttataggcgctacgtattgtgtactcacccgacgcttcggcactccagacttggaaatcttcgtgtggtctttctgccagcaggataccgagaatcatctcggtaacatcctccgaaaagttatacattatcaactcctttttccatggtctaaaaaaagacggagccagcaaactctacaatagaaaggtacattaggaaaatggctattaataaacaaaaaaacatgggaagaccagtgccgcagctagtctgggtatgatactattgtgagatgtcgactaatagcttgctaaaatcggggggggc

SEQ ID NO: 7565 - DNA, 583 bp, Gossypium hirsutum
  Clone ID: GOSHI-09MAY01-C46850_1
cccacgcgttcgggataaatgcaaggaaaaggttatcacgaggagaactgatctgtgagtgccatgaaaataagttgcttgatcgaatggcaatcagtgtcgagtgcttgaagaagaaggttaaggaatgtttcatggatttgggatcatttccagaagacaagaaaatcccccttgatgttcttgtaaacatgtgggttgaaatccataacatcgacgaggaagaagcttttaccattcttttggagctgtctgataagaacctactcactctggtgaaagatgcacgggctggagaggcatattgcagttaccatgaaatctgtgtaactcaacatgacgtgttgagagaccttgctcttcatttaagcaatcaaggagaagtgaatgagcggaagcggttacttatgcctagaagagataccgaacttccgagagactgggagaaaaatgcagatcaaccgttcaacgctcagattgtttcagttcagacaggagaaatgggggaaatggactggttccacatggagttccctaagacagaagtacttatcctaaatttttgctcggacaaatacttctt

SEQ ID NO: 7566 - DNA, 578 bp, Gossypium hirsutum
  Clone ID: AI730139.1
ctgatcatccctggatggtcttcattgctcccatcgtcataataattttgcttgttagcgttgacgacatgaacaggaagaggggaaggaggattgtttggtttcgccatggatgatgatgaagaaggtgaaggtttgagtgatggtggtgatggtgagagttgttgagggtttaaaggcttgtgcgttcgaggatcgatcccttgacttatcaatttcttactcaggtgagtattccagtagttctttatttcgttatctgtacgccctggtattcttccagctattagtgaccaccgattccctaaaaggcggtgaaggcggaggatgagatcttcttcatcgggagcaatctggccacgtttaacagaaggtcggagataattcatccatcggagacgacagctttttccgcatcggagaagaccagcccgtttaggtaaagtccgccaccgtccttcgccttctttgttgatgtaattagataataactcgtcttcttccggcgtccatggccctcttttcaaccctactttgctgcaacacggcgtcgtcttggttccaacgttgtctttttt

SEQ ID NO: 7567 - DNA, 400 bp, Gossypium hirsutum
  Clone ID: LIB3148-059-Q1-K1-A2
gccggatcaaaccgctaaacaaggtttttttttccaggaagaggggaaggaggattgtttggtttcgccatggatgatgatgaagaaggtgaaggtttgagtgatggtggtgatggtgagagttgttgagggtttaaaggcttgtgcgttcgaggatcgatcccttgacttatcaatttcttactcagaaaaaaagagaggaaaaagttaccgattccctaaaaggcggtgaaggcggaggatgagatcttcttcatcgggagcaatctggccacgtttaacagaaggtcggagataattcatccatcggagacgacagctttttccgcatcggagaagaccagcccgtttaggtaaagtccgccaccgtccttcgccttctttggtgatgtaattagat

SEQ ID NO: 7568 - DNA, 587 bp, Gossypium hirsutum
  Clone ID: GOSHI-09MAY01-C46590_1
acaggtccctggtatcttgttcacaccaatctgtcctcattcattatcctttcgacccctgatattgcctgagcatgtaacagtccggattatggtgccgttcaatagcagaagtccggcttgggcatcattcgatggaaaggacaggaaactgttggctgctggggatgctcttctgtgcagcatggcaccttggcctgtgcctacagcttgtcaagttgattctactaatgactttttacgcagtatccatgacggcctccattggaatctgagaaagacgcagtcatttgatggccctcgggatcgggatctataaggtcattttccgaacttatatctagctggaatctaacttatacattccatatgtttcagtcattgtaggaaggggaaatcaaattcacaaaaactgaaatagctgcaagttcttgttatatcaccagtattatggtttacccttaaaaatgttttccccttaaaggttgtaggaaggagcactatatttgcccttctgatgctgcagatataacctaagttgtagtcaacactagattatatttagatctttattatgagatcaaaag

SEQ ID NO: 7569 - DNA, 393 bp, Gossypium hirsutum
  Clone ID: LIB3148-055-Q1-K1-D9
taacagagtacggagaatttgtgcgtagttttaatgctccttctgttgatgagaaatttgaactccttggaatcttggcgaatgtttttatcgttgctcctgaaagtctgtctagtttgtttgagggcacacctagtatccggaaagatgcacaaaggtttattcagcttagagaagactacaagagtgcgaaacttgcatcgaggctcaactctttatggtcgggttctggttgatgtagaggtggggttgttgctggttttcaaatatatagctctctttgtttgtcaccgtccttggtcaatgtattatattaaccaagaattgtttttcatgcctacttcaatcatcatttttaatttattatatctggattcaacccctccctttttt

SEQ ID NO: 7570 - DNA, 218 bp, Gossypium hirsutum
  Clone ID: uC-gsflnu33B093e02b1
ctctctcgtccggtttgtttgagggcacacctagtatccggaaagatgcacaaaggtttattcagcttagagaagactacaagagtgcgaagcttgcatctaggctcagctctttatggtcgggtgtctagttgatgtagaggtggggtagtggaaggccctcaaatatgccaactttttgtgcgtcgtagtatatgcacactttagtcagctggcgt

SEQ ID NO: 7571 - DNA, 559 bp, Gossypium hirsutum
  Clone ID: GOSHI-09MAY01-C46730_1
tcccgagtctgttgtgagtttcagacctagtaacatgcaaggtcaagctccactgagggcagttgcgggtgttaagtattcccttgaaaaattattttcgaagattaagagctctctacctcctggcaatgtccaagaaatattgatgatatacagcacatatagggctggaatgatggccaaggatgcttttataaagaaactacggcaggttgctggggatgaggtcctgagatccgctattcaggatatcaatgcttctggatgatttggaagttttggaattgtttcggttacctatttatttgcctatgctgtttgagagagggaaatgccaaatgtaattgttacctcacaactagcttaggaaagcaaatgcctagaccactaaaacgacagaagtcattcttagttttttattgatcgggggatttaggatttctctttgttttaaaccacagaatgtgtagcaatcatgatttaagttattataaagttcacaatttctctctttctcaatttttcattttcctttctcactatagattttattttgtgg

SEQ ID NO: 7572 - DNA, 406 bp, Gossypium hirsutum
  Clone ID: LIB3148-057-Q1-K1-F3
gcatctcccatctagtgtagattctgacactggctctgatgatcccaagaacccgaagtggtatgtggtatggtcaaatattgcaaacatgaatattcttcccgagtctgttgtgagtttcagacctagtaacatgcaaggtcaagctccactgaaggcagttgctggtgtcaagtattccctcgaaaaattattttcgaagattaagagctctctacctcctggcaaagtccaagaaatattgatgatatacagcacatatagggtaagtaggtgtgcctgtcaattagattaagttgaacgaaactagatctttgggaatcatattgaatatttgactatacaccgcactttgctaaaaaatcgatccctgtttaccaaatttaaaaaatatttaaaggaattt

SEQ ID NO: 7573 - DNA, 480 bp, Gossypium hirsutum
  Clone ID: GOSHI-09MAY01-C46670_1
tcatccttacatgccctgtgttcatcaacatccatttcgagggcgacaaaatttcagacatcactgcaatcacggagacaggcagaatgatgcatagtagccagtgactactttaccacctatcccttgtcgagaaattgagatgtgatttaggtaaaaatcatagaaagatcatgtttaaatatatgtttcttgcatttgagaaccaagtcttttgctagaaagggaagaagcaaaatgtgagtgtgccaggttcttcagtttggttttgatgcttgtaaggtaccatgactgatgttaccagctaactaagctactttgtttgatgatatcctttggattttaataataatgaaagggatgcttatgcttttgtaaaaataaaaacagccgtaacaaagaaaggaaaagaaaatatacaaaccaataaaaaaaaatggatgcatgataaattaaacaaaatgggggggctcgttttaa

SEQ ID NO: 7574 - DNA, 1183 bp, Gossypium hirsutum
  Clone ID: GOSHI-09MAY01-C46620_1
caaagttcagcatcacgaaacaattataagaatgatttccgtgactctggcggacttgagaaccaatcggtgcaagaattggagaagtatgccgtctacaagtctgaggagactactaagaccgtcaacaattgtgtgaagattgcggaagaaatgagagaaggtgccaccaatactttgatcgccttacatcaacagggtgaacagattacccggactcataatacggctgctggcattgatcatgaccttagtcggggcgagaagctccgcggccgcccccgcggccggttctctagaacctggaaaccgaagaagactcggcaaatagttggccctgttataacaagagatgatttgcctaagagtagaggtggccacttggagcaaaaggagaaactgggattgaatcctgttccaaggagacattcaaaatcacaaacgccaccccctgagccggtggatgcgtatcaaaaagtggagtttgaaaaggcaaagcaagatgatgccctctctggtttaagcgatctactgggagagttgaagggtatggctgtcgatatgggatccgaaatcgagaggcaaaataagagtctgaatggtctccaagatgatgtggatgagctaaatttccgtgtgagaggagcaaatcaacgagctcgccgattgcttgggaagtaacactgcagttttgagattcaagctgacatgtctgtttcactcttctgtcattgtgatctcacacacagccatattgggggattttattagtatattcgcctccttaccttaccatgtttctcttacgtttcaggcatatcatatgcttaactatggactttcacaatccgagtatgcgtcttgtcttttgtatttatttttctgtttttcaattaaatatattactaaatatgttgaataaaaaaaaaaaaaaaaaaaaaaaaaaaaaaaaaatgaaaaaaaaaaaaaaaaaaaaaaaaaaaaaaaaaaaaaaaaaaaacaaaaaaaaaaaaaagagggggggcccgttttaaaggatccaattttacttccccttgcttccaacttaataccttttttttggggcccccaaaattcaattcacgggccgtgtttttacaacgtggtaatgggaaaaaccctggctttaccaaattaaatggctttgcaaaaaatccccttt

SEQ ID NO: 7575 - DNA, 915 bp, Gossypium hirsutum
  Clone ID: GOSHI-09MAY01-C46130_1
gtcgcattagacgtgcacagaatctatatgatgaattcaggatagatcactttagaggatttgctggcttttgggctgtcccttctgaagcgaaagttgcaatggttggacgatggaaggttggtcctcaaaaatctttgttcgtcgcccgcgcccgagcagttggaaagattaatatcatagctgaagatctgggagttataactgaggatgtagttcagctcaggaaatatattggagcacctggaatggccgttctccagtttggttttggtagtgactctagcaaccctcatttacctcacaatcacgagcacaatcaagttgtgtacactggaacacatgacaatgacacgatccaaggttggtggagcaatttgatggaacaagagaggtccaatgtattcaagtatcttcgtatcactgaagaagatgagatctcatgggcactgatccaagctgcagtttcttcaatagctcaaactactatcataaccatgcaggatgttcttgggttggacagttctgccaggatgaacattcctgcaacacagcatggaaactggagttggaggatacctaattccacgagttttgatagcctggaaaaagaagcgttaagattaagagagatgctttccatgtacggtcgaaagtagttcaggaaagcttcatatctttcttttcctcagtcattacacatgattttagtgccacccccaacattatgtgtctaaaaacaatctctctagctttgaataagttcttttaaaaagcttgataccctttcatttctttctcgttaatatcttactttctaaacacacgcacatgcctattgccatgtttgctactcaagagtaatgaaatcagtctctagcttcaaaaaaaaaaaaaaaaaaaaaaaaaaaaaaa

SEQ ID NO: 7576 - DNA, 406 bp, Gossypium hirsutum
  Clone ID: LIB3148-049-Q1-K1-G6
ccaagctgcagtttcttcaatagctcaaactactatcataaccatgcaggatgttcttgggttggacagttctgccaggatgaacattcctgcaacacagcatggaaactggagttggaggatacctaattccacgagttttgatagcttggaaaaagaagcgttaagattaacagagatgctttccatgtacggtcgaaagtagtccaggaaagcttcatatctttcttttcctcggtcattacacatgaatttagtgccacccccaccattatgtgtctagtctagctttgaataagttcttttgctgatgactgagggtttagagttgaattttatttataaactaataaaaagcttgataccctttcaaaaaaaaaaaaaaaataaaaaaatatattttaat

SEQ ID NO: 7577 - DNA, 321 bp, Gossypium hirsutum
  Clone ID: GOSHI-09MAY01-C46050_1
cggggcggcccacgcgtccgaaattaatcagttgcagtggtctgctagactcagcctgattggattgccattgccttctccaacaagaatgcagcttctcaaagtgttgaggctccctgcttgaaacgtatgcagctctcattgttggcgcatatactgctcacgcttgtaattaggtgggagttaaaaactgtagaatcagtgctattggctgataagtttgttagtactttgtaagaccagctttaatctacaattatttgttaggtccctccccccaatctgagactcgaatgcatagttggacttagatgtggaaaa

SEQ ID NO: 7578 - DNA, 778 bp, Gossypium hirsutum
  Clone ID: GOSHI-09MAY01-C46370_1
ctccctcgcctcttcatcaccttacggtgtcaagcccgacagcagggccacggtgccactaatggtactgcccgaacaacaatggcctcctccacggcaagcaaacaaccaccaggccgagacggtggtgatgatggaagaagaagctgacaaaggcaatgtgggtcacaacaacaatcacatccaagaagaagaagaagaagaagaagaagaagaagaagaagaagaagaaggggatactgaagacgaatatgaagggaacgatttcgagttagtagcaaaaactgctccaattggcagtggcggcgagtgagacaacaaagggaagcttctaatcaaagatgacatcaactcggacactgacaaggtggttttactactatactatatttttactttggtaaaaaaaaaaaaaggaagaagaagaatgaaaaacacacacatacacacaccatagctgatcctcgaaaacaagaaatttgtctttgactgagaagtaacaaaattttgttggtctgaagaggggaaaagcgagtcagattctgataaattcagcaacaagttgtggggatgacatggattaacagccatgcacatggggtgtaattttattgtggggttaaatgtttttttctgttataatttattatttgattgcaaaataaatatgttaaaaagtgtggaaaagggtatagagtggggagtttgcacagaattagttctttgtatgatacgattcttctttctgttcatagtggaatagaattttattttcttt

SEQ ID NO: 7579 - DNA, 661 bp, Gossypium hirsutum
  Clone ID: GOSHI-09MAY01-C46310_1
gggatatgatgcccttgcaagcacaccacgaggtgaaatttgtctcaagggaacaacattgttctcagggtacttcaaacgtgaagacctcaccaaggaggtcatgattgatgggtggtttcacacaggggatattggtgagtggcaaccaaatggaagtatgaaagttattgatcgaaagaagaacatctttaagctttcacaaggtgaatatgttgctgtcgagaacctggagaatgtttatggttgtgtttctgatattgaatcgatatgggtttatgggaacagctttgagtcctaccttgttgcggttgttaacccaaataagcaagcacttgaacgctgggctgctgacaatggtgtaagtggtgactttgaaaccatctgtaaagatccaaaggccaaagagtacatacttggagagcttacaaggactggcaaagagaaacagctgaaaggttttgaatttataaaagctgtccatctcgaccatgtaccgtttgacatggaccgcgaccttctcaccccaacatttaagaagaaaaggcctcaattgctcaagtattatcagagtgtgatcgacgacatgtacaagagcataaacaagccaaatgcttgaccgaacgggatcctaaagcgggttgttctacgattctgctct

SEQ ID NO: 7580 - DNA, 654 bp, Gossypium hirsutum
  Clone ID: GOSHI-09MAY01-C46200_1
cacgcttccgcccacgcgtcctaacttttcccaagaacttagtgacttggccatggaatctgcacaaattgatggccggttagctcggcgtccactaaaggatagccggagagagttcaaggcacataagatgttatcatctcacatcactcagttaatgcagaaatatgatacacccattaagtctcttcctctcaattccccctcaatgagtaacactttcactcttcggaggcaaatggctcatgatctcctaaccggtgaacttcgtgtcctgaaatctgcacccatgtggttgaataattactgtgcggctctgaaatcaacaagcacctgtcggagtcaattggaaaaccgtatctgaaaaagtgacctgtaaacacttggctatatatatgcaagctttttggagtcattctttttgcccacgatcccctgtttaagtcaatgatggaaagcagaatctggaagtcaagaattttgctttttctttttcttttaattatcccaaaactgaacccaaaagctcaccctttttccccttttgtttttttttaatcgctttgatgggtaatctttacgcctaactgtaatttgtaatttcttgggagatatttttgttttttaataaaaggtacgggatgttaaggggtt

SEQ ID NO: 7581 - DNA, 543 bp, Gossypium hirsutum
  Clone ID: LIB3828-033-Q6-N6-E9
cgggggcaaaaaaagactccaaagcttgcttatatattgccaactgtttacagttcactatacccaaaaaagctggataaactttaagcatagggattaacaatgaagttgttcacaaaaaaaaaaaaaaagaattcttgcctttttcaaatacgatttttaaattgactccaacagttgcttgttgatttcaaagccgcacagtaattattcaaccacatggatgcaaatttcaggacacaaagttcaccggttaggaaatcatgacccatttgcctccaaaaagtgaaagtgttactcattgagggggaattgaaaggaaaaaacttaatggctgtatcatatttctgcattaactgagtgatgggagatgataacattttatgtgccttgaactttttccggctaccctttaggggacgccgagctaaccggccataaatttgtgcagcttccaaggccaagtcactaagttcttgggaagagttccaacataaaagacgagcaaatgcacgtagtgcctgtggaagacccttccccttt

SEQ ID NO: 7582 - DNA, 446 bp, Gossypium hirsutum
  Clone ID: LIB3135-037-Q1-K1-F1
atcatggtcttcacaaggcaagtcaaagacgaagaaaaagacaaatgttaggcataatcatcctaaagatgcccaacaaggaatacaacaggcttatgagagcatcagtaacgggcttgggaaatctgcttctgctttggttcagaaacctttgaaaaaataccaacgaggagccagtgcaagttctgctctggcaactgctgttagggcagttcctactgctgctatagcgccagcttccggttgtgcaagtgcaatacactgtgctctccttggactcagaaatagccttgatcctgaacgcaagaaagagtcgatggagaaatattttggtcccactctgccacaggatccaaattaatcttgcaagcaacagtgtcacttctgggatggtgtgatggatcaaagagtgttctttcctcgaggagaacacggatcgtcatgta

SEQ ID NO: 7583 - DNA, 404 bp, Gossypium hirsutum
  Clone ID: LIB3149-040-Q1-K1-B8
tgaaaaaataccaacgaggagccagttcatgttctgctctggcaactgctgttagggcagggcctactgctgctatagcgccagcttccggttgtgcaagtgcaatacactgtgctctccttggactcagaaatagccttgatcctgaacgcaagaaagagtcgatggagaaatattttggtcccactctgccacaggatccaaattaatcttgcaagcaacagtgtcacttctggtattttcaccttgctacggttcaaaattttctattggtcaactatttgcgcatcaaaagaaattttcagctacttgtttcattttcttatcgatactcaggattgttgtgatggatcaaagagtgttctttcctcgaagagaacacggattgtcatgtacctcgactt

SEQ ID NO: 7584 - DNA, 662 bp, Gossypium hirsutum
  Clone ID: GOSHI-09MAY01-C47580_1
gttgaggaaaattctggcttagaggttaattccggcaacaagtccgacgaatccgataagaaatcatcggaatcggactcgttccttgacgtaccgcaacaaaagaaggtaagaaaaacagaaaccaagtgtctgtttgaattaggaaacatgcccctttggggatttacatccatatgtggtaggagaccagagatggaagatgattttgtggctatacctcaatttttgcgagtccctagtcaaatcctcaaagccgaaagtgtaacaaacgggatgaaccgtgacctaacggctcacttctacggtgtctacgatggacatggagggtgtcaggttgcgaactattgtcgtgaacgtatgcatttggctttagccgaggagtatagaaagggcgaaatcctgtatccgcgagggaaatatcaagcacgattggcaggagctatggaagaaagcgttctccatttgcttcatcaaaggcgatgctgagatcggaggagtttgtaacggtgtgaatgattccgattacaaacctattgcccccgaaactgtcggttcaaccgctgtagttgccgttgttagtccaactcatataatcgtcgtcaatagggtcgaatcaagggcagtctctacagtggaaacatccatgccgtatcataaag

SEQ ID NO: 7585 - DNA, 1001 bp, Gossypium hirsutum
  Clone ID: GOSHI-09MAY01-C47570_1
caaatgtgagaatgaagctgaagtattgaaccagacgtccagaacaatctgtcctggctaagcactatgcctcagcaggccaaatggaaaaagctgaggaccctcgcgtcccaatggaaggggacaacatattagagaatcgttgggtttacaggtttttgcttcctctgtatgctggtcttggaaaggctgatgaagtagaaagaatttggaagatctgtgattcaaaaccccgctttgaagagtatctggctggtattgaagcttggggaaagttaggtaaaattgaaaaatcagaggaaattttcgaaaggctgttaaaaacatcaaaaaagcttcctgcaagatattatacccatctcttgaaggtatactcaaaccataagatgctcgaaaaagggaaggatcttgttaagcgaatggctggtaatgggtgccagattggcccattcacttgggatgctcttgtgaagcttcatgtggaagcaggggatgtggaaaaggctgactcaatcttgcagaaggcatgccagcaaaatgaaattaagcccatgtttactactttcatggttgtgatggagcagtatgctaggaagggtgatatccataacgccgaaaaaatgttacatagaatgagacaggccggatatgtagctcgagttagtcagttccaaactctagtcagagcgtatataaatgccaaagctccagcttatgggatcagggagagaatgaaagcagataacatattccctaataagtccttagctgctctgttgcctcaagttgatgcattcaggaggacttcagtgtctgatttgctcgactaaggatttcaatggttacttcaggtctccattttaatggcaacctctatttctatgcacagttcttatctgtttcatgtagtcaaatattggttgtctacttctagacattctgttctgttcaaacttcaaaccgtactaagcttttgagaaatatgttattaaatttctttt

SEQ ID NO: 7586 - DNA, 397 bp, Gossypium hirsutum
  Clone ID: GOSHI-09MAY01-C47410_1
cccacgcgtccggaaaatcaaaacagaaaagatctaattttcctatccccttcaatcggccggattcggcggttccttgccctcaaccgccaattcgccaccgtagttggcagatagcgtcaaatgaaggccgaacccgatcctattggaggctctatctctctaatcccccttttagcttcgattacaacgaagcaaatgaggaatcggaggcgttcttccaaaaagataaggcccttttttttgtttatatttctatacgagagaactatatggggggataaaaagaaaaaaagaaatgaatcgaaaacctaaagtaaatctgaaatgaccccttttcctttcttctatttttttttttggacttcaatctcaacaatctgtgtgaaaaaaacaa

SEQ ID NO: 7587 - DNA, 751 bp, Gossypium hirsutum
  Clone ID: GOSHI-09MAY01-C47750_1
acggggtttcaatcatccatggccacccggctagcgagaaagctgccatcatcgctctcggcgttttcctcatctccgattaccaaattgacgtcgggcatctcacctccgtcgatgagccatggcggacccggactcaggtgtgcctcctcttcctcttcctcttcctcatcaacagcaacgactggatcaaattcttcatcttctaagcgtgagaagaagataacagaccgtctatcagccgtcatagacgccgtcaacgaccgtaaagtccctcccgagctccgtggccaacgcaacaacgttagatcggaaaccgacatcatcaacgtagttgagcaaagaatatggcattcaatggaagagggtcagttcgagaatttagcagggaaaggtaaacctcttaaccttaacacaaatcctcatgcagatccagctgaagacaccctttataggatactctcgaagaacggatgtgctccggagtgggtagaacttaacaaggagatcaggaacaaagtatccgaatggcgagtcgctgtgtagaaagcatgggacaagcaaatgcaatggaaatgatgaagaaaaatggattggcgttgggaatcttgaagagcaattcgtgccatatcgtaagtttccggatataggatgttccgtcggcgccaagtacgatgaattggacaatatggccccttgaaataccataggtgtttagtttgtggtacctagtttgtcgtttgggtccaaa

SEQ ID NO: 7588 - DNA, 398 bp, Gossypium hirsutum
  Clone ID: GOSHI-09MAY01-C47710_1
ccaagctctccataccgccgccgccgcctgtctaggccgatccacggcctccgtcgtcccagtctccgatcttgacggagatggaatggaccgcgacaaagccaggtgtcgtgcgcgcgaatgacgcgcgtggggaggccaatctccgagtcctgcggcgactggacccttgctggaggcaggggcttgcggcgctaccggcttctagggtttcccaacccttcccttttccattaggttcgggcctgggctggggtgaattgggtattgggttttaacttttttgggcttgctattggattttattattgggagggccgggcaaataattggtattacaggttttatttatttgtatattaaaatgtcatgtcattaatttctacaaggtttaacgg

SEQ ID NO: 7589 - DNA, 583 bp, Gossypium hirsutum
  Clone ID: GOSHI-09MAY01-C47700_1
cccacgcgtccgtggacataagaaagcttgtaaaggataatcttattataaaaaagcctaacataagtcgatcgggatggaggtacaggaaaggtaaggatgttgggaatcctaggagaaaaggatatgggaagagaaagggaacaaaggaagcaacgctaccatccaagctttcgtggatgagaagagctcgagtcctaaggcgactccttcgaaagtacagggaaatgaagaagattgatgtccgcctgtaccatgaattttatatgaaagccaagggaagcgtttttaagcataaacgtgcacttcttgaggcccttcataataaggctaagagtgagaaggatcagaaggttcattttgatcaggttatagctattaaagccatgggtaaattaggtagcaaggagaccagggttccacggaggaaacaatgttcgagtccacctgtggaagttattgatgtgttgaataatgcttatttagtttgaaagtgtatgtataaaataaagttgatgtaataatgcttattacatttataagtaagatttcggaattttgtattagaaaccaacacgaatga

SEQ ID NO: 7590 - DNA, 1079 bp, Gossypium hirsutum
  Clone ID: GOSHI-09MAY01-C47680_1
aaaaaatgatgaatcagatgcttaaacaagttattggagttccaatcaaagcaacgacatatggagttgggagaagaacatcaaggcaatacttacctgatgttgcaggccaataccacatttcacaacaagggtctacaaaaagttggcctccctttcaatacttactaatggtagatatgggatgttttcattttctaatgggaaattgtttgtaactgcaggcaaaggaaactttgtttttaaaaggatgaacttgctagggaagaaagctgatacattcgcccatggtgtccgagagcatggtatgaaccactctcatgctatcagctatattaacgtctcttaagattaaagggaaatgaaagcttaaggttaccggttttttaaaccggcgacccacgcggccgcaaagatcagtgaaacagtgaagggaaagctgagtttaggggcaaggattcttcaagtaggagggttggagaagattttcaagcaattctttagtttcagagaaggagagaagctgttgaaggcttgccaatgttatttatcaacaacagcaggccctattgctggcctacttttcatctcatctgaaaaggttgccttttgcagtgagagatcaatcaaagtcccttgtccaaatggagaatttctgagagtccattacaaggttgtggttccagttgagaaaataaagggggtgaaccagagtgaaaacatgaagaaaccatggcaaaagtacatggaaattgtgacagtggatggtttcgatatctgcttcatggggttcttgaattatcacaaagctttcaagtgtctgcagcaggcaatctcacagagactggaagatgtagacactttcaaggtggcttaacaaatgtttcatgaaccatgagattgttttgataatgaaatgtggaagagtaatcagtaaatcccagttacaaacgtaaaaaaaaaaggttgttctagattgagtatacattccttaattaaggatcaaaattaaattctattttatgttgatttttactggaatattttatatccggcatgaatataatatgttttggacc

SEQ ID NO: 7591 - DNA, 355 bp, Gossypium hirsutum
  Clone ID: LIB3165-055-P1-K1-E11
attcaacagctcgttggcattcaattccatttcattcatcaaaaaaaaaagaaggaaaaatgaagaaccagatgcttaaacaagttattggagtaccaatcaaagcagcaacttatagagttgagagaagaacatcaaggcaatacttacctgatgctgctggccaataccacgtttcatcacaagggtgtacaaaaagcaaaggaaactttgtactcaaaaggatgaacttgctagggaagaaagccgatatgttcgcccatggagtccgagagcatgtgagactggggccaaagatcagtgaaacagtgaagggaaagctgagtttaggggcaaggattcttcaagtaggagg

SEQ ID NO: 7592 - DNA, 732 bp, Gossypium hirsutum
  Clone ID: GOSHI-09MAY01-C47090_1
ccacgccacactacaacgtgtgcaacagcaaggtgatgaaactccaatggtgtgggaaatgcttctatacttttacatcctctattcaccagactggcactatcggagtacaatgcctactttcctgttcttttatggagtcggctttgcaatagcccatgctctcatccgcttcgaaattggcttcaaggtgcattacatcattctctgccttctctgcatccctcgaatgtacaaatactacatctacactaaagataactatgcaaagcggcttgcaaagctatatatagcaactttggtccgggggaagcatatgttggcttatggaccaggtattgtgcaaggagatatctcattggtacttcacccctcaaggtcatgctctatggcatgtcttcatgagcttcaattcatatttcgccaacacgttcctgatgttttgtcgtgctgagcagcgaagatgggatccgaaaatcgtccacttctttggtgttttcccttatgtcaagattcaaaagccaaagagccagtgaaaaaaggcatgcttgcttcacaaggcaattcttttttacccagaaaagatgaaatgaaagaaggttgtttggtcccatattttaaaattcatattagcttcaaaacccccatcacttgaaatcttgtaaggctttcatggatttggacttgcagaaattagtttcctgtatttgtgatagaaataggggggggggg

SEQ ID NO: 7593 - DNA, 899 bp, Gossypium hirsutum
  Clone ID: GOSHI-09MAY01-C47070_1
caagattatacctgaagaccttcattttgtgctaagaatgaggcatacctttgaatctcgtgggtatcaatctggtttctatctgtcccagttgttttcatccaacagaaacggtccgtctttatcgacgatttcttcaaagcaggctgccgttccaacccgtccacctccactcttcaactggaaccagagaccacttccgccagcaactaatccgatgcttgcttcacctaattttcagaacccggctagacttggatttccacaacccaaagacgaaacccacatgtttctactacctcgttcgtctgaaacccgaatggaagacatgatggttgagcatgaaaacgacatcaaatggcctaatggcttgagcttcttcagtgccctcaccggacgaaccgaagatgccaagcttttgttcaactccgagagtttaggaaacaaaccagaaacaaaccaccactctcttatactcgaaggaaaagactcgaaccataacgcagatatcggcgcaaacccgaacgagttcttgagcttagattgagcttggacagtcatccagataatacaaggatgaaaaacaagttttagaaatgccttcaattgccggctagaatgatgatgtttttgtaatcaactttggccgaccatcaccagcacgacccagcgagtatcggaactccgaggccaggatgtacaatgatgtcatggaaactttcttggaatgaaatgtattaggattgtggaagaggacataggtgtgttcttttttatgttcttttatgaatgtctcttaaagccactaaactcaactttctaatcatttgttgtagtttatccttaatgtaagtcctttttaaatagaacttcagttttgtgatagaatatcactttat

SEQ ID NO: 7594 - DNA, 371 bp, Gossypium hirsutum
  Clone ID: GOSHI-09MAY01-C47030_1
gtcatacctcactcccctcctcccatatttttgttgcgggggaaacccccgcgcccaatatggagatgtagatttaaaagactgactgccatcccacgtggtcggcggagcttaagtgattagcatttcaaatgcacaaggatctaattctactcaaaacagttaaatctttttgtgaaatagctgtgggggaactggagctccaactaaagtacgacacaggttctccggaaaaagtaagcaaccccctatatgagtccacaaaggacctcctgcatagtgctctccgaaagggcatagccaaaattttggaaaaacagaactttggcgctccccgagataatgacccattctgagctagttgataaatt

SEQ ID NO: 7595 - DNA, 600 bp, Gossypium hirsutum
  Clone ID: GOSHI-09MAY01-C47240_1
gtgagaagtgagttccattggtatgatcagaggtaaataaacacagttttagaatggatgcgttgcaaaagtgttgcaacagttgttggtctccaagatttatccattgtatgcatatgctgcaacaatcgtaagccaagactagcaaggagaactagatttttgaatcgtgatatgttgcaactgtcacaatactctgctgaacggcaagtgcagctctgctctagcaaacaaataattgggttgggttgggttgggtggtttggaattttgaaacacaaaagtgagtgtaaaaagtgtgacgatgattggatttagtaattaagaaaaatagaagaatattgcggattggtgttctatgatggctctgggtcagtctcttttccacaaaaggcaattatagaacaaggattcttgtgacaggaatgctggggtatgaaacagagttgatgattcagtcttgcaaattggatgtttaggtcttcagtggacccactgatgcttttatgtttggtactgctttgtttaaccccagcaatggcatcactgatgtaattaatttttgggaaatttcaaatggtgttttttttataccagctt

SEQ ID NO: 7596 - DNA, 906 bp, Gossypium hirsutum
  Clone ID: GOSHI-09MAY01-C40910_1
gattttattatttcatcagtgaaagcaagatgtcttcctagagaaagtttggatgagcattttgtaatacacatggagggtgtaaatgttttggctgtcaattatggctctcccgggtcatgcccttatcctcggaatttgaaacttcctgcaaagtggtccttcagttcacatacagttttgaagaacagtggagcaggcacccagggctcctgtatttactgaagaaattcttggtggagagaatgctgaaggtgaagttgtgcagccggctgaaaggtctttttgggctaaatactggatgtatttgatccctctgggactcatggttgtggctgccacagcacgaccaatgaacatgcctgaggaacaagctactggccaggtacctgcacaaggacagccgtcagctggagcagtgcagcgtgggccaagttctgctgtgcgtagaaggtgatcaataaggttgctgctatttataccattttagaagtgaagggatgaagttgagattgatctcttttagggttcttcaattgcatgaattgaagctcattatggatgtgtactttccaatatctgtggtggtaatgaaccgaagccacctaatgagaagaatattaggtggcagcgttctctttttccttttttccgttttaacctccgatatcagaattatctgtgataatcccattgacaattgaatcgtatgttttagcattgcaaaaatttaggcttttttgttttgttggtagaagtaaatttggtttggttgattagtgtaatagcatgagacaaaacttatttagtaaactagcactaatagtttgtaataacattattgaaatggttcattggttggtaggtaaaaatattgagtaaatagaactgaagtattattttatg

SEQ ID NO: 7597 - DNA, 476 bp, Gossypium hirsutum
  Clone ID: LIB3582-012-P1-K1-D9
ttttaaagctgatgtgtttctgccatcaacatattccaattcactagggagagttttaaatttggcatctctatgcatgctgatcaaccatttaaaactgcaacttgatgtgaactgtgacttcagcttatgagtgggttataacattcagcatgtgtagttgttcaagttccgtacacatgcatcaacttgttccacaaaatggaagttcaattttaaatatattgataagatggaaccttgtagaagatgaacagagactattttctttcagagaaattttgatcgtgtaatgatccccctttattttcattttataatctctatttcagcctgcaaagtggtccttcagttcacatacagttttgaagaacagtgagcaggcacccagggctcctgtatttactgaagaaattcttggtggagagaatgctgaaggtgaagttgtgcagcccgctgaaaggtctttttgggct

SEQ ID NO: 7598 - DNA, 689 bp, Gossypium hirsutum
  Clone ID: GOSHI-09MAY01-C40900_1
ggaaagtggtgcgaaatcggactatggaaatactctcgccacccaaactattttggtgatattttacttacctggggatactttgtggcctctcttcccataattgaaggtgctgaatggcttgtactcatcgggccagtctttttgacattgctgctgctttttgttagcggcctaacaattctcgagaagtcaggagacaagaagtttggtaatgtggaagcatatagagtttacaagaaaagaactagccctcttattccactgccacgatcaatatatgggaacctgccgtattggttcaaagccgtttttctctttgaatttcctatctacaaccgttatttaaacagaaaccgtacgaagcaaggatagaacagaagttgagtttgtgcttcgttatcttgggattcgcgaggtcatagaccaggttttgaaactttactggcacatttctgatggggcctatggatttagggaaacctttggggaaggcccttttgcatttttaaatttattggacctttttggcaaacccgcctttaaacctgtttgtggactttgcgctttttacccgagatccacttgtgtgttaaaaagtcccccataaaaatttcgggtgttaatacttctttttcacaaaaaaaaaaactcaggggcgtcccttccctttgggttataaatgcgca

SEQ ID NO: 7599 - DNA, 313 bp, Gossypium hirsutum
  Clone ID: LIB3148-040-Q1-K1-A2
ccggaacgaccggctcgacccactcgttctgttgtagatcgcgagcgtcatatactaagtatccaaactttactgccacattgttgatggaggcaaataggatcttaaaggtcaagcagttgtggtaatggtcccattgttgctatgttttgaactttgtatttgttactttttctgtgcaaatacgcatgcatgttcaaaacttgagtttgtggagcatttcatgcatgtattttagactctggaatgttcaactatggtggttatgttgaataaatgttaccaacataataaaatattttcagtgggattt

SEQ ID NO: 7600 - DNA, 282 bp, Gossypium hirsutum
  Clone ID: uC-gsflnu33B113a10b1
ctgccatattggttcaaagctgtttttctctttgaatttcctatctacaaccgttatttaaacagaaaccgtacaaagcaaggataaaacagaagttgagtttgtgcttccttatctttggattcacgagttcgtagacgaggttttgaaactttgctggcgcgtttctgatggaggcaaataggatcttaaaggtaatgcagttgtggtaatggtcccattgttgctatgttttgaactttgtatttgttactttttctgtgcaaatacgcatgcatattc

SEQ ID NO: 7601 - DNA, 455 bp, Gossypium hirsutum
  Clone ID: GOSHI-09MAY01-C40740_1
cgaagatctctctcctttatttctgcagtctgtatttttcgcggccaccaacaaccaccgaagaaaatggcttcgaacgcggcggtgccgttctggcgtgcagcggggatgacatatatcacctactccaacatatgcgccaacctcgtcagaaactgcttgaaggaaccttataagactgaagccctttctcgtgagaaagtccatttctccatctccaagtggactgatggaaagcctgaaaagcccaccatccgctcagattcgcctgaagaatgagttgtgtggttggtcatcaaagtcgccaattgggaaggactcgaggagtttaatttttgttttttttgtaattcttgtacaatgcctgtgaacagatttcagggtttgagatgctgctgcattttcgtaataatctctactttgcaaataatagactgaggtttcattggactgct

SEQ ID NO: 7602 - DNA, 847 bp, Gossypium hirsutum
  Clone ID: GOSHI-09MAY01-C40730_1
cggacgcgtgggtgaaggccggaatcatgttccaaaggcaatgaaaatgaagcggtcggggtcacatgtcggagctgccgaaaagaactcccagtaccagtatcagtagcagtacccttggtccatcaaactcgatagatcatcggtttcgcttatagacagtgagtgcggttccaccagtacggtattgacaaacaccaactactgcagatcccatttcgggtacgatgtaagagtatgaaataacaccaaatggaatctcgaaaatgaattcgctcgattcaactgagggaaagtaatcaggagccaaaaaaaagtttgacttctatgactaatgtagaagttttactgtgaacaatgacctgcgaaaattgcagggactagtgatgtagtaacattgtgtcaatagaaattctctgtttgatttattttctgatgactaggttttttattttatgtatttgaaagattgtatttatatacatttatttatattaaaatataagttagtatgttcttaattagaataaaaaaaaaaaaaaaaaaaaaaaaaaaaaaaaaaaaaaaaaaaaaaaaaaaaaaaaaaaaaaaaaaaaaaaaaaaaaaaaaaaaaaaaaggggggggccggttttaggggatccaagtttacttccccgggcttgcaacgtattagtttttttttggggccacctaatttaaattcattggccggcgttttacaccggcggacctggaaaaaccctggctttccccactttaatcgctttgcagaacatcccctttttgccagttgggttattaccaaaaaggcccgccccgatcgcctttccaaacagttgcccaccc

SEQ ID NO: 7603 - DNA, 492 bp, Gossypium hirsutum
  Clone ID: GOSHI-09MAY01-C40160_1
gaatacccgggtccgaccgcacgcggtccgctcaatttgcgaacttcttgtagaggagcggaagtgtgtaagacgatcgagtgtgaccggagcccagttcagtgtgggaggtagtaacacgaggtgttgcgtgagtgccattactcacattatgaacacggctgtaaaggggccaggtacccccaactcttgggctaatgccattacttacttgtagaaataatggcgtttgtgttttgtcaatgataaatataatgcaagcgcacccaatgcatgaaatcctatttggtcgttcttttcgaggttggagtgcttatatatattcgtttagccttgttatcctgttgaaatatttgattatagccattgaattcactagggttgtacttgacactgctattgtagatgaacaagcatgaattttgctctggtttgaagtgcgttatgttttttctttattgaatgatcacctgttcttaccatgaaaaaaaa

SEQ ID NO: 7604 - DNA, 146 bp, Gossypium hirsutum
  Clone ID: uC-gsronu33B141f03b1
cccacgcgtccgcccacgcgtccgcccacgcgtccggtttagccttgttatcctgttgaaatatttgattatagccattgaattcactagggttgtacttgacactgctattgtagatgaacaagcatgaattttgctctggtttg

SEQ ID NO: 7605 - DNA, 641 bp, Gossypium hirsutum
  Clone ID: GOSHI-09MAY01-C40100_1
cccacgcgtccgggaaacccaaaattgtgccaaaaatccattacaaaatgaacgctgtatcgaggcgagctattactggaatctttactccagcgagacaggggatcaacttattgagtcatgatctgagtcaggttcagcaaatgagagggataagggtgaaggtaaggaacggcaacttggagcaagcgttggcggtgatgcagcgggtgatgcaatctagcggaatcgaacggctgataaagcaggaacaaactcatcacattaagaattcggagaaacggattttggcacgcaagattttggagcgtaagatcaaatcacaggaccacgctcgcaagctgcaaaccatcctcatcaagaaagtcaggggtctgtgagggcagctttggtgtagttttctgggtaaacttttgttttcttacggaattccaggattgttcaaaactttatttccctttttttagttcaactggatgaattgggcattggcatttgcactttgtactggtttgacattccttcgttcgtggttgagaattgatgaatgatgatacatatgaaacacgatgattgggaactcatttggatttaaacggagctacagtacatgacttgttaatcactttggagcttggatc

SEQ ID NO: 7606 - DNA, 476 bp, Gossypium hirsutum
  unsure (1)..(476): unsure at all n locations
  Clone ID: LIB3147-022-Q1-K1-E12
cggnntggaatggccggcccgacgcacgcgtccgcccacgcgtccgcccacgcgtccgcagcatatgagagggataagggtgaaggtaaggaagggcaacttggagcgggcgttggcggtgatgcancgggtgatgcaatctagcggaatcgaacggctgataaagcaggaacaaactcatcacattaagaattcggagaaacggattttggcacgcaagattttggagcgtaagatcaaatcacaggaccacgctcgcaagctgcaaaccatcctcatcaagaaagtcaggggtctgtgagggcagctttggtgtagttttctgggtaaacttttgttttcttacggaattccaggattgttcaaaactttatttccctttttttagttcaactggatgaattgggcattggcatttgcactttgtactgggttgacattccttcgttcgtggttgagaattgatgaatgatgat

SEQ ID NO: 7607 - DNA, 577 bp, Gossypium hirsutum
  Clone ID: GOSHI-09MAY01-C40010_1
aaaagccataattatgatgcttctcatctctttcttcttcctcatcttacctttagcttctttcctcctcctcctccctcttctcctccgccaccgccgtcaccgccaccgtcgtcaccatctccatccctcctctgggttttcctcgaaacagctcagaaagcttccccaattcagattctcccacgaaacggaatccgtcgggtcggattcggattcttgtgtgatttgcttagatgggttcaggcaaggtcagtggtgtagaagccgtcgttgcgtgtggccatttgttccataggaagtgtttggatgggttggttaatcaaaggtgctgcttgcccaatttgtagaacgagggttcgatttgaaaatgatgataattgcaattccggtccttgttgttcgaggggagcagagtttcagggcttgtttgatgtggtagtttattgcatatttagtcccctctttttgtattataaaaatggacagctccctgtttctaataatcctcatgaagaatcctgcaatatgatcacagttggatggcttttaatagtgattggcttatttatttaaa

SEQ ID NO: 7608 - DNA, 907 bp, Gossypium hirsutum
  Clone ID: GOSHI-09MAY01-C40250_1
gagatcttgagtctgctgtcactgtgtggcactctagtttctgtcgcttaataaaatttcaacgtgattctatctgctccctccatggctggttcaggctttcccttctccctctcagcaacgacaatgttgatggcaatgcagacccttctggtgtatatgcattttgtgacgagtggaagcttgctcttgaacgtgttcctgacactgtagcttctgaagggatcaggggtttcatcaatgttgtccgtgtgatatctgccaaacaaactgaagagcttaagattaagaagcaaacagaaaatgcatcaaaggagcttgagaaaaaggcatcatctctccggaacatagaaaggaagttctaccactcgtactctatggttggtatggggcctcctgatttaggatctgatcatggaccggttctggatgctcgggatccccttttctgaaaagaaatcagagcttgcagcctgtcaaaggcgggtggaagatgaaatgatgaggcatgccaaagcagtagaggtaactagagcaatgaccctgaataatcttcaaacaggcttgcccggcgtttttcgagcattaaccagcttttctggtgtatttactgaggcacttgacacggtatgctcccgttcctatcatatcaaatagatgaatacattttttccccacttgaatttttgagaaaaaaacatataagagctgggttgctcttataattattgttttgggatgtgtatatacatgggaggtctttggttttgtggttctagttatgatcaattatcaagcgaagggaattgtctgcacaggaaattgctcgaattcttttagggaaagaagaggaaaatggcaatttcaacagatgaattaaacacatattctgctttatttctcttct

SEQ ID NO: 7609 - DNA, 985 bp, Gossypium hirsutum
  Clone ID: GOSHI-09MAY01-C40230_1
acaatatttaactttcaaaccattcaattaagcaaaaaagcaaagaatttgaccttttttcttttaattttgaccctttttctctggattcgtaaaaaaaaagggaattttaaagatgtttcagttattgttcttggtgatattctccgagatggcggtgatcatggtattgtcgttcaaaacaccgctaaggaagctgacgctaatggttttggatcgggtgaaacggggacggggaccgttgatggtgaagacagtggcggcaacgatagcggtagtgatgatatcgagcgtttacagcatgatgatgatccagaagcgatggatcgatgatggatcggctaatccgacggaacagatccttatggtcaaacaccttctcgaagctactctaatggggggagtactattcctagcactgatgatagacagattgcaccattatatccgagaacttcggattcgaaggaagagcatggaagctatcaagaaacagggtcctgaggatggaaagtcgggtggctccgacaaagttaaggccttggagggagaagtaactatcctgcaggcaaaattgaagcagctagaatccgatctcgaaacaaagacaaaagaaatggatgctgcagaagctaatgcagttgctttaaggaaacagtccgaaggttttcttctcgagtatgatcggttactcgaggagaaccaaaaccttcggaaccaattggaatctttggaacagagtccgtcgcgttcggggaataagaagaatacttgaggaaaatgaggacctatggtaaattttctttttttaagtttcattatcatttttaatatagttatgcaatggatttgtgggttgcagcagtttagtttatatgattcatgtatgagttttcaagttttttaagtgtggacagaaaaaaaatacaaagagaaagagaaaaaaaaaagttagagaaattaagcccctttgtgtattttttgg

SEQ ID NO: 7610 - DNA, 1071 bp, Gossypium hirsutum
  Clone ID: GOSHI-09MAY01-C40220_1
cccactcgtccggtgaaactggcacatgtgaagcagaggagaacaataatgatcttatatgggttgatcctgcttcatgctgctatgcattattttcgaaactagatgctaagaagatgctcctgcagcagtcaccttcggccccggccgtccccgcgtccgatccagttgagttggatggattaaggaatgcacatatccgggatggtgcagctgttgtgcagtatcttgtctggttggataaacagatgcaagagatttatggggcttctggctacttcttggaggggaagggagcaagcaaaaaaagattcagagagactatgaaactgactgaggtgactgctagtgataagttggagggatttcgtgcaacaaaagagcactttagaggcctaagtttccctactatttcttcggttggtccaaatgcggccgtcattcattactcacctcagcctgaaacatgtgctgaacttgatccagatagcatttatctatttgattcaggagcgcagtatctagatggaacaactgatataactcggacagttcattttggaaagccttcagaacatgagaaggcttgctatacctcagttcttaagggccatattgctctgggaaatgctcgctttcctaatggaacaaatggtcatgcacttgatattctggctcgaattcctttgtggaggtatggtcttgattatcgacatggtactggtcatggaattggatcttacctaaatgttctcgaagggccacatctaattagcttcagaccacaggctcgtaatgtgccacttcaagcttccatgacagtaacagatgaacctggatattatgcagatggcaactttgggataagattggagaatgtactcgtaatcaaggaggctgataccgaattcaactttggtgataagggatacttatcatttgagcatatcacatgggcaccgtatcaaataaaatgatagacttaagcatcttgacaccggaagaaatacagtggttaaataggtaccattcgaaatgtcgggaaattcttgcaccttacttggataaaaa

SEQ ID NO: 7611 - DNA, 495 bp, Gossypium hirsutum
  Clone ID: LIB3584-021-P1-K1-A5
gagaaggaattgaagttcgggagtatggtgctgtgagctcagatgttgcgttgttagcatctaatcagcttgataaggacacaggattaagttctggtcgaaatgatgtttgtgaaactggcacatgtgaagcacaagaaaacaataatgatcttatatgggttgatcctgcttcatgctgctatgcattattttcgaaactagatgcaagaagatgctcctgcagcaggcacctttggcccttgctaaagccttaaagaatccagttgagttggatggattaaggaatgcacatatccgggatggtgcagctgttgtgcagtatcttgtctggttggataaacagatgcaagagatttatggagcttctggctacttcttggaggggaagggagcaagcaaaaaaagattcagagagactatgaaactgactgaggcgactgctagtgatatgctggagggatttcgcgcaacaaaagagcactttagaggcct

SEQ ID NO: 7612 - DNA, 295 bp, Gossypium hirsutum
  Clone ID: LIB3196-023-P1-M1-D8
ggttggtccaaatgcggccgtcattcattactcacctcagcctgaaacatgtgctgagcttgatccagatagcatttatctatttgattcaggagcgcaggtattctatcacatcctaatattttgcttctatcattaaccaaaaccatcagtaaagcctactatttcttattctagattcttagtctgattcttaatctataactgacaatcttgatggcatcattgaagtatctagatggaacaactgatataactcggacagttcattttggaaagccttcagaacatgaga

SEQ ID NO: 7613 - DNA, 708 bp, Gossypium hirsutum
  Clone ID: GOSHI-09MAY01-C41990_1
atagtccactcagacaatgtaagacttgaacacgatgtggctttccttaaggctgttcttgacgatactcaaaaggagcttcactcaacgcgaggagtccttgcaggagagagggccagagcattccagttacaggttgaagttttccatctcaaacaaaggttgcaatcaatggagaaccgagcacccactcctaggaaaccattcaatgtatagtatctcagatcagatcttacccattgtggtcattcatgtatctatttgccatacgtgatccctggtacatgaaaaactgtcgaacctggccggagtcgagcctttgtctgcaaaacaaagcatgagatctgtattctgtagtctacctcattcccatgtaaatataaacaattaagtcgcatgtttcctcgtatgtatcctgtttctagttcaaagacaacgggcgaacttacagcaaggttgcggttagagttggaaaattggtgctgctgaggagttttagcctgtttctttgcctctcaattcaatgcaaaacgtgtgttcaattgccttggaacttattctgtatatttattgcaagatctcattttgtacatcttattcttgccaatgtgcaaagaattcgaatccatcattttcagttttacattcttagcttttgttgtgtcttctttcaagggttcatttgttcaatggtaaaggttttttttt

SEQ ID NO: 7614 - DNA, 568 bp, Gossypium hirsutum
  Clone ID: GOSHI-09MAY01-C41980_1
gtttcatcactcacagagcgttttgcgatgccttggctgaggagagtgcaagagcaattacaggcccagcacagcaagtacctggtggttcttcagtttcacatatgaacaatttgcaatcccaactccataaccacgatttccatggcttatcagtgaaaagagaagaacatcctttcaatgcaagaccaacaacagaagatagccttaatccaccatggcctggtcccccaccaataaaccttttagatcacccactgtcacaaaacgaaaaccctagccaaaacactggttctaatacacttcttcctccattccagacccaaacagcatctccacacatgtctgcaacagcactcctgcagaaagcagctcaaatgggtgtgactatgagccaacccctacaatcatcaccagtagcggctatggcttccatgcaaagaccttacatgtcaggaggaaccagtggttccacgtcttttgccttgtctacagctggttctggtctgggtttattcccacgtgaagaaccttgaagtggttctccccatgggttggcatctttggg

SEQ ID NO: 7615 - DNA, 559 bp, Gossypium hirsutum
  Clone ID: LIB3584-032-P1-K1-B10
cccacgcgtccggttaatatctgctcagaagagaatagcaacccgcagtttcatcctgattcttgtaaatcaatttgcaagataattgagctaattgaaggaatcaacttaccgtcaacggattataatatccctgagaccatgtccgagaagagtagggattctttctcgtacaagcactccgaaacagcttcaggctacgtagttcgagttttccaatggaaaactttggaactcggtgctgttttagagcaatttgtgcaagcttgttatgatttgttgaatggaaaaacagacctcaacaaatttaccgaagaattaacttcagttctcgactggatcattaatcattgcttttcccttcaagatgtttcgagcatgagagatgcaattaaaagccatttcgattgggatgaatctcaaagtgaaagtgattcagaagttgggattgttgataaatttcacctaaccactccttacaacaatgaggacaagaacttcattcaaaagaaagagcctaacgcgagtaactctctgttaaatcaactcgaggaatctg

SEQ ID NO: 7616 - DNA, 386 bp, Gossypium hirsutum
  Clone ID: LIB3147-049-Q1-K1-F4
cttaccgtcaacggattataatatccctgagaccatgtccgagaagagtagggattctttctcgtacaacccctccaaacaacttcaaggtccgtaattcgaggttttcaaatgaaaacttttgaaactcgggcctgttttagaacaatttgggcaggcttgttatgaattgtgaatggaaaacaaacctcaacaaattaccgaagattaacttcaattctcgactgatcataatcatgctttccctcagatgttcgagcatggagatgcattaagccattcgatggatgaattaagtgaaggattagaagtggatgtgataatttactaacactctacacatgagacaaactcttcaaaaagagctacgcgagtactcttgtaat

SEQ ID NO: 7617 - DNA, 773 bp, Gossypium hirsutum
  Clone ID: GOSHI-09MAY01-C41940_2
ccttctcttccgcccacgcgtccgataggcacaattaggagttccttagttgtgttgtaggagccaaagataaaaaaatggtgaagatagcttttggtagcattggtgattcttttagtgttgggtctctcaaggcttatttggctgaattcattgctactttgctttttgtgtttgctggtgttggatcagctattgcttatgggaagctaacgtcggatgcagcactagacccaccaggcttggtggccatagcggtagctcatgcacttgcgttgtttgttggggtagccattgcagccaacatctcaggtggtcatttgaacccagccgtcacctttggtttggccatcggaggaaacatcaccatcttgaccggccttttctactgggttgcccaatgccttggctcaattgttgcttgccttcttctccagtttgttaccaacggattgagtgtaccaacccacagcgttgcttcaggaatgaatgccgtcggaggcgttgtaatggagatcgtaatcactttcgccttagtctacaccgtctacgccaccgcagctgatcccaaaaagggttctctaggaatcatagcacccatcgccattggtttcatcgttggtgctaacatcttagccgctggtccattcagtggtggttcaatgaacccagctcgttcttttggaccagccgtagtcagtgggaactttgctgataattggatctattgggttggtccattggttgggtggtgggttagctgggttgatttt

SEQ ID NO: 7618 - DNA, 855 bp, Gossypium hirsutum
  Clone ID: GOSHI-09MAY01-C41940_1
cggtcgcgtggtctgacgcgtggggtttcttagtcttgagcttagcttttaggtgcatctcttttgtttttgcgagccaaaatggttaagttagcttttggtagctttggtgattctttcagtgtcgggtccctcaaggcttatttggctgaattcattgccaccttgctttttgtctttgctggtgttggatcggctattgcttatggtaagctcactgccgatgcagctctagacccagcgggtttagtggctgtagcggtggctcatgcatttgccctcttcgttggggtgtccattgcagccaacatctcaggtggtcatttgaatcccgccgtcacctttgggttagctgttggaggcaacatcaccatcttaactactattttctactggattgctcaatgctttggctccatcgttgcttgccttcttctccagtttgtcaccaatggcttgagcgtcccagcccacggcgttgcttcaggcttgacggctgtggaaggcatggtgatggagattgtgattacatttgcactcgtctacaccgtttatgccacggcagctgacccaaagaagggttctctcggaacaattgcacctattgcaattggtttcattgtcggtgctaacattttagccgctggtccattcagtggtggttcaatgaacccagcccgttcttttggaccagctgtggttagtgggaacttgtctggaactggatctattgggttggcccattgattggaggagggctagctgggctgattatgttgacctctcattgggtctactcctcatacccagttctggagatatgcttaaaagtgttttgtgtcagggttcggtttt

SEQ ID NO: 7619 - DNA, 843 bp, Gossypium hirsutum
  Clone ID: GOSHI-09MAY01-C41830_1
gcttttccctttccttgctttcgctggattgttcttcctcttccgtcgggctcaaggtggtccaggtggccccggtgggcttggcggacccatggattttggacgatccaaatccaagttccaggaagtgccagagactggtgttaccttctctgacgtagcgggagctgaccaggcaaaattggaactccaagaggttgtcgatttcttgaagaacccagacaagtacacagctttaggagctaaaatcccgaaaggttgtttattggttggccctcctggtactggaaagactctattggcgagagcagtagcaggagaagccggggtgccctttttctcatgcgctgcttcggagtttgtggagttgttcgttggagtaggcgcgtccagggtaagggacttgttcgaaaaggcaaaatccaaagcgccttgcattgtattcatagatgagatcgatgctgttgggagacagagaggagctgggcttggaggaggaaatgatgagagagagcagacaatcaaccagttgctgactgagatggatggattttcagggaattctggtgtcattgttttggcagcaaccaacagacccgatgttcttgatgccgctttgttgcggccgggtaggtttgaccggcaggttacagttgataggcctgatgttgctgggagagtgaagattctccaggtgcactccagaggaaaggcacttgcaaaggatgttgattttgaaaagatctctaggaggaaccccaggtttcaccggagctgatttgcagaacctgatgaatgaagctgccattcttgcggccaggcgcgacctcaagagatcagcaa

SEQ ID NO: 7620 - DNA, 698 bp, Gossypium hirsutum
  Clone ID: GOSHI-09MAY01-C41440_1
tttgtttaattattcaaaggctatgatatggaaatacacaatcagattctacacaacattgtgttcttgcgttctcagcttgacaggtcttatattccagggacatttactgctagctgtagattttgtttatcgccacaatgattgttttcttgatattgtattactctcaaccgtagcaacagccagtcaatttttcatttcttacacgattcgcacatttggtgctctcacatttgctgccataatgaccacaagacagctggtgagcatcatgctgtcatgcatttggttcggccatccccttagctgggaacagcggattggggcgatcatcgtgtttggctccttgtactccagaaccttctggaagaaagtgtcaccagctcccactcctccacaacaaacagaaaatggatcttcgagtcctttgaaagggatcccttaacgaggtcaatttggcaccagtaaccgcaactgattctggtcgggtaagagtctgcctatgttaaagctgcattttgaagcttgtcggggcgaggttttgttcgaatggttttttaatgaaatccgaattgaaattttgggtgaaaaaaatgaaaataggaacactccattttcattgaaggagcattatgaactacaaactaactaaatcccagaaatactcttcttgttttgtgtgttttgtttacaat

SEQ ID NO: 7621 - DNA, 448 bp, Gossypium hirsutum
  Clone ID: GOSHI-09MAY01-C41620_1
gcgtcccattttcctcattttctttcacaccaagcgttgcgcgctagctacatcctaacaacaatgccgagccaagatattagccctccttgcgcttcttgcccttttagtgagcgcatcaaatgcgtccattatcccacagtgctcacttgctcctagtgccattattccacagttcctcccaccagttacttcaacgggcttcgaacatccagccgtgcaagcctacacgctacaactagcgcttgcggcgagcgtcttacaacaaccaattgcccaattgcaacaacaattcttggcacaatctaaacctacaaaccatcgtaacgcaacatcaacaacagtttctgtcatcactgagccacctaaccgtggtgaacccttgtccctacttgcaacagcaactactttcattcaacccactttctctggcaaacgtatcttcata

SEQ ID NO: 7622 - DNA, 664 bp, Gossypium hirsutum
  Clone ID: GOSHI-09MAY01-C41160_1
gggttcatttacaaaactttgagtgtctcatgattgatgaagctgaccggatattggaagcgaattttgaggaagaaatgaaacaaattatcaagtatctacctaaggaaaataggcaaactgctctattttcagctacccagactaagaaggttgaggaccttgctcggttgtcatttcagacaactcctatttatattgatgtagatgatgggcgaaagaaggtcaccaatgaagggctgcagcaaggctactgtgttgtgcatagttcgaagagatttatccttttgtattcatttttgaagaggaacctttcgaagaaagtgatggtctttctctcttcatgcaactcagtcaagtttcatgctgagcttcttagatatattcatgtggattgccttgatatccatggaaagcagaagcagcaaaagcgaaccactaccttcttcgacttttgtaaagcagaaaagggcattttgctctgcactgatgttgcggcccgtggacttgatattcctgctgtggattggattgtgcagtatgatcctcctgatgaacccaaggaatatattcatagggttggtcgaactgcccgtggggaaggtgcaaaaggaaatgcgcttcttttcctgatcccagaggaactgcagtttctacgctattt

SEQ ID NO: 7623 - DNA, 432 bp, Gossypium hirsutum
  Clone ID: GOSHI-09MAY01-C41010_1
cccacgcgtccggcaaattaaggtgtgctcgggaatatgtagctgaatgtgtggaaaagcgtagttttccttagctgtggcccttaaggcaacttaaaataggtggtagttgaatgtgtggaaaagtgtagttttccttagctgtttcccttaacgcaacttaaaataggtggtagttgaatgtgtggaaaagtgtagtttcccttggctgtttctagtgtacattaggtccaggcataaaatacgttggtttgaatctttgatttgtacttttcaggatggcaatggcagccaatactggaccttatatatatgcatcctgaactgaatgttgttgtaatataaaatctgctgaatcaatgcataaaatacccatacataaatttgtatttaataccggtaagtttaatggcagctctctaagcgtatttt

SEQ ID NO: 7624 - DNA, 364 bp, Gossypium hirsutum
  Clone ID: GOSHI-09MAY01-C41000_1
cccacgcgtccgtgtaatgccagttttacggcaagttttgcatcggcgggaactgaaaatatcggcaatttttttcttctttgtgtttaattaatattgttaatgagtgaagttaagaatattaaacatctccgtcacagtaacggtgacggacgagtttgggtacgtgttttatgctggatcatgcttatatgtttgttttcgtgaaggcacgtgataagaacatttcaaaaggctaagttggtttattttatatttttttcttaataacatggtaaaaggttttttaccctactttagattcttattgaaaaaaaaaaaaaaaaaaaaaaaaaaaaaaaaaaaaaaaaaaaaaaccccaacc

SEQ ID NO: 7625 - DNA, 392 bp, Gossypium hirsutum
  Clone ID: GOSHI-09MAY01-C41020_1
cggacgcgtgggcggacgcgtgggctggttccaaggtaaacctattgagcataccaaacatgctttgggaacttgccctcatgtctgtcggatacagaactcaaatgtggaaaattaactcctgaggttgggattttcccgaatccatcaagcaaacaatgaatgaagagaagcaattagccgattcgataacattaggttgaaagcattcttttaggaaaaaaggaatttacagtcagctgattgcagcttatcctagcttttttcattatacaatatcacagccagaacatgcagtttttttcagttgtaatagtgaggtaacactttaatgttttcttacatttttagtgttccaacttcttgaattccaaaaaaaaaaaaaaaccccc

SEQ ID NO: 7626 - DNA, 972 bp, Gossypium hirsutum
  Clone ID: GOSHI-09MAY01-C41280_1
cccacgcgtccgcccacgcgtccgctagcgctcgggggggaatgactgttgctttatctggtgtggtgatgcttagggatcttctaagacccttgcatgatctatctgatgcatccgccatttgcaaatatctcgaatccttttatactctgaggaagccaatgtcatctacgataaatacactagccaatgtcttacacaaggtatttagtgcctcgtccgatcctgcgatggagaatatgcaacaaacattgttcgggtatttgaaacttggaggatttttttcatctggagtatcagctatgttctctggtttatgccctcgtccattaagcttagcatttcatttctttgttatggcaatatatggtgttggccagttgttacttccatttccttctcccaaacgcttgttggatggggctaaactcctttgggttgcatcaagcgtttttctccccattatacactctgaaggaatcagacaaatgtttttccctctaactgtgccagcatattattagaactccccctaagggaaaaaaaatctaagaggaaactccatgcatttgtagtgaacaattctatattaattcgcacgggcgcgtcggccgtcgcgcggcttagcattctcaagtaggcttgatggtcgtttgtactcatattattgttatgtaatttctaaatagacgtttagtaaaaaaaaaaaaaaaaaaaaaaaaaaaaaaaaaaaaaaaaaaaaaaaaaaaaaaaaaaaaaaaaaaaaaaaaaaaaaaaaaaaaaaaaaaaaaaaaaaaaaaaaaaaggggggggccgtttaaaagaaacaaagttaacgtacccgggattgaaaggaaaaagtttttttttagggcccccaaaattaaattaatgggccggggtttaaaaacgggggaacgggaaaaaccttggggtaaccaaattaaatggcgtggaaaaaaaacccctttt

SEQ ID NO: 7627 - DNA, 381 bp, Gossypium hirsutum
  Clone ID: GOSHI-09MAY01-C41250_2
gcgtccatagcaacgttgctctttgatcattagatgtcgactctccctatcattgtaaagcagaattctccaagtgttggattgttctcccagcaataagatacgtgaggttggtttagaccgtcgttacacaggttagtttgaccctactgatggccgagtcgcaatagtgattcagcttagctcgagagaaccggttgattcgcacaattggtcatcgcgcttggttgaaaagccagtggcgcgtagctaccgggcgctggattatgactgtccgcctttaagtcagaatccgggctagcagccacgcacgcgccggtcgcccgagtgccgaccctcagtagcggcctctggccccctagggcacgtgtcgtaggtaca

SEQ ID NO: 7628 - DNA, 380 bp, Gossypium hirsutum
  Clone ID: LIB3272-057-P1-N1-D6
attcaatgtatatacatatataagataaattttagatatgatatatgtgatagccaattttggcccggtcaagtaaaaaaataaagaaacccaaataaaagtccaatttctttagtccatttacaatatgtgtgacctaaattactaaactcaacaggcccaaaccaaaactctattagcctattacctaaactaaccctaatagcccactatctttattttttttcagcagccaccaacccttccccaagatgcagcagctgctcagcccccatgcgcgccactggcttttcaaccaagcgcgatgaccaattgtgcgaatcaacggttcctctcgtactaggttgaattactattgcgacgcggccatcagtagggta

SEQ ID NO: 7629 - DNA, 932 bp, Gossypium hirsutum
  Clone ID: GOSHI-09MAY01-C41270_1
acgtctcaaagtatctaagtgaaaaccgatgccatccgttgaatttcaaattccctacatcaatggctagcaataatggtggtggtgaacagcagtcgctgaagacggcggaattgggcaaacccctaaaagaaggagaaagaattctggcgcccacccgaagacccgacggcaccctccgcaaacccgttcggattcgggccgggtatgttccccaagaggaagtcgccatttaccagtccaaaggtgccctgtggaaaaaggagatggcttcacaagtagggcctccaggttacgatccacctgcagatgcaaaaccgaagaccaagtcggcaaagagaaacgaacgaaagaaagagaaacgggtacaggctgctcttgaaaagggtaagaactcggaagcagtggccgataatgagattaaaggagacggtttaactgaggaagatttagatcatggatcggaatctaatgacagatcttgctgtttctcaaatcctgtttcaacctctcctctctcaaactcagtggatgcctcggatgctgtgacaccagctcaagatctcgataaaaaaatccgggcacttaaaaagaagatccggttagtggaagctcaacagcagaaaactccgcagcaagatatgaagccggaacagttggaaaaactggcaaaactagaaggttggcgtgaggagctaaagcttttggaggacaaataggctgaatttgcagcattgtaagtttaggtttccgtccccacgaagaaactatgttgttgatttataattggaaatttcggtttttttgtaagtttaggtttccgtctccgtaaagaaactgtgtcgttgatctataatcggagatttcgtttttaaaagtggcaacgggaacttgcattcatgcaaaaaaaaaaaaaaaaaaataaaaaacaa

SEQ ID NO: 7630 - DNA, 393 bp, Gossypium hirsutum
  Clone ID: LIB3149-028-Q1-K1-D4
ggggtcgttatttaccagtcaaggggcgccgtgtggaaagaggagatggtttcacaagtggggcctccaggttacgatccacctacagatacaaacctgaaaaccaggtcagcaaaaggaattgaccgaaggaaagagaaacgggtacaggctgctcttgaaaagggtaagaactcagaagcagtggctggtgatgagattaaaggagacggtttaactgaggaagatttagatcatggatccgaatctattaaatcattgacttctcagatgacagatcttgctgtttttcaaaatcttgtttcaacctctcctctctcaaactcagtggatgcctcagatgctgtgacaccagctcaagatctcgataaaaaatccgggcacttaaaaaga

SEQ ID NO: 7631 - DNA, 868 bp, Gossypium hirsutum
  Clone ID: GOSHI-09MAY01-C42970_1
ccagaaccagaaccaccatggacaccaccttgtagcccttgaccactatatgtaaaagaggaaactcgcaccgtgttggaagcatttaggtcgtcgtaagtgcaattaaagcgatagcaacagcgctgtgccaaatgaccgaacctgttgtagatctaacactgcactatgaaccaaaaaccacgcgcacgcagacgtcctacatgtacatcgcgcgacaaatctgagtcagccaccgcagcaaccaaaagtggttcaacaaaatgagcttgcatcggaacctcacgcactagtcgcatctatcgaatctcaaactctaagagaacgtcgactaaacgctgaaaaggaagagactccgtcgagaatgaggccaaagtcaacacagcatcaaagtccgacgagaggccagccaaaacaacttctacctatgacactaccgatccagaggctgcaaaatgcagatcatgtttaatacgagaaaattctgcaccagttgaagcagcaaaaagatgattcactgtggttccaaatttcacatgcagatttagcagagatgtatttggatttggaataagtgcaccttctggagatacgatgaaccgaggtggagcagacaacatgccctccaagaatccttgcagctcatatccttctattatcaaccggatatgttgcttccattgaacaaagtttccttcctctagcttcaacgtgtcatggtgaggcaaagattgaaccaagcatgcacttgaaaatgacggactcataggatcaacagagttagaatctgttgacggtgccataacacgaaaatggaagcacgtaccaggactaggcgactgataccatgtaagatactatgcaaaat

SEQ ID NO: 7632 - DNA, 1229 bp, Gossypium hirsutum
  Clone ID: GOSHI-09MAY01-C42900_1
cgggacgccgtgggttgaaaactcttctgcaccgaatttatgggaagttcatggtccatcgtccattcatccggaaagcaatcaacaacatcttttaccgttttatttttgaaaccggaaaacacaatggaatagctgagctattagaaatactgggaagtataatcaatgggtttgctttaccactgaaggaggaacataagctctttcttgttcgtgtactgataccacttcacaaaccgaagtgcatacctgcttaccaccagcagttatcttactgcattactcaatttgtcgagaaagactgcaagcttgctgacactgttatacggggcttgctgaagtactggccggttaccaatagctcaaaagaagtcatgttcttgggtgaacttgaggaagttttggaagcaacacaatctgtggagcttcatcggcgcatgctaccctttttccccctgattggccgctgcttaagtagttcgcattttcaggtggccgagagggcattgttcttatggaacaatcatcatatcgaaaccctaataaagcagaaccgtaatgttatacttccgattatctttccttccttggaaaggaatgcaagaagccactggaatcctgcagtgcagagcttgacactaaacgtccaaaagattttctctgacaatgaccccgagctctttgaggagtgcttgcatatgtttcaggaagaagaagcacgagaaaatgaggctaaatcaaaacgggaagccacatggaaacggttagaagagattgcagcaatgaaagctgccagtaatcaaccagtgctcatttccctgaaagtaactactcgcaagtgatccggctaggacacgaggttaccattgttgttggcaatggtacgtttacgagatcgatttgcaaaccataaggtttggtattaaagctgagttttatcattgtatccagttggttcaccttctgaatatttggtttcctagattttggtatcacagggttcatttaagatttcctataatttaggcctattttgctcatatattcatataatgtatatactacaatggatagggaccaaaaaaaaaaaaaagtttgggttttagcccatatttttccctcacccctcttttaagggtggcaaggaaacacccatgaattccaccttatatcttctgttcttttatttatatttagatttacttaatggcatttaacttcttgat

SEQ ID NO: 7633 - DNA, 816 bp, Gossypium hirsutum
  Clone ID: GOSHI-09MAY01-C42560_1
ggttcaaatggtgtgcatcagaagtgatcaacctgcctcagtacggcttctgacctattcaactccaaccgggcagtatgaacttttgttgtctcctgttgaaccaaatagctcttctccattgaccagaagaaacaggagccaatcctttaccgactgagatggaaactgatgtttccaattctgcaatggagcccatggagacgatggaggtccagtctgtggaaagaactactcagtttttcccttttggtgatcctacctcatgggagctacctttcttgcaaggatggttaattggtcagacccaagctggtcagcgcaatatgcgtttggctactggtggtggtcatgagaattcactcccagctggtgaaacaggaacttctgcttcagtagcttcttcaggtatggccacgagtgttagccaaacaagagtttctggaagaccaagttcacggcatcgttcttcgcgttctcgcatgatctcctcaagtggaactggtgaatctggttatagcaacatcatacatgagagtagcgatcctcaacctgctgttggcagaattccatctgaacttgccacatcacttgcggctgcggcagcagcagaactaccttgcactgtaaagcttagaatatggccacatgatatgaaagacccttgtgctttccttgatcccgagaaatgtcgcttgatcattccacatgctgtgctttgtagtgaaatgggtgcacatttttcaccttgtgggagatttttagcagcctgtgttgcctgtgtgcctcctcatttggaagccgatcctggagttc

SEQ ID NO: 7634 - DNA, 572 bp, Gossypium hirsutum
  Clone ID: LIB3825-017-Q1-N6-H1
gaataaaaataatatttttatttaaatttaattaaaaataaatataaagacgtccatcatccaagtcgtaccccaaaaaaaaagtccaaatgagcgcgtacctggatttacgggaataattattcaaaagaaatagaataattaacaaacttgtcattccctaaagttgtttaaatttaatcatccctaaataatggagcttcttgcaaatcgtgttaaccccgaatccaatatcaaaattcacaatttataactcctccaaaaaccatttcttacttgtatgtttcacgtggaccgtcattttttgtctaacaatcagactcagctctgaaagtactgcagatgtgcccatcaacacttatggaatgtaaaaaaatgccatgaatctaaaatcccaattggccgtttattagaatccatctacctacttgcaatatggactctggataaaccccttacggaaaaagatggtattatcattgacataaaagaaaagaaagaaagcaaaaggaagagcaggcttttctcgaacccaaaaacatgggagatttgattggataacaactgctcct

SEQ ID NO: 7635 - DNA, 230 bp, Gossypium hirsutum
  Clone ID: LIB3148-001-P1-K1-C8
taaacggccaattgggattttagattcatggcatttgtttacattccataagtgttgatgggcacatctgcagtactttcagagctgagtctgattgttagacaaaataatgacggtccacgtgaaacatacaagtaagaaatggtttttggaggagttataaattgtgaagtttgatttaattataaaaaataatgtatgatttgattgtttaaataaagggcgtgtct

SEQ ID NO: 7636 - DNA, 502 bp, Gossypium hirsutum
  Clone ID: GOSHI-09MAY01-C42680_1
agaaactacaagagaaagttaaggaacaactttaaaaagtgggagaaaagatacaaattggggctatgcaccgtaatgagtgggtggaaaatgctgaccgatgggtcgctggattccttgagatgtttgaggccggttgccacaaaatgggcactgcaatcagagatcgaatccaagagcggttaagggggcagctgctgcaaaacggcaagggtgatgacgatgatgatgaagaatattattacgatgatgattattatgatgatgaagacgacgacgacgaattctactatgatgacaacgaatataatgatgagaaagatcagaaaaatgagaaagaacagaaataaaattgtttctgcttccagtttttactaatattatggggtaccttaaaagttctaaatagtagtgttgtgggatgtgtgatatgtcgatgttgtagctaaatcgagccaggcattgagcagaagctgtgatatgtactttgattattgatgct

SEQ ID NO: 7637 - DNA, 501 bp, Gossypium hirsutum
  Clone ID: GOSHI-09MAY01-C42160_1
atcgccattgtttactgctagtaaagaccctaagcctaacctaacctaacctaacctaacctgcagactgctcgcaaaatcattaggtagcaatgggtacagttacagtgaagttggttgttgtgattatgataacggtgggtttaatggtggaagggtcaagagcaataagcttgtgtgacatgaacgatgagggtctggaagcctgcaagccatcagtgacccagccggatcctgtcgacccaacacctcaatgctgcgaggctcttaaaggagctaacctcacatgcttgtgttcttataagaattcaatgttgctgccttctcttgggatcgatccaacactcgccatgggtttaccagcaaagtgcagtctcgatatgccttctgattgttgattaaggtattttcggaggaaaatgaaccatgaagcggctttcatgttcgtcagcctttcacaagttgtttttatttatttgtacgtggaaaactaagttcgca

SEQ ID NO: 7638 - DNA, 138 bp, Gossypium hirsutum
  Clone ID: LIB3493-045-P1-M1-C2
ccaacactcgccatgggtttaccagcaaagtgcagtctcgatatgccttctgattggtgagtaaggtataccatgactccccgattacgcgcctattacattatcgacctattctggctgtggttcccctgtttttct

SEQ ID NO: 7639 - DNA, 395 bp, Gossypium hirsutum
  Clone ID: GOSHI-09MAY01-C42090_1
tcccacgcgtccgattgcctcaatcttcaactgcaatttcttcacatgtttgaggtcgacggtgacggcggcatcaacggtgacgatgaggatggggatatatcatgatcgttgaatagtagctgttcaatcagttgggcaacttaagactcttttggcagttcatcaagaatggggatcattgtggctcaatccaagcgtataaatgaccggataatagttaagttattttcagcatttgcctgtactatttagtatttatgcctgaacttgagctttcagaaatgaaagtgaaaacattagtggttgaaactaatattattagagctctttttgcaccttaattctgccggaaataaaaaataaaaaaataaaccacaaatcccccagattat

SEQ ID NO: 7640 - DNA, 516 bp, Gossypium hirsutum
  Clone ID: GOSHI-09MAY01-C42040_1
cggacgcgtgggcggacgcgtgggcggacgcggcggcctctgttatctagcgaaaccaacacagctacgaaaagttcagatgtgaataagtcagagagaaatgtgcagtcacctcctctttcagtcaaggatcaggaagagaaggcaaaaagatgtgaatttgttaaagggctgctgttatccacaattcttgatgatgttttatgataccttaaaggatggttgctgcaatcgtgggcttttcacagcgaagaggcctacgatatgggtcttcgcctattgtatgggttgctgcgctgtttgtagtgattatgtttgatgtattaagcaaaagtgttaaataaggtaggaatgagtgtaatatataagtggcatgtgtggactttttagttattaggcctgatcaggtttccacttcatccttttcatctcaggtcatgacaatattaaaaataataaataataattttattccctgaaaaaaaaaaaaaaaaaaaaaaaaaaaaaaaaaaaaaa

SEQ ID NO: 7641 - DNA, 426 bp, Gossypium hirsutum
  unsure (1)..(426): unsure at all n locations
  Clone ID: LIB3147-051-Q1-K1-A3
cccacgcgtncgcccacgcgtccgatttgttaaagggctgctgttatccacatctttttgccttctcttcctgatccttgactgaaagaggaggcaaaaagatgtgaatttgttaaagggctgctgttatccacaattcttgatgatgttttatgataccttaaaggatggttgctgcaatcgtgggcttttcacagcgaagaggcctacgatatgggtcttcgcctattgtatgggttgctgcgctgtttgtagtgattatgtttgatgtattaagcaaaagtgttaaaataaggtaggaatgagtgtaatatataagtggcatgtgtggactttttagttattaggcctgatcaggtttncacttcatccttttcatctcaggtcatgacaatattaaaaataataataataattttatccctg

SEQ ID NO: 7642 - DNA, 280 bp, Gossypium hirsutum
  Clone ID: LIB3146-054-Q1-K1-D11
agtccctcttcgggggttcttcttgtatagcgccctcatcgaactctgcacctgatccgttgctgtcttcgtttattttgcctatcgttgatgattctgttagtgtgcagcctcagttatctagcgaaaccaacacagctacgaaaagttcagatgtgaataagtcagagagaaatgtgcagtcatctcctctttcagtcaaggatcaggaagagaaggcaaaaagatgtgaatttgttaaaagggctgctgttatccacaattcttgatgatggtttat

SEQ ID NO: 7643 - DNA, 587 bp, Gossypium hirsutum
  unsure (1)..(587): unsure at all n locations
  Clone ID: AI054795.1
gaataaagttcacaagaatttcttcatgctcgaccgactanatgnncagctctgaagagnagacgtatagtctttcaagtccttagagagctgggtttatgtgcatcaaggtgggagtttagacaccccatcaaaatcggggactctngtttaggtactgttttattcgagtcttgtgtcatctaatgtactagaccgtgcttcaggtgccattgttgtcgtctgctagttatcgttgtcgtggtctgtttgaacttattatgtgcttttgtggttgagcactatnactaaataagcaaccanctatgttctggtttgttgtttaaaattcaccttcttattttgtgcttatggcttaattgtactttcttttgatgtctacgaacacctgaacatatatgcatatagcaagagattaaagggtgtcggagtaggaactacgactacgattaaagggtgccggcgtttgaacttgtaaaagtagtatcatcagtaccggaggaataataacaccacttacagggaagctagctacctcacttaacacaagcctatgcttcttaccaaaaaaaaaaaaaaaaaaaaac

SEQ ID NO: 7644 - DNA, 181 bp, Gossypium hirsutum
  Clone ID: LIB3147-050-Q1-K1-F11
actatactaaataagcaaccactattgtctctggtttgttgtttaaaattcacttctgagtgggtgcttatggcttaattgtactttcttttgatgtctacgaaacctgaacatatatgcatatagcatgaaaaaaaaattaaatttttatttaataattttattaaaaaaatataataat

SEQ ID NO: 7645 - DNA, 691 bp, Gossypium hirsutum
  Clone ID: GOSHI-09MAY01-C42020_1
atacgattactgttccttattctttgacgctttggcctcctctccgtccttccatcgagcagtgcaaagatgtttttggccctgatatcgccgtctttagtaactctgctggtcttttagagtatgattatgatggttcaaaggcgaagaaactggaagggactattgggattaaagtaataaggcacaaggtgaagaaaccagctggaacagctgaagaaattgagaaacactttggatataagtcgtcacaacttatcatggtgggtgatcggccctttacagatgttgtttatggaaaccgaaatggatttttgactatattgactgaacctttaagtgttgttgaggagccattcattgttaggcaggtgcggaaactagaactgacccttgtaaattggtggtttagaaggggtctgaagccagttagtcataatttattatcagatgccacacagtgtgtgaaagatccacatcccctgtaagaatgttgtggattggatataagtggaagtaattgtttatgtagctgatgacaaattttttagtcgtgattatttgcttttgccaaccatctgaattcattaattctttcatttagtacatcataacacattaactgttatattgtatgttatagttccctctaaaaaaaaaaaaaaaaaaaaaaaaaaagtcgacgcggccg

SEQ ID NO: 7646 - DNA, 717 bp, Gossypium hirsutum
  Clone ID: GOSHI-09MAY01-C42380_2
cccactcgtccggtatggtggtaggggtgatcgtcatggtggaggtggtggccgttacggtcctgatcggaatggagatcgatttggtgggcgcagcagggatgcaggtagtcgtgggggatctggaagtgatagatacaatcgtgatcgatctggaccctatgaccgtcgtggaactgggggtcctcgttctggttaagatgactgcttgtgctgatgaactaggttgctgctttttggcaaagcatgaagtttcttttttacagaatgtgctctcttcattgttgtctgggtggaacaatataatagttcagtcctttgaagtgtgaaacttggcacaaacctacaactatttatgtgttcgtaaaatgctgtgttcgatggagttttgtgctttcttgacataaaaaatcaaaaaaagtaaaataaatgaaaaaaaaaaaaaaaaaaaaaaaaaaaaaaaaaaaaaaaaaaaaaaaaaaaaaaaaaaaaaaaaaaaaaaaaaaaaaataaataaaataaaataaaaaaaaaatttaaaaaaaaaaattggggggggcccctttaaaaaaacaaattttattgcccgggggatgaaaagtatttttttttttttggggaacaaaaaataaaatagaggggggggttttttaaaaagtttggaggggaaaaaccgtgggataccaaaattaatttttttgggaaaaaatccccttt

SEQ ID NO: 7647 - DNA, 544 bp, Gossypium hirsutum
  unsure (1)..(544): unsure at all n locations
  Clone ID: uC-gsronu33B147e10b1
ttcatgcgatacaaacgctttcaacactgcaggcaagcttagaatgcaagttaaaattgctcaaggagattgctactgaaaagggtatcaccttgcatttggaggaaatggctgctgaggtgaggaacttaactgagtcagccaacgatttgcctgtcggaaaagacatggatgatagcttaagtgagtcaatgaaagcacggaaaacgtacaaagatgtggcagatgctgctcaagaggctatcgtatcagcagcttatgcagcagcagcagcacgagcagctgtggagctctcaagaattgaaccccaagactttgattctccaaataatgccatggcccgaagcgaaaaccttgagctgaatgaaacggaagagactagacaaagtttatccagagaaaggacagtttctagttcaagttcagattcggatgcaaacctttcaggtgaggaaagtgatggngagaaggcaaaagaagagccacacacacagcctcatgagttgagctatgagattacccaagtgatgaaaataagtgatga

SEQ ID NO: 7648 - DNA, 433 bp, Gossypium hirsutum
  Clone ID: uC-gsronu33B078e04b1
ggaagtgtttgatacaatcgtgatcgatctggaccctatgaccgtcgtggaactggaggtcctcgttctggttaagatgactgcttgtgctgatgaacttaactgagtcggccaacgatttgcctgtagggaaaagacatggatgaaagcttaagtgagtcaatgaaagcaaggaaaaagtacagagatgtggcagatgctgctcaagaggctttcgtatcagcagcttatgcagcagcagcagcacgagcagctgtggagctctcaagaattgaaccccaagactttgattctccaaataatgccatggcccgaagcgaagacctggagctgaacgaaatagaagagactagacaaagtttatgcagagaaaggacagtttctagatcaagttcagattcggatgcagacctttcaggtgaggaaagtgatg

SEQ ID NO: 7649 - DNA, 611 bp, Gossypium hirsutum
  Clone ID: GOSHI-09MAY01-C42370_1
atcacattcgatgaagaactcgtgacgtgaaagtcaaaggttgatcaacccgtagttcctggcctggacgatgaagtgactgaggttgagcatttacttgcagaacctaaaattgaacatgtttcggtagatggaatcttatgttttggaaacgagaatatagagaagcacttgaaaatggaggacttctcgccggccttcgattatggctggaaaatcagtgccggtgggctggattctatccgtggtcgaggaggagatgatttgaagctcgaagttctcgacggattgctcgatgaggttgatgaagtggatgatatcgatgcagcccacgatctctccggtgcttgtgaagattttcttttggatattgaatttcccgaaaagttatccgagttggattgcggtcctcgtgaaggatcaactttgtgcaactcaagttcggaaagtcattcgcccggatttagtggaaggagtaatagtgtcgggggcatatcagaatcattgacagcaactgttcgggaatccaacagcgagaatggtgggcttgggaagagggttggtgccatttcatcataacttaggagaaacacggtgtcaggtccgtatga

SEQ ID NO: 7650 - DNA, 436 bp, Gossypium hirsutum
  Clone ID: GOSHI-09MAY01-C42310_1
tgcattatcttccagtctcttgatctagcatggactttgcttcgtatcttccctcgtgaacttctccatcgtatacctgcaaagacacttgaccagtactacagtcgcgaatcgtgaaagcaacaagctgagctggtaaagcatttgcatttgctgcatggccttaacccagtaatccgtcttggtgaatggcttcattgcggtgtgctacatttgtttcatttccttttcagatacagttccaatcaagttcatgctctgtgattataatttattttagctgttgagtattctttgttttgagaacccaacccataagctttttcgagaacattattttcagcttgttattctcattcaaacctgttgttaagacttggattgccaaggaaaagactggttctgttttaagttaagatctggcaatgttggatgc

SEQ ID NO: 7651 - DNA, 441 bp, Gossypium hirsutum
  Clone ID: GOSHI-09MAY01-C42330_1
cccacccgcccgcaacctcgattcatggttcagcttttgcacaaagccagaagatcatcggtgccaaccaaaacatgttaattcttgaacattcggctaagaactgttccacaaaaacccaagtaaaagcccgtccggtagttggttctaagcttgtagcacaaggtgttcttcgtaaacccgggaatggctcagctcttggtcccaaggctccggttcaaccaccacctgaaatatggacaaggggaaatggccttgatgaagttgttgacatggcagatatgttgcaaatggaatcccaagattggttcctaggatttgtcgagaaattcttggatgccgatgtagacacatctgttctatccgacaacggtcaaataagccgggatgttgacacagctcaagagtgttaatgactggttagatgaaattagttcgagt

SEQ ID NO: 7652 - DNA, 526 bp, Gossypium hirsutum
  Clone ID: GOSHI-09MAY01-C43950_1
ctttgatgttttgtcttggtttgggaattctctgtggggccgttggttatctcggttctaatctgtttgtaaggaggatctacagaaacatcaagtgcgactaaacccttaaaatgtttgaaagtataaccatcagcgcttctatgagcatttttatttgtcgtctgaggcaataaacgatgatgagatgaaacttccagccaggaggggggtatgggtcaagccctagcaaaatcctagagacgagaaatcccagggtttgagggtaagggggaattggtatttgtgggtttcccatgagattttgctttttctttttgccccatttctatttttacccaaaatgtaatcggaagcctgatttagaatgcagaaaaaaccagttaaaaaaatattaccctttggttatacttttttgtccttccccccttctgcatatacgtgtgtcctgtctgtaagaactcaaaatggctaaaatatctgcccattttgttaggggataaaggaacttctcaaagaattcagc

SEQ ID NO: 7653 - DNA, 752 bp, Gossypium hirsutum
  Clone ID: GOSHI-09MAY01-C43940_1
cagaactaaggagaaaacatgaagcctatcgcaaagaacgttgcattggctctatcttgcggcatttccctctctttcttccccattataaatactgctggtaccaatcccttactcaccgaaacctgtcaaaaggttacgaacaaggatctttgcacctcaagccttggggccgaacatgccacccaagacgcaaaagatgtagccgccctcgcattgatagctatcaacgttgcttccaaccatggcgtcaacgcttccgtctacatcaagaagcagctccttgacggtaagattttggaacctacaacggagcagaactttgaagattgctcggaaaatttcgacgacgcaatgcaggagcttgacgatgcgctggcagtcacactgtcgagggatttcaaacaagtgaaaatcgagttggaaagcgccatagacgatgccgacacctgcatctccgtgctgaatcaaaaagcaggaaaagacaaggaactgtatgaaaagactaatcactttcgccaactagtcagcaatgcctacgacattgccaatattttggctccaaaataatcatgtgccccgcttagcttcattacctactataatttaattattcctaattatagaacaagctgttgtgctatgtaattgttggaaatgagaggcggacttgtccaagaacaagaacccgatagtttggatcgatttgaaccgatcgtttaatttttcatataaaatcactacttttattt

SEQ ID NO: 7654 - DNA, 391 bp, Gossypium hirsutum
  unsure (1)..(391): unsure at all n locations
  Clone ID: LIB3148-019-Q1-K1-D5
agaaactaaaggagaaatttatgaatcctatttcaaagaacgtngcattggctttagctggggtcattttccaggctgtctggggcattataaatactgctgttaccaatcccttactcactgaaacctgtcaaaaggtaaagaacaaggatctttgcaccttaagccttggggccgaacatgccacccaagacgcaaaagatgtagctcgccctcgcattgatagctatcaancgtgcttccatccatgggcgtaactctttcatttacattaagaatcaatatcttttctggtttaattttggtacacttttccttcctttttctttttatgttttttttcgttatcaatttcttctttcttatttttttctgttttttatcttttttt

SEQ ID NO: 7655 - DNA, 729 bp, Gossypium hirsutum
  Clone ID: GOSHI-09MAY01-C43810_1
gcgtccactcttccgggcaattttggggttttttgcagttgtgttactcgttcaagtcggcaactttgttgatggctctccatggaatcatcatcatagtcatcggccccatcgtggatatcatggaccatggatcaatgctcatgccactttctatggaggtggtgatgcgtctggaacaatgggtggagcatgtggttatggaaacctgtatagccaaggatatggtgtcaatacagcagcattgagcactgcattgtttgacaatgggatgagctgtggtgcatgttacgagctgaggtgcgtgaatgacccgcaatggtgcttgcctggttccattgtggtcaccgccactaacttctgcccacccggtggctggtgtgaccctcctaaccaccactttgacctctctcagcctattttccagcacattgctcagtacaaagctggaattgtccctgttatttacagaagggtaagatgcaggagaagtgggggaataagattcaccattaatggccattcttacttcaatttggtgcttataaccaatgttggaggtgccggtgatgtccattcagtcgccgttaaaggttcaaggaccagatggcaacagatgtccagaaactggggacaaaactggcaaagcaatgcttacctcaatggccaaagcctatcctttctcgttacaaccagtgatggccgcagtgtcctctcttacaacgttgc

SEQ ID NO: 7656 - DNA, 469 bp, Gossypium hirsutum
  Clone ID: GOSHI-09MAY01-C43700_1
cccacgcgttcggaaactttgtatcaagggatgtccgatttcagatatagccatcgaagcactcggttccggttgtcccaatttggtaaaaattaaggtgaggaaatgtagaggagtgagcagtgatgccggcgaatggttgcgtgaacaaaggggagcgatgttgatcaatatggatgcttgtgacacagattgtgggttcgaggctagtgtcagtgacattggagttcatgaaaccggtgtggaggttggccaagtaaccgctgttggtgcttccacgagcagcaatggtaggttagctttgttgacgtcaaagctggggcattttgctggtaggaatttagcagcaggcacgttgagaaggcggcctaattgtgatgataatttaaatatcaacctggcgaaatgatctaattgtagatgtttgggaaacttactctttgctttgatccccatgcaggctttgaaa

SEQ ID NO: 7657 - DNA, 510 bp, Gossypium hirsutum
  Clone ID: GOSHI-09MAY01-C43140_1
atgtgaaagctgccaaacggaagaagatacatgctttcaagtcaaaaatgcgacatgaacaacttgaagtggcacaaaataagcggcagaatgcttggcagcagtttcagacaaccaaaggcaagactaaaaaggttggttttttctcggggcgtaagcgtgagagcattttcaaatcaccggatgatcctcaaggtaaggttggtgtgacagggagtggaaagggcttgacagatttccagaaaagagaaaagcacttgcatcttaagggaggtaacgttgagataagtgatgactaggcaggtagagttcctactatacttttagttgccttagctttgtttcgcaccccattcagtagtttgacaagttcccaggtagggggtgttgtaaacatgtacttcccatcattcctctgcgccagtattttgtgcttgcaacttgttaattatactggaattgttcttttttttcttccttttctaaaaaagatctcccaatcattgtttc

SEQ ID NO: 7658 - DNA, 438 bp, Gossypium hirsutum
  Clone ID: GOSHI-09MAY01-C43290_1
tggacgcgtgggcggacgcgtgggcggacgcgtgggtttcatcttgtttttactcacgagagatgtttctatcactggttatgtcgttccttgctttgatctacattttattggctgttttggagtttcagtggaacaataatggagttcgttcttcgctgtttcttcaagattgttgcttccctatgtcgcatctcgtttcgaaaaagatgggtaattttgtgagtgattctaagtttttgaatgtattggaaaatgaagcgtttttcccttagcgatttgcttcaccaaaaaagaaagaaaaaagtttggattaatgtttttttttggggtttaatttgtagggtattaaccaaaggtttaatttagggtttcaatgtaaaaagaaatgttaaaattctgatgacgtaaatctcgggagtttcccgttagtttgct

SEQ ID NO: 7659 - DNA, 721 bp, Gossypium hirsutum
  Clone ID: GOSHI-09MAY01-C43260_1
aggcagctttctgttccatacgacatgggtggcatgcccttgcgagatgctggtatcggacagcctatgccgattccagctttggctacagctcttgcaaatgcgacacctgaacagcaaaggacgatgcttggtgaaagcttgtacccccttgtggaacggcttgagcgtgatgcagctgccaaggttacaggcatgcttctggagatggaccaaacagaggttttgcatctcctggaatcaccagaagctttgaaggccaaagtagctgaagccatggaggtgttgaggagtgttgctgctcagcaacaggccaacaatcaagccgaccaattggcttcattgtccctgaatgataacctcgtttcctgagtgactaaattcgggtccagtttcttggcagagaagttgctaaatcctttatcaaaactgggctatctttgtttattaggctttaagtttggaacctttatatatttgctttgtttttgtcggttaatagggtttttaatacttgctagacattgtttggtttggtttgccttcgtttttctttaatttactggcttgttatggacaaccgtaagtttgttttatgttaaaacctacttttagaacaatcttgcggttttcaatttagactagtattgccagaacccgattagagtagacggtcccaaacttgtttgatcgggaattggttggtacattattttggaac

SEQ ID NO: 7660 - DNA, 661 bp, Gossypium hirsutum
  Clone ID: GOSHI-09MAY01-C43210_1
cgaagatgctcccacatacatcaaaactgttgacgatggaaggcatgagctctttcttgaatacgtggcactcccattgcctttgacgccaacttatgcggaagaagtgaatggtgcaaacaatggaaagaccaacgaatctcatcaaggtatcttctttcggaccatgggcttgcagattttgatgtctacattatggagactaatagccagcagatgaagtctgagctggatcagtacttggaagagtccctgttacctcgtgtccaagagtttgatgtgttgggttggtggaagctgaacaagatgaagtatccaactctttccaagatggctcgcgacattttgtcgattccggtgtctgctgctgccaccgaatcaatctttgatatcacagacaagcaactagatgaatatcgtagctctttgcgaccggagacggtggaagcactaatctgtgccaaggactggctacattatggatcttctgatgtttcgaatgcgcttgttaaaatggaattttagatgtagatgatattccagagtatcatgtttatggacatgtttcactgttaggcctctatttgtacaattagaaagatttgtatggatgcttcgagtatttttttttttacgtgtttctttgaaggctttacgtggc

SEQ ID NO: 7661 - DNA, 805 bp, Gossypium hirsutum
  Clone ID: GOSHI-09MAY01-C43220_2
gaattgcgctcctttctcccaactctagacgctaggctgagtttaggcagaccaaagaacagttctgttcacttttcaggtaaaagaaaaaagaaaatgaagaagccaaatcgtcgttctaagcaaaagagcggctccgccgattcttctacttcgcctttgatcgtatcgggtgagaagggaaatccggctaataggatcagagatttggagctagaaaatgagactcttaagagggcgattgaggagctaaggagcaaagcggttgacgtttcaccaaactcctgtgttggtgttcaaaaactggatcaagggcattctcgaaattcagagacctctccgaagattgtggagttgaggaaactaggcatacagtctcaactcttcggcaaaaaagcctaaatcagatgaaatgtcagaacagttccaggatgagattcaaagattaaaggtgcaaaaggttcagctccaatgcaagatgaagcttgaatcgatgcagttcaggttatgcaaggcttcgcttgaaaaggaaattcttcagcttaagaaagagcaaaggaggaacaagtatgagaagcatgtgctctcaactctcattcagaggcaaaagcatgtattgcagcagaaaacaaaagaagcttttgtggcagcaaaacgtctaaaacagctaactgaatctagaaaggctacatccggcaaaatagctggtgctagaatcgcatcaacattggaactcagggtattgagaatgactttgagccaaactgaagcttgtgagtatgttcaaatccaacatcgaattgaa

SEQ ID NO: 7662 - DNA, 1281 bp, Gossypium hirsutum
  Clone ID: GOSHI-09MAY01-C43220_1
ccgcagtacggtccgattcccggtcgaccaccgtccccaccgtcgaaaacaaaaagcttttgtggcagcaaacgtctaaacagctaatgaactagaaggctacatctggcaaaatagctggtgctagaattggcatcaacattggaactcagggtattgagaatgactttgaagccaaactgaagcttgatgaagtatgttcaaaatacgaacatcgaattgaaaagatggttgatgagataaagaaactcaagctggaattggagatgctaagggaggaaaaatccagttcaagctgcaggacaggcgataatgaaacttccatagctgattcagagttaacagatctaagagaagaagttgctaaactaagttgtatggttagccaaatgaaaatgtcaaaggcacaactcgttccagcagataggtcacaagctgacttggtccagacttctgtttccattgggagtaatattcatgcatccggcacagatgcatctgaatctgagtgttctcagggaaatacttcaatgatcgagaaaccttcaggtgtgtgctgctcctgttccaaaaagtctttgtgtaagaccctcaaatgcagatgtcgatcagcagggagcagctgcggggcgtcttgtggctgcgcattggccaagtgcacgaataataaaaaagttcctttcaaattggacgacatgccacaaccaaagacgccagaagatattgttgaagaactgaaaggcacgattcatgatactatcctgattcaaaataaaactgttaaaaacattcccgatacaaatgaagactgcggacctagaaagcagccattacgagagattgggaacacaatggtcaaaccaactgctgcaaaacttgaccctagaaagaaaggccaaaaaacagtcattcagcctgatactaaggatcagccattacctgtgatggaaaatacaagaggaacaagaagaacaaacaaaatttcaggttagcccttatagtattttttccaagtaccccggaaaattatctgaaagtgtacgagttacttgctcgaaagcattgtactcaggcgaactatagcattggctactagaggtattcctttactaagtttcacatgggattttgagtgttttttctctattgaaataagcatacaaattttatagggagagatgggttcgagaacaaattttgagctttaaacatgttgctaatggttgttagacccgaactagacaaaaggattgaatgaattttgagcaaacctttggaatc

SEQ ID NO: 7663 - DNA, 1007 bp, Gossypium hirsutum
  Clone ID: GOSHI-09MAY01-C78910_1
ttaatcatcactaaagagattctcctctgttctattctaaaatgtctctcttaaaccaattgtttaatagaggcgtttttggtgcaaaatgtaaaacatgcttgagcttggcaatctcgcgcatcaagttgctccaaaataagagagatttgcagctcaagaatatgagaaaagagattgcccaattcttgcaggctggccaggaaccaattgctcgaattcgcgtggaacatgtaatcagagaacagaacatatgggctgcatatgagatactggagcttttctgtgagtttgttcttgcccgagttccaattcttgaaagccagaaagactgtcctccagaattacgagaagctgtggcaagcataatttttgctgctcctagatgttcagatgtgcctgatttattgcagatcaagaatttgtttgctacaaagtatggaaaggaatttgtcattgctgcaacggagcttcgtcctgattctggcgtgaaccgtgcaataattgaaaagctttcagttagtgctgcatcaggtgaaataaggctcaaagtattgaaggaaattgcccaagaatatagtgtagaatgggattcttctggcactgaagcagagttcaacaagaaatatgaagatttactggctggatcaaagcaagtatgtgctgaggctgcagtttctcaagctcccaataaacaagcatctggtaaatcttcgccttctaatggggcaaaaactattttgcctactgatgctaggccggcatctcaacaccaccaagttcccacccatgagtaattgactatagtgaattgatcattcatgaaaatggtctgccggtccaatttctgacattaaaacgagaccaattacacattgatgtatgggaaagagctcagctgctattgccttgaaacgtgcaacagtgcacgtgcagctgtgactgggaatgtgagatttggttcactgaactacaggagcttatcttggtcgttgtcacacatgtct

SEQ ID NO: 7664 - DNA, 643 bp, Gossypium hirsutum
  Clone ID: GOSHI-09MAY01-C78410_1
cccagcgtccgcataaaactcatcttttctttgctcattttcatccttcttcttaaacaacataaggcgttctatccatttcccctcaaccaactcaatgcagcagaaccagatctcctcttagattggggacatttaaccggcattggctgtccattttgagaccgagcctatgcctggaaacaagtacaatggtcattcaaaccatattccgactcgtgttgaacgtctcttgcgagaaagagtgttgagtgagcaaaggaagagcattagagcttcacagtcgaatgaggtgagtgataatcataaggcggatgaagtatctgagaatggccagtgttatcgagaaggcgacacactccggtgttgcttttgtcaaacagtacttggaagaggctggagctgcaaggcctttccggcaacgacttctggtagtcgcgaataggcttcctgtttctgcggtccggagaggtgaagactcatggtctttggacataagtgctggaggtctagtgagtgctctcttgggtgtgaagcagtttgaggcaaggtggattggatgggccggtgtaaacgtccctgatgagattggacaaaaggcgcttactaaagcattagctgaaaagcggtgtatcccagtctt

SEQ ID NO: 7665 - DNA, 482 bp, Gossypium hirsutum
  Clone ID: LIB3582-006-P1-K1-E10
gctacgcatcctgtcatatctccgtttaacaatggcacgcatgaatctctcaagaaatcaaatgaaccaggtttgatactgatgcgtcatgtggagtctatatggaatgaaaagaacctgtttacaggttgagtggaagtgcctttaaccaagaagggagtggaagacgcaattgtagccggcataagaatcagcaacatacctagcgacatgatgtttacatcagcactaattcacgcacagatgaccgctatgctagccatgacacagcaacgaagaaagaatgtgccaaatatcatgcataatgagaatgagcaagcaagggtatggagtcaaatacatagtgaagacaccatagaacaatcaattccaggtatagcagcttggcaatcgaatgaaagaatgtatggagaattacaaggtctgaataaacaggaaactgcagatagatgtgggaaagaaaaagttcatgagtggcgtat

SEQ ID NO: 7666 - DNA, 374 bp, Gossypium hirsutum
  unsure (1)..(374): unsure at all n locations
  Clone ID: LIB3083-017-Q1-L1-F2
tctctctgtctgtctctgtctctctctatctctctctcgccanatgaccgctatgctagccatgacacagcgacgaagaaagaaggtgccaattatcatgcataatgagaatgagcaagcatgggtatggagtcaaatacatagtgaagacaccataaaacaatcaattccagttatagcagcttggcaattgaatgaaagaatgtatggagaattacaaggtctcaatacacaggaaactgcatatagatgtgggaaggaaaaagttcatgagtggccgtagaagcatgatataccaccaccaaatggccagagtttggaaatgtgggctgaaagaactggtgcatattttaaagatgagattgaaccccaac

SEQ ID NO: 7667 - DNA, 594 bp, Gossypium hirsutum
  Clone ID: GOSHI-09MAY01-C78040_1
cggacgcgtggtcggacgcgtcggttcccaatcacgaacgagtcaaattttcccttaaaacaaacatgccttcatcttcttcaactttccctgttactttagtttcaaaaaccatgattttcccagaccaaaaatcaaaccttggcgaacttaagctttcagtttcggatctacccatgttgtcttgtcattatattcagaaaggttgtctttttactcgtccttcaatccctattaactcactcatttcggttctgaaacaagccctttctaagacgctgtcgtttttctcacctctcgccggtcgtctttatactgatcggaatgggtatatttatattacatgcaacgacgccggcgttgagtttcaccatgcaaaaggtaccactttgttcatcagagacgtcattagtccacttgatgttccatggtttgtgaaagggttcttttgttatgataaaacagtgagttatcaaggacattatatgccgttcatggcggtccaactcacttgagttggctgctggggttttcatcgggtgttcggtttttcatgcattgactgtcggttcgtcgttttgggatttcttcaat

SEQ ID NO: 7668 - DNA, 565 bp, Gossypium hirsutum
  Clone ID: GOSHI-09MAY01-C78010_2
caactccactctctcattgtttgctttcaagcgtacttgtcaaatggctcgatctgcactggatgaaatgtcagattctggggcttttatgagaactgcctcaacatttcgtaacttcatctctcgagaccctggttctcagtttccacctgagtcaggaaggtatcatttgtatgtatcttatgcttgcccttgggcttccaggtgtcttgcatacttgaaggtcaaaggccttgacaaggccattggttttacgtcagtcaaacccatatgggaaaggacaaaggaaactgatgagcacatgggatgggtttttcccacttctgatacagaagagccaggtgctgcacccaacccctttaacggagcaaagagcataagggaactatacgagcttgcaagtacgaactatactgggaagtacacagtccctgttcctgtcctatgggacatgacgttcaagactattgttagtaacgagagtgctgagataatccccatgcttaataccgaattcaacgatatagctgagaatcctgctgtggacctatatcctccacatttg

SEQ ID NO: 7669 - DNA, 636 bp, Gossypium hirsutum
  Clone ID: LIB3543-055-Q1-K6-G11
ccccgcgtccgccccgcgtgcggccggcgggcggccacgcgtccgggaaggtatcatttgtatgtatcttatgcttgcccttgggcttccaggtgccttgcatacttgaagatcaaaggacttgacaaggccattggttttacgtcagtcaaacccatatgggaaaggacaaaggaaactgatgagcacatgggatgggtttttcccacttctgatacagaagagccaggtgctgcacccgacccctttaacggagcaaagagcataagggaactatatgagcttgcaagtacgaactatactgggaagtacacagtccctgtcctatgggacaagaagttcaacactattgttagtaacgagagtgctgagataatccgcatgcttaataccgaattcaacgatatagctgagaatcctgctgtggacctatatcctccacatttgagagccgaaattgacaagacgaatgagtggatatacagcggaatcaataacggtgtttacaaatgcgggtttgctagaaaacaagagccttatgatgaggctgtaaaacaactatatgacgctttggaccaatgtgaggagattctttccaagcagcggtacctttgcggaaacattctaaccgaggca

SEQ ID NO: 7670 - DNA, 541 bp, Gossypium hirsutum
  unsure (1)..(541): unsure at all n locations
  Clone ID: LIB3543-038-Q1-K1-F4
gcgttcgggtgccttgctacttgaagacaaggggttggacaggccattggttttacggtcggtgaatcatgccatgtattttaagctcttgtagtttgattaaatctgtcataaagctaatgatcttttgttgttcaattgttcaccagtcagtcaaacccatatggngaaaggacaagaggggggtggtgagcacatgggatgggtttttcccacttctgatacagaagagccaggtgctgcacccgacccctttaacggagcatagagcatangggaactatatgagcttgcaagtccgaactatactgggaagtccacagtccctgtaagttcataaagtcctatgggacatgaagttcaacactattgttagtaacgagagtgctgagataatccgcttgcttaataccgaattcaacgatatagctgagaatcctgctgtggacctatttcctccacatttgagagccgaaattgtcaagacgaatgagtggatatacagcggaatcaataacggtgtttacaaatgcgggtttgc

SEQ ID NO: 7671 - DNA, 514 bp, Gossypium hirsutum
  unsure (1)..(514): unsure at all n locations
  Clone ID: uC-gsronu33B021h12b1
tccacgcgtccgctctcggccagcctgcgagcgacggtggaggcaagtgtgcctcgtctccgtcacggctccaaacagaaccctacgaatccgcacgcctctgaaccggagaagtggccaccgactaggtcgacgccggtcaacggtgttcgtaaccaaaaaacaacgaagtttccaggcctttatagccgaaaggaaagaaaatcaaaataaaaaaatacaatttccatcctttcccttttgctgtgctgtggttttttgttttcttttgcacgtacggagtgcgtggcggcgtacggaggctgtgctggcgacgggggttgctggtcgtacggggcgagggctggggcgtgcgtggggagctgagcggcgctaaggtttttcttccctcctttggctgaaaatgtttaggataatcgggctagttgggctttagggcatttgggtctaggtttgggctttaatgatggactatagngttggggtttattctttggacttttggtttaataat

SEQ ID NO: 7672 - DNA, 479 bp, Gossypium hirsutum
  Clone ID: LIB3582-011-P1-K1-F3
cggctccaaacagaaccctacgaatccgcacgcctctgaaccggagaagtggccaccgactaggtcgacgccggtcaacgggtgagaaagcctttccctttttgattttttttaaaatacaaaacaaatgacccaaaaactctttttgtgttttgattcctttcttttaatttctatacatgtatgcgtaagaaaagaacctcctctttctgaaataaataaaaaaggaaaaaaacgatgaacaaaagagacacctttaaggtttttcttccgattgtttcttctggtattttctttttttatttcagtgttcgtaaccaaaaaacaacgaagtttccaggcctttatagccgaaaggaaagaaaatcaaaataaaaaaatacaatttccatcctttcccttttgctgtgctgtggttttttgttttcttttgcacgtacggagtgcgtggcggcgtacggaggctgtgctggcgtacg

SEQ ID NO: 7673 - DNA, 739 bp, Gossypium hirsutum
  unsure (1)..(739): unsure at all n locations
  Clone ID: AI055149.1
tttcaatctcagctaaataagcctttattctgtgaacaagatcccttcctgatacaatcttcctctcatgcaccaattgatttcgtgagttccatattgcccataaggcgcaacaaaacaccttacactgctcattggttcctttttcgaagacccaagacactgcaaaaatacgtggagactgttttcttaccctgaaccacatcgaggacatctcacgcttgtggttaaatgtttgcaacgtagattgactaatgtaggaatgtagttccaggaaatcctccaaatcaagagtagaatttttgaggaagttgtaattgccataattntctgtagaaatctttgaattcggtctatactaaattattagggtccagattagcatcttgtaatagtttgtaagcactccgtactgagaattctccagacggttcacctttccaaatgagccttcactatctgtaattgcaagtgggatctgtaatattctttgcgcaatggccagttgaaaggttgaatcccggnatccaccggtcattccanatagaaattttgttccctttccagctttcaacataggccctgantgagagccctttgcagccagaacttttcagtaaggangaaaccagcnntggtcagaaggaaaaaaccggaaacctaatgtccgaagcgagaacatgncctgggtcagnctaagatctactcctagattactattcatccaataatttattta

SEQ ID NO: 7674 - DNA, 481 bp, Gossypium hirsutum
  Clone ID: LIB3582-011-P1-K1-C4
cggacgcgtggggttgttttcaaggctcttaactctccccgccagtctcgtacaaaaactcccgacgccgatctatacctgttagtatcaaaagctgtatcaaagtgtattgtgtcctgtgttctcgcttcccaatgtctctgaacttcaacagtcttcaaggacactgcaaaaatacgtggagactgttttcttcccctgaaccacatcgaggacatctcacgcttgtggttaaatgtttgcaacgtagattgactaatgtaggaatgtagttccaagaaatcctccagatcaagagtagaattttttatggaagttgtaattgccatgattttctgtagaaatctttgaattcggtctgtactaaattattagggtccagattagcatcttgtaatagtttgtaagcactccgtactgagaattctccagacggttcacctttccaaacaagcaattcttcactatctgtagttgcaag

SEQ ID NO: 7675 - DNA, 666 bp, Gossypium hirsutum
  Clone ID: GOSHI-09MAY01-C79480_1
cggacgcgtgggttcaaattgagtgtgtaagtggtccttcagccaactcagctggggaagatcctgctgtaccagcatcgatccgtgagacattagttgggacccttcttccaagtctagcagtggctgatattcttgggtttttaactgtaatagaaagccaaatttggtctactgcatctgattcacctgtccacctagtatctctcgcaactctcattagggttgtgcgtagttccccaagaaccttggttcagtgccttgataaggtggttaacttcatcctacaaactatggaccctggcaactctgtcatgcgcaaaacttgccatccacgttcaatgacaacattaagggaagttatacgtgtgtttccaatggtagccatgaatgaaagctccactaagttggcttttggtgatgctattggggagattaacggggctagcattcgggtgtatgacatgcaaagtgcgacaaaaatcaaaggtttggatgcaagttgaactcctggaattccaaatttggctgtaacaagcacccaaattgttcgtgaatacagtaatatcacctctgagcttttcaccaaatggagaaggggttggtaccttcctctgaacatgggctaataatccgatggtggtccttgggatcgtgtggtgggac

SEQ ID NO: 7676 - DNA, 881 bp, Gossypium hirsutum
  Clone ID: GOSHI-09MAY01-C79400_1
caaaatacgcttaccgcagcctgcatagaggctcgaagtggaatgaccataaaagaagtgtgaaggacgtattcattggtggtggtgaatatgtaaggccactttgtaaatggagattagtggacattattactattgttgaaactgctcttttgttttgcagatcgtaaatgatgtaaaatttactgtaaaccaagcagttgagccagttgagaaggggattaccaagttcaatgagaagctgcacaagatcaaagaccggagaaagacaaaggatgatagttgcattgccactgccgaaccgagggtaattcgtggaatagacgatccccttcttaactgggagcatgagtgatagtgcggtagcaaggggaaagaaacattgtaaaaaatcaggaagcactaccagtgcggaaagtggagacagtagctgctatctaaactctggcggatatcttattaggggccgtagatgggtcacaaaggattaaaagcttatatgaattattgtggttatatgatgaactacaaacacaccttgtgatggcttaaaatatagtcatctcctactcttagtttctggactgctagcttgcttcacatgcctaacagcattcattattttctgcctaaggcggttgaagaacttttttttttctttcactttcctgaaattttagaaccattgttctatttatagtccgtctaggcaagtgttttcaggtcgaatcaagcttgagtaatgtctggaaatcattgcccagggaaaaaagagagttataaacacattaacagctgttttgtattctggctctgaatatatatgtacggtatttgagatccagaatacaaaaccccacgcgtccggttctagatcgcga

SEQ ID NO: 7677 - DNA, 491 bp, Gossypium hirsutum
  Clone ID: LIB3584-018-P1-K1-C11
gaagcttttggtgtgcattgtgaaggagaattcaactgggaatgcgggtgtggcgagtgcggcttttttatgctcttgatctgaatagacatccacttaccgaaggcttgcatctgaagtcaagtgtccaagacttcatcatttgtatagagcgcaaataggcattgcttctgttgttcacctatacgatttatcttccaaaccatatgagctaatgggagatcccatttctggaagtgtttcaatccttggagactatgcatgtgttgattgcgctccggatcctgatgagattagggaaagcgagcgacccacaaaactactcttaccgcagactgacatagacgctcgaagtggaatgaccataaaagaaagtgtgaaggacgtattcattggtggtggtgaatatatcgtaaatgatgtaaaatatactgtcaaccaagcagttgagccagttgagaaggggattaccaagttcaatgagtagctgc

SEQ ID NO: 7678 - DNA, 497 bp, Gossypium hirsutum
  Clone ID: uC-gsronu33B153h06b2
ttttaattcactgagaaagtcatggaaggtttcaaggttgttcacctcattgcaatactatcaaccctttcgatggtttcggttaatggacagatttctacagcctgcactgcctcaatgatctccagtttcaccccatgcttaaattttattactgggagcagtgggaatggctcatcatcaccaacacaaggctgttgtggttcattgaagtcgcttatgagcactagcatggattgtgcttgtcttattattactgctagtgtaccttttcaattgcccataaatagaaccctggcactaagtctgcctcgagcttgtaacatggggtggtgtaccagttgcagtgtaaagcttttggcactcctctaccagctccaggccctgttccctttctacttccaccaactttggcaccagcagccgcatcttccttaagtccaggagcttccgaagcttaaacaccagaatctgatactcctctggacctagcacct

SEQ ID NO: 7679 - DNA, 445 bp, Gossypium hirsutum
  Clone ID: LIB3584-017-P1-K1-F5
ccacgcgtccgcccacgcgtccgcccacccgtccgcactgagaaagtcatttaatgtttcaaggttcttcacctaattggagactgtcaaccctttctaaggatcctcctaatggacctatcactacagcctgcaatgcctcaaccatctccaccttcaccccatgctctaatcacattactgaaagcaataaacaattctcataattaccaacacaagagctgcctagttcattgaagtcgcttatgagtactagcatggatcgtgcttgtcttattattactgctagtgtaccttttcaattgcccataaatagaaccctggcacttagtctgcctcgagcttgtaacatgggtggtgtaccaatgcagtgtaaagcttttggcactcctctaccagctccaggccctgttccctttctacttccaccaactttggcaccaac

SEQ ID NO: 7680 - DNA, 746 bp, Gossypium hirsutum
  Clone ID: GOSHI-09MAY01-C74840_1
gaagaatctgtattcacattccttttccttctctatgtattgaagaactcatatatattgctgtgtggctaaaactactacttgacaaacttcattctatcagcacaaatagatcatcgagggctttcatcaaagtgaatttgaagtttgaggaaattaaggaaaaaatggcagggggaagtggaggaagaactctggaggaaacacccacatgggctggtgctgttggttggtttgctttgggtttgatttcaatcatcattgaacacattctccatatgattggaaaggggttgaagaacaagcctaaaccagcactttatgaagcactggaaaagattaaatcagagcttatgctgctgggatttatatccttgcttctaacagtaggacaagggtttaatatcagatatatgcatatcgaaggaaattgcagctacttggcatccatgcaataagaaacaagaagagaaattgaatgaatctgatgatcaagataaaacagataccgagcatcgccggagacttctcactgtctcgactcgggttgtagttattcggcgttcattggcgggaccttcagtggacaatgtgcagctcagggtaagtgccgttgtgtcatcggaaggaatccaccaacttcaccttttcatattgtgctagctcttttcatggtccttattggtctacattgcactgggacactagatgaaggtggagaattggaaagaacaggaccatctatt

SEQ ID NO: 7681 - DNA, 650 bp, Gossypium hirsutum
  Clone ID: GOSHI-09MAY01-C74790_1
tccagcgtccgggcatttagaaacttgaggaggggggagataaaatatagcaaagcttatagagaataaattccttgttcatacacgctagctccaccacgcgtgcggcagatttacgagagcaaagcaaatagtttccttaactaggtagagattataaaggcaaagaaaagagataattatgggacgtggaaagataccgatcaagaggattgagaaccagacgactaggcaagttacgttttcgaagcgacgagctgggttattgaagaagacccatgagttgtctgtgctttgtgacgctcagattgggctcatcatcttctccactaccggcaagatgtgccagtattgcactgagggttacagaatggagcaaatcatagaaaggtatcagaaggtcactggaacttgcattcctgagcatgacaatcgggaacatttgtacaatgaattggcagtgttgaggaaagaaactcgtcgccttcaactaagcatgcgacgctacactggtgaagacatgagttctataccattcgaagagctcgatcaacttgaacacgaactcgaacgctccgtcatcaaggtccgagagcgaaagaatgagctcttgcaacaacaactggataacctacgtagaaaggagagaa

SEQ ID NO: 7682 - DNA, 629 bp, Gossypium hirsutum
  Clone ID: LIB3543-055-Q1-K6-C12
ccccgcgtccgccccgcgtgcggggggggtgcgggcacgcgtccgcccacgcgtccgcccacgcgtccggttctagatcgcgagtggccgccctgttttttttttttttttttttgtttcccagtttccttaactaggtagagattataaaggcaaagaaaagagataattgtggggggggggaagataccgatcaagaggattgagaaccagacgactaggcaagttacgttttcgaagcgacgagctgggttattgaagaagacccatgagttgtctgtgctttgtgatgctcagattgggctcatcatcttctccactaccggcaagatgtgccagtattgcactgagggttacagaatggagcaaatcatagaaaggtatcagaaggtcactggaacttgcattcctgagcatgacaatcgggaacatttgtacaatgaattggcagtgttgaggaaagaaactcgtcgccttcagctaagcatgcgacgctacactggtgaagacatgagttctataccattcgaagagctcgatcaacttgaacacgaactcgaacgctccgtcatcaaggtccgagagcgaaagaatgagctcttgcaacaacaactggataacctacgtag

SEQ ID NO: 7683 - DNA, 661 bp, Gossypium hirsutum
  Clone ID: LIB3543-001-Q1-K1-C11
aaggaatgattcatagaccacaaagaattttttttcgaaggtggtgtttttgcttaatatgggacgtggaaagatagccatcaagaggatcgagaaccaaacgacacggcaagtcaccttttcgaagcgccgagctgggcttttgaagaagactcatgagctctccgttctctgcgatgctcaaattggcctcatcatcttctctagcaccggcaagatgtgccagtattgcactcaaccttatagaatggagcaaatcattgaaaggtaccagaaggtcactgggactcgcattcctgagcatgacaatcggtgttgaggaaagaaacccgtcgtcttcaactaagcatgagacgctacaccggtgaggacatgagctctataccctacgaggagctcgatcaactcgaacaagaactcgaacgctccgtcaacaaggtccgagagcgaaagaatgagctcttgcagcaacagcttgataatctacgtagaaaggaacgaatgctagaggaagaaaacaacaacatgtatcgttggattcaagaacaccgagcggcaatcgagtatcaacaacatggagggctagaagctaagccagtggagcatcatcaacaagttcttgatgaattccccttctacggagagccaagcagtgtgcttc

SEQ ID NO: 7684 - DNA, 449 bp, Gossypium hirsutum
  Clone ID: LIB3584-020-P1-K1-G10
cttatattctagcacccatttttgaaaacttctttattaagctcagctgcttcattttttaaacttcttttttgtgtgtgtggcttaatgtttttttttttcccagtttccttaactaggtagagattataaaggcaaagaaaagagataattatgggacgtggaaagataccgatcaagaggattgagaaccagacgactaggcaagttacgttttcgaagcgacgagctgggttattgaagaagacccatgagttgtctgtgctttgtgacgctcagattgggctcatcatcttctccactaccggcaagatgtgccagtattgcactgagggttacagaatggagcaaatcatagaaaggtatcagaaggtcactggaacttgcattcctgagcatgacaatcgggaacatttgtacaatgaattggcagtgttgaggaaagaaac

SEQ ID NO: 7685 - DNA, 1115 bp, Gossypium hirsutum
  Clone ID: GOSHI-09MAY01-C74640_1
gtgctcggaaggccctacaggatgatatgagccatttttcaagaaatttgaatggacaaagttcagatattgtgtggtcaggctctgcatggacatgtggtaaacacccccacccgtccccagcattttgccgcagtgggaccacaatagcggttcaatcttttgtctttgtcatggctaaaggagagaatcactatcttgcttacttggaggatatgtacgaggacaaacgtgggcagaagaaggtcaaagtgaggtggtttcaccatactaaagaggttaagggtgtcattcctgtaaggaatcctcatccaaaagaagttttcatcactccttattcgcaggtcattagtgcagagtgtgttgatggtcttgcaagtgtcttaactcgagagcactatgagaaatgcttagctgttttccctgatgcttttttagctagagtgcatgtatgctctaggcagttcagaagtaataaagtgaagccatttgatttgagtaaattgcgtggctattttgatcaaccgattctctcttgtttgagttctactttgtcctctgaacctgaatccatgagccatggcctacatgaagaagaggaagaacaaagcgctggtgcaaatgtaaagctgggaaataagaggaccagaactaataacaggacttctagtaaccacttggtgacttatgaaacttcatgcaagaaaataaaatatgctttgtttggaaagagattgccttccttcaagcatgctgagagtcaatattgttatggatcacttttcaaggttgatgaaaagatagagttgctgtgccaggatagtggaatccgaggttgctggttcagatgtacggtcttacaagtatcaagaaaacagatgaaggtccaatatgatgatgtgcaggatgaagatggatatggtaaccttgaggtatgttttaggcattttaaaaacttgtactggtttgtggtttctcaccacatctcttaaccatatggtcggggagtcgatccccactcatgggaatggagcacatttcatggtcagccgcttacgtctttggagagcacctgcggcgagaggatttgtcactgttgccggcagtggataccc

SEQ ID NO: 7686 - DNA, 617 bp, Gossypium hirsutum
  Clone ID: GOSHI-09MAY01-C74600_1
cctacgcgtccgaatctttcccttttgctttcaagttgttcttcttcttcttctccccctcctcctctctccctcccttctatcgaattctcaagcttccaatggagacgttagcttcttcttctcttcgtacgaccctcggcggcggcgctggtggcggattactcaatttttgtcgcggtggctccgtctctgttcttggcttcccccttcaacatctcaagattcaatcccttcccgattcgaagaaaaagcagggttttggggtcataaaagcttctgttgctaagacagaagttgcacttgtcagaataggcactagaggaagcccattagcactcgcgcaagctcacgagacacgtgacaagctcatggcttcccatccggaactagctgaagaaggggctatcaaaattgttgtaatcaaaacaactggtgataaaatactgagtcagccacttgcagatattggtggaaagggcttgttcacaaaagaaatagatgaggctttgataaatggtgatattgacattgctgtccactcaatgaaagacgttcctacttatttaccggagaagacgattctaccatgcaaccttccgcgtgaggatgttcgt

SEQ ID NO: 7687 - DNA, 811 bp, Gossypium hirsutum
  Clone ID: GOSHI-09MAY01-C74190_1
cccacgcgtcgcccacgcgtccggagcaagataatctacagcccgtgctagaaactgagagtgagagagaagaaggagagctggtccctgaggtagcagcagatactgaaggaggtaatgatgcgcacaatgtggtgggatcctctgagtttggcgatggtcaggcagagctagtttcatctcctctggcttcaccttcaggggttgatgatgaagctctagttaccacagcagaaggtgataactctcctgatgctgtaaatgatgagaagaatgaggaaggttatataggtgaagagactgttgccgaaggatctgaaaagtcgaatgatggtaatgagcagagtgtagtggagacggatccaatgcctgaagccgctgccgctgccgctgccgctgccgctggcactaatgagagtggcacaacaagtggtacacctgagggtgaggtctcaaaaaacgtaggtagttcaagcggtgcagcagcagcagaagcagaggatgtgaagcagatgtctcccataagtgggactgggagcgggagtggaggtagtgcaacctcaacgttggtaaatcttcaagagagagccagggaaagagcaatgttaagacaggcaggagtactgggttctactacttcaggtagaggtcgtggaagggttgcagtgcgtgctcgaggtgctagggggcgcagtgcgcgtggtggacgagcaggtgggggaccgcaaaattctgatcaacagtgacctatatttgttatgcttgagactggagaggtaagaatagagaagatgaaatgagatgagaggat

SEQ ID NO: 7688 - DNA, 752 bp, Gossypium hirsutum
  Clone ID: GOSHI-09MAY01-C74110_1
cgcggggttatactgggagggaaaaccaaaacatgtatgggggccatattatcaccatccatccattgtctggaagaaacactcagcactctagattatgctcatcgtgccaagaatatcaagaacaaaccagagattaaccagaagatgatgaaatctgctttaataaaagatctatattctgaaattgatcggctaaggcaagaggtgtatgctgcaagagagaaaaatgggatttatattccacgagatcgctatctccatgacgaagcagaaaagaaggctatggctgaaaaaatagagcgcatggaacttgtgtcagaatctaaagagaagcaaattactgagcttcaggaactctacaattcacagcagatggtgactgcagatttaagtgagaaacttggaaagacagagaaaaaactggaggaaactgaaaatgcgttggttgatcttgaagataaacatagacaagcaaatgcaactattaaagagaaggaatttttaatatctaatctccttaaatctgagaaagcgcttgttgagcgtgcttttgaactccgagaagagcttgaaaacgctgcttcagacgtctcagatttgtttgccaagatcgaaaggaaggataaaattgaggatggaaataaagcacttatccaaaagttccagtcccagttgacccagcagctggaaattttgcataagacagtggcagcttctgtgactcaacaagagcagcaactgaaagaaat

SEQ ID NO: 7689 - DNA, 916 bp, Gossypium hirsutum
  Clone ID: GOSHI-09MAY01-C74290_1
cgactgttttgtagcagagttgctctgttgctgagcaaaaagaacagctcaaaatcataaaaaaaaaaaactaatctttgtgtgcctagagtgtttaaaaaaaaagggccttgaatgagagagcagagagagtacaaaaaagtgttaaaacatacttgtggagaaaggcataggctgagttttcctctgctactcttgttgaaagagagatggatataggtgagaaggataaatatgagcttggaaagagggatgagcataacaacataaactaccaggcacctgttttgtcggccgcgtggcggttggggggggccggccgcgccagggctggtatgagtttagttcctaccactaatccactggctattgggtcttcttgtgcctccgcttcattggtagactcatttggttctagtctttgggagcacccttctaattcaccaaacatgggattttgtgacggtggggtgacggggcggtgcaagctcttcaaatgcaatggaaattggaaaaggtcttcctaactctttgagaactagtattgatagaccatttgatatgggttggaatgccgcaagtgcgatgttgaaaggcggtatttttttaccaaatacaactgggattctagcacagactctatctcagttgccagctgattcagctttcattgagcgtgctgccaggttctctagctttaatggggggaatttttgtgatatggtgaactcttttggtgttcctgagcctatgggtctgtatgcaaggggtgtggggttgatgcaaggacctgatgatatttttgcagtcaatgggatgaaatccgtatctgttatggaatctcagaaaagtaagttggatgccactgaagctactaggatgctggtttgcgagttgaaaataggctaaaacagcc

SEQ ID NO: 7690 - DNA, 542 bp, Gossypium hirsutum
  Clone ID: GOSHI-09MAY01-C75900_1
cccacgcttccgtgcttctgacggtttttgttgctagagaggggaaaatgctttccgattcattgctgattttcttagccagctcagttctgtgggcaacacaaggggtagtcattcatgcagctggtggtagctcagaatactatgaaccagatcccttcacatgcaaccgtcatccagacgttcctaacgcaacacagtcaccggtgccgccacctcagtttccgttctttcctcttaccaatggatctccaccttttgcaatgctttccacttattctgctgagcctactgaaattcagtcatgtgagtcacagttgcagtctgttgaagcttgcttccaagaccttgtcaatgtgtttttgactaacgagctgaaccttggacccgcatgttgccaatcaataacagcgatcaaaacaaggttgcttggatagcttatttccacccttcgttgttgacttatttggcctttacatcaaggaaacttgttctgctgcttcatctcttgcacttttttcctaggattttttatctctagg

SEQ ID NO: 7691 - DNA, 624 bp, Gossypium hirsutum
  Clone ID: GOSHI-09MAY01-C75890_1
gggaaaaaaagattggcagtgtgtaataaggatctgaattcttgcaaaacatggcattagaggcagtggtttaccctccggatcgatttacttacggtttcaaggacatcttccctgttgctggtggaggaggaggagcctggggatatgatttttgctttcaagatgaagataaagttcttcctgtgatccttgaaaccaacttacaacaacaagggagtcatgcaaattgggactcatcgtctacttcagtcatgcaacaacaacatgcaaaggaattatgggatccttactcttcttcgcctgaaacttgtactgtcgaccagtctctccctggtcctgcagctggtttccaagctccaatggaacccccaccagcttacacggcgaccaacggtggtggtagacgaaaacgccgtcgcaccaggagcagtaagaacaaagaagagctagagaaccagagaatgactcatattgctgctgaacgcaatcgtcggaagcaaatgaatgagtaccttgctgctattagatctttgatgcctgcttcttatgttctatggggcgatcaagcttcgattattgggggagccattaatttcgttaaggaattagagcagctgttgc

SEQ ID NO: 7692 - DNA, 440 bp, Gossypium hirsutum
  Clone ID: uC-gsflmaxxa039f01b1
tcccggggggcgccccgcgcgcgtttttctcgtgcgagtgaagcattcaaggcgttttctgctgcgccgccgtccgttcgccgtggtttcgccgcaaccagtggccggaggctcgccggactgggttttttaaccgtcttcggagcacgactcgaaggcaaagtaagccctcaccttcctatttcctttttgtaaatttaaacaccaaatcggaaaaggaaaataactctaaaatatttaaaaaactaataaacaccttaaaaagaaaacgatgttgatttattctctattgagtttctttgcattttctttgtctctctatttctgtctctggttaagctcacaaatccccccccttttttatagatttttcaaggctctaaatagccgacaaaataaaaaatctaaacaatataaagaatcccacttgtttcccgtat

SEQ ID NO: 7693 - DNA, 382 bp, Gossypium hirsutum
  Clone ID: LIB3493-007-P1-M1-E12
gaaaaaataaagaaaataaaaaatttcaaatgctctctgctagggttttgtcccaatcccttgcgccgccgtccgttcgccgtggtttcgccgcaaccagtggccggaggctcgccggactgggttttttaaccctcttcggagccgattcgaaggcaaagtaagccctcaccttcctatttcctttttgcaaatttaaacaccaaatcggaaaaggaaaataactctaaaatatttaaaaaactaataaacaccttaaaaagaaaacgatgttgatttattctctattgattttctttgtattttctttttctctctatttctgtctctgtttaagctcaaaaatcccccccccccttttttatagatttttcaaggcttt

SEQ ID NO: 7694 - DNA, 507 bp, Gossypium hirsutum
  Clone ID: GOSHI-09MAY01-C75710_1
caggacccaactcattgtccctcatcaaagacattgtcgaagccgttgaaggaagttgccataagacttttcgtcccttaccagagtttcaagttttcctcaatgatcttccaacaaatgacttcaattcggtttttaagaccttgcctgatttctatagggaccttaaaaaagacaaaactgaaaggtgcccggctattttcatagcaagttaccctggttcattttatggcagactattcccaaacaattgcttgcacttcatctattcttcttacagtttgcattggctctccaaggttcccccatctctttacgatgagcatggcaagtctatcaacagaagggaacgtttacatatcggaatcgagccctccaagtgtgtcccgagcgtactggaaccagttccaggtagatttttcattgttcctgaaatcacgatcagaggagcttgtctcatgtgggagatttgttcttactattttggtatgatattgctttatttac

SEQ ID NO: 7695 - DNA, 1077 bp, Gossypium hirsutum
  Clone ID: GOSHI-09MAY01-C75690_1
tgctcgttgtgattattggaatttgagtgatgcagcaatgagacatgagaatgagacttgtttgctatatgccgatcaattgaaacaaagatgtgtggagcagtttatagaagggagtttgaggattgaacagcttgctgatgttgatgggttatttgatttggtttcgaaagtgattggtgcagctgagcctgctaggatatacaatgtcaatctctcgattttcacttcgatcccggatttttggagtattggtcaggtttttcctatagtcccaattcaccgattggatgaaaagcccgaagtgaggggagtattgtctgatttaacttgtgatagtgatgggaagattgataagttcatcggtggtgaaactagcttgcttttgcatgagcttgaaggtaatgatggtggtgcaaatgggcggtattatttggggatgttcttaggtggggcttaccaggaggcccttggtggtgtccacaacctgtttggtggcccgaatgttgttagtgtgttgcaaagtgatggtccacaaagctttgctgttacgcgggtgatgcctggtccatcatgtgcagatgtccttcggatgatgcagcatgagcctgagctcatgtttgagaccctcaagcaccgtgctgaagaatttcatgtggaggaccatgacaatgatggcaccaaatatgctactttaatcagcagcgtcgctcgctccttccacaacatgccatatctcaaagctttatctccttgttcgtatgaggaagttcacaatgctgccgcggagtttggtgctagtgaggacgagcaatggtcttactgctacgcctgatgcagcctttgaagtgtcctcgttttaataaattctttctttttaccttctagttgttgatttccatcttttgtgagccaaagcatgtcagttagcataaagggtcattttgcattttcaagggaaggagagatgggaagcgaatcccgcacttttatgtaaattcgggttcttatactctcttgttcatgtttctttttccagtaaaactttttcggttctatagctaaaaccccaaaacc

SEQ ID NO: 7696 - DNA, 803 bp, Gossypium hirsutum
  Clone ID: GOSHI-09MAY01-C75630_1
cccacgcgtccgcccagccagtttacaagcatgaagaagcccttgaggaacagtgggaagagatgctgaaccttactactcgcctctgttggaatcttgtaaagaaggagggatatattgctatatggcagaagcccttggacaacagttgttatttaagccgtgaagccgggactagtcctcctttgtgtgatcaagatgatgacccagataatgtttggtatgttgacctgaaggcctgcattagtcgacttcctgagaatggatatggtgcaaatgttgctccttggcctgctcgtctgcaaattccacctgacaggctgcagagcatacaaatagattcttatatagccagaaaagagctcttcatggcagaatcaaaatactggaatgaaatagtggatagctatgtccgtgctcttcattggaagaaatttcaactgagaaatgtattggacatgagagctagctttggaggatttgcagccgcgataattcagaatcaacttgatgcttgggttctaaacgtggtccctattagtgggcccaataccttgcctgttatttatgatcgtggattaataggggtcatgcatgactggtgtgaaccatttgatacatacccaaggacctatgattttttgcatgcagcaggcctcttctcaattgagaggaaaaggtgcaatatgtctacaatcatgcttgaaatggaccggatattgagacctggtggacgtgtatacatacgtgattctctggatgttatggatgaacttgaagacattgcaaaagccatgggttgg

SEQ ID NO: 7697 - DNA, 664 bp, Gossypium hirsutum
  Clone ID: GOSHI-09MAY01-C75170_1
tcggttgactccagcagtgtccgtcacgtgggggggagctataataccatcgaagatatccaaaactggtcaaaaacatgatttggttccagtatcacaaacgccatcaagcaaatcatcctactcatcccgcagagtatctcttccattgccatcaaggactgcagccattgtgaccccgggtggagccaatgtcgtttcacttcccacctcgaactccccagatgtctctgtcaatgccccacgaattgacaaaattgcagagttccctttagcttcttctaacgatccggttttacccattcgtcaaacctcatcaacatcagccaagtgctcttcttcttcatcgattgacagtgctgaccgttctataacaaaggacaagtgtacagttcagattttggaaaaagctgtcgccacatcgaatgtcagcgatcaaagccttggagttgcacaagatgggagtgaaggtggctctgagcataaccgtgctgcagtatcaatccgttcatcttctgagtcacggcaacggcggttcgacacttcgtcgtaccagcagcgtgcagaggcattggaagggctgcttgagttcagtgcaaggctcttaaaacaacaaaggtatgacgaacttggggtgttgttgaagccatttggaccagagaaa

SEQ ID NO: 7698 - DNA, 578 bp, Gossypium hirsutum
  unsure (1)..(578): unsure at all n locations
  Clone ID: LIB3825-019-Q1-K6-C2
gttcgcctgcagatgttaaaagggcataggtgcaattgctatatctcttccattcgcctgtgtgataggcctcctttcatccatgacttcatcaacaatggctacacgaagatttgtctggatttacgcatcgattcaatttgttttggtggtcatctttgctcatatattttattcgcaggtgaaggtacaagcaatactatcaattctcctcgcaacgttttccgggtttggtgtcacaatgagtgggagttccatcatcgttgagatccaacgatgtagaagaagatggcagcgggctaggttagagcagcaacagcatagtccacaagtgataactcgagctccggtccaatcccctagagctgttaattcgcctcggacggatcctaataacgtaaaccggcaaaatacagaaactgttcggtgggagctcaattgatcgcaggttctccaacactacattacgaaatttatccagatttcatttaggccaaaatggaaaggggtatataatgaaatacatggttgcaatttttctttgttttaaaaaaaaaaaaaaacaaaaatactaatnn

SEQ ID NO: 7699 - DNA, 558 bp, Gossypium hirsutum
  Clone ID: LIB3584-035-P1-K1-E10
tttaagaatacaaagtattcgagctcgaaacggtgctcttcaggctgatgctcaagggtacagggtttggcaggaggtccctgttcttgtcattgtcagcatgcttgcatatttttgttttcttgagcagcttctggtcggaaaaatgggtaccggagcaattgctatatctcttccattttcgtgtgtgcttggcctcctttcatccatgacttcatcaacaatggtgcagcggagatttgtctgggtttacgcatcgattcaatttgctttggtggttttcttcgctcatatattttattctttggtgaaagtacagtcaattctatcaattctcctggcaacattttctggatttggtattgcaatgagtgggagttcgatcattgtcgaaatccttcgatggagaagaaggtggcaggcttggtggcagcagcgacatagatcgcaaacgacgactcatccaccaatccaatcccctagggctgttaattcacctcagacacacagaagtcctaatgtaagccagcaaaatgcagaaactttcaccgggagctg

SEQ ID NO: 7700 - DNA, 983 bp, Gossypium hirsutum
  Clone ID: GOSHI-09MAY01-C75380_1
gttcattgcttccatatgttaatgctgagggtttggacaatggttttcatgacatctacaatgaaactgcatctcttgggtttcatggttttgggcatagtccacaaatgcaacaaagagcttatgctccggtttcatcttatctgcctcctgttggggatcctatcgggctgtccaatgcaaggcatttcatcaccatagattcatcttatcaccatccatcagttccccgaaatattccacatgttacttcaaaggcccagttttctcatttagagtgtcctgtaaatattgagcaacaagtggttggaaaaagatttgggctgagaaccaattaccttcctcagttaggatcatttgatggaggaagaaacttctttggaagctccagcagtctttgctcttcataccaagggtctgatggttttgcggttggtggattctgctcagactggtcaaagccttttagtgggaagagttctctgtttcatctctcatatgcaccagcttctccagaacgggttggttcactagagttttcttcaaacggccctgcaatggtttcttttcaaaaagggccatttaatgggtttggttgtactagctccagctctagaggctacagtggtagcaaaagtgatcaacgttcttgtcatggcagtgtctctactaatagtttaggaataagtggtcataactggcctacgcttgctgaagcaagacaaggagggagctgcaatgacttctcctgcagttgtactgtaacgcttgatacactaagtgagcgtaataggggacctagggcatttaagccgtaaacacatattactacgaatggttttatttgttgattgcaacatgaatggcacaattaatgtcattaccaatggatcctacaaccgacagaattttttaactgattatgagggtgccaagttctttgtgataaaatcttatagtgatgatattgttcatatgttcat

SEQ ID NO: 7701 - DNA, 613 bp, Gossypium hirsutum
  Clone ID: GOSHI-09MAY01-C75350_1
ctttccttcgtttcctggttcagggctttctgttgtgttatattcgctctctcccccgaaataaagtgaataagaaagctgttttgatacactacactgctgaaaaccaaaaaaaaaaaaaagattaaaaaagatgtttggaagagcacccaagaagagtgataatacgaggtactatgagattctgggtgtttccaagaatgcttcccacgatgatttaaagaaagcctataaaaaagccgccattaaaaaccatccagacaaaggttggtgatcctgaaaagtttaaagagttagctcaagcttatgaggttttgagggatcctgagaaacgtgagatatatgatcagtacggtgaggatgctctcaaggaaggaatgggtggtggagccgcggctcatgacccctttgatatattttcatccttcttcggtggtagtccctttggaggtgctagcagtcgaggaaggagacagagacggggagaggatgtagttcatcccctgaaggtgtctctggaggatctttaccttgggacctcaaagaagctttcactttcccgcaatgtgatatgctccaagtgcagtggcaagggttcgaaatctggagcttc

SEQ ID NO: 7702 - DNA, 524 bp, Gossypium hirsutum
  Clone ID: GOSHI-09MAY01-C75310_1
aaaagaatggcaatttggaatctcctatggctttacatattaattctttatgttagcaatggcagaatggaagcgtctcacaaggtttatccacaatttcagtctttaagtgcagttaacatccgccaactccatcatactgcctttcactttcagcctcccaaaaattggatcaatgatccaaacggtcctatgtactataatggaatataccatattttctatcaatacaatcccaaaggtgctgtgtggggtaacattgtttggggccattcaatttcaaagggattgatcaattggaaagaacttgagcctgcaatttgtccttcaaaacattttgatatcgagggtgcttggtctggttcaaccaccattcttcctagcaataagccaatcattttatataccccgagttgattccaatggcatccaaacccaaaactatgcagtaccagcaaatttatctgatccatatttgcgtaaatggatcaaacctggaaacaatccactgattgatccttaaa

SEQ ID NO: 7703 - DNA, 350 bp, Gossypium hirsutum
  Clone ID: GOSHI-09MAY01-C76840_1
cgtttatgcctgtctctcgccaagcaagcttcaaatttactagaaaatgcctttcaataatataaaaagaaagcacacagatctgctattttaattccacccccaaaagaaaaagctatgtgttcactggtatcacttgtgcatacagcttagcatttctgaatatcaaaaagaaagaacaagaaccgcaaattctgcgatgagctttgagagggaagattttggtcttttagggcccttacacctaaatagtatagactgggaaaattcaaatcatcgaaggtctattgcagctaggttggtccaaggcacctattttttggaacgagatcgccaagaaaaaccgcaag

SEQ ID NO: 7704 - DNA, 629 bp, Gossypium hirsutum
  unsure (1)..(629): unsure at all n locations
  Clone ID: LIB3582-055-P1-K1-B10
tgcgttatgcctgtctctcgccaagcaagcttcaaatttactagnaaaattcctttcaataatatanaaagnaaagcacacagatctgctattttaattccacccccaaaagaaaaggtaaaaaatttcctccaattttccatcttttctttttattttccttcttaggtttattcttgatgaagtttttcgtgatatttgattgttttagccatttagctttgatgggtttacctttaagctttgatgggtttaccttatttaactgtcaagggtaacctgaagaaagatgcactgagttatggtggttttatgcttttcttttggattagttgattcttaattatgatgaggtggccttttgtatttatattccatgttatgtttcatagtctgtagggatgtggatggatctgtgtaaatttgtatgttgagagtagaaattagatacaatttttcaatatagattataccttatatggggctgattgaataaatattgaatcaaatttatggtttttgtgaaatttttttattactttttctgttctgattttgccttgaatatttgtgatttggcaacaactacagccatttcacttagatacaaactttaaaatacaagaatt

SEQ ID NO: 7705 - DNA, 817 bp, Gossypium hirsutum
  Clone ID: GOSHI-09MAY01-C76810_1
ttcaatgctattgaaagcatcccttgtgtcagtaagaaggctaaatgggctatcgattggattcagagttccacttcatttgcagagagacttgtggcttttgcatgtattgaaggaatcttcttttggggaggggggggtgcctttttctggcttaaaaagaggggactgatgcctgggttgacattctcaaatgagcttatatctagagatgaggggcttcactgtgactttgcttgccttctttacgggttgctgcagaagcaacttaaatggcacaaagtccatcatattgttcatgaagcagtggaaatcgagactgagttcgtgtgtgaagctcttccttgtgcacttattggcatgaactcgacactcatgagccagtacattaagttcgttgctgatcgtcttctggtttcattgggctgtcaaagaaagtacagcgtcgaaaatccctttgattggatggaatttatatctttacaaggaaaagcgaacttctttgagaggagggttggtgattatcagaaagcatctgttatgtcaagccttcaaaacggaggtaaaaactacgttttcaaactagacgaagacttctaaatcacccccatcattctagtttccattttgttgcacactgcaagtattatatagatgctgcctgttattggtatcaaaatattctttgtagtaggtctgtttgtctataatatcgtttcattatgccataaaatccaagacatcagttcactgcctgcaacaataaaagcttaaatcatgtatgatgtatattatgccatggcatcattagactttt

SEQ ID NO: 7706 - DNA, 695 bp, Gossypium hirsutum
  Clone ID: GOSHI-09MAY01-C76720_1
agttcattttcagccttcctatttgttcttctggctattttgatcaccttgggtgaacaaggtgtagcagctggccgatggtggtatccatcatcgccaccacctccgccgcaaaatggttgggtttggacatggccatggcctgtgtatagctatccaccacccccaaccgccgtaaagccaccttcacatcatggtcaaaaatctcctcctcttcctcctcctcctcctccttctccgcagccaccgatggttaatggcaagtgcttgggaacaaccctggcgagcaaactaacctgtcttcaagatgtcataagttcgatcctgatgtttagaccttacgttagtccagaatgttgcgctgctgttcaagcgactcatgaagattgcttgaacactattttcgacgagtttaataatccattcctcgctcctctggttcaacaacagtgttttcaaacacccaatcccaatcccaatcccaatcctaagcctaagccccaccatggcggccaccaccaccatggccacccttaataagtttccaccataggtgattagatttagctgttaataagagttttaatggaataaatttatatgtaatctagattgctctattggttctattaggtttgtttagatttgaatatgataatcttttaaatacaaatttatttactgttttcatggct

SEQ ID NO: 7707 - DNA, 743 bp, Gossypium hirsutum
  Clone ID: GOSHI-09MAY01-C76340_1
atttcttcacctctaagagtttaccgatacatatatgtaacatcttcaatctttgtttcccaaaattaccatgccaaagccattccatttgttggtcttcttccttgttgctctttgtctatgcaccagttcaaatgccagcagtactaccaatgagttcctagaaactgagtgcttgaaagtaccagcaactgagtttataggttctttgaaaaccaccattgatgctattcgaaaagctacctccgttgtttctcaatttggcggcttttttcatgattttcgtctctctaatgccatttctgattgtcttgatctgcttgactcttctgctgatgaactaagttggaccatgtctgcttcccagaatcctaatgctaaagataacagtactggtgatctaagttctgatttaagaacatggttaagtgctgcaatggttaaccaacagacatgcattgatgggtttgaaggtacaaatagcatggtcaaaactgtagtatccggtagcttgaaccaaatcacttcactggttcgtaatcttctcatcatggtgcaccctggtcctaattccatgtccaacggtacccgtaatggcagccaaaaaggtggtggtggtgggggtcatccagccaaaaccggtttccggtatggttcaaaagggaggatcggagattgttgcaaataaatggggtaacagcaaatgttgtggtggcagcaaatgggagtggaattcacacgcc

SEQ ID NO: 7708 - DNA, 926 bp, Gossypium hirsutum
  Clone ID: GOSHI-09MAY01-C76370_1
acgcgtccgtttgaagttccggcttcacgcgcggcgggggatgctgccgaattacgtggtggtggagcagcgttacttcgacgtgaaggagtttccggcgaacgacgaccacccgtcgcatgacgtggcgcgtgggcagaggttcgtgaaggaggtgtacgagatactgagaagtagcccgcagtggaaagagatggcgcttctgatcacgtacgatgagcacggagggttttatgatcacgttccgacacctgtctcgggtgttcctaacccggacggaataattggacccgacccgttttatttcaagttcaataggcttggtgttagggtccccactctcttggtctctcgctggatcgataaggcaactgtgatccacgagccaactgggccaacaccgtcttcccaatttgaacattcttccatccctgcaactgtgaagaagctcttcaacctgaattcaaatttcctgacaaagagggatgcctgggctgctacatttgaaaattattttaagctgcgtactactccacgaactgactgtcctgaaactcttccagaggtgacgacttcattgaggccatgggggccacaagaagatgctagcctctcagaattccaagttgagctgggtcagcttgcatcacagctcaatggtgattatgtcctcaatacttacccttctattgggaaaagcatgcgagtaggtgaagccaaccgatacgtagaagatgcagtcagaagtttcctgcaaccggataggctgctataaaatccggagctaatgaatctgcaattgttacaatgaagccttctcttaccatcgaatcgaagatcggagtcacatgtggaaaccctatagtccttccatacgatcatctaccgccctaatgtaaatatatttctaaattatttcattaccc

SEQ ID NO: 7709 - DNA, 585 bp, Gossypium hirsutum
  Clone ID: GOSHI-09MAY01-C76360_1
ggaattcccgtccaggttcttgaccgtatgatcgcttccatcagagccttccatgagctgcccaccgacgtcaaggccagattctaccgccgtgacgccgaaaccggtgtatccttcatttccaacgttgatttgttccactctaaagccgctagctggagggatacactccagataagactaggacctactctcccggagcttgagcacattccggaggtttgtagagacgaagtggttcaatggaacttacattcgacaacattaggagagcagctgatggggttgttgtcggaagggctgggattggataaggataccatcaagaatactacatgtttggatgccagagtaatggttgggcactactatccatgctgcccccagcctgatctgccggggggcatcgtatcacatacagatccgggagtgttaactttgttgctgcaggatcacactggtgggctgcagattaagcatgaaggggagtgggtggatgttaagcctgttcatggagctcttgttataaacattgcagatattcttcagataatgtcgaatgatgagtataaaactgtggagcac

SEQ ID NO: 7710 - DNA, 698 bp, Gossypium hirsutum
  Clone ID: GOSHI-09MAY01-C76330_1
gtttgggttctggggattttgactttcccgggaaagttcgggaaaaataagagagatggttagaataaggaaaataccactggacttaacgcttactgagtttccagctctggtttctagctggtgggacgaagtcaatgaatcgactcactggcaagatggcatcttttacacactttgcgccgcttatgccttagtttcctccattgctctgatacaattaataaggatcgaattgagagtacccgaatacggttggactacgcaaaaggttttccatcttatgaatgtcattgtgaatggagtgcgcgccgtcgtgttcgggtttcacaaacaagtatttttattgcatcccaagggacttatattcgtactcctggatcttccaagccttctgtttttctccacgtatccgttactagccctgttttgggcagagatttttcaccaggcaagaagcttaccaacggataaactcctaatttcctatgccgcaatccatggtgttatttacattcctacagttcgccttttggtgtttccttggaataaacaacaccacctggttgaattccaccgaagaatttttttttgccccgggccccttttattcctccataaggattcttttttttttggaaggatgatatttttttcatgcctaaacctttccccccactcaattcaaaagggagtat

SEQ ID NO: 7711 - DNA, 478 bp, Gossypium hirsutum
  Clone ID: GOSHI-09MAY01-C76280_1
gtgatcgtcgattcaagaggtctcctgtcaggccttcttctacacatctgtccagcatcagcgacttctccattgacagtgcacagaaatctcataaagagcaggactatttcagagaacgtttattggccatggaagaagaaacaaagatgctgaaagaagctttggcaatacgtaacagtgaactactggcttcgaggaacctgtgtgcaaagacatccagcaagctccaaactttagaagcacaacttgccatcagcaaccaacaaagaagcccttcaaaaacaattgttcagattcctacagaggtttactccagccaaattgctagcaatccaccgagtatgacttctgtgtctgaagatggaaatgatgatgatagaagctgtgccgagtcatgggctacagccttgatctctgagctctcacatttcaagaaagaaaatagcactggaaagtcgagcaaatctgaaaatgt

SEQ ID NO: 7712 - DNA, 756 bp, Gossypium hirsutum
  Clone ID: GOSHI-09MAY01-C77890_1
atgatataatcaagctttttgatagcatcgagaaatatgatgatggggccctttactttgatgataaacttgttgatggtcatgaataccaaggtcctgtatcaaccacctcatctgttcttagaggcctaacagcatttgctgcagtgactgctgaaaatctcaatcttccaggggacaaaattcttggattagctaaattcttccttggtattggtgttcctggtgatgccaaagatttcttcaaccaaatagactccttagcttgtttggaaagcaacagggtttctataccacttatcttatcgtttccatcaacggtgctttcattgactagaaaagactcactcaaggttggagttagcactgtgcttggttcagaagtaccatctctaacagtaaagcttgtgggagcttttagttctggttcaaaggatgcttctctagttgaaagccaggaacttaattttgacaagacatctgggctacatatcttgaacgacttgccgaagagtattgatgttggaagttacacatttgtttttgagattgtgcttcatgaacctaagcatgaagaggtttattttaagggaagcccaaacaaaagtcccaatatctgtcactggacttatcaagattgaaaattcagaaattgcagttcttgacagtgatcttgggagtatagaatcgcagaaaaagctagatttagctgggaaaaaatgctatatcattatcagcaaaaccatcttcagatgc

SEQ ID NO: 7713 - DNA, 632 bp, Gossypium hirsutum
  Clone ID: GOSHI-09MAY01-C77880_1
tgtttgcaatggttattctgtttgctcatatctgttatacagtacttgctgtgagcccaattctctcggtcctcctatcgtccttcactggatttggtattgcaattagtacaaattcagttcttgtggaatacctcagatggagaataagaagacaaacacaaccacgacaacagcaaattaacggaaccttgcagcaatgaccagctaaggcgtcccaccctacatgcagaactgaccagcaaaggcggcaaccagaagactgccgccagtatattgatagtcgtgatattacattcagtggcagtaagaaaccattacaattcatttttgtcttaattttcagtttgcatatgctacttgacatttaggcaaaaaactttgaagtgcactttgagtttaggtgcttgagcttgaaagttgatcagatgtgaagacatgagaagcagctctttggtccgtaaaagtaccattagccccttgttctaagatttagattgcattttgcccattctactcaaaaattggaaaaattaatttatgtccaattttttaaagagcaaattggtcattctgttaaaaaattttcctatttctaccagtaaaagttgggccatatattttcagaatgg

SEQ ID NO: 7714 - DNA, 696 bp, Gossypium hirsutum
  Clone ID: GOSHI-09MAY01-C77840_1
cttgatacttgcttaatttgctcagcttttcatgtttgctttgtacttcagctctctgaagccacgtctcatttacccgtttcgcttcgggtaaattttggtgtataaatttggaaaaaagaaaaagttagaacaaatttggggattaatggaagttgatcttgaacccaaggtgttagacacttcatctatgacggagaagggatatgaagaatttgggtgttcacactatagaagaagatgcaagatcagggcaccttgttgtgatgagatatttgattgcagacactgccataatgatgccaagaactcaattgaaattgatccttttgatcgtcatgaggttcctcgccatgatataaaaagggttatttgttccttgtgtgacagagaacaagatgttcaacagcattgcattaactgtggggtctgcatgggaaagtatttctgttcaaaatgcaactttttcgatgatgatgtctcgaaaaaacagtaccattgtgatggatgcggcatctgcagaattggtggagcagagaactttttccattgtgataaatgcggatgttgctattctatgatgatgaagaactcccacaagtgtgttgaaaaagccatgcaccataattgcgccgtttgctttgagtttctctttgatacgacaaaagagataactgtcttaccatgtggacacac

SEQ ID NO: 7715 - DNA, 570 bp, Gossypium hirsutum
  Clone ID: LIB3825-027-Q6-K6-F11
gcttatttgctcgcttttctgtttgctttatacttcagctctctgaagccacgtctcagttacccgtttcgcttcgggtaaattttggtgtataaatttggaaaaagaaaagttagaacaaatttggggattaatggaagttgatcttgaacccaagtgttagacacttcatctatgacggagaagggatatgaagaatttgggtgttcacactatagaagaagatgcaagatcagggcaccttgttgtgatgagatatttgattgcagacagtgccataatgatgccaagaactcaattgaaattgatccttttgatcgtcatgaggttcctcgccatgatataaaaagggttatttgttccttgtgtgacagagaacaagatgttcaacagcattgcattaactgtggggtctgcatgggaaagtatttctgttcaaaatgcaattttttcgatgatgatgttagtggtttgcttcatattactattcaaaatcatgcaattcaacaaaattggcttccttataatgggaaaacattttcttttcttgaattgcaaggtctcgaaaaa

SEQ ID NO: 7716 - DNA, 552 bp, Gossypium hirsutum
  Clone ID: AI054733.1
cttcagctctctgaagccacttctcgtttacccgtttcgcttcgggtaaactttggtgtataaatttggaaaaaagaaaaagttagaacaaatttggggattaatggaggttgatcttgaacccaaggtgttagacacttcatctatgacggagaagggatacggagaatttgggtgttcacactatagaagaagatgcaagatcagggcaccttgttgtgatgagatatttgattgcagacactgccataacgatgccaagaactcaattgaaattgatccttttgatcgtcatgaggttcctcgccatgatataaaaagggtaaaatttttttaatgtttttcttgttgtaattttggaccctttttttcccctcattttcttaagtgagtcatagctgatgtcattatattcaataaataaatttttttttcaggttatttgttccttgtgtgacagagaacaagatgtaagtatttgaaaaagtatttaaatggtgatagagagaatgagccgaagaaaacagcagtaaaatactaacttgtcggatg

SEQ ID NO: 7717 - DNA, 491 bp, Gossypium hirsutum
  Clone ID: GOSHI-09MAY01-C77520_1
tgattttccagttatcttgccaaaagggaaactgttcaaacgtccattagatgaaccaattacattgccttcttggttgtccgaggaagaagctaattactatgtcaccgtattccagaaaactggctacaccggtgcactcaacttctacagaaactttaacagaaactgggaactattgaaaccatgggtgggtagtaagatcaaaacaccagccaagttcattgtgggtgataaggatttggtttaccatatgcctggtatgaaggattacattcacaatggtgggttccaagaagatgtgccatctctgcagcaagtggtggtgatggaaggtgttgcccatttcatcaacatggagaaaccagacgagatcaacatatacatttctgacttctttacccagtttgtttgaaataaataaataaataaataaaataaatccatgtattccaagtcttttgtgttataataataaaaaaaacactttg

SEQ ID NO: 7718 - DNA, 640 bp, Gossypium hirsutum
  Clone ID: GOSHI-09MAY01-C77170_1
agcaacacaagtacaatgcaggtctccaaggggaggaagaaattcaagtctgaatttaacgtgcttcgaacaggggaacatgagaacttggtcatgctggttggttctggctctgaaggaaaccacaggctactggtctatgaatatgtctgcaatggttcacttgaccttcatttatcgagtaaggattcattcaagacaactctttggttttttactccgtttttgtgcaatgaaatatctaatcgatgtatgcatgtatgtatttcatttcttgctaaattgattgcagagcactcaagaagacctcttagttggcaaaagagggtgaagatcgcactcggaactgctaagggcttgaaatatttgcatgacaacagacatcatccatcgagacatgagaccgaacaacatccgtgtaacccacgaatttgaaccattgctaggggtctttcgcttggcaagaactcaacatgaagactcagataagtcatcggagacgatgacaagagttgttggaactttaggatacttggcaccagaatacgctgaatgtggcaaagtgtcaaccaagacagatgtttattcctttggagttgtgcttgtgcagctaatcactggaatgaagaccacagaccaa

SEQ ID NO: 7719 - DNA, 554 bp, Gossypium hirsutum
  Clone ID: GOSHI-09MAY01-C77280_1
tttgatgatcccgccgaagataatcagtccgaggatgagactgattcacagtctgggaacaaggaaaccgaatctgcttcggacagtgaaaattttgcttcctctatggactataatgcggtagacaagggaaataaaatggtggtatcggattctgctatcgagaaaaatactgaatcccgtgaagatggtgatatagatatggatgctgtagatgcagtcgacaatgttgaagaaactctatcaggggacaggctagctgaatcatctgtcggagaatctgatgaacgtaacagtcagagtgatacgacgagtatgggtgttaatcaagttgataacgtagctgtttccgatgaacttggagttcgagtctcagttaaggaaaacacacttgccggttccgagtctggggagacgttagcaatgtcggcttcccccgagaaggctttattctctggtacgcgtacaaattgtgatgcaatagagatggaaactaaatcaaacgttggatcttcgcaaagatctttctggttattgtgaggaacctaatgggt

SEQ ID NO: 7720 - DNA, 646 bp, Gossypium hirsutum
  Clone ID: GOSHI-09MAY01-C77260_1
gaataacaagcacttaggacgaccctggctgcgtgttccaaagtacaccaagatgaactcagctccgccggtcccaagctaaacggtcctacaatgccgctaatcggactgattcaggcactccagtaagccaatccccatagatctttcgtctccagccctctaatgctagtgtatgagccgcctcattaatcaatcgagtcactgcaagcaaatcgcctttcacaaccagtcgacggaaacacatcctacccgcgaagattagcgccctttcacaagccctagcttctgccacaaacgcatcggcaacatcattaaagagataagtttctacccctacaatctcacctgtaaaatttctggctagaattgctgttacagcaagcttctcctcctttaggaatgacgcatcaaagtttaacttgataactcctgggtccgggggtctccagatctccttaatcaggggtctaggaggggaacagggagacataaaattaagacaaatgttgtgcacatatccccgaataaaccctagcacctcctacatcgagaagtaaaccccttcatgaactagcttatttctatggaaccaaagactccaaatggagatcacgatgatttgtttttgttgttcatcagctgc

SEQ ID NO: 7721 - DNA, 930 bp, Gossypium hirsutum
  Clone ID: GOSHI-09MAY01-C70860_1
gcgtttcaaaaaacaaaaatctctgaaaccccctctccgtcctttggcctgagttccaacaacggccgatgaccaccgttcacgcgcctcacgcgccatcgtacacggtggtcggaggttctaaatatctcccctcccccgcctccgcacaggtataatttctcctctttatttttaaaagtattttcctgtattacaactcaaaaatgaactgttttctctttgcttttttaaaatctgtttctggatcgtttgttgtattaaaaatacatgtatgtatataataaaaaagaaagaaaataatagagaataaaaatagtaaaacctttgaatctgctgttttcgtattgaacctatgtattttttattgcttctttgtgtgtatttttcagaacataacttttacaagtgaaatgaaaggctttatagccttggtcccttacatattctgggaaagaaatctaagatttctttccattctatgtcttctgtatatttgattgatatattgtgattttcttgccatttctgctttgctttttttcgcgtatcttctgtttgtttccttttcttgcaggtatcatcgaggaatccgacagtgaccgtgctggtgtggattcgcgcgctgatcatggaggcagagtcatggcgctgatggagggcagctgaaacaacgggagttgaagaggcgcaacccttaggctgattgcggcgcgaaccctagctagggtttctctgctgctgaaaataagttaggctaattgggccaattaaatattgggctagtttagtatatctggggtagggtataactgggtatggtttttgggtcaagggtgtaaacgggcttagctgaattgtttcgattttgggcctacggtttgggctttgtagcatgaactgtttaaataaacaaacatttatttattt

SEQ ID NO: 7722 - DNA, 584 bp, Gossypium hirsutum
  Clone ID: GOSHI-09MAY01-C70180_2
atccccctttgcttgagagagtttgtgtgttttggttgtttggactgtcggctttgattttatgttctccttaatcctttgctggtcttggcggagattgtaagcttgaagatgcaaccaacacaaagtttaaatttgggcacttgaactcaaagaaaatatgttgttatcagttggctataagcaaagcgatggctaaacttactgatcatctatcagatacattatgaggatcacagagcaatgggaagtggtgttttcccctggaaatgaaggagagacagcggtggagagctgaagaagacgctttgttgtgtgcatacgtaaaacaatatggtccgagggagtggaaccttgtgtcacaccgcatgaacacacccctgaacagggatgcaaaatcttgcttagaaaggtggaataactatctcaaacctggtatcaagaagggatcccttacggaagaagagcaacgtcttgtaatccgtcttcaagctaaacacggcaacaaatggaagaaaattgcagctgaagtccctggtagaacagctaaagactgggcaagtggtgggaggtattcaaggaga

SEQ ID NO: 7723 - DNA, 596 bp, Gossypium hirsutum
  unsure (1)..(596): unsure at all n locations
  Clone ID: LIB3543-036-Q1-K1-F12
ccccgcgtccgctngaaagtgcttctgagcggagcagaagtcgagtctacatcatactcgtctccttgtgccgcgaaacgcggactatagtccccccccctcccccttctttcttttctttttttttttttctcattttattatctttctccccccatccatccccctttgtttgagagagagtttgtgtgttttggttgtttggactgtcggctttgattttatgttctccttaatcctttgctgttcttgtcggagattgtaagcttgaagatgcaaccaacacaaagtttaaatttgggcacttgaactcaaagaaaatatgatacattatgaggatcacagagcaatgggaagtggtgttttcccctggaaatgaaggagagacagcggtggagagctgaagaagacgctttgttgtgtgcatacgtaaaacaatatggtccgagggagtggaaccttgtgtcacaccgcatgaacacacccctgaacagggatgcaaaatcttgcttagagaggtggaataactatctcaaacctggtatcaagaagggatcccttacggaagaagagcaacgtcttgtaatccgtcttca

SEQ ID NO: 7724 - DNA, 871 bp, Gossypium hirsutum
  Clone ID: GOSHI-09MAY01-C70120_1
gattctcctcgcatttttttttcttttttcactttgagagatagagagagagagtgaaaaccgcttggcaacgcggtcgactcctagtaggcgcctccacttcagattcagatcctccacgtgttccaacctggacccgatctgatccatctttttttttttaaatccaaaattctcgagagagatcccgtttttgttcctttcgtttaaatttgatcgaaaatggtgcggtttttgatcattttatcagctcaggacccggcgcccgtcctccgggggagcgggtcattgttggtggcttttgaagacctggctctaagaagccataagtagacatagatggtatgcaacagttgcttaaagagtgtaattgttcaaactgggcagataggaacaatattaacccggaaaagggtgcatttacgaagggcggggaggactttatatgccggtggtgctggattaacttttttgtggaatcgtgaatttcgaacaagtgctaagatgatggtggattcgggcgcagcagcaagccagggtcccatagtccataaattcccagagaaagatgatgctggatatgttagtggagggtggaaaagtgaggatggaagattaagctgcggttattcaagtttcaggggaaagagagcaaccatggaagattgctatgatattaaaacttccaagattaatgggcagacagtctgcttgtttggaatctttgatgggcatggtggttctcgtgctgctgagtatttgaagcaacacctttttgagaaactaatgaagcatccgcagttcatgaccgacaccaaacttgccataagtgaaacatatcagcaaactgatgcagatttcttggattctg

SEQ ID NO: 7725 - DNA, 586 bp, Gossypium hirsutum
  unsure (1)..(586): unsure at all n locations
  Clone ID: LIB3828-027-Q6-K6-D6
naatgtaactnaaaaatttaacctcgaaagggtgcttttataagatttttgaaggagtttatatgcctgtgctggattaacgttttcgtgaagctgtgaattttgggtgggtgctaggatgatggttgattcaggtgcaacaacaaaccagggtcccgttgttgatatgatatctgagaaagatggtgatggcggatatgttactggagggtggaaaagtgaagatggaaaattaagctatggctattcaagtttcaggggaaagagagcaaccatggaagatttctatgatattaaaacttccaagattaatgggcagatggtctgcatgtttggaatctttgatgggcatggtggttctcatgctgctgagtatttgaaacaacacctttttgagaatctaatgaagcatccaaagttcatcactgacaccaaacttgccataagtgaaacatatccacagactgatgtagatttcttggattctgaaagaaatacttatcgagatgatggttcaactgcttcaacagcagtattggttggtaaccatctatatgttgccaatgttggagactcaaggactata

SEQ ID NO: 7726 - DNA, 563 bp, Gossypium hirsutum
  Clone ID: LIB3543-012-Q1-K6-E6
ccccgcgtccgccccgcgtccgcccacgcgtccgcacacactatcactttccactcctctctctctctctctctctgtctggatatccgtctactaattttcttcacatcgctttcctttttttcctccactttctctctctagggtttcagattctcctcgcgttttcttttttttttcttttttcaatttgagagatagagagagagagtgaaaaccgcttcgcaacgcggtcgattcctagtaggcgcctccacttcagattcagatcctccacgtgttccaacctggacccgatctgatccatccttttttttttaaatctaaaattctcgagagagatcccctttttgttcctttcgtttaaatttgatcgaaaatggtgcggttttgatcattttatcagctcaggaaatgaatcaaatactctgaaaaagcaaatcattgttggtggcttttggaagatctggctttaagaagccataagtagacatagatgggatgcaacagttgcttaaagagggtaattgttcaaactgggcagataggaacaatattaaccc

SEQ ID NO: 7727 - DNA, 645 bp, Gossypium hirsutum
  Clone ID: GOSHI-09MAY01-C70080_2
cctctgtgcaaactccccccctgccgccaaacgttctagggtttgaaatcttatcttcctcaatggcggagaaagaggcgtcgccggagcccgccgaggccaacccaccaactgaagacatggatctcgaaaaccttgactcctccgcccaaaaccctaatgccggagacgacgccaacggtgactccaaatcgaagcgcgggagagaggaagacggcgaagaaaccgaagacgtttccaaaaaaacagaaactggagaagtccgtagaggaagaaaggttggagaagaagtcagatgagtcaccggagtcgggtcgtgtacggctcggtccgaaggagttcgggtcgtcttcggagatgttggattacttttgctatttgctttatcattggggtactcaactgaactttaacaagtatgaacatatggtattgctggacttgcttaaaaaaggtcatctagagcctgagagaaagattggtggaggggtcaaagctttccaaatccgtaatcatccccagtggaagagtaaatgtttctttgtgattagggatgatgaaactatggatgattttagcttccgcaagtgtattgatcatatccttcccttgcctgaagatttgaagggaaagagcaattcaaac

SEQ ID NO: 7728 - DNA, 740 bp, Gossypium hirsutum
  Clone ID: GOSHI-09MAY01-C70080_1
ctgtcgccaaacgttctagggtttgaaatcttatcttcctcaatggcggagaaagaggcgtcgccggagcccgccgaggccaacccaccaactgaagacatggatctcgaaaaccttgactcctccgcccaaaaccctaatgccggagtcgggtcgtgtacggctcggtccgaaggagttcgggtcgtcttcggtgatgttggattacttttgctatttgctttatcattggggtactcaactgaactttaacaagtatgaacatatggtattgctggacttgcttaaaaaaggtcatctagagcctgagagaaagattggtggaggggtcaaagctttccaaatccgtaatcatccccagtggaagagtaaatgtttctttgtgattagggatgatgaaactatggatgattttagcttccgcaagtgtattgatcatatccttcccttgcctgaagatttgaagggaaagagcaattcaaacagggcatcgggtggcggtggcagttggagaggacgtggtgggaaaggaggcggacgaggccgtggaaaaggtggtaagtcaagaaactaaggtggtagtagtagttaaatggagttgaatttggattaaactctttggtaggaccagaactgctttggtttgattatatatctgaccctaaagttccaaattgaattgcactctggaagttatggatattgatgttatcagtgctctttttttatggcatttatat

SEQ ID NO: 7729 - DNA, 779 bp, Gossypium hirsutum
  Clone ID: GOSHI-09MAY01-C70050_1
catgcttaagctcttaatcatctgattcttcatcatcaacaactaaaagacagtttaagacaatgtaccctggaggttacacggctgaaattacgagcttatctccaaaagctaccgagaaggatctttgtgactttttcgcatactgtggtgcaattgtgcatattgaaattatcagatgtggcgaatatgcatgtacagcttatgtgacatttaaagatgcctattcgctcgaaactgctgtcttactcagtggagctacaattggtgatcaatccgtatgcatatcaaagtggggttcgtatggtgatgattcatatccttgggatagttctacatggaagactgaagaggatactagctcatcggttactcatatgcaccaatttgtttctagtcctggagaagcggtgactgttgtcaaaacaatgctagccaagggatatgttttaggcaaagatgctcttatcaaggccaaagacttagacgagtcctatcgggtctcggctactgcagcagccaaagttgctgagcttagcaatagaatcggcctcaccgataagattaacactagcatggaaactgtaaaatcagtggatgagaagtatcatgtttcggatatcaccaagtcagttgcatcagttaccgggactgcagtggtaacagctgcaagttttacagggagaaccgctgtagcagctaccaacgccgtagtcaatagcagctattttgccaagggagcactttgggtttctggcatgttgaaccgtgcagctcaa

SEQ ID NO: 7730 - DNA, 860 bp, Gossypium hirsutum
  Clone ID: GOSHI-09MAY01-C70370_1
cccacgcgtccgcccacgcgtccgcccacgcgtccgcagatttatgcttttagttacggcaagcattcttgtactggttttcttctccatatcaattgcgcagcctctgctctcacaaatcagcttgagaaaaagggaacctctagaactcaaaacaatgggtcaagttctgggcataccagaaagtggactgctattacaaagagaacaagctgttgacattgatcctaatgaaccattggataagcttcttctgaacaaacggttccgtcagtcttttatggcatttgcagacagttgtttggctggggaaagtgtacatttctttgatgaggtgcatgagcttggcaaaattccgatagatgaccctgtaagaaggatctacatggcacgacatatcattaataaatacataattgcaggtgcagcaatggaagttaacatatctcatcgaagccggcaagcgattttggccaccaccgatctaacacaccctgatctcttcaccaatgcactacatgaactgctacagttgatgaaaatgaacttggcaaaagatttctggtcatccatgtacttcctcaaactcaaagatgaaaccagtgtgagatctaatggctatgaaatggaacagatgagtggagcatatagtttctcacccaggttgagttgtgttaatgctattgatgatccctttcaccaggaccatttttcaagtggctcaagccaagatgttcatcatccctaccaataatggaagtaagctttgtaattatcattctatttgaatgtaaattcacttcacaaatgagttgaatatttcatgtatgtttttcctttacttttttcgtttattcatc

SEQ ID NO: 7731 - DNA, 494 bp, Gossypium hirsutum
  Clone ID: GOSHI-09MAY01-C71970_1
gtgatcaaaccagatataacagcaccaggagtcgacatattagcagcatggccggtcgaaacgagcccaagcaggcttgagtgtgacaaaagacgggtattattcaacataatctccggtacatcgatgtcatgcccccacgttagtggcattgccgcgctgattaaatcgaagcacaaagattggtccccagcagcaatcaaatctgcactcatgacaactgcatatacattagacaacaaaggaaaaccaatagccgatctcgcgttttacacctcggcagcaccttttgctatcggttcgggtcatgtcgatcccatcaaagctaccgatcccggtttaatatacaacattaccgccgaggattacataagttacttgtgtagcttgcactattccgattctcaagtatccatgttcgaagaaggttatcaatgtacgccgactgaacgaaggatgcaacccggtgacttgaattacccgtctttcgctat

SEQ ID NO: 7732 - DNA, 552 bp, Gossypium hirsutum
  Clone ID: GOSHI-09MAY01-C71570_1
gaaatttagttttatactcccgtttcctcttttttgtctctcgggcagctccgccgctggagaatccaaggttcttcggtttccagcggcggagcaccacacgttgtgatcggagactaaaaaacttattgttttttttcttcttcatttttgtttttcttcgtttctgggtttcaaactagaaaagcctcgtaggggaaaatggaaaaaagaacttgaaaattttcccttttttttcaataagggttctccgttccagatctacgaaataaaaaaagggggaaaaaggaaaggaaaggaagctggaaggaataaacgcatggattcaccaaacagtcttagaaccgaggacttagttcggtgaaagcccttcatcggagctcaccaccatttgtttatgcatgcacgtgaaagtaaacggcagtggagcaaggccgagggtctacctttaacggcgtgttcaggggcttctcttttttcaagggctttttttttttgttttttcttgcaggttattccgctttttaatactcgtattattgttaatctccc

SEQ ID NO: 7733 - DNA, 548 bp, Gossypium hirsutum
  Clone ID: LIB3582-050-P1-K1-F6
ccgagattgcatattaatgcaatgatgtacttaggtttttcttcttcctcttttgagtgcttttttctagtgcatgaaaaaccttaggcttggaagaaacaaacaaataattgccatattgtctggtgttactggatttagctctcaaagcacttttcaaacttaaattggcaatttggttattgtgtctgcttttttttcttttttttttgatagagtggtattaaacttcattagctgtgattaggaaatattttaattgtctaatatatgttttgcatctttatatttagatactatttttttttcttttgtgttgtaaactactgaatattttatccttgtagttgagtgtacctggatgtacaagactaagtattgagggcattttgaatagcctaaaggctctgaagtctgtgggcagacaaggggtgaagcatttgaggattgctggggtgtatggtgtaacacagaagcattttgaagagctgaagtttgtattgggcatggacaaccaaattcaacagattgtgcacaagccacatttt

SEQ ID NO: 7734 - DNA, 539 bp, Gossypium hirsutum
  Clone ID: LIB3826-002-Q1-K6-E4
caggattgtgaggtttgttctgaggaacatgaaggagctccccatgaagctctgaattttgcctttggttatctgggtctgcgggatctatttgctgttgaaagtgtttgtatgtcactgcgatctgtagttcagaatgatccccttttatggaggaatattcacattgatcaaccactaagcgagaagataactgatgatgttcttttacaaataacaaggagggctcaaggtagcttacaatgcttgagtctggtagattgccaaaggattaccgatgagggccttcagtgcgtggttgaagaaaatccaaagctagtcaagttgagtgtacctggatgtacaaggctaagtattgagggcattttgaatagcctaaaggctctgaagtctgtgggcagacaaggggtgaagcatttgaggattgctggggtgtatggtgtaacacagaaacattttgaagagctgaagttgtttttgggcatggacaaccaaattcaacagattatgcacaagccacatttttataacagaagaat

SEQ ID NO: 7735 - DNA, 593 bp, Gossypium hirsutum
  Clone ID: GOSHI-09MAY01-C71460_1
gaataataataatcatcatctcaaccagcagcttcaacttcaagtcccatttccccctccttcgacttctttcacaatggacacaaataattatttgccaccattgatagataatatggaaaccatggtgcctattgaagtccaatcttgtactagcttggatgaagaaggtggtggagaaatgacacttgagagcttaaggagacaacaacaagagttgaatgaatgggttgaatcacaacaatgttcaagctttttgttgtgggataatattattgaaggacaaattggtggtagtgttgaaggaacaacaataccattaccaccttcatcttcatcatcatcaaatatgggaactacactatcttctttcccttcgtctctataaattatcattaatggtgatgatttgtttttctttctttcttttttgcttcttttgttaactttattaattggtcatgagcttgtggaaaatgtgagggaatgttgcatatttaagtatgcaccattttttttctttcttatcggtgtttggagaaatggaaaaggaaagaataaaaagcaatgtaacagctaattagataattttt

SEQ ID NO: 7736 - DNA, 1590 bp, Gossypium hirsutum
  Clone ID: GOSHI-09MAY01-C71730_1
cccacgcttccgatggactctctgatgatatggaggagcctattagtttaaaagcaaaggcagtggtagcagcgcatgataaagatataaattctctggctgttgcaccaaatgacagtttagtgtgtagtggttcacaggatcgtactgcttgtttttggaggcttccagaactggtgctggtggttaagtttacagggcataaacgagggatctggtgtgtagagttttcacctgttgatcaatgtgtaataacagcatcaggtgacaagactgtaaagatatgggctatagctgatggttcgtgcctgaaaacatttgaagggcatacatcaagtgtattaagagcatcatttcttacacgtgggacccagtttgtatcatgtggtgctgatgggttggttaagctgtggacaatcaaaacaaatgaatgcatcgctacctatgatcagcatgaggacaaggtttgggcattggccggggggaattggactgtattgttagcaccaggtggcagggatgcagtgagcaatctgtggcatccttccactcctgctgagaaagaggaagcttttcgtaaagaggaagaagggggttttgagagggcaagaattagaaaatgcactgttagatgctgagtacacaaaggcaatacaaattgctttggagcttaggaggcctcgtaaactttttgagctgttttctgagctttgcaggaagagagaagctggggaccatatagacaaagcccttcatgcccttggcaagggagaatttcttctactttttgagtatatacgagagtggaacacaaagccaaagctctgtcatgttgcccaatctgttcttttccgagctttcaacattcttcctccgacagagattatcgagataaaaggcattagtgaactacttgaaggtcttatcccatattctcagagacatttcagcaggatagacaggcttataaggagcacatttctgttggactacactcttcttcgaatgtccgttattgaacccgcgactcaggatgatttgaagaccaaatctttattacattccgagaaaaatgaggaagatgcacttttaacagataatgcagaagaagatcaaaagcaagtttccgaagagcagaaaccaaaggcctctgggaaaaagaggaaatctcccaaatctggagaaccattcacgctcacataaaaaggtcaaggacagctcaactcatgcaaatactgcagttgtgccatcgcaggcatgacgggatttaaaaaagtgttctcctttttcctgatttgcatgcatgttggctgatttcttgagaagtttacagtacagttgtttcaaaaggaaatgcatcttccaaccccatcgaagaacaattttgaagcatccctgaaaagtaaacagtttagggggttacaaaggattgcagttttttttatgtttaacttaagattagtctatagatacgtctacatttctaatcccttctttattgtagaaaatatgttttttctgccaactcttttagttgtagtgttaactcataccccgagtaatgtcaatggacgccctgtttgtggttcc

SEQ ID NO: 7737 - DNA, 594 bp, Gossypium hirsutum
  Clone ID: LIB3825-002-Q1-N6-D6
ggaaccacaaacagtacgccattgacattacttggggtatgagtcaacactacaactaaaagagttgggagaaaaaatcatatattctatagtaaagaagggattagaaatgtagacgtatctatagactaatctcaagttaaataacaaacaaactgcatttttttgtaaccccctaaactgtttacttttcagggatgcttcaaaatcgttcttcaatggggttggaagatacatttccttctgaaacaaaactgtactgtaaacttctcaagagatcagccaacatgcatgcaaatcaggaaaaaggtgaacactatcttacatcccgtcatgcctgcaatggcacagctgcagtatttgcatgagttgagctgtccttgactttcttatgtaagcgtgaatggtctccagatttgtgagatttcctctttttcccagaggcctttggtttctgctcttcggaaacttgcttttgatcttcttcggcattatcttccatatttttctcggaatgtaataaagattttggtcttcaaatcatcctgagtccgtgggttcaataacggacattcgaattagaggtgtagtcca

SEQ ID NO: 7738 - DNA, 532 bp, Gossypium hirsutum
  unsure (1)..(532): unsure at all n locations
  Clone ID: LIB3583-035-P1-K1-G4
gtatgccctttttgttcacgtatttctttatatgtgtcctaaacacgttttgaatgaggttgccggcggttattattacatgtttggtctaatccttaaccctgcattgtgatgatccctgtaaccttcatttcattcttgtgcatgcacgtatctaactattttcaaaattattggttcttactgtttccgttgctgtccattttggtcgtttcagatccagatgaagcaaaaggaaaggaaaagcgacagaagggatttcttgctcctcttcaactttcagatgctctggtaaaatttcttggtactggagaaaatgagcttacacgggctgtcgtgatcaagagaatgtgggattacataaaagaaaataacctccaggatccagctgacaagaggaaagtaatatgtgacgagaagctgaaagagctgttcgaggttgaaaccttccatgggttcacagttacaaaactcttggctgctcattntctcaaagagtgagctgaccagaccagaccagaccagaccagag

SEQ ID NO: 7739 - DNA, 533 bp, Gossypium hirsutum
  unsure (1)..(533): unsure at all n locations
  Clone ID: LIB3582-052-P1-K1-C4
cccacgcgtccggttttaacaaagtgagcagactttccccacaacttcgggaacttttaggagtccctgaaatggcgaggactgaggtggtcaagcaaatgtgggtttatattagagagaaaaatttgcaagacccagttaacaagaaaaatataatttgtgacgagccattgcatgcactttttggtgttgaatccattgacatgtttcaaatgaacaaagccctgtcaaagcacatcttgcccttggattcagacgaagtcaagtcaatggagagggaaaaaccaagaaagcatgagagagaagaagtcaagtcaacggagaaggaaaagccaagaaagcatgagagagaagaagatccagatgaagcaaaaggaaaggaaaagcgacagaagggatttcttgctcctcttcaactttcagatgctctggtaaaatttcttggtactggagaaaatgagcttacacgggctgtcgggatcaagagaatgtgggattacataaaagaaaataacctncaggatccagctgac

SEQ ID NO: 7740 - DNA, 574 bp, Gossypium hirsutum
  Clone ID: GOSHI-09MAY01-C71600_1
cggacgcgtgggctcaaagcccggaaaaggacaggtttttcttcttcaaatttagaaccctagaatttgggaggtttgctgtttttggattttcatggtgaattcgaaatggttggaaattcgctagctggactgcaagatcacttgaaattggctcgagaatacgctctcgaaggcctctacgacacttccattatcttctttgatggcgccattgctcagatcaacaagcatctaaccactcttgatgacccgctaattcgtgcaaaatggatgaatgtaaagaaagcactatcagaggagacagaagttgtgaagcaattggatgctgagagaaggtcatttaaggaagctcctaatgggcggcgtccttcttcgccaccgattcatgctaagtcatctttcgtattccaaccactagatgagtatccaacttcatcaggtgccccagtggatgatcctgatgtgtggaggcctccaagtcgggacacatcaactagaagacctgctaggggtggtcaagcgggaatgagaaagtctccccaagatgggatttcgggtcgtggtaatacta

SEQ ID NO: 7741 - DNA, 740 bp, Gossypium hirsutum
  Clone ID: GOSHI-09MAY01-C71390_1
caaacccaacagctgaaggttgaagtactcctcattctggcctgaccctgacaaccaggatcatcatgggtagaagcaaaattttaagacaaacaaaggaaattccttacggacatcattattagtacttgaagcctagctctggtcaagttcttttcaaggagagaggccaacaaaaccatctattactatggtttactcctttttttttttattctttctcttttttcttcttctaatgggggaggaccagagggacctggtttatgactttcaaaggctctcaagtctcaaatgaactaactgtaaaacagtccatgttggaaagagagaaagaacaaaagggaaaaaaaaagaagaagaagaagaagaaagtaaagtaaagaaaagaaaagaagaaaaaaaagcaagaaaaaaggctggtctctatactgacaaatagaaggatataaccaaagacccaaagcaaatatccttcctgcatgaaaatcaccaccattatgatgacaatatcatctttatctggctctattcttattattttattatttcaagactcttgtattatttcttttctatctttttttttgtcaaacaaatataccaatgagtttgtgcaaattgcaacaattacttgttgattatgttgtgttgttagtcgcttttctagtaagtatatgtatggattcccttacatatatagagaaatgaaaaatatcgatttcagaattgtttatttc

SEQ ID NO: 7742 - DNA, 695 bp, Gossypium hirsutum
  Clone ID: GOSHI-09MAY01-C71370_1
ggactggagtgcatggattggcctgttggtttgatgtcctgtttaatggtggcaccgtgcaaagatggcttacgaccgcccccggtgctcctacagacccactggtaccagatacgatgtgtcctctctcagccgatttacgttatggccgggcaagaaataacaggccaacttcatatgattgcccataatgctcaaagttataccatatacctaacattgtcagctaaaatgtggggtcccggggcagaacaaggaggaattattcagacatcatcttgcaaactcgatctcaaggagccatattaccgtatgtcacagccgcaaccctacacaatggcacaagaccagcaaccacatcagttactacaggctgaggatataccgccaatccacaccgaggatctggatttagaggaacttgagttgctgcagcagccatcggaacctttaggagctcagtagccccaataagtgatgaaattagattttagattttctagaggattcttacaggcatttcatctgtaacataaattttgggtttttttttttttttaacactgggtaattgctaccggtttcccttatattaatatcaactcttttttgggtcgtttctaccatttgtttctggtcattgtaaattaaaaccgatatgctctactcgatttcaggcatgctcatttctcgat

SEQ ID NO: 7743 - DNA, 471 bp, Gossypium hirsutum
  Clone ID: GOSHI-09MAY01-C71280_1
acagcatataaaaagcttattaaagggaaaaaaaacaccgatccaatgagttacctgaaccgggtttggatggcgacgagcatggcgatggtacaaggtcacggtgaaaaccaaggtcaaaactggaaatcaggcatcaagtttctccaaaggggccaaaggaggcccttcgacggagaatcttcgaatctccggccgatttccggttctgatctaaccggcgtggtcgggaaccgtgacggccaagccgatgagtcgatccgtccagtcatgtatcttaattgttggggtcaaggatgaggattttgacttgttcttcggcttttttttttcgatttcgcaaccctaaaaaaacggaaatttggactgacgggtgtctgggagagatgtaaataaaaaaaggaaaaattttcagttctagggttttgagaattagtggaaattatgaaatcgaattggggaaaaaagcac

SEQ ID NO: 7744 - DNA, 496 bp, Gossypium hirsutum
  unsure (1)..(496): unsure at all n locations
  Clone ID: LIB3585-062-P1-K2-H12
cggacgcgtgggtgacaacaccgtgatccttgacatgcttgatatcccacctgctgatccaattagtaacggggacaaaatttagatggcgactagtatatttattgtacataggggacggtgaaaaccaaagtcaaaactggaaatgaggcatcaagagtctataaaggggccaaaggaggcccttcgacggagaatcttcgaatctccggccgatttccggttctgatctaaccggcgtggtcgggaaccgtgacggccaagccgatgagtcgatccgtcgagtcatgtatcttaattgttggggtcaaggatgaggattttgacttgttcttcngcttttttttttcgatttcgcaaccctaaaaaaaaactgaaatttggactgacggttgtttgtgacagatgtctattaaaaaaaggtaaagtaactaatttgtaaagtttttgattttaagaatgtgatttatttttggtaattattcataaactcaaa

SEQ ID NO: 7745 - DNA, 824 bp, Gossypium hirsutum
  Clone ID: GOSHI-09MAY01-C72890_1
tgcaaaggaacttggtaaatctgttgacaaatacgatgtgatcgccgatgtttgtctatcatgtggtcagtcatcaatggcaatattcagtcatcccatgtttttaggacctcagttttcatcatctcttcattctcaagtggatgggttcagtcaacagcaagttaaagtggaagcagacccttgtatcgaagacaaaacaaccaaatacttgaacaggaaagatgtgcagaaagctttacatgcaaaacttgttggaatcaccagctggaacttatgtaacaagattgtgcaatacatggacgacctagagacaccaacaatttatactgttggtaaaatagtgaagtccggtattcccgtcatggtttacagtggagatcaggattctgttatcccatttactggtaccagaaacttagtgtataaactagccaaagcattgggacttaaaacaacggtgccttaccgaccttggttcgaagggaaacaagttggtgggtggacacaagtttatggtgatatcttgtcctttgccaccatcagaggagcttcacacaccgctccagcttcacagccagagcgatcaatggcactgtttaaggcagctcttagcgggaaaccactgccagaagcttgagcgttcccatggatccatatgccttttttatttcagcattatgtattctccaaactaagtgtcggtatccattctactgccattggcaatctttaataattaaataatgaaagttttcattcgaaataaaaaaatgtgagaacctgaaaaagcaaatgaaaaagagccgtgtgccgcccaaaaa

SEQ ID NO: 7746 - DNA, 758 bp, Gossypium hirsutum
  Clone ID: GOSHI-09MAY01-C72830_1
ggggaaggcagtgccacaacagggggtagttggggttgggtcgaggcccattgtcccttctatcacaaacccaacatttttacaaatctacattctcaggctgcttgcctagctttaggtcaccaaacttttctgggtcattgagacttgggcctaaagggcagcctattaggatcaaatacacccaattgttgaagaaccctagaagaccctcactctactttgtgaatttgattggaattagggttggaaggagggttgtcgatatcccaccaaaggcattggctttcaacccttccactggtgctgggaccatctttgattctggtactgttttcacccggctagtagaaccagcctacgtagcagtccggaatgcgttccgaaggcgagttaaggtggccaatgtgacatccctgggagggttcgacacatgttacacggtccccatcgtggcgcccaccataactttcatgttcactggcatgaacgcaacactgccacaagagaacctactaatccacagcacagcaggcagcataacatgcttggcaatgggcgtcggcaccggacaacgtgaactcagtgctgaatgtgatagccaatatgcagcaacagaaccatcgtgtgcttttcgatgtgcccaaatcgaggttgggcgtggcccgtgagcgctgcacctgaccagactgaacctacttttgggaatgtgagactggaggcagtactagattatcttaatgttgggtttaatgata

SEQ ID NO: 7747 - DNA, 389 bp, Gossypium hirsutum
  Clone ID: GOSHI-09MAY01-C72460_1
agaaaaagcacggttgcaagcagaggcgcaaagccccgggaagaggcagggagaaaagctgaagctgaagctgctggtgaagccaaaaaggaagagggagctggagagagaagcagcacgtcaggctcttttaaagatggagaagacagtggatatcaacgagaacagtcaatttatggaagatctagagatgcttactacgaccaatgatgaaactttgcctgatttcatggaggagactagcccaagtcattctcaaaatgagttgggaagtttcaaactccggggagtaagtaatcccctcgaacaactaggtttatacatgaagccggacgacgatgatgaagatgaacctcctcaaagtgctccagagccagtaaatgatgttg

SEQ ID NO: 7748 - DNA, 658 bp, Gossypium hirsutum
  Clone ID: GOSHI-09MAY01-C72740_1
caaattcatggatttcagcttggatataggattcatctttccccgggctgcactttcctctgggcttcgataaccaaccaacagggaacaggaagagatactgaaaaaagacatgaagctatcattcaagctccaagaagacaagaacccagtcttgaaagccagaatacccatttccatatttagccaacccttcgtttcgagccttactaccacccctccaaccaccaccgattccagcggcggcggcagcggcagcggcggcaacaaatcctctcaaaataccttccttttctctttccacgaatttcccttctggcccttgcttcaaactctcttatgcaccctcggcttcctctgccatcacaatccctttctctctttctctaaaatcgggtcttggcctctttggctcccctaaagattcccctcttattttctctgcccacttttccctttcatcggttaaccctggaactataatccccacgttcgctctccatttcaagccccaatttggcaacttttctttgtacaaggccacttcatccaaacctaccttgagccggattctaggcctcaccatgtttcaggacaatctgcttcaccttccaattccgagtttgggaaccctgattcggcctcggtttggcaagat

SEQ ID NO: 7749 - DNA, 640 bp, Gossypium hirsutum
  Clone ID: GOSHI-09MAY01-C72610_1
ctttaactcacaaaagtgggacggctttcataataaactctttggtcctcctcacaatctcttccaccctgctcgtattccaaaacgattcctcaggttccacacaaggtcccagagccaaatatgtgatcggatttgtatgcacggtggctgcttcagcagggtacggattgatgttgtctctaacacaactttgtttccaaaagattctcaagaaacacacatttaaggcagtgttggacatgacaatctaccagtcatcggctgcaactttgatgatcagcgtgggtcttttccccagtggggagtggaagagtctgggccaagaaatggaagggtttaaactgggtaagtcggcatacgttaacgttttggtttggattgctgtagggtggcaagttttctcgattggtgcggtgggtttgatcttcgaagcgtcatcgcttttctcgaatgttatcagcacgttaggactacccattgttccagtgtttgcgatggtgtttttccacgatccaatgactggagttaaggtcatttccatgttgttggccatatggggatttgtgtcctatgtttaccagcactatcttgatgatcgaaactctgatactggaaaactttaaatcaaaatttgtcc

SEQ ID NO: 7750 - DNA, 771 bp, Gossypium hirsutum
  Clone ID: GOSHI-09MAY01-C72320_1
gttcattaaaaaaaaaaccctctctttactggaaaatttcttgactttcttctattctctagcagaaatgctccttaagcttcccgggttgtgttaaaaagaaaaatccaaactttttttagctcttttgaatcatgggtaatagcttgatttgcaggacaaagaaagatgctaaagataatggatcgaaaagcaagaggatgggaaagtctcaaaggaaaatgcttgcagaagaagagtttttgcataagcaagctttgtctatggctcttcatcaacaccagttgtctcagagatttgatggatccatgtctaggagaattggctctaccagctctagaaggcacgctgatccattagctaatgagaaaaagctactggaatctcttgaaaagatcaagtttaaaaaaattgttccgttacatggagaaagcctttgatctttgggttgggataaaaacatgtcccattgtgggaaaatgccttatactttctagcttggaatacaaagtcttggatttggtcttccgggttcaaacccaccctctatttggccaattttaaaacccttgatattttttaaaaacttcccgaattaaaaggtttttggtggtcattccatgggggtcttcctttatttcttggattttcccgaaatatcccaaacaatttttttttctcaatgggcccatgtaaaaccttttattttttccataacttgttttataccttcataaaattcctatttattttgaagggaaaataccctct

SEQ ID NO: 7751 - DNA, 396 bp, Gossypium hirsutum
  Clone ID: GOSHI-09MAY01-C72250_1
cacaatttgaagtacatgggtacctcgtctatgcttttgagcctcaagctactaaggcggatagaagtaaaagaatgcaatacaatggaacaagtgattagggaagacgaggaggaagcaacagcacatgagttcacatttcctgagctctactctgtagaaataaaggcgtgtttcaacttgacaaatttttttttgggaagtcgagctcttgaatttccaaagttaagtcatattgcgatagttgggtgtccaaaaaatgacggcattgtcttcttcaatttcaagagagagtgaaaaagtgattggcgagcaaggcgtgggagataacactacaactttattctgccacaaggttgtcattcccaatttggagtatctgactttgtcctccat

SEQ ID NO: 7752 - DNA, 380 bp, Gossypium hirsutum
  Clone ID: GOSHI-09MAY01-C72260_1
tcgatgctttccatcaatcaaaatggatcgttcaatttcaaacctttcttcttcttcttcttcttcttcttcttcttctttatggttcaactacacatgcactattttctccttcatcttcttcactttcacgttctcattttccctcttttcattatcaatcttcattttaagattaaaactatggcgtaaatgttcaacttgccaatcattcctcacttcaagttggtccaaagatttcaataacctgtgcgattggtatactcaccttctttcaaaatcgccgacgggaacaatccatattcatatcctcggcgatatcatcaccgccgatcctaaaaacgtcgaacacatattaaaaacaaaggtcgaaaattacc

SEQ ID NO: 7753 - DNA, 545 bp, Gossypium hirsutum
  unsure (1)..(545): unsure at all n locations
  Clone ID: LIB3583-010-P1-K1-E12
cccacgcgtccggttgataaaatggatgcttctcagaatcttaagcgatttggcgatacttcttcaggagatgcagtatttgatgcatcacagtatgcattttttggaaaagatgttcttgaggaggttgaattggggggattagatgatgatgaggatgtacctgcagtcggacttgaggatgaggaggagtttttgtttgatagagatgagggtgaagttttgagatccttatcggatgttgatgatcttactaatacattttcaaagttgaacacagccattagtggaccaagaggctcaaggataattggtgatggggggtccggacaaagtgagtttattcatctcagtactgtcttctatcagtcaattgctgatgattgatgtggttttggtccaatccttcttggattgaataactgatggtttcctatgctataatttttaactgaagggttcatctgctgccgaatggacacatggggaggaatttcctcactggcttgatcagcagcctcttgaaactgaaagtattnctgatg

SEQ ID NO: 7754 - DNA, 484 bp, Gossypium hirsutum
  Clone ID: uC-gsflnu33B137f12b1
tcgtatttgcccccatctcaattatcctatccgtttttcatttccaagggggtgaactctcaagttctaggcatacagtataagtggcttttgtggtggcgcatagtggattagattgttgtttgcttgctgtttggttttaagggaaagtaaaaaataaccttttttcctcccatgattgtgtttatcctttgttttctggtgaaaaagatgtattaatgtttgtttgagttgattttcatgtctccatctatctcatctttatgttgtgagttcatttctggttgaagtgtgcatgtttagtaaacttgactttttctatgatgcaggagatgcagtatttgatgcgtcacagtatgcattttttggaaaagatgttcttgaggaggtcgaattggggggattagatgacgaggaggaggatttacctgcagtcggacttgaggatgaggaggagtttttggttggttgagatgaggctaat

SEQ ID NO: 7755 - DNA, 850 bp, Gossypium hirsutum
  Clone ID: GOSHI-09MAY01-C73980_1
cccacgcgtccgcccacgcgtccgggattttttgggccaattatcgacaatagtactcggtgggggctaaactcatcgcttccctacatcgatgatgttatctgactaattacgagttcgagatgatatgtattatgtataaggcttgaacatcgaacccacattatctaggtgtatgcgtttgtagatgtttgttgtaattgaaaaatcaatctctgattatgtgttttttgttggttaatggataccagtacgacgtgtatgggaacttgttcgggctacttgctgcacaccctgtaacacctttagtatcgctgcatcaccttgatgtcgtcgagcctatttaccccaatgtgaccagggttcaagctcttaatcaccttatgttgcctgcaaagctagattcagccgggatcatgcaacaatccatctgctacgacaaaacgagaagttggaccatatcggtttcgtggggtttcgccattcaagtttttagaggaatcttttctccaagggagatagaaatgccttcgagaacgttcttgaattggtataaaagagcagattacacagcgtattcattcaacacccgccctgttagccgaaacccttgccaaaagcctttcgtgttttacatgtcgagcgtcggaatgcattccaaactgaacacaaccgtgagcaaatatgatcgacaccgtgttcctcatcctccttgccgatggaaaatggctgatcctaacaatctttaaatggtgatcgtctacaagaaacctgacccgaatctatggaatagatcaccgagaagaaactgttgtagggtgatgaaaacaaaggagccaggaacaatgga

SEQ ID NO: 7756 - DNA, 359 bp, Gossypium hirsutum
  unsure (1)..(359): unsure at all n locations
  Clone ID: AF056951.1
nnttatggtctacctgcaggnnggtctgcactantgattgagcttgaanatcnancccacattatctaggtgtatnncgtttgtagatgtttgctgtcaattgaaaaatcaatctctgattatgcgttttttgttggttaatggataccagtatgacgtgtatgggaacttgttcgggctacttgctgcacaccctgtaacncctttagtatcgctgnatcacctngatgtcgtcgagcctatttaccccaatgtgaccaagtgttcaantcacaaggttcaagctagcttgaaccttgtgagcttgaaccttgtgagcttgaaccttgtgagcttgaaccattcagggcaaaaaaaaa

SEQ ID NO: 7757 - DNA, 668 bp, Gossypium hirsutum
  Clone ID: GOSHI-09MAY01-C73400_1
attcataagctttaagctttttatttcaagtgtttttcttttcctatatttaaattttagggacactactgcataatttgcttttcaataacaccctaaatttggtttcccagaagaaaaaaaaagaaaccaatcgttgcaactgataaagaaataacaatggcaggtcaagttctcgttgctgccctcgttttcatggcggttgttgtggcgtttgcgggggattcagcgccgtcgccgtcccctaaaagttcatcgccatctaaagggggggcgtctccgccttccaagtcaccttctccctctcctccttcctccaagaactcctctgcatcctccccatctccctcctccggcggcggctccagcaaaaacaacagctctagtagcagcagcagctcccctccttcgccaccatcaccaacgaaatcctccgacgcacccaagtcatcctccggtggatcctcaagcagctccaaatctcctcccgctcctgccccatccagctccagcaaaagccacggaagctccgccccaaccagcagcgacgaagaggagtccccttctgaatcccccaatgcctccaaatcccctcccataccagaagctgaggtccctaataaagatagctctctatccgacgctccagccagcgatttcgcgccaga

SEQ ID NO: 7758 - DNA, 508 bp, Gossypium hirsutum
  Clone ID: LIB3583-008-P1-K1-B5
gcggatctgccgtggcagtcgaacgtaaagttgtcaatgacagggaaagtgttaaggtggatgtaagaggcgtgacctgggtgttagttatgcacctaaagagcctaaagactcaaagtcttctagtttatcagacttgagaatcgaaaagtccatatttattaaacctaaaacatttcacctgacggtgctcatgttgaagttgtggaacaaagaacgagttaatttagcaactgaggtattgaagagtatctccccaaaagtgatggatgccttggataatcgacctctgtttgtaagacttaagggtctggattgcatgagaggttctttggataaagcctgtgttgtctatgctcctgtagaagaaattggcagtgaaaatcgactttcacatgcctgtcaagttattattgatgcttttgttgaggctgggcttgttctagagcgagatatcagacatgaattaaagttgcatgccactgtgatgaatgtgaagcatcggaaa

SEQ ID NO: 7759 - DNA, 493 bp, Gossypium hirsutum
  Clone ID: uC-gsronu33B150e06b1
ccttcttgtccgcccacgcgtccgcccacgcgtccgggtgcctgcaattgcaagaactttgtgattgattattaagttgcaatacctttattttagcattctaagcattttcctcttattgcgttaacaaaccttgctgatatatattggacttgacagacttgagaatcgaaaagtccatatttattaaacctaaaacatttcacctgacggtgctcatgttgaagttgtggaacaaagaacgagttaatttagcaactgaggtattgaagagtatctccccaaaagtgatggatgccttggataatcgacctctgtttgtaagacttaagggtctggattgcatgaggggttctttggataaagcccgtgttgtctatgctcctggagaagaaattggcagtgaaaatcgactttcatgtgcctgtcaagttattattgatgctcttgttgaggctgggcttgttctagagcgagatatcagacatgaatt

SEQ ID NO: 7760 - DNA, 454 bp, Gossypium hirsutum
  Clone ID: GOSHI-09MAY01-C73300_1
ttgacatattgacagcatggcgggactcgaagtggaggaaatttctacctcaacagcttctttggagaggcttccagggaagtcaacctcatcatcccctgcggttgccgccgatggttcaactcacgaatctttctcttattctaagcttcctgaagagaccctcaatctctccattcgcaaattggatggctcttcctttgttattgaagttttaaagtcggctaccgttgcagatctcaagctgggagtccagaatgtcttttgtcatatgccagacgaaggtcctgacaagatttcatggggacctgtttggggacactttcgcttgccttatcgtcatgtgaagctgatcacagacgctgatcttatcgaaaagtatggcattaaggatgatgatcagcttcatttcactaggcatatctcgacaaaggttcaaaaagttaaacagact

SEQ ID NO: 7761 - DNA, 580 bp, Gossypium hirsutum
  Clone ID: GOSHI-09MAY01-C68420_1
aatatctactatatcattggtaattgctgctgtagtagagatgcggaggcttaaaattgcggaagaacatggattgatagacaagccaattgtggtggttccaatgagtgtatcgtggctggtccctcaatacgcattgtaatggattagctgatgtcttcaccatggttggtcttcaagaattcttttatgaccagatgccaaatgaattaaggagtgtcggtcttgcgctctaccttagcatcttcggtgttggaagcttcttaagtagttttctcatctccgccatcgagaacttgaccagcggggatggccgagatagctggtttgcaaataatctgaatagagcacatcttgattacttttatttgctgcttgctgcgcttagtgctgtgggattgactctctatgtatgttgtacaaaatattacatttatgctagatggggaaggacgttctaaatcgcgattttctaggtatcaccagtccattgattgttgtaactgtaatatattaagcgacttctcactaaatggttggttaaacttgtaagaatgtaaaccatgaatgtaaggatttt

SEQ ID NO: 7762 - DNA, 497 bp, Gossypium hirsutum
  Clone ID: GOSHI-09MAY01-C68780_1
gtgaagccaagcagcttcctatgtctctaaaatcttaatcttcaattttgcattttttataataatttattccttttaatatttaaaacaaaggcttaacctttctctctcttcaatcttcactttttttttcttgtgtgaacaaaaaaaagggaacatccaaagtctgccgcgtttcggaaagctttgagagtgtggatcgctagaaaggaagaagaaaagccctaattattctttgaattttagcttctgcattcgcaagttttacagttatacctgccgtcggttttgtactcttttgatggcggggtaacctctttgggagtggcatttggcgtaaataagtgatgaagttaaagggtgagtcgcggcggttgcttttgttgttgttgagtccgtgatgggcgtagctaaggcgtggagtttagcgtgatgtcggacaaactggcgctgttacagcatccaggcggcagccttttaagccacaagcctgagtg

SEQ ID NO: 7763 - DNA, 657 bp, Gossypium hirsutum
  Clone ID: GOSHI-09MAY01-C68380_1
cccagcgtccgcccacgccgtccgaacataattgaagtaaaaacctaatgctccccaacccccccatctcttccttttctcttcagccgaaaaggccatcgtctgctcactcaatcgtcgccatggccagtggccggcgctgcggagaatgagcttttaagctccatcttgaaagaccctctcgaaggctaaaccttcagcaaccaaagagtgaggagaaagggagttctctgtccctttgtcgaacccgattacaacgacggagaaatcactccgacggcgagatcgaaagggattcaggtgagagatttttttcttcctttttagttagtttttttgtttagacagatttacaaagagaaagaaaaaaagaaaatacagtaaacaaaaagaaaaaatggaaagaacccagaacaccttttttaaatctctgtttttttgctttgtatttgtatttcaatgtgcgtagtatcgcgtaaaaattacatggatccctcctttggctttatagccggagaaataaaatgatcaaaaaatgaaaaatacaatattccttgtttttgtttctttcttgctgtgtgttcgtcctttctttgtaggtacagggtgcgtggcgctcgggtacgggctatgctggctgctgagatgctggcatcg

SEQ ID NO: 7764 - DNA, 475 bp, Gossypium hirsutum
  Clone ID: uC-gsflmaxxa042g09b1
tcgtctcacgcgtccgcccacgcgtccgcaaattcaagtcttcttcccttcacctccaagtttaaacaatggatgtagaagatgacacaagagagggcttggcttcctccattatccttcaatctttggaatccactcggcagggagataagctttctgatgaggatttggcttgggttaattcttgtctggttacagatactgaaattttggaaagaaattggtcttctttcaaagatgttttgctggagatcattggtgaccaacctgagccacttgactcttctgcaactggaagcaatggttttcttagtggaactgaaatcagtatagctccttccatcaaggaggcagaggctgccaattactcaaggagaactgatgaagatcttcttgtcattccagtggatggagaaaatggaatgaacaccaacaacatttctatcataaagaggactggtacccagcagcaatt

SEQ ID NO: 7765 - DNA, 416 bp, Gossypium hirsutum
  Clone ID: LIB3272-054-P1-K1-H2
ctagaacataaattcccactctcttttatgcaaattagggtttaaaattttgctgatattttcgagttgcaatggatgtagaagatgacacaagagagggcttggcttcctccattatccttcaatctttggaatccactcggcagggagataagctttctgatgaggatttggcttgggttaattcttgtctggttacagatactgaaattttggaaagaaattggtcttctttcaaagatgttttgctggagatcattggtgaccaacctgagccacttgactcttctgcaactggaagcaatggttttttttagtgaactgaaatcagatagctccttccatcaaggaggcagaggctgccaattacttcaggagaactgatgaagatcttcttgtcatttcagtggatggag

SEQ ID NO: 7766 - DNA, 1179 bp, Gossypium hirsutum
  Clone ID: GOSHI-09MAY01-C69910_2
aaggcttggcctttttctggtaagaatcaaaaataaaatctggggttcttgtatggtgagtgaatgttcgacttatttctgctgatccacgttcgctcacaaatttggcttcgcaaaaggaagaaaagaaaaccaacaaaaccccattcttttttcttctttttttatacctaatcatactaacgaaagaaatcttttttttttttcctttttctttccgcttagatttcctaacttttgtacagtccaaatactggaagaataaatacccctcataaattttccttctttttgccttttgatcctttcatcgctctcgtattaatttgtagctttaattttatagaaaacccaagtagttggagttatattttaatagagctgggttgttttacatttgagttttgaataggattttgaggtggtttctgattaattttggtgaaaggataacaaaaagagagggcagattttagttatttgcactaaacagcttacaaaagtggcgaaaatgagtttaagtgcagctgaggatgattcaaggtcagagattcatataccggcagatatagattggcacatgcttgataaatccaagttctttttccttggtgcggctttattcccacgcgtccgagctgctctttaccctgtagtggtcttgaaaactaggcaacaagtttcatctacacaagtttcttgctttaaaatgtcattctccatcatgagatatgaaggattgagaggattctacaggggttttggtacctctttgatggggacaatcccagctagggcactttacatgggagcccttgaggttaccaagagcagtgttggcactgcaactgttagtttaggattttcagatactacagctactgctttagctaatgcagctgctgggttgagctcagctatggctgcgcaactggtttggaccccaattgatgttgtgagccagagactaatggttcaaggatataatgacagtaacagtagcaaaaatgtaaatcccaatgtgaatctttgtagatataggaatggtcttgatgcgtttaggaaaattctatatgcagatggtcctaaaggattatacaggggatctgggatctcgattttgacatatgcaccgtctaatgcggtttggtgggcatcttactctgttgcacacaagct

SEQ ID NO: 7767 - DNA, 726 bp, Gossypium hirsutum
  unsure (1)..(726): unsure at all n locations
  Clone ID: AI055050.1
ctggtctctaccgttaaaagcgctctacttttttctcattctctcccactccttcacttaccatttccttcttattgacattatccacttcagcatttcattttccgtgaacccgccacccccataacccactttttgccccacttcatttatattctttgcgcttttgagatctgtgcttctctctctttatgatttcccagttgcctatttgacaaataaagatgaagccttgattgaagatgttgcaaaggtttggactttttctggtaagaatcaaaaataaaatctggggttcttgtatggtgagtggaatgttcgacttatttctgctgatccacgttcgctctcaaatttggcttcgcaaaaggaagaaaagaaaaccaacaaaaccccattctttttttattattatacctaatcatactaacgaaagaaatctttnnttnttcccttttctttccgcttagatntcctaacttttgtacagtccaaatactggaagaataaatacccctcataaatnntccttncttntgcctttgatcttttcatcgctctcggattaatnggagctgtaatttatagaaaacccaagtaatggagtatatttaatagaagctggtgtttacattgagtttgaatagaatttgagtgtctgataaattgtgaagatacaaaagaagggcgattaatattgananctaactacatggcaaatgattg

SEQ ID NO: 7768 - DNA, 635 bp, Gossypium hirsutum
  Clone ID: GOSHI-09MAY01-C69920_1
cggacgcgtgggtgcagggctgtggaggttaacgggcaaggtttccctttcggtgcaaagtgacgagggaagccgagcctcgggcgttgtgtgcgctgacggaggcacgtggggtgcggcgctcgagagaaagctaggggttaggccttggggttttttgatttaagcattgggccaattcggccatcagggtttgggcttagatgggtttaggttttgggctttaaatctgatattttttgtaaatggactttttaaatttggacttattattttggtttatttatatcgggcccgggcaaatttgggcccgtacacatatcattaggtgtaagcaaatgacttgaacagaatcttagaagtaaaaatttcttttcaaaaaaaaaaaaaaaaaaaaaaaaaaaaaaaaaaaaaaaaaaaaaaaaaaaaaaaaaaaaaaaaaaaaaaaaaaaaaaaaaaaaaaaaaaaaaaaaaaaaaaaaaaaaaaaaaaaaaaaaaaaaaaaaaaaaaaaaaaaaaaaaaaaaaaaaaagggggggcgggtttaaaaaaaacaaaattttaaggccgggggttggaaaagaatattttttttttagggcccaaaaaataaaaaaaccggccccggttttaaaa

SEQ ID NO: 7769 - DNA, 602 bp, Gossypium hirsutum
  Clone ID: GOSHI-09MAY01-C69570_1
ccaagttgaatctctcatacgaatctctggaaaaagctacgaattactttagcgacaccaacaagctgggacaaggaggatccggttccgtttataaaggaactttacccaatggaaaggttgttgctataaagagactcttctttaatacaaggcaatgggtggaccaatttttcaatgaagtcaatttaatcagtggcataaatcacaaaaatctcgtaaagctattgggatgcagctttacaggcccggaaagccttcttgtttacgaatttgtgtcaaaccagagcctccatgattatctcttcgttagaaaagatgttgagccactaagatgggaggagcgatacaagatcgtattgggtaccgctgagggcttggcctatctgcacgaggaatccaaattgaggatcatacatagagacataaaacccggcaatattttgcttgatgaagacctcaccccgaaaattgctgattttgcccttgttagacttttttccggaggataagactcacatcagcaccgccttcgctggcactttaggttacatggctccagaatacgctgttcgtggcatgttgactcaaaaggctgacgt

SEQ ID NO: 7770 - DNA, 453 bp, Gossypium hirsutum
  Clone ID: LIB3585-058-P1-K1-H2
acgcaagtccaagttgaatctctcatacgaatctctggaaaaggctacgaattactttagcgacaccaacaagctgggacaaggaggatctggttccgtttataaaggaactttacccaatgggaaggttgttgcaataaagagactcttctttaatacaaggcaatgggtggaccaattcttcaatgaagtcaatttaaccagtggcattaatcacaaaaatctcgtaaagctattgggatgcagcattacaggcccggaaagtcttcttgtttacgaatttgtgtcaaaccagagcctccatgattatctcttcgttagaaaagatgttgagccactaaaatgggaagagcgatacaagatcctattgggtaccggttccggcttggcctattttgaccaagaattcaaagtgggggttattccttgagaccttaaacccaacaatatttt

SEQ ID NO: 7771 - DNA, 583 bp, Gossypium hirsutum
  Clone ID: GOSHI-09MAY01-C69460_1
cccacgcgtccgcccacgcgtccgctgctccaccggaaatcaaggaggatgaagacgaggaggatgaggagcaagaaggaggactgagtaagtccgggaaagagttgaagaagctattagggaaagctagtgggcttaatgattcagatgcagacgaagatgatgatgatgaggatgtggatgatgatatgaactttaatcctacaccagctcctaagcagaaggatgcacctaaagaagaaccagctgacaacagtccgatgaaaccggcaccttcagcttctgctcggggtaccccagctgcatctaagtcatcaaagggaatgagtaaaggtgatgataccaaaagcatcaaatggtacccctctgtaagaaggttaaattcagaacctgggttcaaaaaccttctgggaacgaaggaaaattccgctgctgcgttaggcagtgcgccttccaagggcacgtcatcctctgcaaaagctggatcaacatcagctgccagtgcatcttcttctaaagcaggttcagcatcaactgctggacctgtaactgaagaagaaataaggctgtgttattacaaaag

SEQ ID NO: 7772 - DNA, 582 bp, Gossypium hirsutum
  Clone ID: LIB3583-044-Q6-K1-H11
gcaaccgaatctggagaacaagaaattgagattgatattgacgacctcagtgatgataccttgttcactttgaagagacttctagatgactatttgcaagagaaacagaaaatccaagcaagaggtgaaccttgtgaaattgagctaattaatgaatctgcaccaagtaattcatccatgcaacaaggcaaaggtcatctttcaaatccttgtgcataataacccccgtctgaggtatgttttctttctgacttggctttctgtttgacttttttgttgcagggaatgaccaagttgatgaggatgttgacattgggggaaatgagcctcctgtatctagctatccacctgtggagatagagaaggacacagaccatagaaccacaaagtctgtcagttcaagcagctctagagattcagactctggctgttctgatagtgaatctgatgatgctaaaccttcaagttccatggatgcaatgaaggtacaggaagcggtagattctggggctcaattagatgaaaaaacaagtgttgacgatcttcataagaattaatgtgtggatgggtcggatcagcttg

SEQ ID NO: 7773 - DNA, 268 bp, Gossypium hirsutum
  unsure (1)..(268): unsure at all n locations
  Clone ID: LIB3083-058-Q1-L1-F11
cttttaatagacttcntaaatactatntgcaagagagacagattagccaagcaagaggtgaaccttgtgaaattgacctaattaatgaatctgcaccgagtaattcatccatgcaacaaggcaaagggaatgaccaagttgatgaggatgttgacattgggggaaatgagcctcctgtatctagctatccacctgtggagatagagaaggacacagaccatagaaccacaaagtctgtcagttcaagcagctctagagattcagattc

SEQ ID NO: 7774 - DNA, 551 bp, Gossypium hirsutum
  Clone ID: GOSHI-09MAY01-C69740_1
ctttatcactctttattggtcgaccagttgattgccggcgcgtaattcaaaacccgtcgccgtaaaatcatcggctttaagcttcatcaaagcaagaagcatcgaagtgatctctttgagcctgttaaaggagctaggcatgtctctcgatggcttccctccattcatttcagctcagctccattatctcatcaatcactttcccgacaaaatcaaggttgagcaagtgttgtctggtggaaaaacctacaccgggggcctagatcgatttacattgcttattccatattgcttagactatattaaatgggatattatatacaatgcggagttcccattggctccaccggatataatatttggacctgaagatgaagattttcacccattacacatgactggccgtgtaggagagggggactcgaagttttggaacattttgcctgattggaactataaagacccgacaaggctactagctttaattcaggaatgagggaccggtatatggcctaccaagaagaaacgtgttggaagaagtggatgatgat

SEQ ID NO: 7775 - DNA, 591 bp, Gossypium hirsutum
  Clone ID: LIB3828-002-Q1-K6-C2
gttttagcttgttagggttttgtttcattttacaaagaaaacaggaaagcaaagcattcagtgttcgaatccgtctttcttgcaccgaactgttacagatttattggcaaggtcaagcaacctaaaagcttatctcaagcgatgggagaagtgaatttcatgcaagaggaagatattcgattggagactacgcgagcaagatttgcaaatgttgtcaaaaggcatgcccaacttacagagcgtctctccagggattctgataagatgatatttgagcgtctacaaagagagtttgaagctgcaagagcttctcaaagtcaagagattaacttagatggtgagcagtggaatgatgggttattagctacagtaagagagcaggttcatatggaggctgacagaaagacaacatctggggatgcaaatgacatgccgacatctcatttccaagaaaaggttacctacagagtcggaaataaggtgatttgttgtttggaagggacaagaattggcatattatatgaaacgtcctttgcaggggaaccttgtgagctgtatcattgtgtgcttgagagcaagtcatttcttgaa

SEQ ID NO: 7776 - DNA, 551 bp, Gossypium hirsutum
  Clone ID: LIB3584-056-P1-K2-E4
cccacgcgtccgcccacgcgtccgctttccttttcctcccgcctcccccaatgttttagcttgttagggttttgttcccttgtacaaagaaaacaggaaagcaaagcattcagtgttcgaatccgtctttcttgcaccgaactgttacagatttattggcaacgtttaacgaagtttcgaatttatgttctataatgtgtccaacctagagtgatttatacaagctcagcttattatattcgacgttttttaatttatcaagttgtttgctaaaatgcaagcctgaaatgaaatctttgaaattatgcaggtcatcaacctagaagcttatctcaagcgatgggagaagtgaatttcatgcaagaggaagatattcgattggagactacgcgagcaagatttgcaaatgttgtcaaaaggcatgcccaacttacagagcgtctctccagggattctgataagatgatatttgagcgtctacaaaaagagtttgaagctgcaagagcttctcaaagtcaagagattaacttagatggcgaacagtggaatga

SEQ ID NO: 7777 - DNA, 872 bp, Gossypium hirsutum
  Clone ID: GOSHI-09MAY01-C69650_1
cgtttctcttgggtcttactccagctattagtctgctagttgattttgctgctgtgtctgaaagctcgccctgtcttttgctcaccatatcccctcagttttagatgtttctaccacctgataaaatccttcactttatccaccagcacctgtagatcctcgaccgtgatgtgcatcattgagcatgtggcccttttcaaggtcacaggtgacacagaacaggaaaaggtcaacgcgatgcttaatcacctcaatggtttggtctctctggatcctgtcctgcacctcactgctggtcccgtccatcgtatcaaatctcctatcttgaatttcacccacatgctccatagccggtacaagtctaaagaagatttgaacacatattccgcacatcccgaacaccggcctgttgccaaggaaaacgtcatccccatctgtgacgatataatggctgttgattgggttgccgataatgatcccaccccgctgtccccgccccctggttctgccttcaaagtaaccttcttgaaactcaaagagagtgttagcaatgaagtgcaaggtgggattctaggggaaattaaaggggtgaaggaggggatctctggtattcaacagatgacttgcggagagaatttctcacctgcaagagcaaagggcttttcacttgcctcggtcgctgcttttggtggagttggagaaatggaggcagcagtgggaattgaagagtatgtgaacctacagaagcaaaaggttagggacaatgtggatggtgtcattgttgtcgattatgtggtgccagcttcttcaccatagattattaactaaaagaaagaacttggttcttgaatgatggaagctttggatcaata

SEQ ID NO: 7778 - DNA, 675 bp, Gossypium hirsutum
  Clone ID: GOSHI-09MAY01-C69380_1
acaaccttcaaaaaattccgattattttattaattttgaagtagtgcttggatcttgtatcttcactgtgtatttatcttaccatcttcctttttatcagatcctttccattttccttcgctacttccttctaggcttcattcccatggagttttgatttgtcgcacgctttacaagtgtgtgatggattccgataccgtatcgtccgcgggtgggcttgaggttgcccatcaaaatggtgtttatccgtccggggatgcgtatgacagtggggttacagataatgcgaacgggaccattgcggaaagtttcgagacttgtttatataatgaaatggatgacaatggagcaactgaacaagctagagaagggccaaatgagtgtgtggaaagcagtggattgattgattctaaggaagggggagtcaaagataatccgaaacaatccgaacctgataagtttcaaggcaagaccaagaatgaaaagccctctgttcccaaaaaagtttctccagctttagtgaagaaacatgaagatggaaagattacaaggccacattgccagctcccaatggtggttctgttgctacaaatccacgtatgaaacagcctcttaaaagtagatcattgaatgaaagacagccaatgtatccaagcattctgaaaaaccagatgt

SEQ ID NO: 7779 - DNA, 600 bp, Gossypium hirsutum
  Clone ID: GOSHI-09MAY01-C69250_1
cgggactccaatgaagcaggtgttatgctgatctttctgatgcaacagttttaggaattatttgaaatcaagcagttttgatttcgtctcaactcaatcactattcaggataatttacaagattatggatgaaagtattgaaagaaagaaaggagatgtacctcatcgtgtcgcatgcctgttgagaaagattgtagaagagatagaatggcgagtttcaactagggcaagaaatttaaaaaatcaaaacaagctttttagggcacaggaggaaaagtatcaatcaaggataagagcacttgagaccctagcatagggaaccatggaggaaaatatggttgttctaaagaatctacaacatataaagtttgaaaagagcaaactagaggagaagggtaaagttgaagagcaggatgtgcttcagcttaagaaggagaaggttcagaaagacctcgagatttctaggctaaaagaggaactagagagcagcaaaaagatgcatgaaatacagtgtctacaattggaagcccaggctgaggataataaagtattgttagaaaagaagttaaaagaagtcgagtgtcttttaagtgactccag

SEQ ID NO: 7780 - DNA, 407 bp, Gossypium hirsutum
  Clone ID: GOSHI-09MAY01-C64920_1
gttcccaaagtggatgagctttgacatggctttgctagtcccaaacttacttgaaatcgccatatggaattgtattaaatgcatacatctcccgttgttcagtcggcttcccaagcttaaggtgctcaggcttgaagtgataactgctgtcgaatacattgaagatagcagtgccgagtcttcatctttctcattcaagggaaatccaatgaatagaggaagagaaggtaaagaattcttcccttgcctagaagaattagtgttttttgacttgcgaaatctgaagggatggtggggggaagcccctctctgttaccaattattatcatggcgcagcagcatcaccacagaggccattgcagaagaaggaatcaatgcccccattccctcgtctttcaaaattaaaa

SEQ ID NO: 7781 - DNA, 611 bp, Gossypium hirsutum
  Clone ID: GOSHI-09MAY01-C64890_1
gcggattaggactttcgttcttcttgctctttaatgtttacgccaccagtttctactctggatctcgacttgttgagagtggcgatgccacattctcggatgtttttcaagttttctttgctttgacaatggcaactgttggcatttctcaatcaagcacccttgctcctgactccagcaaagccagggccgctgctgcttccatattcgcaattatcgaccgtgagtctaagatagacccgagtgaccagtccgggacaacattagaaaacgtgaagggtgatatcgaactttctcatgtcagtttcaagtatccattaagaccagacattcaaattttccaagacttgagtttatctatccctgctggcaagactgttgcattggtaggagaaagcgggagtgggaaatccaccgtgatatcattattacagagattttacgatcccaattcgggacgtatcactatcgatggagtcgaaatccaaacactccaattgaaatggttgaggcaacaaatgggcttgttagccaagaacctatttttgttaatgaaacaatccgtgctaacatcgcatacggtaagggagggtaacgcaccgagctgaaat

SEQ ID NO: 7782 - DNA, 636 bp, Gossypium hirsutum
  Clone ID: GOSHI-09MAY01-C64450_1
ctttttctcctaaattctctcaccttcactttctttcaatcatcttacctggggtaacaaactgctgctgaaaactatttctttactattttgattttgtttttattccagagaaaaaacagaacaatttttcttatttaatttgattcattgttttcggccaattttttcccagccgttatcttttatttgattgcatatagatgtttgattttgcctgttgattactcttcttctctagtcaatgtagctgggttttttttttccttttctgaattagggtttcagttttaaaaaattggggattttgctatcaagctgtgtagttgaggaaactggaggagcctttctgataattataatgataaaagtttgtttttttctttgttgtgcttagattgaaatttccctgcatcatttccgaattttatttttagcgtcatccgtcctaggatttcatttctttcttttagtcaaaagctcagacttttttttttattttgacgattttatccctgctgattattgaagaagattaagaatttttttcttcgtttgatctattggagtcatcaatttggtaaatcccccaagctttaagggagttgttttggggggcaataaattttgattttg

SEQ ID NO: 7783 - DNA, 424 bp, Gossypium hirsutum
  Clone ID: GOSHI-09MAY01-C64730_1
ggcgttctaatttttccttcttcattcggccaatctccatagccccttattctcatattcttgcttcaatttgagcagtggtgcaggggagccatggagaacctcgaggactctgttttcaatttcgaaacaccgtccctactttgattgcgacgaagaagacgggtctcgactactaagcctgttgcaggtatgaatggagctagctggatgatggcgcacgtggggctggcacggaggcagcagcggtgttggaggctactgaaagttgctgcggcgcaagtgacctaggttttctgccgaaaatttcattggtgttttgggcttgggatattttgggctgtttgggttagttgggttaggtttaggtttgggcttgtaatgggtattggatctcaatgtttgtaaaagggacattggattt

SEQ ID NO: 7784 - DNA, 519 bp, Gossypium hirsutum
  Clone ID: LIB3585-035-P1-K1-H6
agccgtcgcacagaggctcaggcatcccgcagcacaacctgatagtacttctacatcatcaactctctacgataagtcatcgtctaccaagatgaaggggattttcaaatacaagccgcgaactcccgtcgatatcgtgcgccaaacgcgtgatctcctcagctgcgccgcccgctcctccgaaagtcgggaatccaagcgggaagagaaaatggcagaattgtttaagaatttaagggagttgaaatctattctttatgggaatagtgaatctgagccagtctcagaagcttgtgcacaactgactcaagagttcttcagagagaacacgctgcggctcttgatcacttgccttcctaaattgaacttagaggcaaggaaagatgccactcaagtcgttgccaatttgcaaaggcaacaagtgaatacgcggttgattgcttctgattactcggaagcgaacttagatctttgagagtatttaatagcaagttatgaatacacagacatggctttaca

SEQ ID NO: 7785 - DNA, 409 bp, Gossypium hirsutum
  Clone ID: LIB3272-001-P1-K1-H9
caaagcctgtgtctagccgttggataaaacacggtgcggtgacttgaggctcttgtaatcggcggtgagacttcaaacttcagccttcaacgacaagtcatcgtgttaagatgaagggactcttcaaatctaagccgcgaactcctgttgatatcgtgcggcaaacgcgcgatctcctcatgtatgttggccgttcctccgacagtcgtgaagccaagcgggaagagaagatggcggagttatttaaaaatataagggagttgaagtgtattctttacggtaatagtgaatctgagccggtttcagaagcttgtgcacaactgactcacgagttcttcagagagaacacgctacgactcttgatcacttgtcttcctaaattgaacttagaggcgaggaaagatgcaac

SEQ ID NO: 7786 - DNA, 601 bp, Gossypium hirsutum
  Clone ID: GOSHI-09MAY01-C64090_1
agttaatccgcattttaggttcattgccatcttgtcccgatcagggtataattcgtgaagttctaaagttttcattgtctcctgaggttcgcagccaagacgctatgtatgcacttgctgttagcaaggaaggtcgtgaagttgcctggacttggttcaaggaaaactgggatctcattttaaaaacctacggtagtggattcctgataacacgttttgtcagtgcagttgtctcaccgtttgcatcatttgaaaaagtgaaggaagtggaggagttctttgccaaccgatcaatgccttcgattgcaaggacattgaagcagagcctggagcgggttaacattaatgccaactgggttaagagcattcaggcagagcaaaatctgggtgaggccatacaggagttagcttacaggaaatactaagggatttgtctttgttttttactagagatctagtatggaaagtagccgcggtggctttttactgttgttatacttttttactaaactgaatactctctagtaatatcatgaataataatcatcctaataaaaacaatgtattaggcattagttattagttatttttaggtgttacc

SEQ ID NO: 7787 - DNA, 806 bp, Gossypium hirsutum
  Clone ID: GOSHI-09MAY01-C64270_1
gttagtcataaacccgggcttgattcaggtgcctttgttagactgtggcgggtgtggtgctactgtcaggatattggatttcttaactgttcctcgacctgctcgtgttgctcccaacaacattgatatccctgacacaagcaagaaaaggggattgactcgtggagggggggcggcccgtggaattagtggttgggttgccgctgatgatccagagaaagaaccgactgaagaccgtgatgaagtgggaacgactgatgagagaaatttggtgccaaaaacagatgttgatttgaatcttacaatggctgggggtctgtctttctagtcagttgggtagagccgcatcatccagaaatatgaatgatgcagacatgggtcgggatctagtgattgggcaaccatcaggtagtgaggttggtgatagagctgcttcttatgaatcacggggccctagtcctcgcaagcgaagcttggaaataggtgccagttcagatgataggccacagttatgcacacaacaggctgatagtgttgaagaaactgtgattgatcgtgatggtgacaaattcaatgattgcagacaatattctgctggcccttccaaacgtgcccgtgattcagatttttttgatacttactgctcaccatatccaagagattcctctgaggcaggcccaagccattcggtgggttttgaaactcatggagatggtggcaatagagttgctctgtttaggcaaggaagtaaccaggttattgaaatcccgtcagtgagagattcaatgcgtgcgtcctctgtcatt

SEQ ID NO: 7788 - DNA, 661 bp, Gossypium hirsutum
  Clone ID: GOSHI-09MAY01-C65990_1
gtataaaatcaagtgcaggagctagggtttccatcaattgcaaaaatggagggattagtttcaatgaaaacagcttctggaatttccttccactctattccttcccctaatcagcgacctaatttcttcctcagacgctcctcaatggaccttcagcatcggcgattccattttccctccattcgagctcaacagtcggggacgatatttccgggaaaagaaggtgaggaagattctttgaaggtaagggaatgggaagttggaatgttgcaaaacgaagtcgcagcgagtcaagggattagaatacggcggcgtccaccgtcgggtccgcctttgcattacgtgggtcccttcgaattccgtttacagaatgagggaaacactcctcgtaacattcttgaagaaatagtttggcacaaagatgtggaagtttcccaaatgaaagagaagaagcctttgctttcattgaagaaggttatcgagaatgcacctccaactagagatttcgtcgggtctcttaaagctgcccatttgcggactggattgcctggtttaattgctgaagttaagaaggcttcgcctagcagaggaattctcagagagaattttgacccagttgagattgctagagcatatgagaagggtggagccgcttgtctgg

SEQ ID NO: 7789 - DNA, 633 bp, Gossypium hirsutum
  Clone ID: GOSHI-09MAY01-C65950_2
cccacgccgtccgggtgggtactttgcttgtttctttttcgggtatgcgataattcgaagggcaatgttgggaagcgggggggtttcggacgggtacgaggtcggctcaaagagacaaagaatgatggaatcaactccctacttcgcagtgaacagcggtatgggcggctatcaaccttacgggtatggtggtggctaccaacctccttcctttccggtagtacgtcttagggggtcttcctttcaactgcactgatatcgacattttcaagttctttgccggattggacattgtcgacgttttgctagtcaacaagaatggaaggttctccggagaagcctttgttctctttgccgggtcaatgcaggttgagtttgctttgcaaagggatcgacaaaacatgggacgccgctatgtagaagttttccggtgcaagaggcaagactattaccatgccgtagccgcagaggtgaattacgaaggaatctacgataatgatttccacggaagccccccaccctctcgagcaaagagattcaacgataaggatcaaatggaatacaccgaaatactcaagttgcgtggtcttcctttctcggtgaagaagcctgaaatcgttgaattctttgcag

SEQ ID NO: 7790 - DNA, 982 bp, Gossypium hirsutum
  Clone ID: GOSHI-09MAY01-C65950_1
cccacgcgtcgcccacgcgtccggttttctttaggaagcgttcttcaaaaaattatctgagaaattttctggggtgtggcttgtgacaatcgaagatctaaaacaccctatacgactccatgcacggatccagaggtgaacagcggtatgggcggctatcaaccttacgggtatggtggtggctaccaacctccttcgtttccggtagtacgacttaggggtcttcctttcaactgcactgatatcgacattttcaagttctttgctggattggacattgtcgatgttttactagtcaacaagaatggaaggttctctggagaagcctttgttctctttgccgggtcaatgcaagttgagtttgcttttgcaaagggatcgacaaacatgggacgccgctatgtagaaattttccggtgcaagaggcaagactattaccatgccgtagctgcagaggtgaattacgaaggaatctacgataatgatttccacggaagccccccaccctctcgagcaaagagattcaacgataaggatcaaatggaatacactgaaatactcaagttgcgtggtcttcctttctcggtgaagaagcctgaaatcgttgaattctttgcagatttcaaaatcgttgaagacaggatacacattgcatgccgccccgatgggaaagccactggagaggcatacgtggagtttgcttccgtcgaggaagctaaaagagcaatgtgcaaggataagatgatgatagggtctcgatatgtggagttgtttccttcaacaccagacgaagctcgacgagctgaatcaagatcgaggcagtgaagaggtcctgttatctgggtttttgcatatgtagtctttggtttgtatgtttgtcattctagcctgaagaaatgcatgtcaacccatatttaatgggttatcttcttcctatgtgtgatctgctctcgaaaatataatctcctaatcctattaggtt

SEQ ID NO: 7791 - DNA, 332 bp, Gossypium hirsutum
  Clone ID: LIB3272-024-P1-K1-H8
gaagcgttcttcgaaaatttatctgtgaaattttctgcagttttcttcttacaatagaagatctaaaacaacctatacggcgccatgtacggatccagaggatttcaagatcgttgaagacaggatacacattgcatgccgccccgatgggaaagccactggagaggcatacgtggagtttacttccgtcgaggaggctaaaagagcaatgtgcagggataggatgatgataggggtctcggtattggggaatggtttctttcaacaccagacgaagctcgacgagccgaatcaagatcgaggcagggaagaggtccggtaatctgggtttt

SEQ ID NO: 7792 - DNA, 433 bp, Gossypium hirsutum
  Clone ID: GOSHI-09MAY01-C65490_1
ggaacggccgggccggcccagcgcgtcccgtttcgtgtagttataaaggatagtctcaatcggctcgattcgcctgcgtggcgggggtaaggatcccctcttttaaggatgaattcactttcgaccaaaggctggaagaatcccgcgatatcattgccaaatatcccaatcgggtccctgtgattgtggaaagatactcaaaagcagatcttccagaaatggaaaagaaaaagtatctggttcctcgggacatgtctgttggacaattcattcatatcttaagcttgagacttcgtctgagccctggaaaagcactgtttgtgtttgtgaagaacacgttgccacaaacagctacgcttatggactctctctatgaatctttcaaagaggatgatggttttctgtatatgtgttacagcagtgagaaaacctt

SEQ ID NO: 7793 - DNA, 718 bp, Gossypium hirsutum
  Clone ID: GOSHI-09MAY01-C65440_1
gaaaatttaataaattaataaagctctctgattttcttctttttttcgtcctcttccgcttccttcccttctttattcctttgtcctctttctttgaatgtttcagttcctgtctgtttcacctcataatccctcgtttttcctttcagtttccaagaaatttctgtagggttttcctgagctgggcataaaaaagatgggtatatatctcagcacccccaaaactgagaaattctctgaagacggcgagaatgacagggttagatatggtctatcatccatgcaaggatggcgtgctaccatggaagatgctcatgctgcgtaccctgatcttgatgcttctacttcgttctttggtgtttatgatggtcatggaggcaaagttgtcgcaaagttctgtgccaagtatcttcctcagcaggttctcaagcatgaagcatatgcaactggcgacataggagcatcagttcatagggcatttttcaggttgcttaatttgattactcgagttttatgcttattcttcgctattttccattgttgtgggagtcaacaactcaagtctgatgctggaatgatttggaggatttcgtgcttaatacctgctagtaataatgtctattgataaattcttcagcgcatgaggtttgagagaaacttttccattgtttccacacttcttgttataaattccacaaggttgaagttactatctcta

SEQ ID NO: 7794 - DNA, 525 bp, Gossypium hirsutum
  Clone ID: LIB3585-009-P1-K1-G3
cggacgcgtggggtaaattcaatgggtttcttttttctttaacttagcattcaacctaggatctggatcttcttctttttttttcaacatattttttcccttctcaagattcccatttgaattagcataggagttgtgaatttctctgataagagactatcttgtttgattgctgttgcatgtccttgaatttgataatgtctgaattaatagatcagttaccaaatgacgtttaagcgacaaattaagttattgccttactggttttaaaacttttttagatgcaagacttggggagatcaaataagccacacattattggatttaaaaaaccaacttaacttgattcattcatttccagacctagatgggtatatatctcagcacccccaaaactgagaaattctcagaagacggcgagaatgatagggttagatatggtctatcatccatgcaaggatggcgtgcagccatggaagatgctcatgctgcgtatcctgatctcgatgaatctacttccgtctt

SEQ ID NO: 7795 - DNA, 693 bp, Gossypium hirsutum
  Clone ID: GOSHI-09MAY01-C65380_1
gcgaattttcagagcaaatttcagtggttcacttcaaagcattccaataaaagtttcttttttatttattatctttggtcacttgcctccatctttcctttgaaatctttcagatttttttttaaatcagggtttctccgcttaaattaagcccaaaaaagggggaataatgttaaccagtaagacattaattcaacctccttccattcatctccaaaaccctaatcttaaaccctctccttcaatccctaaaagacccaccttctcatcccttccttttcaccgatcatttttactgtctttttcacataatttgacgccccgaaatcttagccgtcactgcattagccctggccaggaactgagttatgaaaatgaagatttagtcgaagaacaaaatgaagaagaagaagtggaattttcccggaaatttcaggaaaaagggtttagcaatttaaacatatggaatcaaatgaaagagattgtgatgcttactggaccggttactgggctttggctttgcgggcccttgatgagtcttattgatactgctgtcattgatcaaggaaactcaatcgagcttgcagctttaagtcctggcacggttgtttgtgattataccggttaattggttatgttcttttaattgcccttttaatttgtggccactttcttgtttacggataaaattaa

SEQ ID NO: 7796 - DNA, 874 bp, Gossypium hirsutum
  Clone ID: GOSHI-09MAY01-C65300_1
ggtggcaggaaacggtgcgtattcgccacgttttttcagcatctctttctcgattgttctctgttttttgtgttttattgcttgtttggctgcgaagagagtgagagagatcaggcaaaaatggcgtgtacgcacgaccacagctgcgagaggtcacgattgttcttctaatgggtctctttacaagcacatcgacctcgccaaggttaccgctttaaatgaggctaatccaggaagtgttaaatcggtgtttaaggcttgggaggagcgattaaattcttctggggaacgcttggaaagtaatgagggtgatcctgagttacttgtttacattccgtttacatcagatgttaagatcaagagtatatcagttgttggtggtgctgatggaacaagtccttccaagctgagagtatttatcaatcgagaaggtattgatttctctgatgctcaaagcatgcaacctgttcaggagtgggaattggttgaaaatctgcaaggagtgttagaataccagacaaggtactcaaagtttcaaagtgtggcaaatattacattgcattttcccgagagttttggtggtgatacaacccaaattcactacattggttttaaaggcgaagccacacagttaaaaagagatgttgttgcaacgattgtttatgaaattacgcccaatccttctgatcacaagacccgggctgaaactggtggaggactttctcatgtggaataaagaatatgtcgtggctctggttgttattgtcaagaatctgaccactccttttgaacatgctatggcgaaaatatactaatgttatgatagttaattgagaacccccccccccggccttcgctattggggtattatgct

SEQ ID NO: 7797 - DNA, 441 bp, Gossypium hirsutum
  Clone ID: GOSHI-09MAY01-C65330_1
actttcttttgtagtggaagaaaaaaaagagaaaaaattatggagacaaagtcattggcaatggtggtggtgataactgtttcagtcatgtggggcgttgaaatggccactgcagaactcagtgccgctcagtgcaagcaagaaaggaacctcgccattaccgcttgcaagccggtggtttacggtaagcttccgtccccggaatgctgccagcgagtaagggttacccatctggaatgcgtttgccccatcatcacgcccaagatcgccgcccttattgacgtcaaccgtgccatccgcctcattcaaggctgcggtcgaagtgttcctcgccactacaaatgtggaagtatcacaactccatgaaattggcataccttctgctatactactggttacttatgcttggaggtggaatcagcttctgaaattaaaataatt

SEQ ID NO: 7798 - DNA, 784 bp, Gossypium hirsutum
  Clone ID: GOSHI-09MAY01-C65220_1
ggtgcactgagcagaggttaaataaggaatggaaggtgaggaattcgcagtgggttgcttcctttcaattaagacaactttgggcgacgaatttgaaggtcaaattatcagtttcgaccgcctctccaacatcctcgtacttcaggagggtttggaatcaggacccagaaggaacattcggctgctgaaggctaatcacattaaagagttctctttattgcgccaagatgaagatcctcttgatgttaagaaatgttttttagaccttactagccttcaagcaagagaagattctgctattaggcaagctgaggctgattcagagaggtttggtgttggagttaccagtgaggcacagactctttttgatgctttgtctaaaacgctacctgttcgctgggacaagactgtcattgttgtaatgaatgaggtgcgtgtgagcagtccatatctccccgagtctgttagtggaggaactcctgcagccaatgaacgagtgagaaaagtgctggagtttgaaaggaagaggatgcaaactcgtggtactagccagtgacaaactcacatttgtgttcaaaggttggagaaaccaaaatgtgttatgattggtattattgtggtagttcttttgcctcacatttttcttattttattgaaagagtttaaacaaatgcctgatactgaattgttagtcctaatataatgctacctaccttttttagatgagtttgctggtaatgaagccagtacaagtagggggaagtccggggtatgattttaattt

SEQ ID NO: 7799 - DNA, 402 bp, Gossypium hirsutum
  Clone ID: GOSHI-09MAY01-C66970_1
cggacgcgtgggaacaaataccacgattttgtgtggcaacttggatctaaatgtcaccgaagaggtattgaagcaatttttcttgccattaggagaaattgtgtgtgtcaagattcctgccaccaaaggatgcggttatgtactgttcgcgaacaggaattctgctgaagaagccatacggaggatgcaggggcaaatgattggtcaacaagttgtccaaattacttggggtaggatcccaacagcaaatcaggacctacctggtagctggggcgcacaaatagatcctaatcagtggaatgcttattacgggtatggacaaggctatgatgcttactcttacggggctacccaggatccctctctctatgcgtatggtgcatatgccggatatgcacaata

SEQ ID NO: 7800 - DNA, 591 bp, Gossypium hirsutum
  Clone ID: GOSHI-09MAY01-C66860_1
gccaatatctgagtcaaacaatggaggactctggagatagcagcaagaagaagggttggaaggcacaggcttggatctgccacccaataagcatggcaatttgaagagtgcttccagcgatgaaaaccttaagcacattcttcttcgtgtcaaaacctctaaaactcctacggttatcaattacggagcctcatggtgcggtgtttgtagccagattcttcctgcattttgcaagttgagcaaccagttcccaaacttatcattcgtgtatgctgatattgatgaatgtcctgaaacaacgcagcatattcgttacactcctacgtttcatttttatcgagatggtgaaagagtggacgagatgttcggtgctggggaagagcggcttcatgatcgcttgtggttacattcctgaacaaccccatttatgtttatgttagcttgggatgctttcatgtatctaatcaatttatgccaatcttctgtctttcaggctattcacacttgttaaattatatcctttatggatggctgtcattgcacaaaacttttttatagctcaaatttgaatagaatagtagccaagattaa

SEQ ID NO: 7801 - DNA, 407 bp, Gossypium hirsutum
  Clone ID: LIB3272-037-P1-K1-F8
gataaactgacaatatctgagtcaaacaatggaggactctggagatagcatcagggggaaagggttggaaggcacaggcttggatctgccacccaataagcatggcaatttgaagagtgcttccagcgatgaaaaccttaagcacattcttcttcgtgtcaaaacctctaaaactcctgtgcggtgtttgtagccagattcttcctgcattttgcaagttgagcaaccagttcccaaacttatcattcgtgtatgctgatattgatgaatgtcctgaaacaacgcagcatattcgtgacacttctacgtttcatttttatcgagatggtgaaagagtggacgagatgttcggtgctggggaagagcggcttcatgatcgcttgtggtacattcctgaacaaccccat

SEQ ID NO: 7802 - DNA, 466 bp, Gossypium hirsutum
  Clone ID: LIB3493-037-P1-M1-A11
cagaatttttgagtcccaagttctggaggaaacctgaaggtcggttttctacttcaaggttatcttcttctgggcgcatgctttccctaaatgctgcacataacatacctgataaagattctcgcgctgaaacgtatataccagcagtcagccaaaggcatcagcatcaaggttgcggtggatttatatttccagtggctgatggttgcaacggtataactgataattcagggtcctcaaatagattgtcaaagaataccattcaaaatgctgagagggttcagcttggaaatggtagcgatcctgatgggacgactttagttcgttgtactgcaccaatgaaaccttagaagcaggtaatgtaatttcactgtattttattatataattctttattcagatcaataaatgctcttcgaatttgctatagtttatggctgtctagaggctttgtgcacttgagtca

SEQ ID NO: 7803 - DNA, 405 bp, Gossypium hirsutum
  Clone ID: LIB3272-032-P1-K1-H12
ggcgcatgctttccctaaatgctgcacataacatacctgataaagattctcgcgctgaaacgtatataccagcagtcagccaaaggcatcagcatcaaggttgcggtggatttatatttccagtggctgatggttgcaacggtataactgataattcagggtcctcaaatagattgtcaaagaataccattcaaaatgctgagagggttcagcttggaaatggtagcgatcctgatgggacgactttagttcgttgtactgcaccaatgaaaccttagaagcagatctcttcaactcaagagctatttcaagaaccagcctcaaagctagcagacaaatgtctcggatgataaaacacaatgaatcaagttgtagagatgcgaaggggtttggccggttacacga

SEQ ID NO: 7804 - DNA, 535 bp, Gossypium hirsutum
  Clone ID: uC-gsflmaxxa027f12b1
tcgtttttgagaaacaaaaaacagatagcttttgctctctctccctctcctcttttccttgcggctagggttttgaaaccctcgtcgccgccattgtcactgcgccaccacaggcggtagttgggacgttgcgagcttggctttctagcccctgtttaaagcgtccccaaaggccaagccttctcagtccaaaaggtgcgaaagagaggatcctttccctccctattcggtccgatcccgatgacgaatgagagccctccttagactaaaaccaccggcgactactgtgagaccctcttccctttccctttacttattttatgtcccacttttttttaaatggattttttttaaaaatataaaaaaaatgaatggaaaaacaaaataatagaatatcgtgatcaaccttaaccttgggtctgtttctttaaattcaaatgtgtgtgtaaaaaataccaagtatgtggattggtttttattgccggttaaagcaactctccatttcattccttttatttttttggaattaatcctt

SEQ ID NO: 7805 - DNA, 449 bp, Gossypium hirsutum
  Clone ID: LIB3272-031-P1-K1-H5
cgggacggcccgggcggaccgacgcgtgcgttgcagcccatttttttgagaaacaaaaaacagatagcttttgctctctctccctgtcctcttttccttgcggctagggttttgaaaccctcgtcgccgccattgtcacggcgccaccacaggcggtagttgggacgttgcgagcttggctttctagcccctgtttaaagcgtccccaaaggccaagccttctcagcccaaaaggtgcgaaagagaggatctctcccctccctattcggtccgatcccgatgacgaaggagagccctccgacgacgaaaaccaccggcgactacggtgtcagagaggtgccaggcgatggcagttggctcgcgaggaggcaaggcggcacgcgtggtggccaatggttggccaaaagttcggcagtagcattcttggggggctggctgctgcttgtttc

SEQ ID NO: 7806 - DNA, 466 bp, Gossypium hirsutum
  Clone ID: GOSHI-09MAY01-C66070_1
tctccacgcgtccggcttgtagtagtggaaaacatgagtagaggttggagctacggtggcggccaaagttccttgggctacctctttggtgccgatgagcggccaagcgcacccaccgtcacaccaccgatccagcctccatatggcatagatattaccccagagaaccctccccctcaatataaaccaagttcagagcaacagactgagaaaaacaccaccaacaactatcagagggctaaaggacagaatgcaggcaacttcataactgatcgaccatcaacaaaggtgaaatcaagttccaggtggagattcctccccgggttacctgtttggagacaagtgatgcaatgattaattccttcttacaagtttttaagaagaaaattggtgaactgcttccgataaggaattgaagataaacagataagtgggtttttttagttaaatacatgtgcagaagttg

SEQ ID NO: 7807 - DNA, 553 bp, Gossypium hirsutum
  Clone ID: GOSHI-09MAY01-C66000_1
ggatcgtataaggctgaaatgatgcctactcgtatacttatgatttcccaaactctccatctcatttctcccagagagctacttctagcatcataattgcaaattgtaatattaaagcgtcgatatggtgcttgtgagaggcccgcctgagaatcgattgtgatcaactgattgggatcaaccctctcccggagtaactgtggaagaagcatagcttgtttggagattataccttgaaactgaacctctccactctatacctatcatttccttgtgaagggcacacagcagaactaacagggaggttggttgctccaagcggttttgctcttgctataaatacaccatttgccgcttcatattcgttgttcgtgttttttttttctaaaggaaaatgttaggagctagttggaatatgtttaaggagattcaatgcaattgcctctttgtgagggcttttacaacttgattttgccaagcttcgtgatggtaaataattgggtgtttgggttgtaatttcatgcactgtcagcttatgaacactatccttagt

SEQ ID NO: 7808 - DNA, 793 bp, Gossypium hirsutum
  Clone ID: GOSHI-09MAY01-C66370_1
atggcgagcatttgaatcccaaccacatagttaatatatattatatttacatgaatccaatgtaagaaattgcgtgcatgtgagaaacatgtgccccgtaggtttcctttgtatcactatttaaatcctttatttgtctagctctattttacaagtggatttgtaattgaagtgacacagctaatatatgggtaattatgagccccaaaaggactgtccagtgtcggatccaataaaacccgaaaatttcctcttctaaatatcctcccccatttcccccattatatagtttaacccaaatatattgcaccctcacttcaatctcatactcgtcgatcccctcctgtcttaatcccacacatctctccatttatatacattagtaccccaggcagctagctatctagcaaaccattttttacatatctgcgaactatacatagtattagcagcgttttttgggaaaaaaaacggtggatcgaaggcatggaaaacgtccgcttccatccgaaacatcggaggagaaaagcaaaggacccgatgaatttgcagcagccgcaacttcatggactgaatccgcggacatgacagccatggttacagctcttactcaagtgatgggaagcgatgaacagcttagcttccaacaatcaccgaagccctcatcagtacaatgtgttaaagatgggattgtcaacatttttcagccggttgtgctccttttgtctgtcgtctttcgtgatattaacttgtttttgtgtcgagcagtcatgtacttatctttttcaagttt

SEQ ID NO: 7809 - DNA, 830 bp, Gossypium hirsutum
  Clone ID: GOSHI-09MAY01-C67950_1
cactggtcattcccctagtacaatgactgctcacgatgagcaatttgagggaggtagtggggaggttgatagctctacaaggctaattaaaaagcgaaaactgcttgatggcagttatggttgtttgcccttgcttatggatactgctaatttggggaattttaacagatattctgaatacgaggatgatgcatattcaagctgtgccaaaggccaaaatcctggatcaggtgatacagattcgtcttcaagcaacaagagaatgagaaaggataaaatccgagagaccgtgactgttttgcgaagcataatcccaggcggagagggaaaggatgcagttgctgttcttgacgaagctatcaactacctgaaatccctgaaacttaaagccaaaaccttgggacttaatactctatgagctgcaacctgcagcctgcagctgttctcacaagtagtattagttgttatttctgtcattgttagtggagctgtgttaaataagtgaagtatacacaatcttgcatggagtttttcatatataatttggagcccttccaaaaatagaagagcgtagacaaagaacatgaatccttcccaatgatattagttggaaaccagtagcataaggggtcgaaatctcatctctatttcctaaaggaagcaaaggatacatgagtgtatactatgtcccaataaaggaaggtgaaccatcattagtcaacatcttgggttgtagagaaagtgaaactcacagctaggcatgagggatgatgggtgggatgtgtgaatgagaagactggttattccaagagggacgcggcctcataaaa

SEQ ID NO: 7810 - DNA, 408 bp, Gossypium hirsutum
  Clone ID: GOSHI-09MAY01-C67910_1
ggagctttcgttttaaaacgaggaatcaacatttaagtggcggctcgcggggacacagtgaatagggaaagatggaagaaggatgcgaaattttgcagctctacgaaattccgtactcggatctcttgcttctatcatcttcttccgcatcgtgttcccattatcaagagagaatgataatggaaaacctggggccgacgggccctggcctcttcgctattacaaacgttcccgacgcttcgcttctccgacgaaagctcctccctcttgctcgcaagctggctcttcttagccccgatgatcgcaaacgtattctcagagaccacaacttggggagtgatgttccattgaaagacccagataggaatgtcttctctgtcgcgatgcagctcaaatatgctcaaggta

SEQ ID NO: 7811 - DNA, 531 bp, Gossypium hirsutum
  Clone ID: GOSHI-09MAY01-C67810_1
cccacgcgtccggctgttccaagaaaaaactagttccttggtctactacacgtctacggagagctacacactacgctacccttatcgttccctcgccattgccaagaacccagaagaacaggcctccaaaattggctgaaacaagttctcccatcttggttgttctgacagacaggctagttaaagataagaatggcgcacacctgcatttcgacatcggcatcgtctcttcggttgactagcctgcccttctcttcaaaatcaagcaccaatctttactctcataacttatctcttcctttccatccccttcctcccaggaaactgaagaagctatttagtaatcaaaagaatgcgaggggttctcagccaaaggctgtctacacaggtgagttttgggctccagagaaaagctctcgacatggaatttggtcaataagggatgatttgcaaatcccgtcgtcaccttattttcctgcatatgcacaagggcagggcccccctccaatggtgcaagagcgatttcagagt

SEQ ID NO: 7812 - DNA, 639 bp, Gossypium hirsutum
  Clone ID: GOSHI-09MAY01-C67580_1
ctttctgttcccaagcaaaagccattgtttcttcacaccttttgttttctaagtaccaacctaagtttcttctaatccgtagtctttttctttttcatggctttcctcaagtgggttttactgattttcactcttcattcgtttatgcctacacccatttcttcaaatctttcattaaccaaggaagccttagcgcaaatcccactcaactttctcgaattttccaagaaaccagagattatggattggatggttaatattagaagaaaaatacatgaaaaccgggagcttggttatgaagaatttgagactagtaagcttatacgagctgagcttgatcttatgggcatcccttacaagtacccgattgctgttaccggtgttgtcggctatattggcaccggcaagcctccttttgtcgcactcagagcagatatggatgctcttgccatggaggaactggtggagtgggagcataagagtaaggttcctggaaagatgcatgcttgtggacatgatgctcatgttgctatgcttcttggtgctgcaaagatgcttcaacataatcaaaatgatttgcagggaacagttgttcttatttttcaaccggcagaagaagggggtgggggagccaaaata

SEQ ID NO: 7813 - DNA, 490 bp, Gossypium hirsutum
  Clone ID: GOSHI-09MAY01-C67410_1
aaaaatctgaaaaaaaaaaaattctcttgaatggtaggtaagctaaagctaaaacaaccccatcatcccatttcttcattgttcatgctttagagacctttgacatgttcatatggccttgtttggtagtccaggaaagttaagtggactattattaagaattgggcagtgtttttctgcagctgcttcaattggtttcatggtttctgctcatggctttttttaactccactgctttctgctatttgattgcgtcaatggggattcaagttttatggagctttggacttgcatgtctcgatttccatgctttgaggtcaaagacaaacctacacaatcctgtcttagtaagcttgtttgttattggtgattgggtaacagccacattatcacttgcagcagcatgttcatctgcaggtgtaacagttctttattcaagagacttgggttactgcagatcaccacaaataccatgctcccatttcaaagc

SEQ ID NO: 7814 - DNA, 379 bp, Gossypium hirsutum
  Clone ID: LIB3272-049-P1-K1-G4
gtgtgttagaaagaaataaaaacaacgcagggcccaaatctctttgactgagggcggctaacaccacttccggagggcgaattagatcttaaaagtgcctcatttctgcttctaatggccgtaatgaagttcacatggagatccattatcccaaggctttcaaagggtattcaataaccacaaccagacgccgttcccgaaccagcgtctcagatgcacgattcaacccctggttctatttccatgcttgcaatgatagatttaagttacccaagttcgaggttcaccgaggatcttgccacatcgcttgccagttcaaatctatatgtttttacactgtgcgaattaaaggcgataacacagtgcttctcatcggcta

SEQ ID NO: 7815 - DNA, 388 bp, Gossypium hirsutum
  Clone ID: LIB3272-049-P1-K1-F6
gtgtgttagaaagaaaaaaaaaaaacgaagggttcaaatctctttgtctgtggggtttccagaccagttcttgttggcgaatttgatcttaaaagtgcctcatttctgcttctaatggccgtaatgaagtccacatggagatccattatgccaaggtgttcaacgggtcttgaagaaccacccgcagacgccgaggccgaaccagcgacaaagtaacaagattcaaaacatggttctttttccaggcttgcaatgatagatttaagttacccaagttcgaggttcaccgaggatctttccacatggcttgccagttcaaatctatatgtttttacactggcggaattaaaggcgataacacagtgcttctcatcggctaattttctag

SEQ ID NO: 7816 - DNA, 927 bp, Gossypium hirsutum
  Clone ID: GOSHI-09MAY01-C67160_1
gtttttaagcgatgctccaaattggggaaaaaaaccccttcgaggtttgagttactgagcgtggttagaaaacactcgaatttattagggaaaacgacggtggatgaggaagatgctaccgacgttgaaatggacggtaaattttggcatgatgtcttcgatttgtatttcgttaggggtaaggaatcgagaggtcgacaagatgatgatctcatatttttcgttcggaaatggaaggggcatggttttaacgaaagtgaggaaagtgttgctccttactttgtacgcaggtgggcacctgagttagataagttagttggcgacagtttatcggttgtggattggcggcgctcgttttacttgaatatgattgcccatacttcgtactctgtaacagtggcgagttgcagtcacaatgtccttagaaatcatcaagtggggcaagacacaccattatctgctatctacaaggttgtgaagactgtttatgcatctcccagtcgagtaaattttcatttggactcaaaaaaggaagtagagacaacacctgcctatccggacatctgttttgcaatagatgattttgactctacttttgatgcagtggtcttgacagaaacagaacattgctattgtgttcttcttaatgcgcttgatggggcagcttttcctagtgaaaaggatacaaatgatagcaggtccagcaacaaagtaccattaagagtagatactaattctatgaagacgaaaaatagtaagctcacacttttttctggatttgtcagctatcaaatggtccgggatgcatatgatgctgggagttctggatttggaagtcttctatcaatgggtcattcctctggcaaaaaagacagactttacatgaaaggtcctgaaggacgtggggaaattgaagtagctgttctg

SEQ ID NO: 7817 - DNA, 607 bp, Gossypium hirsutum
  unsure (1)..(607): unsure at all n locations
  Clone ID: AI054660.1
gggcaagatacaccattatctgctatctacaaggttgtgaagactgtttatgcatctcccagtcgagtaaattttcatttggactcaaaaaaggcaagcctttctacttccaggaaatcatggtgacattgagattttcttcaattctttggcatgctcacttgcttggatacaggaagtagagacaacacctgcctatccggacatctgttttgcaatagatgattttgactttacttttgatgcagtggtcttgacagaacagatcattgctattgtgttcttcttaatgcgcttgatggggcagcttttcctagtgaaaagatacaaatgtagcagttccagaacaaagtaccatgagagtagatactaattctatgaagacgaanatagtaagtnttgggtcctttctagctntgtgatattnatgtgtattgatccatgatcaccagagtcttcacttctgaagaggtacttacaaacactgcttgggttttgatgttacataaatatggaagtggtatataatngtttttcctgacatttgtacatttaatgatgccacttgaatatntatctcatgactatttngntatgagttttaata

SEQ ID NO: 7818 - DNA, 371 bp, Gossypium hirsutum
  unsure (1)..(371): unsure at all n locations
  Clone ID: uC-gsflnu33B131d11b1
tttcttccacgcgtccggtacttgtcgacctctcattttgcagatggttcattaccgttctgcacttgagcctcgttgtcgctttcaggtcttgacagaaacagatcattgctattgtgttcttgttaatgcgcttgatggggaagcttttcctagtgaaaaggatacaaatgatagcagttccagtaacaaagtaccattgagagtagatactaattccatgaagacgaaaaatagtaagctcacacttttttctggatttgtcagctatcaaatggtccgggatgcatatgatgtggngagttctggacttggaaagtcttctatcaatgggtcattcctctggcaaaaaagacagactctgcatgaaa

SEQ ID NO: 7819 - DNA, 748 bp, Gossypium hirsutum
  Clone ID: GOSHI-09MAY01-C67060_1
gttcttcttcaaaggcttctttcttttcaggtgaaaatagcagtgaaaaggtaggggtaatggagacaggagcgcttatagaaaatactgctaaaacaggagggccgggtcttgtgctggggggcaagttgatggaccagattgagtggctccctgtatcaattgggaaattaaaggatgtgagcgaattggacttatccgaaaaccgtatcatggcgctaccaccctccattggtggccttcaagccttgacaaagcttgatcttcactcaaaccaacttataaaccttcctgattcgattggggaacttatgaatctaacagagcttgatctccgtgcgaacaggttaaagtcgctgcctgctacttttgggaacttgataaacctcatgaatctagatttgagttcaaatgagttcacccatttgcctgagacaattggaaatttaacgtctttgaggagactgattgttgaaacaaatgagcttgaagaacttccatacacaataggaaattgctccttatttttggagctaagattagattttaatcagataaaggctcttcctgaggctgttgggaagcttgaacgcttggaggttctcactgcacactataacaggctcaaagggttgctcgacaacaatgggcaacctttcctatctaaaggagctcctcgtacgcttttcgtggtttgtagtttatttctggagaacctctttttttttcagttaattttttcagaaaa

SEQ ID NO: 7820 - DNA, 1026 bp, Gossypium hirsutum
  Clone ID: GOSHI-09MAY01-C67280_1
cggcgcgtgggcggccgcgtgggcggacgcgtgggttcagccactggcagatgcagcaaagctatttcttgctgcaaaatacaaggatgtaaccaagttccaggatgaggtactcaacttgcctcttgctggtatagaggcagttttttccagtgatgatctccaggtagcttcagaggatgctgtttatgactttttgctgaagtgggctcggactcattacccaaaactggaggaaaggcgtggagtttttgctacacgccttggccgactaatccgccctcccctccggacttgcagaaagcttaaaaaagttttaacctgcaatgactttgatgcagaaatttgcccccaagatggtgctcgaagccctctttttcaaggctgagacaccacagaaccagcgtgctcttgcatcggaggaggcaaatgccccttttcgccactttcttgaacgggcttacaagtaccgcccagtcaaggttctagagtttgaaaagccaaaacaacagtgcgttgtgtacctggacctgaagcgcgaggaatgcgcgcatctgtttccaggtggtaaagtttattcacaagcattccatcttggtggacaagggttttttcttctccgcacattgccatatggaccagcaaagctcattccactgctttgggctatttttgggaatgcaagagaagggtgccgtcacttttgccgttgactatgagtttgcagcaaggtcaaaaccaactgaggattacgtaagtaagtacaaaggtaactacacattcacaggctgaaaggccattggctatcgtaacctgttcggtataccatggacgacattcatggccgatgatagtaatttcttcataaatggtgtcctccatctcagggctgaactaactgttagacaatgagatttagctaggtttatatagtattgtatacagtccattagattactatatcagttactgatacggcaccatgtgtaaatacatttggaatacatagaattttgaataatttgg

SEQ ID NO: 7821 - DNA, 369 bp, Gossypium hirsutum
  Clone ID: GOSHI-09MAY01-C60810_1
gcctgagacacccattgattggccaacaaggatgagaatagcaaagggtgttacaagaggtctgatgtaccttcacactcaagaaaacatcatccatgggaaccttacatcaagcaatgtcttacttgatgaggacacaagtgctaaaatatcagattttggcctttctcgtctaatgacagctgctgcaaatgcaaatgtaattgcgaccgcaggagcgttaggttaccgagcaccggagcctttcgaagctcaagaaagccaacacaaaaactgatgcctatagccctggtgttatcatattagaactcctaacagggaagtcccccggagaggcaatgaatggagtggatttgccacaatgggttg

SEQ ID NO: 7822 - DNA, 448 bp, Gossypium hirsutum
  Clone ID: GOSHI-09MAY01-C60540_1
ccagctgaggccggtccgcaatttccgggatgcaagatggccgttgaaaaagttgagaagccagatactaaagagaagaaacccgaagccaagaaggctgatgctggtggcaaggtgaaaaagggtaacctcaaggctaagaagcccaagaaggggaagccccattgcagccgcaaccctgtccttgtcagaggaattggcaggtattcccgatctgccatgtattccagaaaggccatgtacaagaggaagtactcagccgctaaatccaaggttgaaaagaaaaagaaggagaaggttcttgcaactcttacaaaaccagttggtggtgacaagaacggcggtacccgggtggttaaacttcgcaaaatgcctagatattatcctactgaagatgtgcctcgaaagctgttgagccacggcaaaaaacccttcaatcagcacgtga

SEQ ID NO: 7823 - DNA, 741 bp, Gossypium hirsutum
  Clone ID: GOSHI-09MAY01-C60570_1
ctctcctcatctccaccgtttcgaactttaccgatttattcttaaaacctctgcccaaacttcgaccacggcgaagcgagcagagatctaacggtgtgcttcaagaaggtaaaacctccctctcttttctcttttatttttcgccaagaaaagagaaaaaggaaaaaaaactaaaagaaaacgaaaaagagagccagagagaatcgagaaatcgcctttccttattcagtttttctgtatttcgtaatgatttctccctttttattcaacaataaataaatttcaaaacaaagaagcagaaacaatgaacaatccaaaggagaaaatcaaatctctgatccgggggaaactttttctggtttttggttgtattcaatatctgtgtctgtgtaaaaaaaaggaaccaaaaacccttttacaaattcgaaaatggctttatacagccgaaaataaaatagaaatttagaggaaattcttttctaaatttctgctatttttctctgctatcctcgcgtattttgctgctgttgcccctttgttcggtttttcttgttttgtgttgcgttgtctattcttgtttgttgcaggtacgacctggaggagaagaagcacgtacgcgcggaggcgtagcacgcccgggagggggccctgattgctgcggcgctggatgctgcgttgctaccctagggtttctgattctctttggtgttgggccgatgattggtgggctaggggtaattg

SEQ ID NO: 7824 - DNA, 644 bp, Gossypium hirsutum
  Clone ID: GOSHI-09MAY01-C60430_4
cgtgttattcttgtgtgcaaccatgcatgtagaaccgtgcagagttctcaggtggtggctccaagagctgaacccgatgacaacaccatggatatgctcttagttcacgggagtgggcgactccggttgatgagattttttgtgctactacagatgggtaaacacctttcactgccatatgttgaatatgtcaaggtaaaatctgtcaaaattaaggctgggaaatgcacgcataacggttgtggcattgacggtgagtatttccccctcaatggagaagtagtgtcatcgttgcttccggaacagtgcagactaattggtcacttccgtggccatcatgatgtctgatgaagagattttttatttatttgaaatgttcttgtcatatctagaatgcaaaaggctccctacaagactcacggctctgtgagtatgcggagtatgcttaagacatattttgtctgaatattatattatatcacatgtgaaacccctcccatttgtgccattaaacatgcaatgagggtttctgtaaatttttatttttgctgggtttttgtgtatctgttgctttgtttaactccgtggtcttgtttctttctgtgtgggcttctcaatgtatggaaaattctttcttgtttttc

SEQ ID NO: 7825 - DNA, 1101 bp, Gossypium hirsutum
  Clone ID: GOSHI-09MAY01-C60430_2
gcgttcggacattgtgtagcactctgccggccagacgtgtgaattgtgcgtggccttgatcctaaggctaaacggttgtcgtttgggagaaacaatgtaacagccgagcctgaagttattcaccctcagttaccaccctcatcgactccaaactggcctcggaccagatcaaaatctaggacagataaaggatggagtggatcgactgcagcacatgatccttcgagatgttcttggggtaatgctgcaacaaatgatagagaggggatatcttcaacattgtccgatcctggtccaatttgggatgctgaaccaaagtgggacactgaggctaattgggatgtggaaaatccaatcgagttaccagggccatcagatgatgttgattcaggaataaataaggaagttgtcccaagacttgaagataaatgggttttgaccaaggggccatttcttggcatcattgtgtgcaaccatgcatgcagaaccgtgcaaagttctcaggtggttgctccaagagctgaacatgatgacaataccatggatatgctcttagttcatgggagtgggcggttgaagttgatgagatttttcttgctgctacagatgggtaaacacctttcactgccatatgttgaatatgtcaaggtgaaatcagttaagattaaggctgggaaacacacgcataatggttgtggtattgatggtgagtttttccccctcaatggacaagtggcatcatctttgcttccagaacagtgcagactaattggtcgcttccctgaccgtcatgtataatgattaagagatgtgttttttgaaaatttctttttgccaatatcttggatgccggtgctcccttctcctctcgtgagtgtccttatacagaaaacaatgtcttgtgatatatttttcatgttaatccctccccatttgtgccattacatacatacagtgaggacccctgtaaatttttgttgggtttatgtatctgttgcttgtttattatgttcttactcttacagtaaatacactttcctcccgttagattctgtgtgactgtgagcttctaaatgtattaaacatttaccctctttgttt

SEQ ID NO: 7826 - DNA, 796 bp, Gossypium hirsutum
  Clone ID: GOSHI-09MAY01-C60430_1
cggtcgcgtgggcggacgcgtgggctggtcttattcactttgggatgacggtctcctattatggttttgtcagtgatgtcttaaagctttctgagaaatatcagaaacgatttggtcctctacgatattttgttgctgggttcttcaagtttttgtgtttgccaacatacaactatgaagtggagtaccttcctgcagagaaagaggatcgagaaggtaaaacctctgctgatcgggaagtagttgacatgtctgacctgtacacagacgttataaggaggtcatacatagatggcattcctagagcctcgagtttatctagtattgattcaataatgactcctagccgaatgtctggaggcgagatggacacttctagtaatatgcatgccagcactgaaccatctgaatatgtacgaggccttgatcctaagactaaacggctgtcatctagcagaagcaatgtaacagctgagcctgaagttattcatcctcagttaccactctcatcgactctaaactggccacggaccagatcaaaatcaaggacagataaaggatggagtggattgactgcagcacatgatccttcgagatgtccttggggtaatgctgcaacaaatgatagagaggatatatctccaacattgtcccatcctggtcaattgggatgctaaccaaagtggaactgagctaatggattgtggaaatcatcgagtacaggccatcgatgatgtgatcagataataagagtgtcccagactggaaaaatgtttgaccagggcatcttgcattt

SEQ ID NO: 7827 - DNA, 572 bp, Gossypium hirsutum
  unsure (1)..(572): unsure at all n locations
  Clone ID: LIB3829-006-Q6-K6-F12
cggncgcgtgggtccaagtcaggtcggggtcgttctagtaaagttttccatggaattgtcgaaccaatatttaagcttgcagggtttaaattggaggttgtcaaaacaacatctgcaggccatgccaagaagctggcatctacagttgatatcagcacatgtcctgatggaataatatgcgttggtggtgatggcattatcaacgaggttctaaatggtctgcttagtagagacaatcagaaagaaggaatttctatacccattggaattataccagcagggtcggataattcactggtttggactgttcttggagttagagatcctgtctctgctgcgatttctattgtgaagggaggtcttacagctacagatgttttcgctgttgagtggattcagactggtattattcactttggaatgacggtttcctattatggatttgtcagtgatgtcttaaagctttctgagaaatatcagaaacgatttggtcctctacgatattttgttgctgggttcttcaagtttttgtgtttgccaacatacaactatgaagtggagtaccttcctgc

SEQ ID NO: 7828 - DNA, 682 bp, Gossypium hirsutum
  Clone ID: GOSHI-09MAY01-C60790_1
gaagaaccgaagtcaccggaaagtgacgtcaccagcatgagtttcgaggagacgaagctgactttaggattgccaggggagggacgatcgtcggcgggagctgttaagtgttctgcaaaacgtggcttcgttgagaccgtagtcgatcttaaagtcgggagttctggtaactgcatgcctggtggacgtgatgacactactactgttatcgattccggtgccggaaaacctcctcccgccaaggaacaagttgtgggttggccaccagtgagatcaagtagaaagaaggctataaatgagaggtttaggtatgtgaaagtagccatggatggagctccatttcttcgcaaagtaaacttacaatgttactctagttacaaccagctcttgaaagatttcgacaacttattcgattgtagtaataaagaggaaagcaagcttatggatgtggtaaaaagaatggagtatgtaccaacttatgaagacaaagacgatgattggatgttagttggagatgttccttggaaaatgttcgtagaatcatgtaagcgtatccgtctgatgaaatgctcagatcctactgtcttcaccttagcatcaaagggctgttcttcttcctcttctcaaaatgttgaatcccaagctgagttcatagtgagtgtggttatatatatatatgtat

SEQ ID NO: 7829 - DNA, 434 bp, Gossypium hirsutum
  Clone ID: GOSHI-09MAY01-C60630_1
ccatcatgtctgagggtgttgtttgaaatgatgatggtttgcagcctagatttcaaaaaactgtatgccgcgtggaagacctcctataatggatctgaaaacagcttatgatgctgaactcagtggatctagaattcagcatgaactatggccattagatgaaattgctccggggaaagcaaagtttccttgctggctggtttggaccccactcccagttgtctcatggttggcaccttctcattggccacgttggcatttgccgagaagctggcccgattctggactgttcaggatcatattttgcgaatgtcgcggattttgcttttggtgctgcagctcgatacgttcaactcgatagagaaaagtgctgctttcctcccaacctggctggtcacaaatgcaagcacgggtatcagcatgaagagtttggg

SEQ ID NO: 7830 - DNA, 471 bp, Gossypium hirsutum
  Clone ID: GOSHI-09MAY01-C60150_1
ataatgaccgtccttattaagcgtaataccaccattcctaccaagcagacacagaccttcactacctattctgacaaccagcctggtgtgcttattcaggtctatgaaggagagcgtgccatgaccaaggataacaacctgcttggcaagtttgaactcacgggcatacctcctgcaccccgaggtgttcctcagattgaagtcacttttgacattgatgccaatggtatcctgaatgtctctgctgtggacaagagtacaggaaaagagaataagattactatcactaatgacaagggccgtttgagcaaggaagacattgaacgtatggtccaggaagctgagaagtacaaagctgaagatgagaagcagagggacaaggtatcatccaagaattcacttgagtcctatgcattcaacatgaaagcaactgtcgaagacgagaaacttcaaagcaagattaacgatgag

SEQ ID NO: 7831 - DNA, 1116 bp, Gossypium hirsutum
  Clone ID: GOSHI-09MAY01-C61470_1
agacattatgcttgatcagacatctgagtgttcatcctatgggttaagcaggagagaaactgcagatcttgataatcagatgcttgagttgtgggaaacaactgaccaagatgttaacattgccttgaaagttggcagggcccagaaggttgtcattgctccaactggcaaccaacgaattggtgctgcaaaggcacgcaagggcaaaagtctttctacagaatctcttgtgaaggagttaggtgttgatagagagagctctaagagatttacagagccttaccaagaaggaagcaagaggaagattatagaaagacttgattctgatgcacaaaagttggctaaccttcaaataactgtgcaggatctgaagaggaaagtggatataaccgaggcaggaaaaatggtgataggaatcgaatatggtacggtaaaacagcagctagaagaagctgaggaagccatcatgcagctatttgatgtcaatcgcaaactgacgacacacgttgaagatcgttctcggtctcttgatgggaaacctgcactagaatctgatgagagtggttcctttaggaggcggagagtatcagaacaagttcgaagagggtctgaaaaaatagtgcggttgcaattggaggtgcagaaaatacagttcatgttactgatacttgacaaaaaagaaagtaaaggacaaaccaggatcatggagcgtaaaacaagagttgtattgcgggactatctttatggcgggataagaaagaaccacaagaggaagaaagcaaccttttgtgcatgtgctaaacccccaacgaaaggagattgagccaattacttatcagcggcacaaaatcagtgcagttttctggtactgagattttagttgcgttgtccataaatctgccttcctaagtttttgtttcacataattattttcttttagaggtcatcttcttctttagtttagacatcctgctgtatatttcaggcaccatctaatctaaagaagctgtaactttgtagcctaaaacttcccttctctgtacgtttaacttggcataaatatggatttcgttggaaaaatagataaatgacaagaaagtaaaaagagatctatat

SEQ ID NO: 7832 - DNA, 384 bp, Gossypium hirsutum
  Clone ID: LIB3196-031-P1-M1-E8
atcttttctgattctggtggatcctccctggcgtaattaaaggctctttgcgcctccccatactatgaaatattatctaggagttgaccctgaatgatccacgggcaaaccagaggttaggggttaaattgaaccgtagcctgccaacatgtttaatcattctgtctctaaaatatttaattatagtgtcagatggtaaataatatatcctcaccgccacaatgttaccccactcagcctataaccactactgctgccgccatcggcaccgcggccacatttactccgactaataacattccgctcttggatacttcagctgcatttttgttttaccaaagagtaacgtctgcggacttctttcagtttcaggttcactctata

SEQ ID NO: 7833 - DNA, 374 bp, Gossypium hirsutum
  Clone ID: LIB3196-031-P1-M1-E9
cccacgcgtccggtttctatcaatgaagattgctactttgaatcctatgttttattatctaggagttgaccctgaatcatttatggtcaaaccagaggtaaggtattaaattgaaaaatagtttgataatatgtttaattatttgtctctaaaatatttaattatgtttcagatggtaaataatatatcctcaccgccacaatgttaccccactcagcctataaccactactgctgccgccatcggcaccgcggccacatttactccgactaataacattccgctcttggatacttcagctgcatttttgtttcaccaaggagtaacgtctgcggtcttctctcagtttcaggtacactctatattagggtttt

SEQ ID NO: 7834 - DNA, 617 bp, Gossypium hirsutum
  Clone ID: AI055296.1
cttagtaagatgggtgaaggttagccgtcaaagtgctctgctgtgagatcttttaatttttgtgattctggttgtagcacatttcagccaaaattgctagtgttgtaggcacatttggtcgagttttggaatgttgggaccgtcaaaatcgagagtatgttgcaattaaagtagtcagaagcatccgtaagtaccgtgatgcagcaatgattgaagttgatgttcttgaacatctggctaagaatgataaaggcacctcacactttgtgcagattcgcaattggtttgattaccgcaatcacatttgtatagtaagtattcaatgaacttttagcattatctatttcttttcagtcgtgcatttggaaattgtagtattgggaactttttattttaagctagaagatttcttaacattttgataaaaagaatggctgaaggttgaattatgcttggcttttaaactgatggagtttgtttccttttagttggcgtggatttttttagcgaacctgttgaaatttaagctttgatgaaaatttagatttcgttaattccttggtatttgtcccttagggactttttatgtatttgtatatttaaaccttctgggatct

SEQ ID NO: 7835 - DNA, 580 bp, Gossypium hirsutum
  Clone ID: LIB3825-005-Q1-K6-H11
tctggttgtagcacatttcagccaaattgctagtgttgtaggcacatttggtcgagttttggaatgttgggacggtcaaaatcgagagtatgttgcaattaaagtagtcagaagcatccgttgatgcagcaatgattgaagttgatgttcttgaacatctggctaagaatgataaaggcacctcacactttgtgcagattcgcaattggtttgattactgcaatcacatttgtatagtatttgagaggcttggaccaagtttatttgattttctaaagagaaataaatactgcccatttcctgtggatcttgtagcatatatgcatgatttacgcttaatccacactgacctgaagccagaaaatattcttcttgtatcttctgaatatgtaaagcttcctggctgcaagaggagttcttcagatgaaacacatttcaggtgcttgccaaagtcaagtgccattaagctgattgattttggtagtactgcatttgataatcagaatcatagctccattgtttctacgaggcattacagagcccctgagattattctaggtctaggttggagttatccatg

SEQ ID NO: 7836 - DNA, 472 bp, Gossypium hirsutum
  unsure (1)..(472): unsure at all n locations
  Clone ID: LIB3584-027-P1-K1-H12
gnggtacaaacttggttatgaataaaaaatgcttgaaatggtacagagttcttcagatgaaacgcatttatggtgcttgccaaagtcaagtgccattaagctgattgattttggtagcactgcattcgataatcagaatcacagctccattgtttccacaaggcattacagagcccctgagattattctaggtaatgaatattctgtttctctttgtctgtttggtgttttgttctatttcccaggtattattctagtttccagttgagttcaaggaagggtattttaggacagcatctgaaaatctaatagaaaatagtcgaatgacttactgtttggtttcccttttgagttcgtccattttaatatcttgtatgattgaattgcctagattgtttctgtatattgcttaaattacttcgacactttccatgtgagctaatctgtgttttggcacccatcaaatgtccca

SEQ ID NO: 7837 - DNA, 351 bp, Gossypium hirsutum
  Clone ID: LIB3196-022-P1-M1-F7
tgaaccttctttttagcattatatatttcttttcagtcgtgcatttggaaattgtagtattgggaactttttatttcaagcaagaagattagcttaacattttgatatgaaagaagtggctgaagtgttgaatttgcttgttcttttagactgaatggtgtttgtctccttctcggtttgccgtggatctttttaggcgaactaattgaaattgaaagctttgatgagatagttgaatcagttataattccttgattatattttgcccttgtggacttcattcatgtaaattgggactaaacaagaaccttcctttggatgcattttaatggtgttaccaggtatttgaga

SEQ ID NO: 7838 - DNA, 393 bp, Gossypium hirsutum
  Clone ID: GOSHI-09MAY01-C61390_1
atggagccggagcgcatagacctcgcagacctcgccggcttcacactcacctcggtgtctgctgcacccgccgcttcttctcctaggccacgagacccagcggctagaaattcaccatgtctattctcaaggtccatgccagggagatctttgactctcgtgggaatcccactgttgaggttgatctcttcacctcaaaaggtctcttcagagctgctgtgcccagtggtgcttcaactggtatctatgaggccctagaactccgggacaatgataagactcgctatatggggaagggtgtctcaaaggctgttgagcacatcaataaaactattgcgcctgccctggttagcaagaaactgaacgtcacagaacaagagaagattgacaaac

SEQ ID NO: 7839 - DNA, 430 bp, Gossypium hirsutum
  Clone ID: GOSHI-09MAY01-C61330_1
gcgacaccatctaactagagggaacgctgaagcgcgctcaggccccgccccgatatccccgatccgtgccacacactcggcacggtgaacagcacgtcgttgttgatgatggagtgcgtctcaaatgggagccaaatctatacaaactgccaaggctagcgaaatgagccatcaaggttgaaatcgaagagagcagcgtttaaaaggtactaagccttttacaaattgaccagtacctgaccatcacatctagagcaggggcagctcgtcccacatagacagtgcgaagaagaaagctctcaacaaagaatctacttcacgcacacagatttatggatgatcagacctgtcagagagagacacattctctagtgaaccctgtgttatatgaagcgcttgcctacactagacacagagcgtaaaaacaact

SEQ ID NO: 7840 - DNA, 692 bp, Gossypium hirsutum
  Clone ID: GOSHI-09MAY01-C62850_1
ccccgcgtccgataaattgtcctctattgacatctcttgatgcatccttttgcagccaactcaaggatgattgcttatctgcaaccactgcttcctgccctcttattgagtcactaatattgatgtcttgcccatctattggttctgatggtcttttctctttgcgctggcttccaaatttaactacacttgatttgtcttacacctttttgacgaatttgcagccagtttttgagtcttgtttgcagctcaaggtgttaaaattacaagcatgcaagtatctggcggactcatcattggagcccctttacaaggaaggtgctttacgagaactccgggatttggacttgtcatatggtaccctgtgccagtctgccatagaggagcttcttgcttattgcacgcatcttacccatgtgagcttgaatggatgcataaatatgcatgacctaaattggggttctactggtggtggatttgaatcacttaacggatctagcatgtttccttttgagaacatgaatgactcaattgagcaaccaaatcgtttactgcagaacctcaattgcgttggttgtccaaaatatcagggaggtgctcatcccaccagctgcacgttgtttccacttatcatccctaaatctttctttgtcagtcaatttaaaggaagttgaccttgcttgttacagcct

SEQ ID NO: 7841 - DNA, 456 bp, Gossypium hirsutum
  Clone ID: GOSHI-09MAY01-C62450_1
atgttgagtaggcagaaaaaggagcctattcattaaggattaaaaggtataggccagcacgtgtaccatcgacttcaagatttctgaatccatatgtcgtatgtttcattgtcgtcgcaggggtagtgatcctggcagtgaccatagctctacttgtttactttttagcttttgatcaaaaatcttacttttacaggagcagttgtcaactcctaaatgttgtatatattagtcagttaaattcaccagctacacacgaatacacgactttgagtggaagaattgaatctctgattactagaacattcaaagaatcaaatttaagaaaccagttcatgagagctcatgttgtcaaactgagtcaagatggtagtggtgtgagagcggatgttgtcatgaaatttcgattcactagaaataacaatggagcatcaatgaaaagcagaattgagtctg

SEQ ID NO: 7842 - DNA, 568 bp, Gossypium hirsutum
  Clone ID: GOSHI-09MAY01-C62780_1
cgatcggcggcgggctgctctggtaaaaaaactattctctattccgcctcaacccgaaacagctttctcaatcaacgaccatctgcgagtaatggataacatagtagattccttaaacaaagcctaccaagaattcgttgcagcagcagctaatgtcctcgaaactaagggatcttcggctgcccaaaagacggaatccaccgatacggcattggaaagctttaaacaaaaatgggaaacattcggactggcttgcgatcaagctgaggagtttgttgagtcaatcaaacaaaggataggatccgagtgcttggtcgatgaagccaccgggaattcgtcggagcggttgactggcctgccccccatcagtgccgtccgtttggagcagatgagtaaagctgttagatggcttgtgattgagttgcagaacggttcgggaactgccgctcgcccacccatcgacacctttcgatggtagggtctcggaggattggtggtcaataggtaggggggtttgtcttttttggattcaatgtgcgtttaaaattgccaaatgatgaaaaatcca

SEQ ID NO: 7843 - DNA, 711 bp, Gossypium hirsutum
  Clone ID: GOSHI-09MAY01-C62710_1
ttggtcaccaaattcattatacatcatttcccgtgaaaaccaaactgaatatctggatgggtatcgttggtgaagaaccggttctgtctagactagatcgagtagacaacatggtaaggcagttggaggaaatgagagggagccatggtaatggtaattataacaggtctccaagcccaaggagctctagcgcatccaccccatcaagtgggacgttgggcagcacatgtacggagggtcatccttcatctatcgatttctccccaaccgccaagtccctggagaagtactgtcgtcccattgatcatgtcatggtggagactcagctcaaaggaacgctccttcagaggctggaccaagtagaggaccgcctactcaagctgtgtgtgcagttggaggaagaattggaagaagagaagaagagggaagcggtccatgttgagaagaaggggcccaagaaaggaatcaaacaatttgtgaagcaatgtgtcaaagggaaacactctaaacaacccaaaggaacggaatggaatggaaaggcaaagagcagcctcagcctcagccttggttcaaatataaaataaaaacttgatatgtataatttgatcatgcatgcatgcccctctcttttgttgttgaacagattttaaacaagtagatatttttaatatgttctcccatgctccttaaatggggagctgttggtttttc

SEQ ID NO: 7844 - DNA, 358 bp, Gossypium hirsutum
  Clone ID: LIB3196-037-P1-M1-A11
caaaaaagaaaatgtcaagtgctttagagatgtcgctcgacgatctcatcaagcgtaaccgtaagccgagatccggcaaatctcgcggccggggacgtggatccggacctggaccggcccgccgttttcctaatcgtggagcaaaccgctcggcaccgtatgctcctgctaaggtgctggagacgacgcggcagcaggatatgttttccgataagggagcggcgttgcaaggactagcgggtcggaattctggaatagaaaccggaacgaagctctatatctctaatttagattacggtgtttcaaacgacgacatcaaggaattggtttctgaggtcggtgacctgaaacgattttc

SEQ ID NO: 7845 - DNA, 350 bp, Gossypium hirsutum
  Clone ID: LIB3272-047-P1-K1-G8
cggacgcgtgggctttgactgaatcctatatcctctctctgatttcgtttttagggttgtatttttctttgttctaattcaaaaaagaaaatgtcaagtgctttagagatgtcgctcgacgatctcatcaagcgtaaccgtgagtcgcgatccgcctcatctcgaggacaaggactcggtttcgcaactgcaccggaccgacggtttcatggtggcagagcatccccaccggcccttagtgcttgctgtacggctcctgtgacgacgtggtcagcgcttgctccgtccgttccgcgacttgcgtcgcgattccctcccttcttgctcttctttctacgcgaaaaaagtga

SEQ ID NO: 7846 - DNA, 461 bp, Gossypium hirsutum
  Clone ID: GOSHI-09MAY01-C62390_1
atctcgcccgacccgccggtcaccagctacgccccgtccgatgtgccctcggggatcgcgctgctcctcaccatccctttcgccttcttcctgccggagctgatatttgggttcctggtctggaccctggtagccgccacccacgtagtattcccattgctgcaaggatgggtgatgtatgtctcaatcacctcgtttctcatctccttgatgttcctgttgtcttacttgtttggattttacaaaatatttgaatcctggagagttctggacagcctgtaccacgggaccactggcatcctgtacatgagtgctgccgtcctacaagcacatgccacgattgtttctgagatcatggacccgagaatttactacattaacacggcagcctcgttcttcgccttcatcaccacgctgctctacatcctccatgccttcagcatctattaccattgatgcac

SEQ ID NO: 7847 - DNA, 397 bp, Gossypium hirsutum
  Clone ID: GOSHI-09MAY01-C62360_1
caatctttaatgaagtggtcaactgatctgcacttatagcaggagcggtcatggaacctacagctccccgaatgccatctaccgcaatgccgacactccgttctgtctcgacgttctttcccaacactggcgaccgaagtgcctcgtgtacccacagggggtcgatcacgatctcgtctaaaaaggcccgaagtgcctctagaccggcccacatcatctcgaaatttcttcgatgcctgttgaagagactttcccgaggatcttttacgaaactctccagttcccacatcaactttttgtttttcttttctaagctcttcggctttacaagctcgctcgacaagtactacgaactctcgtatttcaagaatgccaacgaacatttttatatcttcat

SEQ ID NO: 7848 - DNA, 382 bp, Gossypium hirsutum
  Clone ID: GOSHI-09MAY01-C63910_1
atgccaggggtcctcctacgctgtgctcccggcagcggcgctctgccaggtggggccggagctgcgaggaggggtcggcgccccgcgggcagctccattcccccctctccagtggacttggccgcagaatccgggtcccgggctcctggaacttgttccggccaggccgcggcaaggagatctctctggaccccattcctccccttctcgtcctcatggcggacaagaaaactggtgggggttttcggaggcaccggggcccagggtggctccgtggcccgcacgctcctggaagatggaacattcaaggttcgagtggtgacccgaaaccctgggaagaaggcagcaaaggagctgaggctgcaaggtgcagaagtagtga

SEQ ID NO: 7849 - DNA, 716 bp, Gossypium hirsutum
  Clone ID: GOSHI-09MAY01-C63510_1
gattttacgagcttattaattgaaagtatgacagcaagatcgctcattcccaaaccaagtaccttcgggatttagccggatatagctactcgctcagatgccttcgggacttagcccgggtatagtaactcgcacaaatgccttcgggacttagcccggatatagtaactcgcacaaatgccttcgggacttagcccggaactagtcactagcacaaatgccttcgggacttagcccggttatcatccaaatattcatgcacatatcaataaatcatgacacatctatatttcattttcataattagagttcaaacacaagtcacgtattaagcaatcccattttcggctcactagccacatacaaacagcatggtttagtttgctttatgacacgatctctatgcacatacggctacccgtcatacgtatagactaattaactcaacatataattcaagtagaatcatcatatcaccgtatatttgttatgctcatacgtcatgacttaatcaaatcgtaaactaagtctcgttactcgaaaacttacctcggatgttgtcgaacgattccgatggctattcgaccactttttccttccctttatcggatttagttcccctttgctcttgagcttaatttaacaaataaattgatttaatcatttgagcatcgaaaagaggaactcaaagtacttagcccatatatatacattag

SEQ ID NO: 7850 - DNA, 357 bp, Gossypium hirsutum
  Clone ID: GOSHI-09MAY01-C63530_1
cggacgcgtgggattagctatcatgtttgatgcttattttatgtatatatgcatgtgtgaaaatttcatatttgaattttgttaattctaggtgaattttagtaaataggacttatgtgagaaaatttagaaatgtgctaggcaaatgtaaagtggccggggaatgcatgttgtgaaaatgatgggtttgcatgtcaaattacccaaaatttgagctagtggctggccatgctatgggtggaaacatgttgggttcgtgtgggccgtgtgaggtatgtaggaaaaaaataaaataaggggcatgggcataaaataatgaaaaggagtatgccattcacataaaaacaagcttgaact

SEQ ID NO: 7851 - DNA, 584 bp, Gossypium hirsutum
  unsure (1)..(584): unsure at all n locations
  Clone ID: LIB3829-029-Q6-K6-F6
ggctgagggctacaatatagctggcggcgagnatcaatttcagacagaagtagagacaataagtttagctgtgcatcgcaatcttctcagactttctggattctgcacgactgagaatgaacggctcctggtttacccctatatgccaaatggaagtgtagcatctagactaagagacaatattcatggtcggcctgctttagactggacaaggcggaagaggatagccttaggtactgctagggggcttgtatacttgcatgaacagtgtgacccaaaaatcattcatcgggatgtcaaagctgccaacatcttgttggacgaagactttgaggccgttgttggagatttcgggttggcaaagcttttagaccaccgagattctcatgtaacgactgcagtccgtggtacagttggtcacattgctccagagtatttatcaacaggtcagtcatcagaaaagacagatgtatttgggttcgggatcctgctcctcgagctaatcactggtcagaaggccttggatttcggacgagcagtaaatcagaagggtgtaatgctcgattgggtaaagaagctacata

SEQ ID NO: 7852 - DNA, 359 bp, Gossypium hirsutum
  Clone ID: LIB3196-055-P1-M1-A12
cccacgcgtccgcggcatttatggaagagttattcaattcggatattaaatgaatatcagaattactatttgaagttataaacttctttttcttttcatattcggtttcccaatcagacaatattcatggtcggcctgctttagactggacaaggcggaagaggatagccttaggtactgctagggggcttgtatacttgcatgaacagtgtgacccaaaaatcattcatcgggatgtcaaagctgccaacatcttgttggacgaagactttgaggccgttgttggagatttcgggttggcaaagcttttagaccaccgagattctcatgtaacgactgcagtccgtggtacagttggt

SEQ ID NO: 7853 - DNA, 613 bp, Gossypium hirsutum
  Clone ID: GOSHI-09MAY01-C63400_1
cccagcgtccgaacattaaaatatggagaaaagaattgctaaatttcaccaattgaagcctcaatgctgcagcaatgccatagccttaaacctgacaggaacaaattggaaacttcatacttaaagagctccacatcagcttttgagcttaacccatcttttaatcaagtgctgatagtatccgggaaccagaaagaataggctagacaaacatgtaaaggcccaaaacatttctaataggaaaaaaatagaatacgaaaggggtttgatctagtctatcttctttaagggatgatataaatatcatatttctcaaaaaataggagggcagccgctgagattgaacaaacagaacaaaaactttcagggtaagagcgtcggaaaagaagcagataagaggaggaagaacaagacgcaaacaacttgtggagaaccaccgacattcgactcacatctcttcgcctttgtctttacctattattttgttttttctattgtttgaaatcatggataaatttttttgaagttttttttagtttgatgattatgagctaaaagtttatatgctagaatgattatggaaccctaatatgagattattggtactttgctt

SEQ ID NO: 7854 - DNA, 1134 bp, Gossypium hirsutum
  Clone ID: GOSHI-09MAY01-C63700_1
agaaaatccgaaagccctacaccataaccaagtccagagagagttggactgaacctgaacacgacaagttcctcgaggctctccagctatttgaccgtgactggaaaaagatcgaagcatttgtcgggtcaaagactgttattcagattcgtagtcatgcccagaaatattttctaaaggttcagaagaatggaacaaatgaacacctacctccacctcgacctaaaaggaaagcagctcatccatatccgctgaaagcctcaaaaaatgttcatgtacagccacaagcatcagggtctcttcaatcatcgaatgcattagttgacactggatgtgttctgagatctgatccctcattgatgcttatgaaccctgttactgctgcgtcttcctggacacacaatgaacaaaccatcagtttctcacaagctaaaaaaggttctggaatggccaataaatctaggggcagctcaatgagcaccccacagaggcgacaaattggagagatgactaatcagggaaatcatggtcatgcactaagagtgttgcctgactttgttcaagtatacagttttattggcagtgtctttgatccaaacactaccggtcatctccagaaacttaaaaagatggatcccatagacattgaaacggtgctgttgttgatgagaaacctctccatcaatctgacaagtcctgatttcgaggatcatagaaagctgctttcttcctacgagattgacacagagacaaattatcatggtggtgcgtgtaaagctgtcggtacttgacaatgacctgtctggaaattacttaataaggatcaccggctgcaaattttccgaataatttcccccattctgcggtcgtgtatatacactgtgagagaactgggtgcagcagaatgaaaggaaaaagaatggcaaagagagtgtacagtggttatctttttggttttttttttattttatttttttgaagggggtattttgtacaatacagtgtctcgtgtattcaatttttgactgcttgtttttatatatatgctatgttggtatatgcacatagtatttatgtaagaagctgccgctaatgctgctttgggttatattatatacaaaaatctgttttttc

SEQ ID NO: 7855 - DNA, 535 bp, Gossypium hirsutum
  Clone ID: LIB3828-029-Q6-N6-C8
gaaaaacagatttttgtatataatataacccaaagcagcattagcccagcttcttacacaaatactatgtgcatataccaacatagcatatatatatttataaacaagcagtcaaaacttgaatacacaagacactgtattgtacaaaatacccccttcaaaaaaaaaaccaaaaagataagcactgtacactctctttgccattctttttcctttcattctgctgcacccagttctctcacagtgtatatacacgatcgcagaatgggggaaattattcggaaaatttgcagccggtgatcctaacaaacaataaatatactaacggaacatcatatagtatatgtcgctttttgattctagagcttcttggcatgaaaatagagtccatattaattatgtatgagataaaagatggtatgataaaagatgaaattaaaagcaaatgccatcacctaccttattaagtaatttccagacaggtcattgtcaagtaccgacggctttacacgcaccaccatgataaattgtctct

SEQ ID NO: 7856 - DNA, 689 bp, Gossypium hirsutum
  Clone ID: GOSHI-09MAY01-C63660_1
gtcaaagaacttcgatttacagaggtgtcaccagacacagatggacgggtagatatgaagctcatctatgggataacagctgcaggagagagggtcaagccagaaaaggccgtcaagtatacttaggtggttatgataaggaagaaaaggctgctcgggcttacgatctggccgctttaaaatactggggtcctacagcaaccaccaacttcccgatttcggattattcaaaagagttggaagagatgaagcatgcgaccaagcaagagtttattgcatccttgaggaggaaaagtagcggattttcaaggggtgcatcgatttacagaggtgtcacaaggcatcatcaacagggccgatggcaagcaaggataggtcgggttgctggaaacaaggacttgtaccttgggacattcgctactgaagaggaggcagcagaggcatatgatattgcagccatcaagttccgaggtgtcaatgcggtgactaacttcgagatgagtcggtatgatgtcaaagccattgcccagagttctcttcccattggtggggcagccaagcgcttaaagctttcacttgaatcagagccaaaaccgatagtgaaccagaagcaacaaccaccaccaccccggtgcagctccaacagcaatcttataagttttgctcccatgaagcagccggtttccact

SEQ ID NO: 7857 - DNA, 570 bp, Gossypium hirsutum
  Clone ID: AI054834.1
gatagtttcaacaggacagacttatgaccggagttcgataactaggtggatcgaggaagggcattgtacttgtccaaagacagggcaaatgcttgaccatacgcggcttgtttcgaatcgagctttgaggaacttgatcgtgcaatggtgatactgctcatggtgtccatatatgatccatcataatctattgatgcttaataagagtttattgccactgcttgttcattctatctataatttaattattttaattatcagtaattgttatttctaataataattctatattaatctttattattatagatgtttgatgtttattatattctgatatcgtcttattctgttgatgatatccttacgttttttatgatgaatgctctatatattatattatgttgtttgtttatttagtcgttattttcactctagtttttgatgttttatcgtaatctgtttttttatattaatatataattatatatattaatgtttttatatattattattatttgatctttattttttatatatttactattttattataattttctattattatag

SEQ ID NO: 7858 - DNA, 396 bp, Gossypium hirsutum
  unsure (1)..(396): unsure at all n locations
  Clone ID: LIB3196-053-P1-M1-C4
attggagttgatgagagatccggtgatagtttcaacaggacagacttatgaccggagttcgataactaggtggatcgaggaagggcattgtacttgtccaaagacagggcaaatgcttgaccatacgcggcttgttccgaatcgagctttgaggaacttgatcgtgcaatggtgtactgctcatggtgtcccatatgatccaccagagactagggatgcatcggcagagtcttttgccactgcttgcccaatcaaagcancagtggaagccaatagagcaacagcaacgcttcttatcaaacaactagcagatggatctcagggagctcagactattgcttctagagagattcggttattgactaaaacgggaaaggaaaaccgtgcttttattgc

SEQ ID NO: 7859 - DNA, 625 bp, Gossypium hirsutum
  Clone ID: GOSHI-09MAY01-C18910_1
ctctttgaactggccaccgccgataagttgcagattcactggagaatttgtctatggattcacaagccaagaccacaaagttcctgagcctgttaagaaggatttttacagtgataatggctcttacatgtaccagcaagcttatggttatatgccatatggggcatattccatgcccgggtcacctcttccacttatgggacatgatggccagctgcatgcactgcaagaatactattatccaagtacttattaccaaccgcctcagcaaacgtagtcaaacagatgcttctcaagtggtggtttcaactgtcaatgcagatgatcaagcttctttatcaactgaaacaaatacaggaaatttgagcactgtagaaagtggtgcgggtttgagtggtaatactggttctgggtcacaaaaatcaactttcaaggtctcctctctaaatccgaatgcttcctataaaagagaaagctttccaacaggtaatctatccgaaggtcatcagaattcaagatttagctacgaaggggtccagccaacaattccttgcttagatatgtcagtgtcttctaatgggcaatccaagcataccgctaataatggattctcttcatatgcaaa

SEQ ID NO: 7860 - DNA, 1084 bp, Gossypium hirsutum
  Clone ID: GOSHI-09MAY01-C18900_2
acaagtttttcattttttataatcttttctgcggcaaagctacagcaacgaataaagaagctctgcgataaaagcagaggttgagtaagaagaagatgggtgtagattattacaagattctacaagttgacaagaatgcaaaagatgatgatttgaagaaagcttataggaagcttgccatgaagtggcaccctgataagaacccaaataacaaaaaggaagctgaggccaaattcaagcaaatctctgaagcttatgaggttttgagtgacccacaaaagagagctatctatgaccagtatggtgaagaagggctaaaaggccaagtaccacctcaagatgctggcggacctggtggagcaacatttttccaaaccggagacggtccaaatgtgttcagattcaaccccagaaatgctaatgacatctttgccgagttctttgggtattctagcccctttgggggaatgggcggcagtgggatgagaggtagctcaaggtcatttggtggcatgtttggtgatgatatattcagttcgtttggtgaaggaaggccaatgagtcagaatcctcgtaaacctcctcctattgaaaatacgttgccttgtagccttgacgatttatataaaggaaccacaaagaagatgaagatgtctagagaaattgcagatgctagcgggaagacattgccagtgcaggaaatcctgaccattgatatcaaacctggttggaaaaagggaacaaagattaccttccctgagaaaggaaacgaacaaccgaacacaatccctgcagatcttgttttcataatagatgaaaaacctcacagcacattcacacgcgatggcaatgacctggttgtcacgcaaaagatatcgctggccgaagcattaacaggctacaccgttcatcttacaacattggatggaaggagcttgaacatccccatcaacagtgtgatccatccaaactatgaggaggtagtcccgaaggaaggtatgccaattcccaaagacccatcgaaaaaagggaacctcagaatcaagttcaacattaagttcccaacaaggttaactgcagagca

SEQ ID NO: 7861 - DNA, 980 bp, Gossypium hirsutum
  Clone ID: GOSHI-09MAY01-C18900_1
attaatcattcaattattggttttcaatgatatattgaagcgtatttgttaacttcctaattgatctgttttagtctataagtaagcagtaaaagagagctgaagagtttgtcttgatcatatttcgtacatgtttctaaataacatacctatccgagataagatcgtaacatgcctgataatgccaactattttcatggctgctgatggttcccttgctaacaaggttgtcttaaaaatttgtctgtgttgcaggaagacattgccagtgcaggaaatcctgaccattgatatcaaacctggttggaaaaagggaacaaagattaccttccctgagaaaggaaacgaacaaccgaacacaatccctgcagatcttgttttcatagtagttgtcaaacctcacagcacattcacacgcgatggcaatgacctggttgtcacgcaaaagatatcgctggccgaagcattaacaggctacaccgttcatcttacaacattggatggaaggagcttgaacatccccatcaacagtgtgatccatccaaactatgaggaggtagtcccgaaggaaggtatgccaattcccaaagacccatcgaaaagagggaacctcagaatcaagttcaacattaagttcccaacaaggttaactgcagagcagaaatctggaatcaagaagttattgggaccatcgggtgggctttgattaaaatgaaagatatgatcagtaggaacttgggaatacctgcttgtgatcattccaccactcgtatggaaaaggatgcctgatttctagtgttttgtttactgttagtgtgtggttttaatagtgatgcatttgtcatttgagaagaataaagaacttttagtctattttgtactgctcagaagagagcaaagtttttaagaccatcaacctgactctataattccaacaaagtttgttaatagatggatctatgttaaaaaaaaaaaaaaaa

SEQ ID NO: 7862 - DNA, 399 bp, Gossypium hirsutum
  Clone ID: LIB3083-011-Q1-L1-D1
aggaagcttgctatgaagtggcaccctgataagaacccaaatgacaaaatggaagctgaggccaaattcaagcaaatctctgaagcttatgaggttctgagtgacccacagaagagagctatctacgaccagtatggtgaagaagggctaaaatgccaagttctactttaagatgctgtctgaccttttggagcatctttttttcaaacttgatattttctaatttgttttataattatttctttatttttttatttttttatttttatatttttttattatttttatttttatttttatatttttgttttatttttattttttttttttttttttttttttatttttttatttttatatttttttttttattatattttttatatttttttttttttt

SEQ ID NO: 7863 - DNA, 438 bp, Gossypium hirsutum
  Clone ID: GOSHI-09MAY01-C118568_1
tcctcgcgtccggggctttaggctcaaaaggagttcgtgttatagccattgatttgcctggaaatgggttttctgaaaaatctaggttagagatcgaagaaggaacaaatggcagtccggcgaggtttaaggaagtttatagtttgattcaagacaagggtttgttttgggctttcgatcaaatggttgaaactggtgaactaccttatgaggagataaaatctagagttttggttaaaaagaatgttaaggttattgaaattggaagtgaagaaatggggatggttctggggcaggttataggaactattgggattagctcctgtgcatttagttttacatgattctgcttttcttatggctgcgaattggattgctgagaattcaggattcatttaaagcataacttttatcgatgctggactaaaaccagcttta

SEQ ID NO: 7864 - DNA, 368 bp, Gossypium hirsutum
  Clone ID: uC-gsflmaxxa010d12b1
gaacaaatggcattttagcgaggtttaaggaagttgatagtttgattcaagacaagggtttgctttgggctttcgatcaaatgcttgaaactggtgaactaccttatgaggagataaagtctaaagtgacggttaaaaagagtgttgaggttattgcaattggaactgacaagaacgttaatgatactaagcttggtggttatgacatgcatgtagagagtgagatccttgcgaatgcatggcggttagccaacaacccgtctcactggaagaacccagaagaggtccggccttgaaaggcttttcgaggagggatctagggttgaaacttgtggtaatgacttcaggtatcatccatttggtgatgg

SEQ ID NO: 7865 - DNA, 488 bp, Gossypium hirsutum
  Clone ID: GOSHI-09MAY01-C18570_1
cggcggtcgtctagaactagtggagtcccggctgaggcgcacctgattcactgagtaaaggaaacattaaccgaaatggtcttggactcggagctaatcgcccgactctgggagttcttaggtgaatcggacctcaacaccacaactacagcaatcgtgcggcggagattggaggaagatttcggtattgatttgacggacaggaagaagtttattagggaacaggtcgatttatatctccaaaaccagttcgaaaatgccgaagaacaacaacaacaagaacaaaatgaagatgatcagacggataagattaaatcagaggaaaccgacggctctgattcggacgacgaagaggaggagccggaaagagcgaagaacaaaaaggctacctcaaagaaacggttaaaaggagtcaatagtgaaggtaagagaagaggaagtggttttaacaaagtaagcagactttccccacatcttcgggaactttt

SEQ ID NO: 7866 - DNA, 440 bp, Gossypium hirsutum
  Clone ID: GOSHI-09MAY01-C18520_1
acaaattccaaagagagtgagaaaaatgtctgcagtagttggtggatggatgggcgaggtagcagcaaagcttaaagagaaagttgaagcaagaaaaccattcttgtcaataagggccaagaaagaccaaccgtttccgaccaaagaagggcatgttgaagacaaagatgcttctaaagatgatactaacgaaaccacaatgtctgaagctactgtctgtctgcttatggatcggtttgtaccttggtaatgataaattagagaaagttcccttgtcctaactttgttgggccttatatgtaaaggcaactctatgctttgtgtaaattagagttgttttattgtggatatggcagccagctctgcttttagtgttcatttcttttgtatctgagcgctgtatatgattagctggtctctttaaacatatccagtaatac

SEQ ID NO: 7867 - DNA, 612 bp, Gossypium hirsutum
  Clone ID: GOSHI-09MAY01-C18490_1
ctttttcttcttctcgtcgtcgttgttgtttcgatttttggtcctttcttcgtcttcaacttttttacccctttttttgtttgctaaatcttttgctcgtcttcttcgtcttgttcttcttgtttgcaggaggctttaaatgaatttataaaattaaagcatctcgagcaggcgttttctaaatttccgtctactctttttttagtaatatgtttcagttatcgctggtactttgagggttgactgtttcttgaatggttattttggctacgagcttcgattcagcttaagcaatccgggatcccagtaattgcatgtctagggtttgctagcagctcgaattcgaaggtgtttcattttccgcaactaaatagagatcgtgtagagattgtgccatcaaatgagtgtcaagagtttgggctaaggaaatctgcttatcctgggttttatcatttggggtttcattcatgattgggaaaatggtcgagggtcctaaatttactggacttatgggaggaactgacaacaacgataacaattactatgattttactcaagggttttaccaaaagcttggagagggtactaacatgtctattgacagtttacaga

SEQ ID NO: 7868 - DNA, 1305 bp, Gossypium hirsutum
  Clone ID: GOSHI-09MAY01-C18480_1
gccaagttttcgaatgtgctgtctgcatttcctcaaaatctaatacaaagcagcagcagtcctgctcagtctcctcaatggaagaattctgtgaggacaactagctctcaagttccttctcaatctctaccatcaacttcatccctcaagaatatttcccagcaacaaggtcggccacagcaaagccccacacagatttcttttgcagctaatcctaaatcaccacaaggtcaacagcctcttagtagcactcctaccccttctccaatgatggttggctctcccacaacttcactctccaggagtgctggtggtagcccaaggacaacaggttcctcttccaccagcaacaaagctggccaagcatctggtttagcatcccaacaagctaagaactcaccgaccgtgcctagtcagaagtcatctcctgttggtgggagtaatgtgccatctgtcctgggaaaccctcacataagttcatcttcaaatatgggagccaagcctcaagtggcactacagcatcagcaacatcaaaagcatgcacttcatcaagggcagctgttcttcccaaatgcttacatgcaggctcaagctcaacactcaccaagttcgacaacacctgcaacaacagcaagtgcatactatgtccaacgacaacagcacactctacctctgggttcatctgcaacttcatcaacttcgatgttatcgttgcgttctccggttactcttgccaacagcggcaccaccgaccctgcaaaagctgtagcagctgctgtggcaagcaacatgaaaggtgggttggcatcccagggacttatcaatcctgcacaatttgcttctccacaatccactggaaagtcacatcagctggtaccaggcttcccatgtgttcatgctgtcccttccgctgttcaggtaaaaccagcagaacagaaacaacctgctggtgagtaaaattctccccttttttgcttcaacattgcttcccccgtatagtgaacaaggagaagaaggtacggaatgaaaaccgaatcaatgatatcgggggccggggcgcgccagatcatctgggtttttcccctgaaatgacagcagcagccaaaacaggaagatatgattgaagttatatatatataatgtggcttagaactcactcaacccacaattttgcaaagtgatgggggaagttttctttgtggaatgtgctttctcatgtgtatccaccaaacatgtagacttttgtttataatctttgacatggttgatccctgatatgccctatgtaattaaatctgattgggg

SEQ ID NO: 7869 - DNA, 399 bp, Gossypium hirsutum
  Clone ID: GOSHI-09MAY01-C18790_1
gttgggaaagccgtttgtaagaaaaaattcagagcctttcatgaactcttttcaaaagacttcatcgatgaatgaaaacttatccaacggtcaccccactgatattgatcctaatacaatgggtggtgctggttcattaagtatgttggttcgcactattctaattgataaaaagcctgaagaagttcccctgctggttgaatctttgcttggtaaagttgtagaggagtttgagcatcgtctggcaagccaatatgaagtgatgaaaacaacttcaacagacatcactgcttccaatttcaacaagcctctatcggaaccaatttctggggataaaaagatggaggaaaaaaatatcaaaatgatgaagaaagatgattgctctcatagaagcatcac

SEQ ID NO: 7870 - DNA, 823 bp, Gossypium hirsutum
  Clone ID: GOSHI-09MAY01-C18780_1
caataactgagtccaatccactttctccctctcccctcttttacccttttgagttcttcaaatgaaggacccaatcctctttcctttctctcgcttcctctaatattatagaacaaggagaaggggatatacaaaactacaaaaggctcgttgctttgttcaagtgtttgacaatgtggggggacaaaaacgtgttgtccaaggtggtcaacatgttcatgttatggctgttgttttcttcttgggttttttccttagtttcagccactgtttcttatgatagcaaagctatcatcattaatggcaggagaaggattcttctttctggttctatccattaccccagaagtactcctcagatgtggcctgatcttatagcaaaggccaaagaaggaggcttggatgttatacagacttatgttttctggaatggacatgagccttctcctggaaatgattattttgaggatagatatgatctggttcgatttattaagctggtccaacaagctggcctttatgttcatctccggattggtccctatatttgtgctgaatggaactttgggggatttcctgtttggctcaaatatgtccccggcattgctttcaggactgataatgaaccttttaaggcagcaatgcaaaaatttacagagaagatagtgagtatgatgaaagctgaaaagctgtttgagactcaaggaagtccaataataatgtctcagattgagaatgaatttggtccggttgaatgggaaatcggtgatccaggtaaagcttacaccaaatgggcagcacaaatggcagtggggctcgacac

SEQ ID NO: 7871 - DNA, 511 bp, Gossypium hirsutum
  Clone ID: GOSHI-09MAY01-C18770_1
cccactcgtcttcccacgcgtccggaatgtcgtggttagctagatcgattgctaactcgctcaagcttgacgacgacgacgacgacgatcggaccaatgcggcgctggatccgaaacccgaatccgatccgaatcctaaccaagcctctccttctcattcccattcatcatcggatcccaacactccacgtggcgtcaaagaagacctatccgagcttaccaaaaccctatctcgtcaattctggggggttgcttccttcttcgctcctcctcctccggaatcatcggagcagcagcccgatcacgcggctgagaaggaggaaaactctctccggccaccgccgtcttctgatgatacggatgagtcgtcggatgaggcattgatagcgggaatccgtagcgatttatctgagatcggtgggagattcaagactggaatctcgaagctgtctaaatatatgaatgtctcggagttcactaagatcgcttcgaattttctttcagtttggat

SEQ ID NO: 7872 - DNA, 402 bp, Gossypium hirsutum
  Clone ID: GOSHI-09MAY01-C18700_1
tagaactatgtggatctcctggtctacatgatttcgagccgatttgttacatctgtctgatctatacatttgcggtcatgtctatttacacaagaattttcgaaactcataatgttgtaatcaacgccctcaatggcggtagaacgattgcaaagcattatgaaaagaactatcacaacacacatgttttacatgaaaattcttttgggaaaaaactatggactgatgaataaaaattcactaatgttgaaaaacgaatgacacatgaggagtctaggctacatctatctaaaggttgaaataccctgttctaatcaaagtcatatgatagaagtactttatggactcaacttgtgcaatatggtctgtactgtccggatgcaaccccaatacagttttgtg

SEQ ID NO: 7873 - DNA, 1456 bp, Gossypium hirsutum
  Clone ID: GOSHI-09MAY01-C18690_1
gttaatttgtaagtggaaaggaaacaaagtaacctggctgattagaaaattcttgttgaaatattatgtgtgactcctcaatttgtgtaagcttcatattgatcttagcaatttattccaagcatctaatagctatcttttatttctttttctttccttaagaaagggtggtagagtggtatctcattttctctttttacagagctccctcagttaaggagtttgacttcagaggaactaggttgtgatgctcgtggctattctcgtgctggccgtgataccttgacctggtattgtgctatcctagctggaaggctggggccagaacttgatagcatgcgagaaaccatgcgcagggtccaagaaacattatcaaaatctagtgagttgaaggctgcaagtgaagatgagcactcaataacagctgctgttgctttaaaaagtaagcgattgacattaagctggcttgatggggaaacacaaaagaactactgttttttctaccttaatattgaaagtagttatgaaacatgtggaccaaggagagttccaactgatgtccctcggttattcattatccgctatgaaaggaatgctactgaagatacttttaaggtagataagaaagcaaaaagtatatgggaattccaccaacaggaagttgattcctgctgcacagctttcagtgacttacaatgggtcagctgaagtttcccggatcatccagtggatgtcaaacataattgaggatggtgactccaggaaactccccttctatagggtaaaaacaccagagcttgttcctgaggatgcagagcctttctggtcaagaggtccacaaggcttactttccaaaagcatgggaacaaagcaaaaaatccaacgcactataattcgaatatatgattatctaggtgatccaaggattggtccagctttgcttttgggagccttgatgtcctttggtagcatctggctgatgaggactcaacaaaatcgttcggttcagtcaagccaaccgagccaagcagataatgatgtaggataaactgaaaccaagagagagacgccgggaaaggaatgcatcgaaacgcaacttacctccttcaataactgattttgagccaaaggattcataccagacgccactgtcggactcggactaagtcgcttaacaaaaaaaatgcaaatccaaaagtagaaagcatgcaatgtaagtggctaccaggtgacataaatacatacatgactaggatttgtgtgcctttaaacgaacaggctgtcaaatggacacatcttgaggcacccttgacacttcatagaaatgcgcatgcaataaattttctcccacttcattttgcttaaattgagttggggaatattggtttttgcagttctgttaatgtttgggaaaacaaaatgacaatatctatgaagattgtgtatcatatctttt

SEQ ID NO: 7874 - DNA, 505 bp, Gossypium hirsutum
  Clone ID: LIB3831-002-Q1-N6-A9
cctcaatagtataataactaaaagatatgctacacagtcttcatagatattgtcatcttgtttttgcaaacattaacagaaaactgcaaaaaccaattttccctaactcaatttaagcaaccctagctcaatttaagcaaaatgaagtgggagaaaatttattgcatgagcatttctatttagtgtcaagggtgcctcaagatgtgtccatttgacagcctgttcgtttaaaggcacacaaatcctagtcatgtatgtatttatgtcacctggtagccacttacattgcatgctttctacttttggatttgcattttttttgttaagcgacttagtccgagtccgacagtggcatctggtatgaatcctttggctcaaaatcagttattgaaggaggtaagttgcgtttcgatgcattcctttcccggcatctctctcttggtttcagtttatcctacaccattatctgcttggctcgggtggcttgactgaaccgaacgatttt

SEQ ID NO: 7875 - DNA, 419 bp, Gossypium hirsutum
  Clone ID: LIB3145-019-Q1-K1-C8
gggaattaattggtcgacccacgcatgcgtggactcagactaagtcgcttaacaaaaaaaatgcaaattcaaaagtacaaagcatgcaaggtgagtggctaccaggtgacataaatacatacatgactaggatttgtgtgcctttaaacgaacaggctgtcaaatggacacatcttgaagcacccttgacacttcatagaaatgcgcatgcaataaattttctcccacttcattatgcttaaattgagttggggaatattggtttttgcagttctgataatgtttgggaaaacaaaatgacaatatctatgaagattgtgtatcatatcttttaaaaaaaaaattgttgcaatcttactcttacactcctgctattgatatgtgggctggtggtgctatattagcggagctttttactt

SEQ ID NO: 7876 - DNA, 439 bp, Gossypium hirsutum
  Clone ID: GOSHI-09MAY01-C18180_1
atcatcgtcatcttcttcaccaccgttctaggttgtgggattggctgaacatttccaatattagttatgttctcagagggggtttcatgcacctcactattcgttaccacaggggtaccggcgctcactgtgacatctgcaaatggctcaacaccaataagaaatttcttagcttttgaatcaaaacaaacagttttctgatcaacccttatgacattagctagagccttcccagcggccaaaattctcttgacacgggctttcctttccttattgccatcgcttacaaaggaacatttccttgagaagtccaaaatggagtgtgcaggagcaagaggcaagaaccctcgcaactcaaagtcctcccacaatgcaagacggttttcagtctctccttcatagctactcatattgaaaaagcaggcctcctcttcatcat

SEQ ID NO: 7877 - DNA, 321 bp, Gossypium hirsutum
  Clone ID: LIB3197-053-Q1-M1-G8
cattaattatgtatttcataatagaggtagtttcgactgaaaccccaatttcaacaaacgacacttcctggtcactaaaatatataacaaaatgaagtctttattcaatactcaccaacatatatggagagatgttagaagtacacattccgagtatttccaatattagttatattttcagagggggattcatgcaccacactattcgttaccacaggggtagcggagctcactgtgacatctgcaaatggctcaacaccaataagaaatttcttagcttttgaatcaaaacaaacagttttctgatcaaccctaatgaca

SEQ ID NO: 7878 - DNA, 628 bp, Gossypium hirsutum
  Clone ID: GOSHI-09MAY01-C18090_1
gaatctatacgctcacgatctctctttatttgatttcaccaacttctctgataatcctatcatcgatcacccttcatctttcgcttcctttatcactacacctcccagtgattctgatgatgttgatgctggaaataaaccaacttccaccgctactcctaggagtccaccaaagcaccgccatgaccggacctcgccgttgcctttggggatggattggtctttacctcctcgcagatgggatgggcgggacactgtttggcctcacaatcctcagacagggtggagttactgtgttacaattccttcttggattattctgccaacatctggaggttcagatattgtcgtgttttaccgggttcaagttggcattcaatcaccagaaggcgtcactaccacccgggaaatattacgaagatttagtgatttcttgaagctactatctgaacttaagaagatatttcccaagaaaaatctgcctccagctcctccaaagagaattttgagggtaaaaaacagaacactgttggaggagagaaggtgttctttggaggattggatggaaaaacttttatcagatattgatatttccagaagtgtttcagtggcaacatttcttgagctc

SEQ ID NO: 7879 - DNA, 864 bp, Gossypium hirsutum
  Clone ID: GOSHI-09MAY01-C18040_1
atatgcttgttgagcagttggctgaagtggatccatctcaaatgagttgcaacgaaaagctggcattttggattaacctgtatcatgctctgattatgcatgcatgtttagcatatggggttccgagaaacgttaacaagctattttccttaatgcagaaggcttcctatactgttggaggacaatcagtgagtgcagtagacattgaatgcactgttctaaaaatgaaccctgctacttatcatccacaaattgctgcagctgttgcacttcaaaaattcaactcttctaacgagcagaaaaagtatacaattgatcatgctgagcctcttctatattttgctttaagttgtgggctacattcttcgccggcggtgaggattttcagccctcaaaatgtgaatgagttgctaaaaaggtcaatgaaagattacattcaggcaactgttggtataagtaacaaagggaaactactggtacctaaattgctgcattgttttgccaaaggagttatcgaagactcacttttacctgaatggatttgtcgaatcttgacacctcagcaagcttccatggttagagaatgcttatctcgtaataagtggaagcttcttggtgctaggagcttctgtgttctaccctttgattctaggtttcgatttctcttcctattggaggatgatgggaactccctttcctctacatcataagaccaaccatgtttcgttttctacctccaaaagtaggcaggcaattcttcagcacaagggctgtttcccatgttatctatcgccttgtaaattgatctcattgcacagtagttatgcatgggaaaaaattcaagccaaggttccttttttttct

SEQ ID NO: 7880 - DNA, 855 bp, Gossypium hirsutum
  Clone ID: GOSHI-09MAY01-C18070_1
ataaatcttcagagaagaatttccccttagttctttgcaagaaggtagagataaagacactttttcaaaaatggcaatggtatcagaattcctcaagcaggcctggtttattgaaaatgaagagcaggaatatgttcaaactgtgaaatcatccaaaggtggtcctggatcagcagtgagcccctatcctaccttcaatccatcctcggatgtcgctgccttgcacaaggccataatggttaaaggtgtggatgaagcaaccatcattgacattctaactaagcgaaacaatgcacagcgtcaacagatcaaagcagcatatctccaggaaacaggaaagcccctggatgaaacactgaagaaagcccttatgggtcaccttgaggaggttgttttagctctgctaaaaactccagcgcaatttgatgctgatgaacttcgggctgccatgaagggccttggaactgatgaagacactctgattgagattttggcatcaagaactaacaaagaaatcagagacattaacagggtctacagagaggaactgaagagagatctggccaaagacataacttcagacacatctggagattttcggaacgctttgctttctcttgctaagggtgaccgatctgaggactttggtgtgaatgaagacttggctgattcagatgccagggccttgtatgaagcgggagaaaggagaaaggggacagatgtaaacgtgttcaataccatccttaccacccgaagctatccacatcttcgcagagtgtttcagaaatacaccaagtacagtaagcatgacatgaacaaagttctgggacctgggagtgaaagtgacatttgaga

SEQ ID NO: 7881 - DNA, 394 bp, Gossypium hirsutum
  Clone ID: LIB3196-056-P1-M1-F2
gcgcctgcagctaccttcccggaatttttcaggagcaggaatacgcccctcgaccactcgtccggtcatacaaggtaattactgtagttgaaaaatggcaatggtatcagaattcctcatgcgggcctggtttattgaaaatgaagagcaggaatatgttcaaactgtgaaatcatccaaaggtggtcctggatcagcagtgtgcccctatcctaccttcaatccatcctcggatgttgttgacttgcacaaggccataatggttaaaggtgtggatgaagcaaccatcattgacattctaactaagcgaaacaatgcacagtgtaaacagatcaaagcagcatatctccaggaaacatgaaagcccacggatgaaacaatgcattaagccctt

SEQ ID NO: 7882 - DNA, 554 bp, Gossypium hirsutum
  Clone ID: GOSHI-09MAY01-C118378_1
atcactgcgtccggaattttttccccaagttgagcggctctcatttgtctcgcctttttgctacgctctccaaactcccaaacaacttcaccaaaattccttccaagtatcgaccccaagccattcgagatgcccaacaagctctcacggattacctccactgttcccgttacatccctttcgtctacgccgagcacattgctaaaaactccttcttttccctctcttctcatcatctccggcattaatttctccaccacgagcttcaatcgaaacgtcctcagattcctcaggtaccatcccatttaacgagtatgagtttttcttcgaaagtataggcattgattatgaggaagttggtggcctattgccgtccaagaagttcttcttttctgaagatgagacggttctggaggctgcttgtgcgctctctggatttgggtttccctggaacaaattgggtaagctctattaagaggaaatcttgattcttaaggcaagttctagggaactaaaagctaggctttttaagattaaggaaggggtttagaaaa

SEQ ID NO: 7883 - DNA, 687 bp, Gossypium hirsutum
  Clone ID: GOSHI-09MAY01-C18370_1
tccacgcgtccggagattttaacgatgcttaatgtcctgtgtcgccaaccaactgcttcaaaatattaaaagctatcatcacaaatatcatacatacggctcccagatctgctcttacctctcaattccagtataaaaggtaagggtttctaaaatatcaacgagaaaaaaaaccgtgaatactgtgatggcctctgagagggaagtttttggtctttcgggtccattacacctaaccaatatagattggaataatgcacatcatcgaaggtcagtagcagccagtttggttgagggtgtgtatatcttggagcgagaccgtcaggaaaaacgtgaaggttctcaagcattggctcctccctggtgggagttctttcattttaagttggttcgtaagctgatcgatgatgttgatttttgcatctttggtgctatttacgagtataagcctccatcgtctcattgtaatgactcaatagtctcaattgatggaaatccccgctatgtgattgcgttccgaggtaccataactaaaccagactccttcacaagagactttgagttggatatccacataatgcgaaatggactccaccagacatctcgctttgagattggcatgcaagctgttcgaaacatggttgctactgtaagtgcttcgaatgtctggttagctggccattccct

SEQ ID NO: 7884 - DNA, 397 bp, Gossypium hirsutum
  Clone ID: GOSHI-09MAY01-C118328_1
cctttttggatcaacaacatgcaactgctgatgggttgccagtaaaagtacttggtgatgggtttgacgatgaggatatggaagatggtgagatcgagagcgacccaagctcttatagagccctctctcgcaagaccttagcggatgtggttgacgcactgcttggagcttattacgttgaacgtcgcgagcacgcacctacccacctcaggtaatgcattgggatccaggtggagtctgaccctgtcgatatggactctatcgtgaacccatcgaatgttccagaaagcatactcaggagtgtaaattttgaggccttagaaggtgcattgaacatcgagtttaaaaatagggccttgttgggagaagctattactcatgcttcacgcccatcatc

SEQ ID NO: 7885 - DNA, 768 bp, Gossypium hirsutum
  Clone ID: GOSHI-09MAY01-C18330_1
catggacctcctggaaccggaaaaactacaacagtcggggaaattgtactacaagaagtgaagcgaggatcaaagatacttgcttgtgctgcttcaaatattgctgttgacaacattgttgagcgacttgccactcacagagtaaagatggtcagattggggcatcctgctcgattattacctcaagttttggacagtgctcttgatgcaaaggtactacgaggagataatagctctcttgcaaatgacattagaaaggaaatgaaggcactaaatgggaaattattgaaaaccaaagacagaaatacaaggagagagatccagaaggagcttagaactctttcaaaagaagagcgtaaaaggcagcagcttgctgttactgatgtaattaaggatgcagatgtcatattgacaacgtggactggtgcattttctcgcaaactggacaacactacatttgatttgattattatcgatgaagctgcgcaggctcttgaaatagcatgctggatggctctactaaagggctcaagatgtatacttgcgggggaccatctgcagcttcctccaactatccagagtgttgaagctgagaggaaagggttaggaagaaccctttttgaacgccttgcagatctgtatggagatgaggtcatgtccatgctcactgtccagtaccgcatgcatgagcttattatgaactggtcatctaaagagctttacagcagcaagatcaaagcgcattctagtgttgctacgcacatgctt

SEQ ID NO: 7886 - DNA, 626 bp, Gossypium hirsutum
  Clone ID: GOSHI-09MAY01-C18290_1
aaacccttaactaaaccaccattcttagcttttctttttaaattattctattactaatccatcgatttttgcacaattgatcaactcttcttcgatctactcctcaaattccaccaaaaactcctgggtttattgaattttttttaatattttcttatataggttttttgtttttttttctctttcaatcgtgattcattgattgatttggcaattctgggatttacccatttcatattattgtgaaatattggtggggttttgattttctcctcgtgatcttcttgtttgcatttatttgctttgattatgaacgaatgttcaaatttatcatcttttttttttatagcttttttttcctttgctggattataccttccttgtgttgtctgtaatgaatttggcatattttcttattgattatgattattatttttaataataactattattttatggtgtatgctcataatcttttttcagaaaccaatgctctcatattatgctgtagatatcatttttaatagcttcagcctgctagcaagattgttccttctcaaaggttagaagagagttagctggttttcctcttggcatgcttgaattagtgaaatggacaggagtag

SEQ ID NO: 7887 - DNA, 490 bp, Gossypium hirsutum
  Clone ID: GOSHI-09MAY01-C118248_1
catatgtctacggaataaatggcgttttcaccgatgatttcccagcaaagccggcaataccattcaattataccggcactccaccgcctggtctacaaacgatgaacggtaccaaggtatacagattggcctataattcaacagttcaacttgtgatccaagggaacactataatagcacccgagagccatccaacccatcttcacggatccaacttcttcgtagttggcagaggggctggaaacttcgatccggaaaaggatccattgaaattcaatcttgttgatccgggtgaacggaacacggataagcgtaccaactgcagggtggactgcactaagattcagagcagataacccaggggtctgcttttttcattgccctttggaaagttcatacaacatggggacttaagatggcattcttggtggaaaaacgaaaaagccccgacgagtcgaaccgaccggcttcgagcgatcttcaaagtgtt

SEQ ID NO: 7888 - DNA, 850 bp, Gossypium hirsutum
  Clone ID: GOSHI-09MAY01-C18220_1
cccacgcgtccgcccacgcgtccgtttaataatggtcggcttagagaactaatcaccccttttcctaaccatcaaaatacccccatccttttttatatcctaatcttcctcctttttgcagatcaacgatcctctggatttttcttttcagattcctaaatccaacaatacctaaagcctttgagatatttatatagatcgatcgaaatcgaagacagcagggtggcttgagaaaagggtaagtctggggtttggtggttattggaagtaaatggcgaatctgtatgtgaaagcggtgccaccggcggatctgaaccggaacaccgagtggttcatgtacccaggagtatggactacttatattctaatcctattcttctcctggctccttgttctctccatcttcggttgctctcctggcatggcttggaccgtcgtcaatctcgctcacttcctcgttacataccacttctttcactggaagaaaggaaccccatttgctgaagatcaagggatttacaatggcttgacttggtgggagcagatagacaatggaaagcagcttacacgcaataggaagtttctaactgtcgtacctgttgtgctgtacttgatagcctcgcatacaaccgactatcaacatcctatgctcttttttaacacacttgcagtgcttgtgcttgtcatcgccaagttccccaacatgcacaaggtccggatcttcggaatcaatgcagacaagtgagtttatctccccgttcagaacagttgatttcaccagctagaaaagccatacatacagctccttcacctctgttgaaaatgggtatatctctttgtatagaacatt

SEQ ID NO: 7889 - DNA, 578 bp, Gossypium hirsutum
  Clone ID: AI731442.1
agaacgcctagtgtttgaatttatataaattcaatcaaatacaaaaactgggtcgttttagaagaagggtctcgtctctgattttggcgggttaaattgaaaaacataaatggcgaatctatatgtgaaggcggtaccaccggctgatctgaaccggaacaccgagtggttcatgtacccaggtgtatggactacttatattctattcctctttttctcttggctccttgttctttccatctttggttgttctcctggcatggcttggaccatcgttaatctcgctcacttccttgttacttaccacttctttcactggaagaagggaaccccgtttgctgatgatcaaggaatttacaatggcttgacttggtgggagcagatagacaatggaaagcagctaacacgcaacagaaagtttttaaccgttgtacctgttgtgctatacctgatagcttcgcatacaacagactaccaacatcctatgctctttctgaacacgcttgcagtgatcatcctcgtcgttgccaagttcccaaacatgcacaaagtccggatcttcggaatcaatgcagaaa

SEQ ID NO: 7890 - DNA, 352 bp, Gossypium hirsutum
  Clone ID: uC-gsflmaxxa094h08b1
tctacgcgtccgcccacgcgtccgcccacgcgtgcgctgatgcgtgggggatcttcttaatcaacgcagacaagtgagtttatctccccgttcagaacagttgatttcaccagctagaaaagccatacatacagctccttcacctctgttgaaaatgggtatatctctttgtatagaacattctgaaggcttaatgtccttctttcgttttcgtggtgaattttctgactgcacacttagaagctcccctttgatcatgatgaaggaataatgagtgtatcaagttaaaacctttgtatagtagagaaacataatgtatgttcaatatcattaagctcttggctgcctatat

SEQ ID NO: 7891 - DNA, 1150 bp, Gossypium hirsutum
  Clone ID: GOSHI-09MAY01-C19930_1
ggggctgctcgcctgcctgcacgcgcccggacttaactggctgggccgacccacccgtccacgcgttacggccagcgtgcgaccacgcgggggggcttggagaagagacgaaattgtagttgaccctttaaccatttatttcttataaaccgaatcactccttcggagattttgataattcccccatctccctagatctcctacatttcggagatggcggacgcgcaatccagatacgttaagctgacaaaagatcaggcgcctttagaggatatccaacctggtgaacttaatcagcccattgatgttcctcagttgcatgtccgaaagtgcaatgaatgtggacagcctttacctgaaaattttgaacctcctgctgttgaaccttggacaactggaatttttggctgtgctgaagatacggaaagttgctggacgggactattttgtccatgtgttctatttgggcgtaatattgagagcttgagagatgatacgccctggactacaccatgcatttgtcatgctatttgtgttgaaggtggcgttgcattggcagttgcaacagcttttgtccatggtattgagccgaagacaacatttctcatttacgagggtttgttgtttgcttggtggatgtgtggaatatatactggcctttctcggcaatccttacagaaaaagtatcatctcaagaattcaccctgtgatccttgcatggtgcattgctgcatgcactggtgtgctttatgccaggagcatagagagatgaagggacggctatcagatgactttgtcatgccaatgactgttgtcaaccctcctcctgttcaagagatgaccgccaataatgaaaaccaggattccacaccaccaccctctgggactagcacaaacttggagatgcaagccccctatgccccggcttcctttgtaaaaaatggcgcatattgttgaatgatttttgtgttggagggattttatttaaatattcatgccttgtttctctgtagaattggttagtcttcacaaagaacttttccatactcttcttatggtacatctattgatactgagagataattctctaatcagcgaggcttttgatttgctatatatatatatacacagataccgttacttcgttttt

SEQ ID NO: 7892 - DNA, 204 bp, Gossypium hirsutum
  Clone ID: GOSHI-09MAY01-C119588_1
tcttccacgcgtccgcgttttctgtactcgtggatttctactatggaatgttagttttggatttcaatgctcgcacttttattgtcaatttctttgtgatttatgtgtcgactttggaatcatacacattgtgtttagctgaaaaaaaaaaaaacaaaaaaaaaaaaaaaaaaaaaaaaaagactaataaaaataaaaccgggc

SEQ ID NO: 7893 - DNA, 432 bp, Gossypium hirsutum
  Clone ID: GOSHI-09MAY01-C119578_1
gtgctttgggtcgtgggtgtctgaatattgaggatgcagggctactctgggcatcgtgtgatgagggatacaacgcgataggaaagagcgtacgggactaccttggcaagtaaagtgttattgtgatgttgtcatatgggtctgacgagacagttgacaatgaggtcattgacatatcatcctctgtgatcgagaattgtgctggtgcggtctgaaggtgttgttcatgatctcgcacggactaggttgtccaattcacttattggggctgcggtattgatgctgcagacttaccgacagggggcggctacctcgcttattgattatggtgctagtgacaaagctgtgccttcggagccactatcatgggaggagcctgaagagcttgctgatccgcatgttgtatacgcacaaagtaatcctgtttctgag

SEQ ID NO: 7894 - DNA, 327 bp, Gossypium hirsutum
  Clone ID: GOSHI-09MAY01-C19510_1
ctttgttctggcgtgccgggtgttgcatagaacagaaccaagattggcttgtaacctgaagttatttttatggttattttattttttttttatttgtttttttttatttatttttatttttttttgttttttttttattgaggtaaaagaaagttccaatgacactttaaaaaaaaaaactttaaggttattagcctaaaccaaggattaataataagctaaggaaccaaattaaataaagtcttagcaactactagagcccctataaataacccaaaaagaataaacggtgtaaaatccaaccgtacttaaagataggcccaattt

SEQ ID NO: 7895 - DNA, 340 bp, Gossypium hirsutum
  Clone ID: GOSHI-09MAY01-C119498_1
ctcaacgacgccaaattttatttatttatttatttatttcattaaagccgatcagagatctcctccgcctctaatttctcctccatttgtcttttgcatttacggttctttaattttctgtaacaaatggaaccttcatcttcatctcctggttcaatgaaagtttcgccgctcgatctgatgtccgcgataatcaaagccaaaatggacccttctaacgcctccgccgactcggctgccgagatggctaccatgcttctagagaacaaggagttcgttatgattttaactaccttcatcgcggtgctcgttggctgcgtcgtccgtttggtatggcgta

SEQ ID NO: 7896 - DNA, 1795 bp, Gossypium hirsutum
  Clone ID: GOSHI-09MAY01-C19460_1
taaaacccatattctcacagccgcaccaaggcgaagatcgaacggccacgttcgtaacaatatatataaaagaagaaaaatcgtagaagaagctatacggcgatggtggaagtagtttctctgatggatatcgacgaagacgacaaccaccagaaacaaaacaactctcaaaagcttaacaagggcaaaggtctcgtcacagccgctgataccaaacccactccctgggtcgagaagtaccgtcctcagtcactcgccgacgtagccgctcaccgcgacatccttgacaccattgataggcttacaagcgagaacagattgccgcatcttctattgtatggtcctcccggaactggcaaaacatctaccattctggctgttgcacggaagctttatggatcacagtatcgtaatatgattctcgagttgaatgcttcagatgatagaggaattgatgttgttaggcaacagattcaagattttgctagcacccaaccccgctcatttggggcgaactcatcagtgaagttgattttacttgatgaggctgatgctatgacaaaggatgcccaatttgctttgcgtagagttattgagaaatatacaaagaatacgagatttgcactgatctgtaatcacgtcaacaagatcattccagcattacagtccagatgtactcggttccgatttgcacctcttgatcctattcatgtcactgagcgacttaaacatgttatacaggctgaaaggcttgatgtacctgattgtggcttggcagcactagtacggcttagcaatggtgacatgagaaaggctttgaacattttgcagtcaacacacatggcttctcagaagattacagaagaagccgtgtatctctgtactggaaatccgttgcctaaagacatcgagcaaatatcttactggcttctgaatgaatcatttgcagagagtttcaaacgagtatctgaaacaaagaccaggaaaggattagccctgatcgatattgtaagggaagtgacaatgtttgtttttaagattaaaatgccctcagatgttcgagttcagttaattaatgacttggcagacatagagtatcgattgagttttgggtgcaatgataagttgcaactgggatctctcattgctattttcacaaaagctagatcttccctagttgcggcagtgaagtagctgtttcaaagcttggccttgtttcttctcccagtctcaaaatgttctttctgtatgatttaagcccctgacaaatagaaagtgtttttgcttatgtagtccatgagtcgtgaatccctaaagaatgtagttttcaggccctaaagatgtttatttatttacttttttgcagtgatttttgcttcttatgagctcccagatccttcatgttttgcttcttaaaccctgcttagcttatggtaaagtgatttattttgggggaccaaatgaggctcaagttttagaggcattgcatcttcattgtagttccacatggttctttttcagtgcacctttctgatgtagtaagtaggacaagaggccaaggttaggaagtaaatatagttgccctactcaatcaaaagttagtacgactttcatgtactttgcatgtcagccgttactgcaactacgttatgcattttgattgattggttattttattttattttattttaaatctcgtcatattatagggatgcaagtgaatacaatcaacattttctataacattatatatttgtctaaggttttgattgttataaagaagtgattgttatac

SEQ ID NO: 7897 - DNA, 677 bp, Gossypium hirsutum
  Clone ID: GOSHI-09MAY01-C119428_1
ctcacgcgtccgcaaatcccttggccttgacctcatcgcagccgacaacgggcgccttcattcctcaccaatgatttacagccccgtgattccttccccaccttcgatttcaacgaagtcaagagggatcaatggcggattcgaagggtaaggtctcgttttccttttttcttttgtttttaaatgcaaaaaattagaaaggaaaacgaaagaagcagttagagaaaaaaaacgcaatagatctagagactcaaaacggaaatcacctttctttgcttttttctatttgattgtttcgtatgcgtagtgtgtgtctaaaaaagatacaatggcattgttcttggctttatagccgaaacagagtaagaaaaatcaaaataaaaatacaaatttttttgtatttgctgccgtgtggtttttgtatttgctcgcaggtaaggggtgtgcgttggcgtacgggactgtgctggcgtacggaggcgtgggcgtggctgctgaaatgctggaaggtacgacgcatggtggctttgctgcggcgcgaaggggaaaaaccccaggcttctggtgttttagtttttccggcctgctgggcctaattcttgggctgtgtattggactgaccgactgttaatatctggatttttttgttcttgtttatttattagttttatggtgat

SEQ ID NO: 7898 - DNA, 401 bp, Gossypium hirsutum
  Clone ID: GOSHI-09MAY01-C119738_1
cctatcgcgtccgaagcaacagacaatggaagcggggcgtagggaacttgaactctggcagcgacaaaaagccacatctgaacaagttgccataaatgcaaagcagcggcagggctccggtggcgtatggggttggcttgcaggaagaactccacaaaatgctgatgatgcttgaaaacctaattaaatagtgcttgcagggaagtcatacccggtgcaatgttctattcactggatcaagagctcaaaccatggatacagcctcttcttgcaaagccggggggaggttgcggacattaggaccttctgcaaatccttgttttagtaggaacctaacgcattgggcactctctttttgtcaaaattttgggtaaaatatacatatatgtcctgttctactt

SEQ ID NO: 7899 - DNA, 499 bp, Gossypium hirsutum
  Clone ID: GOSHI-09MAY01-C119708_1
gcctaccacgcgtccgcccacgcgtccgcccacgcgtccgcccacgcgtccgaagaaatcacattattctcccaaaaccatggcaagaggttcctctcactcgcaaaacaccgcttcctccaccaccacccgtcccggcgtcatggctcctcgaggttccgctgcagcgacggccggaatgcgtcgtcgcagggttaccggaggcgctgctgccacctccgcattgaccaccgtcggctccggaacgagcaacatgctccggttctacacagactatgctccgggcttgaagatctcccctaccgttgttccttgtcatgagtttttgcttcattgcctttcgtcgttgctcttccacgcttttggccaggtccttcccgccaaagctggagccggagctggaccgtgaatcatgaccagaacccggtcttcgttttttttcggatctatgaggtgttcttgaatcgtaactgaataatattcgatttggtttaacttt

SEQ ID NO: 7900 - DNA, 1097 bp, Gossypium hirsutum
  Clone ID: GOSHI-09MAY01-C19690_1
ggaaaacccgtcccggcggacgcgaaacgcccacgcctccgcccacgcgtccgcggaaaggcaaaggaagaaaaagagtgaaagatttgggttttgagaaaatcaattcaaaacgactggtttcactctttttttcctgccttgctgatctttttggggttcttccacaaaaagaaacaaaaaattttgggtgatctgtgttgaaaaagaaataaaatatggcgacattccaaggaactcaacaaaaatgcaatgcatgcaacaagactgtttatctggtggataagttgacggctgataatagggtttttcataaggcttgcttccgttgccaccattgcaagggtaccctcaagcttagcaactacaactcatttgaaggggtgctatactgcaggccacactatgatcaactcttcaagagaactggcagtcttgacaagagttttgaaggaacaccaaaggttgtcaaacctgaaagacaaatcgatagtgagagtgcactgaaagtgatgaactcgtttggtggcaccagagaaaaatgtgcggcctgttctaagactgcttatccaattgagagggttactgtgaatgggacaatataccacaagagctgcttcaagtgtacccatggagggtgtaccattagcccatcaaactatatagcacatgaaggtaaactctactgcaaacatcaccatatccaactcttcaaggagaaaggaaactacagccaactcgagaccgaacgagagaaacaagccgccaccgccgccaataaggttcctgcccctgctgcaacatcaaccacaaccacaaccacggagattgcagctgagtcgtaatgatctcagtgtgcatcactgctgcttcaatgaaaaaaactttgtaaaacgatccaatgtcattgctgtgttgattttctgcaatggggttctttttattttttttctttgatccagatattattcttggttcataatatgttacataaatttcccactttcaaagatgggattgaggtgatatgttccaagtggattcagcttttgaaaaataaagattctttcattaattctacccccactattactttc

SEQ ID NO: 7901 - DNA, 509 bp, Gossypium hirsutum
  Clone ID: uC-gsflnu33B089d11b1
tttctacgcgtccgcccacgcgtccgatttttccttaaaatatcaaaatcatctgtatattcctataatttttgccctgaattcactaccgtccacaatatttttggtcacccctgcatttttcacagccattaataaacaggatttaaagcttggaagcagaggagcaaatcgttgaaatcagatcggaaaggcaaaggaagaaaagagtgaaagatttgggttttgagaaaatcaattcaaaacgactgggttcactctttttttcctgccttgctgatctttttggggttcttccacaaaaagaaactaaaaaatttgggtgatctgtgttgaaaaagaaataaaaaatggcgacattccaaggaactcaacaaaaatgcaatgcatgcaacaagactgtttatttggtggataagttgacggctgataatagggttttttcataaggcttgcttccgttgccaccattgcaagggtaccctcagcttagcaactccactcatttg

SEQ ID NO: 7902 - DNA, 619 bp, Gossypium hirsutum
  Clone ID: AW187256.1
cacaatccaaaagctaaaagaaaacaacactttatctatcagtatcaccatttttttttttagcttcaattaagcccttcaatcaccaatccatgtctttttctcttataatcccttaaattcccgtaaagaacccatattatataccatcagaaaatgctagatccagcctccgatatgcttccgccgccgtcttcccccaccatctcttccgtttcctcttctgatctcgacactgagtcgacaggttcatttttccatgatagaagcactacattgggtactctaatgggtgtgagttttccggccattgctttccgagcaccgtcacggcacaaccaccgcgagacgcaacccgcgaactccggttcttccacggcgaaacccaagaagaggagggcgttgacggcggctttcgggtcggagcgttcaggtaaacggcggaggaagtggtggcagatctgccgggatggggattcaaagccggcttctctgggtgagtttctggaggttgagcggaggttcggcgacggagcgttttacggtgcgacgccggaactggaaggagtgatggggacgggtcacgatgagaatcacgaagcgaggaatggacggtcgt

SEQ ID NO: 7903 - DNA, 527 bp, Gossypium hirsutum
  Clone ID: uC-gsflnu33B081b05b1
cttacgcgtccgcccacgcgtccgcccacgcgtccgaaaccccatattatataccatcagaaaatgctagatccagcctccgatatgcttccgccgccgtcttcccccaccatctcttccgtttcctcttctgatctcgacactgagtcgacaggttcatttttccatgatagaagcactacattgggtactctaatgggtgtgagttttccggccattactttccgagcaccgtcacggcacaaccaccgcgagacgcaacccgcgagccccggttcttccacggcgaaacccaagaagaggagggcgttgacggcggctttcgggtcggagcgttcaggtagacggcggaggaagtggtggcagatttgccgggatggggattcaaagccggcttctctgggtgagtttctggagggtgagcggaggttcagtgacggagcgttttacggtgcgacggcggaactggaggagtgatggggacgggtcacgatgagaatcacgaggcgaggaatggacggtcgttg

SEQ ID NO: 7904 - DNA, 685 bp, Gossypium hirsutum
  Clone ID: GOSHI-09MAY01-C19610_1
ctctccttgatgatagaatttttctttcagtttctcacctcccagactggcccagcaactgtcaatctctgacacaactctgcaaaaaaactctgtacaggaagaacttttcttagtcctcttcaaaagatatttgtcccttttctcccaaaagttcctcacctttcgaatctattctcctttctctctctcttaatcgatcatgcttcaaagcttagttcctcaatctccaatcagttccaacactactagctctaatcctagctcctccatgaagtcaaagcgcgtcgaaagagacgtctccgcagctaccggcgaagattccactgctgatgatccttccaacaagcgtcctaactactcctccggcgacaaagcagctgccgccgatgaacatgatgaaacggtgatagaaggtgagtctacagggttaaggcttttaggtctcctgctccaatgcgccgaatgcgtcgccatggataacctcgaggacgccaccgatcttttacctgaaatatcccaactctcttctccgttcggctcatctcccgaacgtgtcggcgcgtacttcgcacacgctttgcagggacgcgtggtgagttctagcttaagaaactattctcccctggataacaaatcacttaccttgactcagtcgcaaaagatcttcaatgcgctgcaatct

SEQ ID NO: 7905 - DNA, 701 bp, Gossypium hirsutum
  Clone ID: GOSHI-09MAY01-C19630_3
gaaaaggggaaaaaatcgaatctctccggtactaaccataccttttaccttaccagatatcatagttgacgccaaaagaaaagaagaaaaagagagaagaaggctttattaacagcgcgaaagtatgtatttccctttttcattttgagtgatttaattaaacggttgaggagccgagaatctgcaaaagcttcctctcatacgcaacaacaggacgcctttttccacttggatcgaacggccgtgtcgtttattttaattgagtggttatggcggagccatcttcgtctttatcgtcttccaaggacgagctgtttcagctcatcaagcgtcttggaacttatctcgccctcaagatgtcaaatcttttctcgatctctctccaaaaactggatccgcgatctgttggggctattgcagggcttgctgttgcaattatctttacctataggttgatgagatcacctgcagtacccccaagaaggcaaccaaaacgtcaagctccaacaactagtagctcttctatcagtacccagtcaaatgcaacattgatgccttctggagcctgttcaccttcagaggatttaagagcacaaatgtgttgatgagttcttccagccagtaaagccaacattggggcaaatagttaggcagaaactgagtgaaggtagaaaagtaacatgccgtttgcttggagtgat

SEQ ID NO: 7906 - DNA, 746 bp, Gossypium hirsutum
  Clone ID: GOSHI-09MAY01-C19630_2
ccccgcgtccgcaattttgtgatctttatctcatggagagggttattgacgatgaaagcgaaaaaatgttcttctggccttggaaaatgcaggattttcacctccggtggcttggtgaaggacaaggttctcttttgtagtacagagaatgggaggacatcttttgttcggcagctagaacctgattggcatatcgacacaaatcctgaaatagtttcccagttagctaggttcatcaaatatcagctccacgtatcccctgtcaaaactgaatggactacgggtaaagtgctcagttctccatccttggaaaaattctttgggtaagtttgacacttgaactgatatgaaaacatgcagatatgttttgaagttgttgtttgctcccttttggcccttgtatgcttcctttttggttaaagcctgatatttttctttcttttggcaccccttgtgctgatgtcagtttttaggataactataagggagaagatttatttgtttcaaaatttgtgaaacagggaggggttcacgtttgaactttttttctttttctttctttctttcttttttttttttactggaggaactacatccaatatttgtaatttactttcaaggatatgcaatcatacaaaagttcttatattgttgcctctactgagttggctgctttactcgctttgttattgctttgttattggaatattgcgtgtattccagtgttgaaaaagcttgactgatcg

SEQ ID NO: 7907 - DNA, 1039 bp, Gossypium hirsutum
  Clone ID: GOSHI-09MAY01-C19630_1
ctcatacgcaacaacaagacgcctttttccattggatcgaacggccgtgtcgtttattttaattgagtgcttatggcggagccatcttccccgcgtccgccctccgtccgccgccgcgtgcggctcatcaagcgtcttggaacttatctcgccctcaagatgtcaaatcttttctcgatctctctccaaaaactggatccgcgatctgttggggctattgcagggcttgctgttgcaattatctttacctataggttgatgagatcacctgcggcacccccaagaaggcaaccaaaacgtcaagctccaacaactagtggctcttctatcagtgcccagtcaaatgcaacattgatgccttctggagcctgttcaccttcagaggattttagagcacaaaatgttgttgatgagttcttccagccagtaaagccaacattggggcaaatagttaggcagaaactgagtgaaggtagaaaggtaacatgccgtttgcttggagtaatccttgaggaaagcagtccagaggagctgcagaaacaagcaacagtgaagtcctcagtgttggatgtgctattggagattaccaaatattgcgatctttatctcatggagagagttattgatgatgaaagcgaaaaaattgttcttctggccttggaaaatgctgggattttcacctccggtggttttggtaaaggacaaggttctcttttgcagcacagaaaatgggcgtacatcttttgttcggcaactagaaccagattggcatattgacacaaatcctgtaatagtttctcagttagctaggttcatcaaatatcaacttcacgtttctcctaccaggccgtgaggggactgcgcctaatgtcttcagttgtccatccttggaccacttccttggatgcgtttgccgcgtgatccgggttcacatttgaacttttttggaaccggagaaactccatgcagcaattaatgtttgtaatcttgatagtggaaggatatgcaatgcaatcataaagaattattttgatgcttc

SEQ ID NO: 7908 - DNA, 159 bp, Gossypium hirsutum
  Clone ID: LIB3585-030-P1-K1-F1
gttttttaggataatggagaagttatttgtttgaaatctgtgtagggttcacatttgaactttttttgaaccggagaaactccatgcagcaattaatgtttgtaatcttgatagtggaaggatatgcaatgcaatcataaagaattattttgatgcttc

SEQ ID NO: 7909 - DNA, 786 bp, Gossypium hirsutum
  Clone ID: GOSHI-09MAY01-C19190_1
gcaaagcatacaaaaaccaaacgagtctctcaatctcccaaaattcataatccaattttcctgttaatcccagttttctattgtgaaaatggctatgattccaagcttttatggcagccgccgcagcaatgtctttgatcctttctctcttgatgtatgggatcctttcaaggacttccccctttcttcttcactcacctcacaaaccccggaaacctcagcgtttgtgaatacccgaattgactggaaagaaaccccagaagcgcacgtgttcaaggctgatgttccggggcttaagaaagaagaggtcaaagtggaggttgaagatgacagggtgcttcagataagcggagagaggaacatggagaaggaagacaagaatgacacatggcatcgcgtggaacgtagcagtgggaagtttatgaggaggttcaggttgcctgagaatgctaagatggatcagatcaaggcttccatggaaaatggtgtgcttactgtcactgttcccaaactggaagtgaaaaagcccgatgtcaaggctattgacatttctggctaaacgattgaactttggtttctaaacccgtgtcttttcactctgccagatcagagttcagttcccactatgcgcgatctatactatatgtgtgtttacgtatgtatgtataaaagttttaaataacgttgtgatttgtaatggtcttcgttttgtagtttggtcttttatgtatctgtaatcaaaataaatatctcaattttatacatctgtttgcgaagttctgtttt

SEQ ID NO: 7910 - DNA, 471 bp, Gossypium hirsutum
  Clone ID: GOSHI-09MAY01-C119198_1
ctcacgcgtccggaccgggtgggctatgatcagcctagtcaagcagtagagtggctgattaaagcagctgctgatgcaattgcggagcttccttcacttaacactgcatttcctgataccccaaggcaattgagtgatgatggaactgaacaagggtttgactcggctgaagtagagttagatggcgatccgaataattaccaacaaaaccaaagtcagcagcacctttccttgtccaaatcagcttgcagtagcacgtccgagattagcaagaactcgggtttatccctttccaggtctgagaaccgtgttaaggcccgggaacgggcaaggggaagagtagcaaaagaaaaggggtaagagcaaaagactgacattgcacatcaacaaaatgggaaccccatttctcaaaactcttccttcactgagttactaaccctgtggcatttggcagttgttaggcaaacaaaa

SEQ ID NO: 7911 - DNA, 727 bp, Gossypium hirsutum
  Clone ID: GOSHI-09MAY01-C19100_1
gaacaatcaatgtattattcagattaggatcctgaagttttttggtcaatttcggccaataagcctttgctcggttttatacaagttgatgatgaaggtaattgctaaccacttaaatccaatcctccaaatttcacagagaataagaaaaagggggggggggaatcaaagctagggttaggattgaattttgcagaaaatggcaatgaggaaagtttatagcgagataaaagggatgaaagtgaaggaagtccctaactacgtgaaaccgatgctatcaatggattacgtgaagaaagcttttcaaaagggtttggacaattacaattcaaagtacattcaaaccgattcgatccagcctctttaccatgtctgtttcggtgggatggtcttttcttacctcgtcgctctcccaaatgagcgtcgccatctcgagcaccagcaacacgccaaggaacatggtcatcactgatccctgctcaggttaaagagtggcatttatggcataatgcttctggttgtaatttctgagcaatttaggcaggaagatactgtctttgatcaaatgcattgcagcattgtggtgataaaataatattaaaaataaaatggatttttgttatggtggtgtgttgttgatttctattgactattttttgttgggtgttgataagttggggatcaatcgattaaatactgaattttttttatagtggaaattgactgc

SEQ ID NO: 7912 - DNA, 974 bp, Gossypium hirsutum
  Clone ID: GOSHI-09MAY01-C19050_1
gaggcgcgtggaacagtggggcccccgctgaggtttgcttacgggcgtgtactcatctctgttagctttcatttttattcacttcaagctctttacacagtttacagccatagaagcaacaacaatgtggagatcaatcataactttcattctcttcgcctttcttttcttccctatttcagcgacgaagataacactctacaacaaatgctcacatccagtatggccagggattcaacccagcgccggcaagccaattttagcccgcggtgggttcaaactcccaccaaacaaagcctactccatgaatctacctccgttatggtccggtcggttctggggtcgacacggttgttcctttgacgcctcgggtcacggccgttgcgcgacaggtgactgcggcggttccttattctgcaacgggctcggcggaaccccacccgctacgttagcggaaatcaccctcggccaacaacaagatttctacgacgtcagtttggtggatggctataacatcgctatgtccattacacctttcaaaggcgccggtaaatgtagctacgccgggtgtgttagtgacttgaatttaatgtgccccgtcgcgttacaagtgagggataataaacaagtggtggcttgtaaaagcgcttgtttcgcttttaattcaccgagatattgttgtaccggcagcttcggcagtcctcagtcgtgtaaaccgacggcgtattcgaagattttcaagactgcttgtcctaaagcttattcttatgcttacgatgatccgaccagtattgctacttgctctcgcggcaactatttggtcactttttgcccacaccgccgctagaattttttaaggctaaattagcatcgtatttgggtgttttttttttttttttggctttctcttatctcttcgtacactatattgcctgttctgtaatggagtttttattaatagaaacaatgttatt

SEQ ID NO: 7913 - DNA, 349 bp, Gossypium hirsutum
  Clone ID: LIB3083-078-Q1-L1-D11
caggtactaattggttgcgtactctccaatatactgaaataaacatacatttttgcacaacatttaagaataattgattttgttgtttaaacagcgacgacgataacactctacaacaaatgctcacatccagtttggccagggattcaacccagcgccggcaagccaattttagcccgcggtggattcaaactcccaccaaacaaagcctactccatgaatctacctccgttatggtccggtcggttctggggtcgacacggttgttcctttgacgcctcgggtcacggccgttgcgcgacaggtgactgcggcggttccttattctgcaacgggctcggcggaaccc

SEQ ID NO: 7914 - DNA, 350 bp, Gossypium hirsutum
  unsure (1)..(350): unsure at all n locations
  Clone ID: LIB3585-003-P1-K1-C1
cggggcggaccaacgcgtccgcccacgcgtccgcccacgcgtgcggccacgcgtccgttctgtaagcttgcatttcaactgactggaggctctttccatagttgacagccatagaagcaacaacaatgtggagatcaatcataattttgactctcttggcctttctttgcttgcctatttcagcgactacgataacactctacaacaaatgctgacatccagttggggcagggattcaacccagcgccggcgagccaattttagcccgcggtggattcaaactcccaccaaacaaagcctactccatgaatctacctgcgntatggtacggtcggatctggggtcgacac

SEQ ID NO: 7915 - DNA, 630 bp, Gossypium hirsutum
  Clone ID: GOSHI-09MAY01-C19070_1
gttgttttttccaatggcgaattatgcgctgaatcatgcattcttgccttttggtatagacagttaattcacattcacacaatcgagtcaaaattacagggaaacaccaagaatgttgctgtgaatatggccaatgtaagaggaatatatcaaaggaaaaatgaaaaatgcaactgtttcttatagatgatgaaccgaagaataaacacgcaacgacaactctatctatgcaagaaatgaaaatcgaaaaaagaaataaaagattgctgattgtttttcccagtccttttactgaaagatggtggagcacctgtaagaactgaggaagcctgctgggaagaaatccataatatgcatcgcgggtttaatgagtctctttctctgagttggagcgacagagatcctcgatttggttcatcacctcggccattgaaggacgcttgtcagggtattgagcagtgcaattaatggcaagctgtaagagctggaccatatcatcctcaacattctggtatctcagaagttcgaggtcgaacacctcagaggtccagtcctctcgaactatggattggacccatcttggaaggtctatgccttcctcgttcaataaggcatgtgttggtgcctttc

SEQ ID NO: 7916 - DNA, 699 bp, Gossypium hirsutum
  Clone ID: GOSHI-09MAY01-C19030_2
ggtggttctgcggttgtaggaggaggtgctagtgctggatatggaggtggtggtggtagtggagaagtggtggtgttggaaatggaggtgctggtggacatggaggtggtagtggtagtggtggaggcggaggtagtgcaggtggagcttctggatatggaagtggagttggtgaaggaggtggagctggtagtggtgccggatatggaggagcaggtgggcatggagagctcccgttgaggaacagggttcaccacccaccatcccaggtggagcaacgctaatatttgacgcagagcttgtttcagtcaatgggaagccatcgagtggggaggatacaagtgaagatgagctatagttgctttgctcattagcgctaactttttttatattttactacgcttgttttccattaaaaaacgctattatgacggcgtaacctcaacaggccttctgtctaggattcagataatatttttgggggtttctttttttccacaaggaaaactatctgtttgttacgatgttggagaaacgttctttttggatggttcctcctttgattattattatatgtgggcagataaggtgaattcaactgtcgaattaaaacttgataaaagttgtgcatttctgatatgatgacaggcaagcttcaatttcaaaggatgaatgaagggtacaacttccacagttaac

SEQ ID NO: 7917 - DNA, 736 bp, Gossypium hirsutum
  Clone ID: GOSHI-09MAY01-C19030_1
gagaattggccggagttagagagagtgaaacaaaatgagtatcagctgcgcgttgaaggtggttccgattgtgcttctgttggttcttttcgcgttagcgaatgccaagaaatcagctgatgtgaccgagctgcagatcggcgtcaaatataagcctccatcatgtgaattccaggctcataaaggtgatagagtaaaagtgcactatcgggggaaactcactgatggaaaggttttcgattccagttttgaaagaggtgatcccattgagtttgagcttggtagtggacaagtaatcaaaggatgggaccaaggattgctggggatgtgcgttggtgagaagcgcaaattgaaaatacctgctaagcttggatatggtgaacagggttcaccacccaccatcccaggtggagcaacgctaatatttgacacagagcttgtttcagtcaatgggaagccatcgagtggggaggatacaagtgaagatgagcgtatagttgctttgttcattagcgtcaacttttttttttatatattttactacgcttgttttccagtaaaaaacgctattatgatggcgtaacctcaacaggccttctgtctaggattcagataatatttttgggggggttttttttttccacaaggaaaactatttgtttgttagaatgttggagaaacattctttttggatggttcttcctttgattattataatatgtgggcagataaggtg

SEQ ID NO: 7918 - DNA, 382 bp, Gossypium hirsutum
  Clone ID: uC-gsflnu33B036c05b1
atgagtagtagttcgagagagtgaaacaaaatgagtggcatttgtacgatgaaggtggcgcctattgcgccgcagtgggctctttgcgcattagcgaatgccaagaaatcagctgatgtgaccgagctgcagatcggcgtcaaatataagcctacatcatgtgaattccaggctcataaaggcgatagagtaaaagtgcactatcgggggaagcttactgatggaaaggttttcgattccagttttgaaagaggtgatcccattgagtttgagcttggtagtggacaagtaatcaaaggatgggaccaaggattgctggggatgtgcgttggtgagaagcgcaaattgaaaatacctgctaagcttggatatggtgaacagg

SEQ ID NO: 7919 - DNA, 838 bp, Gossypium hirsutum
  Clone ID: GOSHI-09MAY01-C19360_1
cccacgtgaaaccattcccgtacggcaaacctccaatcttttcagcgtcctatggcataagccaagctccattgccatggattggtactcttggttgtcaaaaactgcccttgagccctcactaatctatgactatggccttgccttctcccgtaatgagcttcaaaaagaggatttagcctacttcaatcatgagtttcttcagagcatgggcatatcagttgccaagcataggcttgagattctcaagcttgctaggaaggaagttggagaaacccctaatagcctgtccaagataattttggcaatcaacaaaaccagaaagagctttaacaagtatgttaacaagttggttcaccatgagaataactcgattaagctgctgccggagccgggtcgttatcgagatcagtggagaggaggattgacaaggaagtgcaacagtgagaaggaggtgaacattgagcagccagtgcggagaaccaggaagatagcaaaatccggccccctggattatagagtacaagagaagttgcttgcccctcctaggagcctaaaattgtctgggccactagacagaaaaatgcaggagaaactggtgttcaactataagagccccgtgacatctggtcctattgatattgcaattgcacaagagaggttgattctcacaacaaataggagcccaaaactatcagcacctcttacttatgtaagacctccaagcccaaagattcatggtgactactacaaggaaaagacaggcggggactatggtgatcagacattgtgggctgcaatgtttcaggacatgaaacccacttgacttcaccacatg

SEQ ID NO: 7920 - DNA, 803 bp, Gossypium hirsutum
  Clone ID: GOSHI-09MAY01-C19300_1
ccttccagggagtaatcttcaactgattcgcctacggtcggctcttaatgctagagacattccagctgaagacttcaacctgctgcctgattttggtgtgcagcagcaacagcgggtgaacgagttatctagcctcagtcagccatctatgagttctaattctatgaatcgatctggtcgattgaaaaccctgaccccatcaaatctcgaagatctattttccaccgagagctcttcaccccagtactctgatcaagcattggcagcagttgttttctcaccttctcataaatctgccgttctcaatcaatttcagcagcagtcaagcatgctatcacccattaatacaaatttttctcctaaaagtaaggagcatccgctattgcaggtgtctctatctggtaggatgtctcctcggaatgtggaacctatctcgccgatgagctctcgagtttcaatgttagctcaacttgagaaacagcagtttcgctgtctaagctctagggaacttggctctgactctcctgccagtatttcttccccagtaaattcttggtcaaaatggggatcttccaatgggaagcccgattgggctgtcaatgcagatgagttaggcaagcatcatgcttcatttgagctcagcaacggagatgagcccgatttatcatgggttcaatcccttgtttaggaatctcccactgagatgaaagagaaaatgaaggcttcggtcttggatgttccgtctaatgcctcgaaaatgagggttctaatacaaactcgcaagttgatccgctggatcacac

SEQ ID NO: 7921 - DNA, 820 bp, Gossypium hirsutum
  Clone ID: GOSHI-09MAY01-C19320_1
tcagttaaaaacactgcaactcccccccgcccccgccctacccaaaaaaatgataggcggacgaagggaaggtgggttgatgaagaaaagcatcgcagtcagtggtgaaatcaacaatattaatagctgttgccattgggatttccattggttgcctcttcgcttttctttatcctcacggtttcctctctttctattcccctgctttccactcccaggttctatcttccaaatgtgaatcatctcataggttgaacgagttgaaagcagagtatgcggccgaattggagaaaaacgaagagttgagacaacaagttaaggagcttactgagaaggttaggttggctgaacaaaagaaagatcatgcacagaaacaagtcgaggcattgggtaaatggcgtaaagcggggccttccggaaccgttaaaggtttaagaacaaaccccacagtgattccagatgaacccgttaatccgagattggcggaaattctggaagctgttgccgtcggaagagagcttatagtggcacttgcaaactggaacgtgaaggagtcgttagagatttggttcacaaacattaagagagttggcataactaattatttggttgttgctttggatgataagatcactgaattttgcaagtcaaataatgttccagtgtataagagagatgcaaatgatgggattgcttccattgggaggacggtgaataaccatgctgtttccggattgaaatttcatatcttgagagagtttttgcagctggggtatagtgttctcctttccgatatcgataatgggtatttgcaaaaccc

SEQ ID NO: 7922 - DNA, 410 bp, Gossypium hirsutum
  Clone ID: GOSHI-09MAY01-C19240_1
aagaagctctttcaactaaaatatttttcctcactgtttgaaatcatgcgtaaaacatcaagggaggttgcccttatctaaggttgaagttcagccatggcatccctgcaccaactcaattcacgtttcttaagaattcctcgtttacagatgaggtttcaaaccagacattggtttttcatttagagggtgcattattgaaggcatattcactcttcccttacttcatgttggtagcttttgaagctggtggactctttagagctctcatcttgcttcttttgtaccctcttgtttggttacttggccatgaacttggactcaaagttatggtatttgtcagctttgttggtattaaaaaaggagaagttcagagcttggactgctattttgcctaagtttttcccttg

SEQ ID NO: 7923 - DNA, 423 bp, Gossypium hirsutum
  Clone ID: GOSHI-09MAY01-C14950_1
cgtccttcttcgcgtgcgaagaagaagaagaagcagaaccaaaccgggttttgttttggttctctcttccaatggcttccaccattgtcatccgaaccttcgtttacgtcgaaggcgttgaataaatccctgaatacccatttcgtcccttccttcaaactccccggtttggtctctttcaagccccgaacggtttcccagttgtcggttcgagccgggttgatcgagccggacggtgggaagctcgtggacctccacgtggcggagccggagcgggggttgaagaagcgagaagcggctctgttgcccagggtgaagctgaccaggatcgacttgcaatgggtccatgttttgagtgaaggctgggcaagccccctcaccgggttcatgagagaatacgagttccttcaaactcttcatttt

SEQ ID NO: 7924 - DNA, 993 bp, Gossypium hirsutum
  Clone ID: GOSHI-09MAY01-C14960_2
tgtccctaatctaaattctctaattctaaaacaaatgaaagtctcgcaaattccacaaattttgcagtatttttattttatttgaactctataatttaatttccccttattggattcaccattcccagtaccaaaccctagttttcttcttttcttttctctgtaattttttccaagaacattcttcaatcatcttatttgaaggtttttttttttttgcttttgcccccctcccgtgtgtgagttgaggggtttaatattttgaggatggatatcgagcaaaaacaagcagagttaatcgatcactttgtgaagaaagcgtcagctcaagttggttcagctattggcgccgtaattgtcgaagcgacgtcccatgcttcactcttcgccttctccgagatccttgccgtgcctacagtcgctgagcttgaaggaactgaaaactcagtttaccttgagttgcttccgtggtttgcacatggcacatggagtgattacaagagtattagtggtagtctccctcaactgctccccgatcaagttctcaagctaaagcaattgactgtccttacacttgcagagaccaacaaggtcctaccgtatgatccactcatgctggagttagatgtcacaaatgtccgtgaacttgaagattttatcatcaatgaatgcatatatgcgggtatagtcagaggaaagctggatcagctgcgaagatgttttgaggtccaatttgctgctggaagggatttgaggccaggacaacttgggagtatgatacaaacactatcaaactggttgggcacattaaacaacttactcatctcaattcaagagaagataaaatgggctgatacaatgagcgagttggacaagaagcatcggaaggaggtcgaagataaggtggaagaagtaaagaagtcagttgccgtcaaggccgaccttgactttcgagggattgaagagatctactctggacctggtggagtgatg

SEQ ID NO: 7925 - DNA, 667 bp, Gossypium hirsutum
  unsure (1)..(667): unsure at all n locations
  Clone ID: AI054985.1
gctgctgggagggatttgaggccaggacaacttgggagcatgatacaaacactatcaaactggtaaatctctagttctagtaaggcatgccattaaggtctctgttcatgctgaagtctttattgatactttttactgtcttatgttatatttgcttttggctttgtcaaataaagctagctagtttaagtaggcttgatggtaatgcaatgttaaatttgatcaatatcatgttatatatctaacatctgtccatggatgagaacctaggttgggcacatcagacaacttactcatctcaattcaagagaagataaaatgggctgatacaatgagcgagttggacaaagaagcttcgaagggatgtttaaaataggtggaaagaagtaaagaagtcaagtggcgtcaagttcggntgaatctagttttcctgtttggcgtnttgctgtaaatcagtgttggactattaaaaagcatggtccccttaaatattgaatatatatgatgagggtganatgctaggaaagcgagtccttttaattcttgaaatatgcatatataatccatagcatgccataaatttactcatcaatatccagaatgttgtcgaagtggcttactacgtgtggcanaagtcacctgtaacaggccaacttgatttcagggg

SEQ ID NO: 7926 - DNA, 526 bp, Gossypium hirsutum
  Clone ID: LIB3543-059-Q6-K6-A11
gtaacatcttcaaccatcttaggggggggggggtgtgttttttgcttttgcccccctcccgtgtgtgagttgaggggtttaatattctgaggatggatgtcgagcaaaaacaagcgcagttaatctatcactttgtgaagaaagcgtcagctcacagttcgttcaacctcttggcgggggggggggggaagcaacacaacatgcttcactcttcgccttctcctaaatccttacctggcctacactcgctgagcttaaaggaacttaaaactcactttaccttgaggtgcttctgctgtttgcacatggcacatggagtgattacaagagtaatagaggtagacttcctcaactgctccccgatcaagttctcaagctaaagcaattgactgtccttacactcgcaaagacaaacaaggacctaccatatgaacaactaatgctggagttaaatgtcacaaatgtccatgaacttcaagattttatcatcaatgaatgcatatatagcgggtataatcaggaggaa

SEQ ID NO: 7927 - DNA, 413 bp, Gossypium hirsutum
  Clone ID: LIB3189-048-P1-K1-F7
cccacgcgtccgctttatgtccctaaactaaattctctaattctaaaacaaatgaaaatctctcaaagggcacaaattttgcagggtttttattttatttgaactctataatttaatttccccttattggattcaccattcccagtaccaaaccctaggtttcttcttttcttttctctgtaattttttccaagaagattcttcaatcatcttattttaagttttttttgtgccatccggacgcggttccggctggaaaatgagtcaaaagctgtggacaagggactatgctggtgtctactaggctattcttggttttgattggacgtagcatacacaagatcttgttgctgctttttagagctttacattaataggatgttgtcacttttgcaattttttttttttactat

SEQ ID NO: 7928 - DNA, 852 bp, Gossypium hirsutum
  Clone ID: GOSHI-09MAY01-C14910_1
agtttgaacagatatgttatttacattaagaagggtttatataaagagaatgtggagatcaagaagaagaaatggaaccttatgatgattggtgatggaatggatgtcactgtaatatctgggaatcgtagcttcattgatggatggaccacatttcgatctgcaacatttgctgtaagtggaagagggttcatacaagagacataacattcgagaacacagcaggtccccaaaagcaccaagcggtagcgttacggtccgactcggacctctcagttttcttccgatgtgcaatcaagggataccaagactcgctctacacccacacgatgcgtcaattctaccgggaatgtaagatcaccggcactgtagacttcatattcggcgacggcgccgttttgttccaaaattgccaaatcttagccaagcaaggcttaccaaaccagaaaaataccatcaccgcgcaaggtcgcaaagacccgaaccaaccaactggcttctccatccagttctgcaacatctcggccgatacagacttattaccttcagttaactccactcctacatacttgggaagaccatggaaactatattcaaggaccattatcatgcaatcctacattagtgatgccataaggccacaagggtggcttgaatggaaccaagattttgccttggatacattatactatgccgagtacatgaataatgggccaggggctagccttagggagcgagttaagtggcctggttaccatgttttaaataactcagctcaagctgttaatttacagtagctcaattcattgaaagagacttgtggttgccgtcaactggtgttaaatacacttc

SEQ ID NO: 7929 - DNA, 827 bp, Gossypium hirsutum
  Clone ID: GOSHI-09MAY01-C14900_1
ccctctcgtccggtgaatcgaggcagaattcatcttatcgtacgagttcggcttcatgggattctcatactggcaatcctcagtatggtcaagaaagcccgagttatatatcacagtatagctctgcctccccgcagtattatccacctccgcaaaaccgtggcagtgataaaaggacactagaccggaggtattccagaattgcagacaattacaactccttagatcaggtgacggaagctcttgctaatgctggtctcgaatcttccaatctcattgttggtattgatttcacgaagagcaatgagtggacagggaaaagatcattcaatagaaaaagcttgcaccacattggaaatagtttaaatccttatgaacaagcaatctcaatcattgggaaaacgttagctgccttcgatgaggacaatttaattccttgctttggattcggtgatgcatcaacacatgatgcaagatgtcttcagtttctacccggatgacagattttgtaatggatttgaggaagtcttaagccgctatagagaaattgtgccacatcttcgacttgcaggacctacatcgtttgctccaatcattgaaatggcaatgaccatagttgagcagagcagtggccagtaccacgtgttagtgataatcgcagatggccaggtaaccagaagtgttgatacccagcatggccagctaagtccgcaagagcagaaaactgttgatgccatagttcaagcaagcaagcttcctctgtcgattatattggttggtggtggagacggaccatgggatatgatgaaggagtttgatgattacat

SEQ ID NO: 7930 - DNA, 1898 bp, Gossypium hirsutum
  Clone ID: GOSHI-09MAY01-C14820_1
gtttctctcttctaaaaacctctcaaaacctagctagattttattttctcttttatttttcacgcattccagcttatatttctttttattttttttttcaaaaacccatcaccctcctgctcttatcttctcttatcatcacataaaaaaaaagggcttatggctgaagttgatcaaagctttgttgaacatgaggaggaacaggtacaagaacctcagaacttggagcagaatccgaacctggaacataacttgaacttagggaactacgtggacttggaacccaatgtgaacttggaacacaatataagcttggtccacaacgttaacttggagcagaacttgcatgaggaggaagatcaggaagaggacctggaggagcaaaatttgcagcaggaatcagaacatcaaccaaaagtagaacatgaagacgaggcagtagttggaggtggtgaaaagaagtggcctggatggcctggagagagtgtgtttcgaatgttggttcccgcgcaaaaggtcggtagtataatcggacgaaaaggggaattcataaaaaaaatagttgaggagacgagagcacgtattaagatacttgatggtcctccagggacgacagaaagagctgtaatggtatctgccaaggaggagcctgattcttctcttccgcccgccatggatggacttttgagggtccataaacgcattgttgatggtttggagggtgatccatctcatacacctacggctgtgggaaccaaggtttcaactaggctgctagtccctgcctcacaagccggaagtttgattggaaaacagggagcaactgtcaaatccattcaggaatcttctaattgtattgtcagagttctgggagcagattctgcagaagaccttcccgtctttgctcttcaagatgatagggttgttgaagttgttgcagaagcagctggtgtgcacaaagccgtggagttaattgcaactcatctcaggaagttcttagtggaccgcagtataattccgttatttgaaatgcatatgcaaaggtctaatcatcagatggatcacatgccacctcatcaatcctggggtccacctcaaggtgtccctccaaatgctagtggaggttctggttatggtcataatcctctgtacatgccaccttctcggcaaatggacaattactaccctcctgctgatatgccacctcatatggaaaaacagccccatcagggtatttctgcctatggaagagaggtgccaatgggtgcccatggatcatcaaatccccagaatgcaccatcaatgatcacacaggtcactcagcaaatgcaaattccactatcttatgctgatgctgttattgggacagctggtgcaagtattagctatattcgacgtgctagtggggcaactgtcaccattcaagaaacccggggtgtccctggtgaaatgacagtcgaaataagtggaactgcttcacaagttcaaactgctcagcaactgatacagaatttcatggcagaagctgctgcggctccagctcaggcacaagctggtggggctgcagaccaagcctataatccgtatgcagctcatggttcggctatacgcttcgccaccatccaatcccggacatgcgggtggctatggctctggtcatgcttcgggctctgggcactgggtaagaattgttttgattttcgatgttgtcttagagatagaaaattctgggggtaagttaactgaaatttgttttaaagtatggacaatagactgctgtagaaagttgtaatctttgcttaacgtcatgagttaaaaaacaaaccaaaacatgttaggttttatggtatgcattttcaatgcttttgatattttaatgttcatctccagttttcctt

SEQ ID NO: 7931 - DNA, 439 bp, Gossypium hirsutum
  unsure (1)..(439): unsure at all n locations
  Clone ID: LIB3135-054-Q1-K1-F1
ggtgaaaagaagtggcctggatggcctggagagagtgtgtttcgaatgttggttcccgcgcaaaaggtcggtggtataatcggacgaaaaggggaattcataaaaaaaatagttgaggagacgagagcacgtatcaagatacttgatggtcctccagggacgacagaaagagctgtaatggtatctgccaaggctgggaatgaggtacgagatggagaggaacgacggtgccgatgagttgttgggtgaaatctttgatgatgaagagcctgcgttggaggagattaaggaagcgtttgatgttttcgacgataacaaagatgggtttatcgatgcgacggagctgcaaagggtgctcatttgcctangcgtgaaaaggaagatggtgaccgtggatgagtgtaagaagatgataacgatggctgatacggatggagat

SEQ ID NO: 7932 - DNA, 381 bp, Gossypium hirsutum
  Clone ID: LIB3197-044-Q1-M1-C2
cccccccccctttttttttttttttttttttggtggggttttaaatctaacatgtttgggtttgttttttaactcatgacgttaagcaaagattacaactttctacagcagtccattggccatacttaaaaaacaaatttcagttaatttacccccagaattttctatctctaagacaacatcgaaaatcgaaacaattctgacttattacccatagtttgagccataaacagagccataccctcccgcatgtccgggattggatggtggcgaatcatataccgaactatgagctgcataaggattataagcttggtctgcaaccccacctgcttgtgcctgagctggagccggaacagcttcagccatgaaattctgtat

SEQ ID NO: 7933 - DNA, 704 bp, Gossypium hirsutum
  Clone ID: GOSHI-09MAY01-C14570_2
aatgacttcccaattcccagtcccacagaatcagagtaattcatttccaagcgataagttttagggttttgagttctattctcttgacaatggctgcgatttacagtctttacataatcaacaaatcaggaggtttgatattttataaggattatggatccaaggggcgcatggatacgaatgatagcttgagagtggctagtctatggcattcgatgcacgctatctcacagcagctatcgcctaccactggttgttctggaattgagctacttgaagctgatacatttgatctccattgttttcaatctcttaccgggacaaagttctttgtagtttgcgaacctgggacacaacacatggaggctctcttgaaagttgtttatgagctctacacagattatgttttgaagaaccccttctatgagatggtgatgcccatacgatgcgaactctttgacatcaacctgacacaggcagtacagaaggatcgtgttgcgcttttggggcgataagctgtcctggaacctttatcttaccaaaatgtcaccatctcttatcttcatccgtacacttttgatggaagattgctatcaagtttggatcaacctgtgtattgggatatcatcaagctcctttggttagctcataagtgctgaattatttacaacatatgatgatttctagagttgcttctcccaatt

SEQ ID NO: 7934 - DNA, 588 bp, Gossypium hirsutum
  Clone ID: GOSHI-09MAY01-C14570_1
ataattaataataacaagaagcatgtacaaatatgaattctctcctttaaatggattttaaataaccactcgatgaattctctacactgttgattttgcaaatatgcatgttatgattttcagggacaaagttctttgtagtttgtgaaccagggacaaagttgtttatgagctctacacagattatgttttgaagaaccccttctatgagatggagatgcccatacgattcgaactctttgacatcaacctgacacaggcagtacagaaggatcgtgttgcgcttttggggcgataagctgtcctagaacctttatcttaccaaaatgtcaccccctcgcgtccgcatccgtacacttttgatggaagattgctatcaagtttgtataaacctgtgtactgggatatcatcaagctcctttgtttagctcataagtgctgaatgatttataacatatgatgatttctggagttgcttctcccaattaacatttataaaattaatgaaaaaatccgttgaattatttgtttaaaagaaataagtacagaacgctgatatcttaagaatgttagctgatgtactgttag

SEQ ID NO: 7935 - DNA, 453 bp, Gossypium hirsutum
  Clone ID: LIB3189-041-P1-K1-C4
acacttacgtgcctttttttttcccaaaattcactccaaatttcttcctccccaaatcaagcgtcggttcacccctcatgtgcatctcccgtgaaatccaaaagtaccagcaaagtactgaactcctcatcaagaaactgcctttcgaaaggctcgttcgtgaaattgcccaagactttttaagttagctgatgattatgatctgtgctgatggatgctctatgattgatcgaagaatgggacaaagttctttgtagtttgtgaacctgggacacagcacatggaagctctcttgaaagttgtttatgagctctacacagattatgttttgaaaaaccccttctatgagatggagatacccatacaattcgaactctttgacatcaacctgccacaggcaatacagaaggacgtgttgcgcctttaggttgataagctgtcctggaacctttt

SEQ ID NO: 7936 - DNA, 347 bp, Gossypium hirsutum
  Clone ID: GOSHI-09MAY01-C14520_1
agataggtatattaagattttttaagtaaagcatacgctgtcgcattaaatcaaatgacaatcagcctcaaactcaataagtttcaaccagacataaaacatgaaacaagttgtcttccatctatgtttaatgttcttttcatatgattgcatagaagattccagaagggatgaaaagtttgctacagctaccatgatcctatagcaccctgtgcagggttctcaaaagcagagaattcccagtacgtcttcaatgaatatggctgggaaattgttacaccatcttcagtaattttagcaatctgaagcttgttaacgagctgatctatcacgcggacgcgtggatc

SEQ ID NO: 7937 - DNA, 619 bp, Gossypium hirsutum
  Clone ID: GOSHI-09MAY01-C14450_1
cgaccacgcgtcgggacgcgtggggggaaattggcacccaatggaaaggtagttgaggcacgttccaatctgaattccagtgatatcgagggcaggcttcagactccttgttctttgctctacgactcgaattgcccatcagaagaacacatcaagggtgatctaagatatatgttagattctttgctcgaccctgaaaccatgtcggcatacaggcctcatgcaacaagggaacgcgtgatggatttggctactaaacttcttgattgcaagcaatttttgaaagactacaaaccaagtgctcacaatccctgcgctatttgtgtttggtgtcatttagagctttctaaccctactaaagatgatccagttccaccccccgagctcatcattctacctctcagtgctactgtcggcgaccttaaaactgtagctacaaaaggttttgtagatgtatttgccatgtttaagaggcttcaaatgaggacctacctgactatggttctgtagaagacagcataaccctgaaaatgttgattggcacaaactggtcagttcgagtgcgaggcaaatgtacatcaagacatggccttaaatcgttccgaatggagaggggaac

SEQ ID NO: 7938 - DNA, 394 bp, Gossypium hirsutum
  Clone ID: GOSHI-09MAY01-C14470_4
aaaaactaaaaaaaaataaaatatattatattcaagaaaatacaaataaaatacataaatacatacatccaaaacacttcaaaatggaaaacccatagtttcttcaatcggcatgttgacccctggacccaaaagcaagttcaatactaaatatcaaaccccagagcagagtagctaccattaaaggaaaagatagccctcaccatcccacatcctacatagtaatcataaataatagtagtatgactccgccaactattatagaataaagaagctcctttaagcatttgccaccttacgtatggtattggtcgctctatttttcaactttctcaacaggaatctcatcagctttttcatctcccttttccccgtcagctggtttctcctccac

SEQ ID NO: 7939 - DNA, 981 bp, Gossypium hirsutum
  Clone ID: GOSHI-09MAY01-C14470_1
tttttttttttttttttttttttttcgttttttttttttttttttttttttttttttttttttttttttttttttttttttttttaaacaaaaatagatatttattatgcaaatatggagatcacatctcatcacaccagtatcaaactcatcatatagactctcttgggaccgaaaaccatacgtgcgtgcatgcatgcacacatgcatacatacatccataccacttcaaaatggaaaacctatagtttcttccatcagcatgttgacccctggacccaaaaggaagttcaatactaaatatcaaaccccaaagcagaaaaacaaccattaaagaaaaagaaagccctcatcatcccacatccgacatagtaatcataaataatagtagtatgactccgccaactatgacatacagcctatagaaaaaagaagctcctttaagcttttgccaccttacgtatggtattggtcgctctattcttcaactttctcaacaggaatctcttcagctttttcatctcccttttcctcctccgctggtttctcctccaccgctgcttccaccgcgggttcctcggtctctactttggcctcctctgtaactgtttctgtctgcacctccggggtctcatcctttacctcctcctttgctttctccgattcctcagcagccttcgcttcttcttctaccacttctttggtatcgacttcagctggagcttcggctatggaaacttcggtttcctccgcagccggagcatctgatgttgtctccggctcagcttctacaggtgcggccgctggctcctcttttggcgtttccacaaccttggttacctctggtgttgtctcgttctctggcaatgttgttgcagctgattgaacctcaacactggccattggggaaaatgggaacttgaagaaaagattaaataaaatctcgtgccgaactcgtccgagggatgcggcatagttcta

SEQ ID NO: 7940 - DNA, 682 bp, Gossypium hirsutum
  unsure (1)..(682): unsure at all n locations
  Clone ID: AI055587.1
cctcaaaatgaaccaagtttctcaaagcatgtacctgccccaagggaagtcaatctaatacaacccaagcagganacaccattagganaagaagcctatcatccacatcgacatgtatcatataatagtaggtgactcgccanttatgcatncagctatagananagagctcccttaagcttntgcaccttacgtatgtatggtcgctcattcttcanctttccaacaggaattcttcagcttttcaatctcccttttcntcntcgnntttttctcctccacgctgcttccacgcggggtcctcggtttctactttggctcctctgtaactgtttcgtctgcactccggggtctcatcctttacctcctccttgctttctccgattcctcagcagccttcgcttcttcttctaccacttcttggtatcgacttcagctggagcttcggctatggaaacttcggtttcctccgcagccggagcatctgatgttgtctccggctcagcttctacaggtgcggccgctggctcctcttttggcgtttccacaaccttggttacctctggtgttgtctcgttctctggcaatgttgttgcagctgattgaacctcaacactggccattggggaaaatgggaacttgaagaaaagattgaataaaatatacagagatagagcaagag

SEQ ID NO: 7941 - DNA, 625 bp, Gossypium hirsutum
  Clone ID: AI729305.1
attttttttttttttttttttttttttttttttttttttttttttttttttttttttttttttttttaatggttgtttttcttccatcagcattttgacccctggacccaaaaggaatttcaatactaaatatcaaaccccaaagcaaaaaaacaaccattaaaaaaaaaaaaagccctcatcatcccacatccgaaatattaatcataaataatagtagtatgactccgccaactatgacatacagcctataaaaaaaaaaagctcctttaagcttttgccaccttacttatggtattggtcgctctattcttcaactttctcaacaggaatctcttcagctttttcatctcccttttcctcctccgctggtttctcctccaccgctgcttccaccgcgggttcctcggtctctactttggcctcctctgtaactgtttctgtctgcacctccggggtctcatcctttacctcctcctttggtttctccgattcctcagcagccttcgcttcttcttctaccaattctttggtatccaattcaactggaacttcggctatggaaacttcggtttcctccgcagccggaacatcttgatgttttctccggctcagcttcttaagg

SEQ ID NO: 7942 - DNA, 329 bp, Gossypium hirsutum
  unsure (1)..(329): unsure at all n locations
  Clone ID: LIB3189-046-P1-K1-A6
tacgcggtaccggttggctttcttttcgggaaaattataagtggacaaccttttgtgtttacacaatggcgggcggggagcaaagcgtagagtgctacctacgntactaaatgattaaacaaaaacaaatttttattctgccaatttgaggatcacattacactacacccggatcaaacttattatatagactttctttgcaacgaaaaccatacgggcgtgcatgcatgctcccattcctacatacatccataccaatttaaaatggaaaacctatagtttcttccattagcatgttgacccctggacccaaaaggaagttcaatact

SEQ ID NO: 7943 - DNA, 316 bp, Gossypium hirsutum
  Clone ID: LIB3189-046-P1-K1-A12
tttttattttattgggtgagacagggagtgaaaagaagttaacgaggcaaatgattaaacaaaaatagatatttattatgcaaatatggagatcacatctcattacaccagtattaaactcatcatatagactctgttgggaccgaaaaccatacgtgcgtgcatgcatgcacacatgcatacatacatccataccacttcaaaatggaaaacctatagtttctttcatcagcatgttgacccctggacccaaaaggaagttcaatactaaatatcaaaccccaaagcagaaaaacaaccatttaagaaaaagaaa

SEQ ID NO: 7944 - DNA, 443 bp, Gossypium hirsutum
  Clone ID: uC-gsronu33B162g09b2
ttctatcgcgtccggctgacttgaagaacaacagattgactaattatacacttaattttgaccagatgcttaacgataagaaagcaatttgcaaggagcctcaagagtcaaagattcccccatctcttctttttagtgataaattttgattttcttgatgcagccatgccatttatacatttctgcgaaattttgaagttgtaatgaagttgtaaaatggcttgtgttattcaagttgttgttattaaattttggactctgagtaatatttgaatccgctttatttttgttgataggaaaaaaaaaaaaaaaaaaaaaaaaaaaaaaaaaaaaaaaaaaattaaaaataaaaaaactaaaaaaaataaaaaactcaaaagcgtttaaaaaattataataaaaccccttcctttaaaaaattaaagtgttaaaaaaggggcccg

SEQ ID NO: 7945 - DNA, 426 bp, Gossypium hirsutum
  Clone ID: AI726116.1
gtcgacgttggttatggtgctgtaaagtatgctgacttgaagaacaacagattgactaattatacacttaattttgaccagatgcttaacgataagaaagcaatttgcaaggagcctcaagagtcaaagattcccccatctcttctttttagtgataaattttgattttcttgacgcagccatgccatttatacatttctgcgaaattttgaagttgtaatgaagttgtaaaatggcttgtgttattcaagttgttgttattaaattttggactctgagtaatatttgaatccgctttatttttgttgataggatattgaatccttttttttgtatccattttgtttttggggatgacaaattctgatatacgaattgattagctactttactttttacaaaaaaaaaaaaaagtcgacgcggccg

SEQ ID NO: 7946 - DNA, 939 bp, Gossypium hirsutum
  Clone ID: GOSHI-09MAY01-C114748_1
gaagaaaacgatggaggatcttgccgtcgataagattgtcaatattggtatcggattagtgccgccggagatggctgatcaactttatgaaggaattcattctcatttggaaaatgttggaattgacggagttaaagttgacgtgattcatctgttggaaatgctgtgtgaaaactatggtggaagagttgatcttgcaaaagcttattataaagctttaacagattcagttaaaaagcatttcaaaggcaatggtgttattgccagtatggaacactgcaacgatttcatgtttcttggaacagaagccatttgtcttggtcgtgtcggggacgatttttggtgcactgatccatcaggtgaccctaatgggacattttggctccaaggttgtcacatggtgcactgtgcttacaacagtttatggatgggcaactttatccaccctgattgggacatgttccagtcctcccacccttgtgctgagttccacgctgcttcaagggccatctccggtggcccaatttacatcagcgacaccgttggcaaccacaactttgctctcctcaaacgcctcgttttacccgatggttcgatcctccgctgccagtactacgctcttccaaccagggattgcctatttgaggaccctctccatgatggcaaaaccatgctcaaaatctggaacttgaataagtatactggtgtgattggcgcatttaactgccaaggaggcggatggtgccgagaaactagaagaaaccaatgcttttccgagttttcgcatacggtaaaggccgagatgaatccaaaaagcattgagtggaacagtggaaagaacccaatttccattgaagatgtccaagtattcgccatgtatttttctcagtccaagatactagtcctctcaaaacccgctggaaacatggaaatctcgct

SEQ ID NO: 7947 - DNA, 956 bp, Gossypium hirsutum
  Clone ID: GOSHI-09MAY01-C14710_1
gaaaagaagtccaaatctttgtaagttctcccccttcttgaatggcagcttatcgacgatgggtttcagttctctgttgcctctccttgctgggctcatttgcttcagcttccacaattagccttccttctgattctcgtaaagtctccttgactttgtattacgagtccctttgcccatacagtgccaatttcattgtcaattacctgcccaagctcttcaatgaggatctcatttccatcgtcgatctccgcctcgttccttggggaaacgctaagctcaaaggcaacgacacctttgattgccagcatggccctactgaatgcttgttaaacactgtggaagcttgtgcaattgatgcctggcctaaactgaatgaccatttcccgtttatctattgcgttgagaatttggaattggagcgcaagccccttgaatgggaatcgtgctttaagaaattgggattggaatcaaagcccgttaatgattgttataagagtggactggggcaaaagcttgatctacaatatgcagctgaaacaagtgcccttgaaccacctcatacatatgtaccttgggttgttgtggatgggcaaccactttacgaggactatgaaaactatataagctatgtgtgcaaggcttataaaggtgctaatatgcccaaggcttgtagtggactgaccttcaatcaaatctacaataggaaaactatccatccagtttgctataaggagataccaccattaacattgtcatcaagaaccatatcaactgttatgtcatggatacggaagatagtaacttctatgtaattgtttcagttttaaggatgcatttcaaaccttgttaatataattatatatctatgtattgacggttaactgttaagcactatgctgaagtttatgcaagttgtgcttaactgcttttgctagtgttcgaattagaatgtg

SEQ ID NO: 7948 - DNA, 601 bp, Gossypium hirsutum
  unsure (1)..(601): unsure at all n locations
  Clone ID: LIB3829-027-Q6-K6-D12
gcgttcggnaataataagaacagcactgctcggctttataattattttcatcacttataaattgctttaatttattaactcttggattatggcttttatcactgtgaatagggtaagtatataacttcacaagcacctgttatttgttgtgcacaaaacaatcactgatagaactggacattcagtgttgtgttcttagaagatcattctaagttttggagatttacgtgcctgtcagcttttgtgatttttgttgtttagttatccttcattgttatttgaaatactgtccttgcataggttgtttatattccttagggacaatagattatgattttaggtcattatgtcattttgatcctttcctgcatgcttaattgagtggcttaataaggaattgctatctttatgcagcttgatctacaatatgcagccgaaacaagtgcccttgaaccacctcatacatatgtaccttgggttgttgtggatgggcaaccactttacgaggtttgtttccttgactatcaaattgattgattatcctaattacttgttcattactcaaatgtgtgattttgatgaacatcgttattgatggttt

SEQ ID NO: 7949 - DNA, 744 bp, Gossypium hirsutum
  Clone ID: GOSHI-09MAY01-C14700_1
ccacagaccctttccattttccctttatttcctttgccgcccctagggttttattacattccccacatggcttctgcagatgtcgagtaccagtgcttcgtcggaggtctcgcatggaccatcaacgaccgtgctctcgaagaagccttcagtgcttacggcgagatcgtcgattcgaagatcattaacgatcgtgagactggaagatccagaggctttggcttcgttactttccgtgatgagaaatctatgaaagatgctattgaaggaatgaacggtcggagtctcgatggaaggaatataaccgtcaacgaagcacaatctcgccgaagcggcggcggcggtggtggtggaggatttggaggaaacggtgggtacaaccgtggaggcggtggatatggtggtcgccgtgaaggtggatatggaggtggtggttacggaggtggacgccgtgatggtggtggatacggtgacggtggatctcgttactcaggtggcggcggttcttgggcttaggttaaggcgttttaggatttgagtgagcttcggctcttattttagggtttaatgggtttgtttgttagtgtgtggtttctatcgatattttttcttgtatcatcaggagttttaaaacataaaagtggaatgaagtatatgccttcttttcaattcattgcttgtgccctttcttttttatttttatatgatgagtggaaaaataaacaaataagcattccttttaat

SEQ ID NO: 7950 - DNA, 546 bp, Gossypium hirsutum
  Clone ID: uC-gsflmaxxa029f12b1
cattttccctttatttcctttgccgcccctagggtttaattgcattccgcacatggcttctgcagatgtcgagtaccagtgctttgtcggaggtctcgcatggaccatcaacgaccgtgctctcgaagaagccttcagtgcttacggcgagatcgtcgattcgaaggtccgtttgtcgcagtgatcggactccagatctgactcgaatccaacccgacctgggcctccatgtctatgatctgtgatccttgatctgttattttgtgttactactcgataatctcttgttactattctaaactgttttctaaagtctcgctgatcattaacgatcgtgagactggaagatccagaggctttggcttcgttactttccgtgatgagaaatcgatgagagatgctattgaaggaatgaacggtcggagtctcgatggaaggaatataaccgtcaacgaagcacaatctcgcccaagccgcggcggaagtggtggtggaggatttggaggaaaaggtgggtacaaccgtggtggaagccgtggatatggt

SEQ ID NO: 7951 - DNA, 410 bp, Gossypium hirsutum
  Clone ID: LIB3145-058-Q1-K1-A10
cccacgcgtccgcccacgcgtccgttccattttccctttatttcctttgccgcccctagggtttaattacattccgcacatggcttctgcagatgtcgagtaccagtgctttgtcggaggtctcgcatggaccatcaacgaccgtgctctcgaagaagccttcagtgcttacggcgagatcgtcgattcgaaggtccgtttgtcgcagtgatcggactccagatctgactcgaatccaacccgacctgggcctccatgtctatgatctgtgatccttgatctgttattttgtgttactactcgataatctcttgttactattctaaactggtttctaaagtctcgctggtacgttccatcttcataccctctgggccgaagatcgatcgattctaacaatttttagtttt

SEQ ID NO: 7952 - DNA, 328 bp, Gossypium hirsutum
  Clone ID: uC-gsflmaxxa029f06b1
cccacgcgtccgcattttttttttatttcctttgccgcccctagggtttaattgcattccttacatggcttatgggggtgtccaataccagtgctttgtcggaggtcttgcatggaccatcaacgaccgtgctctcgaagaagccttcagtgcttacagcgagatcgtctattttaatgtccgtttgtcgcagtgaacgatctccaaatctgactcgaattcaacctcacctgggcctccatgtctatgactcttcaattctttgatcccgttttttcagtgcctactacctcaaaaactctctttgttactaattctaaaactgttt

SEQ ID NO: 7953 - DNA, 730 bp, Gossypium hirsutum
  Clone ID: GOSHI-09MAY01-C14650_1
gggagagagcggcaatggagtcaccgttcaaagcagacattttgaaagggaaagtgggtttaattacaggcggtggctcaggcattggtttcgagatttctacccagttgggcaaacatggagcttcaattgctattatgggtcgacgcaaacatgtccttcaagctgctgtttctgctcttcaatcccttgggattcatgctgttggctttgagggggatgttcgtaagcaggaagatgcaaaaagagtgattgaatcaactttcaaacattttggccatattgacattcttgtgaatgctgctgctggaaactttcttgtgcctgctgaagatttgtccactaacgggtttcgaacagttatggatattgattctgttggtaccttcacaatgtgccgcgaagcactcgagtatctcaaaaagggaggacgtggaaggaactcaccgagtggaggatcaatcttgaatatcagtgctactttacattatacagcctcttggtaccaaatacacgtctctgcagccaaggcagcagttgatagcattaccagaaacttagcactcgagtggggaactgactacgatatccgggtcaatggtattgctcctggccctattgccgatacacccggcttaagtaaactcgcacccgacgagattaccatcaaggctcgagagcacttgccttcgtataaaataggggacaaatgggatattgctatgtcagc

SEQ ID NO: 7954 - DNA, 1611 bp, Gossypium hirsutum
  Clone ID: GOSHI-09MAY01-C14640_1
cccacgcgcccgcgggcccgggattccccctcccccaatcatacaacttagtgttttcttttcgtttgcagcggagccatggaagtgacgccaggcagaaagcagttctatagcaattatatgctattgaaccctaagaaagcctctttctttgatctaatcgccctcttattttctaaaaatttaaagaagagaaaatttatcgaaaccagtatcgaaactgaggacagtttctggtatagacttgttatattcctctctactctgttacagaagtttctgctttccataaagacgccaatggctttggctggccaaacttttgaggatatgctcaaccttttcactaacaatggtggcttgtttggtctcattaaaaaggtcatgacagggaaggtggtgattccaagcagagaagcagcaacctatgtctctgctgttggatatacggacttgagaatggatttagacaaacaaattatatacgggaattctatgtattatccagcacttgcgattatgacttgtaaagctgtttataataatgctgcttacaacaaatctataatcgaaaacaattgggggatggaagtcatcggattctataattattggaacgattacctgaggcaaccggatacccaagtggtgatgttccgaaacaaaacttcggagcacgacactatggttgtttccttccgaggaacacaaccgtttagtgccgacgattggtgttcggacgccgatctgtcttggtacgaattccccaacattgggaagattcacagtggtttcttgaaagctttggggatgcagaaacttgtgggttggcccaagtttgtgattccagatcttactcgcaaagcacctttggcttattatgacataagggataggttgaaagaccttttgaagaacagccctgaggcgaaagttatagtgacgggccacagtttgggcggcgccttggctgctcttttcccggcgattttgttttaccacgacgaacagttggtgcttgagagaatggaaggcgtttacacgttcgggcagcccagagttggtgacgaagcctttgccggctacatggagaagaatttgaacaaaaatgggatccagttttacagatatgtttactgtaatgatatagttcctagggttcctttcgacggcatgttcaagcactttggtacctgcgtttactacaacagcaaatatcaagcaaagatagtggaagaagtaccatacttgaactacttctcgctgtttggattctttccgatgcatatgaacgccatttatgaggtgataagaagcttcacaatgaaggctaaatatggagcagattatacagatgggtggctgatgtttggtgtgagattatttcgactgctcctccctcgtgttccataccattgtccccaagactatgtcaactccactcgtcttggcaaacccgatgatgttttattccttcctctccacactaaaaaggcacttggtttttaagtccctttgcttgctgcctaatgcatcttcctccataataaatatctatctgtgtaaacttatcgggcttgggattttgagttcatgatggatttccatttc

SEQ ID NO: 7955 - DNA, 404 bp, Gossypium hirsutum
  Clone ID: LIB3149-005-Q1-K2-C1
gtggctcgcaagaacggaacgcgtggacccgttctgactggcccaactggataacaaagccttggcctgctacatggatgtgaatgcgatcataaatgggttgcttatgtacacatatgtttactgttgtagatattgtgcctaggactcatttcgacggcatgttcaagcacttgggtacctgcgttctctacaacaaaaaatatcaagctgagatagttgaagaagtaccatacttgaactacttctcgctgtttggattcttgccgatgcatatgaaccccatgtgtgccgtgattagaagctctacaatgaaagttaaatatggagcagattatacagatgggtgggtgatgtttggcatgagattatctggaatgttaatccctggaatatgaaacaat

SEQ ID NO: 7956 - DNA, 1343 bp, Gossypium hirsutum
  Clone ID: GOSHI-09MAY01-C14600_1
cattccttaagagagaccctatgtgttatcggaaaggggtggtagtacatttgccaggtttattcaaagaaatcgatgggttggaagctaatggggtttcttgcaaagggaggatattggtatctgatcgtgctcatttgctatttgattttcatcaagtagttgatggattaagggaagctgaacttaacaagtcatttatcggtacaactagaagagggattggacctgcttactcgagcaagatgaacaggaatggcatcagagtaagtgacttgaggcacatggatactttccctcagaagcttcataatctattatctgacgtgacttcaaggttcccggattttaattatactccagaagtgctcaaagaagaggttgaaaactacaagagatatgccgagaggttggagcctttcattgctgatactgtgcacgtaatgaatgaatcgattgcacagaagaagaggatattggtggaaggaggccaagctactatgctcgacattgatttcggtacttatcctttcgtaacttcctccagtccatcagctggtggaatctgcactgggctcggtattgctcctagagttgtgggtgatctaattggagttgtgaaagcatataccacaagagttggctctggtcctttcccaaccgaaatccttggtcaaggtggtgatatccttaggtttgccgggcaggagtttggcaccacaactggccgccctcgtcgttgtggttggctcgatgtagttgctctcaagttctgttgtgagattaacggcttttcttctctaaacctcaccaaattggatgttttatctgatcttccggaaattaaattaggcgttgcttataaacatgttgatggtacaccggtggaatcgttcccaggtgatcttcagcttctcgaacagttgaaggtggaatacgaagttttgcctggatggcaatccgatatttcttctatcagaaattattcggatcttccgaaagctgcacgacaatatgtcgagaggatagaggaacttgttggtgtgcctatccattacatcggtgtcggacctggtcgtgatgctctcatatacaaataattaatcacttttttttttttttggtgctcatgctactgctagttgattttctttttctctgcacgcaggcagtaccatactgtttgtgctacaaaaaatatttagaacgatggggaaatttcccataacataaattaggggaaattgcataattcaacatccaaatgttctcttttagccaagtgaggcaattagatttttagacttttaaatatgttgattgaaatgaatttccctatttgg

SEQ ID NO: 7957 - DNA, 781 bp, Gossypium hirsutum
  Clone ID: GOSHI-09MAY01-C14630_1
cggccgcgtcgacaagaacttcccctcgcaaactcgaaatccccattactctccggtcactgcccaaaagttccaaaccaaaagaaatggccgaaactgagtccaccaccactgctcaagactcagccaccgcagaaacggagccccaccagactcaggctcaatcccaaatagatgaaaccgccgccaagctcaataatcttactctccgaatttggccccccactcaacgaacccgcgatgccgttatcaaccgtcttgtcgagacgctctcttcccaatctgtactttccaaacgctacggcaccatccccgaggacgaggccgcctccctggccaaatctatcgaggaggaggctttctcagccgccggtgcggccttctcccccgacgatgatggcatcgagatccttcagatgtattccaaggagatcagcaagcgtatgctcgatactgtcaaatctcgcgctgctactgccgctgccgccgatgctccgtcagccacggaagcagcgaatggtgaggaggtttcatcgtcgtccgtgaaggcggaggcttgagtttaaggatcctcatttctctctttctctctctttagggcttttctttagattgatgatcggtcttgctagggtttttaaagatctgtctgcttggctcaggatttttcgagatgcttaattgcctatatacgacgataataaaatctgtaactgtaataccatttctttatctcttctttttttgaagggtttctggttttgcggtggaaaaaaaaaaa

SEQ ID NO: 7958 - DNA, 436 bp, Gossypium hirsutum
  unsure (1)..(436): unsure at all n locations
  Clone ID: LIB3189-043-P1-K1-A6
ctccattaaaaatcccccaattattttctcgttactcgattttattttccaaaccaaaagaaatcaccagggctgtgtttatcaacactgntgatgctcanccacacaanaaactgagccccaccatacccaggctcaatcgcaaatagatgaaaccgatcccaagctcaataaccttactcttctaatttgaccccccactcaacgaaccctcgatgccgttatcaaccgtcttgtccagacgctctcttaccaatctgtactttccaaacgctacggcaccatccctgatgacgaggcctcctccctggccaaatctatcgaggcggaagctttctcattcgcctgttcggccttctcccccgacgatgatggcatccagatccttcacatgtattccaaggagatcagcaagcgtatactcaatactgtcaaa

SEQ ID NO: 7959 - DNA, 972 bp, Gossypium hirsutum
  Clone ID: GOSHI-09MAY01-C14100_1
cccacgcgtccgcggacgcgtggggtaaaagtctctacttcgactcggacacgacagtggaagtgtgttggatcaagagcagatagtaagcgcctttattatggacgctttattctgtctccacttatgaaaggccaagccgacacaataggcattgcgatgcgaagagctttgcttggagaactagaaggaacatgcattacacgtgcaaaatttgagaaaataccccacgaatattctaccatagtaggtattcaagaatcagtccatgaaattttaatgaatttgaaagaaattgtattgagagggaatttgtatggaactcgtaacgcctttatttgtgccaagggtcccggatatgtaactgctcaagacatcatcttaccaccttctgtggaaatcgttgataatacacagcatgtagccagcctaaccgaaccaattgatttgtgtattggattacaaatcgagagaaatagaggatacggtataaaaacgccaaagaactttcacgacggaagttatcctatagatgctgtattcatgcctgttcgaaatgcgaatcatagtattcattgttatgggaatgataatgaaaaacaggagatactttttctagaaatatggacaaatggaagtttaactccgaaagaagcacttcatgaagcttctcgcaatttgattgatttatttattccttttctacatacggaagaagaaaacttacatttagaaaacaatcaacacgatgttactttacctttttttccgtttcatgatagattagttaaactaacaaaaaagaaaaaagaaatagcattgaaatatatttttattgaccaattagaattgcctcccaggatctataattgtctcaaaaagtccaatatacatacattattggaccttttgaataacagtcgagaagaccttatgaaaattgaacactttcgcatagaagatgtaaaacaa

SEQ ID NO: 7960 - DNA, 451 bp, Gossypium hirsutum
  unsure (1)..(451): unsure at all n locations
  Clone ID: LIB3189-021-P1-K1-E3
cccacgcgttcgtccacgcgttcgcccacgcgtctgttatancatcttaccaccttctgtggaaatcgttgataatacacagcatgtagccagcctaaccgaaccaattgatttgtgtattggattacaaatcgagagaaatagaggatacggtataaaaacgccaaagaactttcacgacggaagttatcctatagatgctgtattcatgcctgttcgaaatgcgaatcatagtattcattgttatgggaatgattatgaataacaggagatactttttctagaattatggacaaatggtaatgtttaattggtagttgttctttattaattattcttttaatatttggttttttatatttttatttgttttataatttattaaatcattatatgttatattggtgaatctaatttatttatggtgggttattcgatttctttgatattt

SEQ ID NO: 7961 - DNA, 2120 bp, Gossypium hirsutum
  Clone ID: GOSHI-09MAY01-C14080_1
ttatggtctcctaatgtttatttcttacttttggcaagacttttggatggttttggggttggtttggcagtaactctggtcccagtttacatatctgaaactgcaccacccgaaataagggggttgctaaatacccttccgcagtttactggttccatcggaatgtttttgtcttattgcatggtttttggaatgtcattatcggaattaccgaattggagattgatgcttggagttctttctattccatctcttatatattttatattaaccattttcttccggcctgagtctccaagatggctcgtaagtaaaggacgaatgattgaggcaaaaaaagttttgcagagactacgtggcagggaagatgttgctggtgagatggcattgttagtggagggacttggtgttggaggtgaaacatcgatagaggagtatataattggcccggccaatgaggacatagaagaccaagatatatcagatgataaggatcaaatcaagttatatggacctgaagaaggtctttcctgggtggccagacctgtcacaggacagagtactcttggtatcgtgtcacggcatggaagcatggctagtcagagcgctcttggtcttgttgatcctcttgtcaccctctttggaagtgtccatgagaaggttccagaaacgggaagtatgcgtagcgcactttttccgcactttggtagcatgttcagcgtgggaggtaatcaagctagaaatgaagagtgggatgacgatattgttcccagagagggcggggactacccatctgatggtggtggtggtgatgctgatgacaatttacatagtcctttgatctcacgacaaacaaccagtttggataaggacatagttccaactaaccacggaagccttacgagcttaagacacggtagtctaatgcaatcaactaccggagaacaagttggtagcatgggtgttggtggtggttggcagctggcatggcaatggtctgaaaaggtagccccggatgggaaaaaggaagggggatttaaaagaatctatttgcatcaagagactgtacctgaatctaggcgtgggtcagtagtttctctgcctggtggtgatgtccctgctgacactgagtatgtccaagcagccgctttggtgagtcattcggctctttattcctcagagcttgtgaagcaacatccggttggaccagctatggttcatccagctgaaacggcaaagggaccaagttggactgatatctttgaacccggagtcaagcatgctttatttgtagggattggaattcaaatacttcagcagttctctggtataaacggcgttctatactacactccccaaattcttgagcaggcaggagtcggggttcttctttctaacttgggcctcagttcatcttctgcatcgctgcttatcagtggcattacaaccttgttgatgcttccaagtatagctgtcgccatgcggcttatggatatagccggtagaaggagtttgctactcaacacacttcctgtcctgataatatctctcgtcgtcttagtcgtcgctagtgttgtgaaaatggggagtgttgtgcacgcatcaatctcaactgttagggtggggctctacttctggtgctgtgtgatgggattcgggccaattcccaatatactgtgtgccgagatcttcccgacacgggttcgtggcatctgcattgctatatgcgcccttactttttggatttgcgacatcattgtcacgtattcgctcccgttgctgctgaaatcagttggccttgctggcgtctttggcatgtatgcagttgtatgcgttatatcatgggtgtttgtcttcttaaaagttccagaaaccaaaggcatgcctcttgaagtcattacggaattctttgcagttggtgcaaagcagattgcagctaccaaggacaactgagttcggtttatttctttgattttcatggatattgaaagttttgatttttgttcaaaatttctcctcattcgaataggcagagtttgatttatgtagaacaagaaaaagaaaacataatgtgtttctctattgtttgttgcaattcaaagagaatcctatctttacgt

SEQ ID NO: 7962 - DNA, 420 bp, Gossypium hirsutum
  Clone ID: LIB3585-062-P1-K2-F10
cccacgcgtccgcccacgcgtccgcccacgcgtccgcccacgcgtccggtcacgtattcgctggcggggctgctgaaatcagttggccttgctggcgtctttggcatgtatgcagtcgtatgcgttatatcatgggtgtttgtcttcttaaaagttccagaaaccaaaggcatgcctcttgaagtcattacagaattctttgcagttggtgcaaagcagattgcagctaccaaggacaactgagatcggtttatttctttgattttcatggatattgaaagttttgatttttgttcaaaatttctcctcattcgaataggcagagtttgatttatgtagaacaagaaaaagaaaacataatgtgtttctctattggttgttgcaattcaaagagaatcctatcttttcgtgaaaaaataa

SEQ ID NO: 7963 - DNA, 830 bp, Gossypium hirsutum
  Clone ID: GOSHI-09MAY01-C14000_1
gaaaaaaaagatgtctctagtgactgaagagatcaaaggcagcgcttcagaaatttaccatggagatgagatatgtcaagagaaatcaaagtttctgctggaggaaatgggcatgcccagtggacttttgcccctcaaagacattgaagaatgtgggtatgtgaaggacactggtttcgtgtggctgaaacaaaagaagagcataacccacaagtttgacaagattggtaagcttgtttcctatgcaactgaggtcacagctgtggttgagaaaaacaagatcaagaagctcactggggtgaagaccaaggagcttctggtttggatcacactcagtgatatctatgttgatgatccaccaactgggaatatcactttcaagacacctgctgggctgttcagaactttccctgtatcagcgtttgaggttgaaggtgaagttaagggtgctgttaaggacaagaaagaagaaaaggataatgtgaagcctgctgctgtggaagcagtgaaagaggtctagagtagtgagactagaattaaatttccaaattccatccatctgcggggttgtttttggacttgctatcttttaacaagcctcttctattaatatcatcaatagcagcaatcaataaaaaataacagcatgttagtttacattcagaacactaatgttgcatcgcattgcaagtcaaattgcatggaccatattatatttcaggtacgaccttgcctgaggctgagatacctatacttgtatgtcgcaaaaactagtaatgtgtttcctctttatgacttaaatcaaagagaataaataattgactactact

SEQ ID NO: 7964 - DNA, 438 bp, Gossypium hirsutum
  unsure (1)..(438): unsure at all n locations
  Clone ID: LIB3147-058-Q1-K1-C7
acaagatcaagaagctcactggggtgaagaccaaggagcttctggtttggatcacactcagtgatatctatgttgatgatccaccaactgggaatatcactttcaagacacctgctgggctgttcagaactttccctgtatcagcgtttgaggttgaaggtgaagttaagggtgctgttaaggacaagaaagaagaaaaggataatgtgaagcctgctgctgtggaagcagtgaaagaggtctagagtagtgagactagaattaaatttccaaattccatccatctgcggggttgtttttggacttgctatcttttaacaagcctcttctattaatatcatcaatagcagcaatcaataaaaaataacagcatgttagtttacattcaaaaaaaaaaaaancaaaaataaaaaacacattaaaagaaaagagggtaag

SEQ ID NO: 7965 - DNA, 1267 bp, Gossypium hirsutum
  Clone ID: GOSHI-09MAY01-C14360_1
ccgcacccaaggggaaccgaagccgaatcagatgcatcatgttgttagaaatactatggcaatgcaaggaggggcgaaattgccacaaaagcctagtaataaccatgttaggagtaatagtcagggcaatgtcatcgccaagcaagctcaccagctcagttatcagtatcaccagaatggtctgattacaggggcgagtacgaagggaagggaatcggaagatcctgcaaccaagtcttctatgaaagcaatggcagctagagccttatggcatcttgcaaaggagaattcgcttatctgcaagagtataactgagtccagagcattgctatgttttgctgttttgcttgaaaaaggaactgaagaagtgcggtttaattcagctatggcattgatggagattacagctgtggcagagcaggatcctgatttgagaaggtctgctttcaagcccaactctcatgcttgtaagctcatcgtggaccagctgttgaagatcactgagcaggccgattcagagctgctgattccttgtatcaaggctatcggaaatttggctaggacgtttagagctacggaaacaaggatgattgcccctttggtcaaacttcttgacgaaagggaagccgaagtttccaaggaggctgcaattgcactcgccaagtttgcttgcacggacaactatctacaccttgatcactccaaggcaatcattaatgcaggaggtgcaaagcatttgattcagcttgtgtattttggggaacatattgttcaactcccagcattacttctcctatgctacatttcccaccatgtacctgacagcgaggaacttgctgaagccaaggttcttaccgtcctcgaatgggcatccaggcaatccaacatgacccagaatgcaactggcaaactcttacaagaggccaaaagtagattggagctgtatcagtctagagggtcaaccggatttcattgatccaatcactttccctttgtaatttctctctttatacagtaccccatcattgagttcataattctaaattggagtgtacatacagttagaagtcttccatatgcatgctaagtagtattgtcagccatttgcagagttgctgctttttttttttctgttctgtgtactcaccaattgccctaggaatcccagctgtctgttagtttataaactataagttaaattcccctgtattattgcttttcctgtatgcaatgttgggaaatgcaaagttagcctttttttctgctg

SEQ ID NO: 7966 - DNA, 1198 bp, Gossypium hirsutum
  Clone ID: GOSHI-09MAY01-C14310_1
ttcacgcgtccgctactccaacgtttcggccttcacttacgattccaattccacttcttgcgttcaagccacttcctttttatcaagtcaaatatgggtctctgaaacttcattttttgcgttgtcaagttccagtctttggacgtatttagtatggacccttgtgataacttcagttttaagtgtacccatatgtttacttttgcttttattactcaaacactacacgaagcagatcgtttatgtcttgcttcctttctttcccacccggccggttttctttgatgtttattggttcgttgcttgtaccttgagctcttcttgtagtgatgctttccctttggtctatagaattctggtgcttgttttcattttgctaatagttggggttattgtttggatcattgtggctaattggcatcggatcgagttgactgtgaggattatcggggttgcttccgatgcgctttcgaggaatttagggttgtttttggtgataccgttgttgaccgttggattgttggcttattatgcgtcaattgttgtgttcttggtgttttctaggtttaatgggaaaattgtggctaaagagtcgaatggggagtatacttgtgtttggaaacaagatagctgggtgcctgcttattttacattggctattttgacaatgttgtggtccttgaccagtatggtggaagctcaggtttatgttaccagtggcaccattgctcagtggtacttctccaaagatgatacgaaacctcaccggagcataaggagatctttgagaaatgcatttggtccttcttctggcaccatctgtctatctggattacttgtctttgttgttcgagtggtgcgtgctgctgttgatagtgcaagagaagaagatgttcctgggatagtgaatcttgttctgcggtgttgtgttaatgccctaatgtctgcgatagactttcttaacaagttcacaatcaactttgctgcaataactggcgaggcatattgcacctctgcgaggatgacatatgagcttctaagacgtaacctactctctgctgtttttgtggagaccgtttcaactcgtttattagcaggagttatttttgtcctttcatcagtttatgcaattgcggtctgtgcgatcttaaagggtgttagtgatctaggggttaacatgtacaccgtcgcagctctg

SEQ ID NO: 7967 - DNA, 525 bp, Gossypium hirsutum
  Clone ID: GOSHI-09MAY01-C14300_1
tcaaaactcacaagagaagcagccgctcctccttccatctcctaaacaagaatggattcgcaaattaagtttgctgtggtggtgaaaataatgggaaggaccggttcaagaggtcaagtgacgcaggtgagagtgaagttcttggacgatcagaaccggttcattatgaggaacgtgaagggaccggttcgtgagggagatatcctcacattgctggagtctgagagagaagctaggaggcttcgttgaagggttatttttatactttttggggtttatgcttgttttgaattgtctaccgtattgcttttgaattacgtttagtaggtattcgtatatcgagacttgcgatttgggagaatggttgttgcttaaacctggattttatgatgattatgttgaaatgaactgaattggttttgagttttggttatatttttgcctcccgttttgagaaaaatgttcggattagatttgtttgtttgaatgatcacttgttatgattatgtaaaaaaaaaaaaaaaa

SEQ ID NO: 7968 - DNA, 493 bp, Gossypium hirsutum
  Clone ID: uC-gsronu33B178c07b1
ttatactcacaagagaagcagccgctcctccttgcatctcctaaacaagaatggattcgcaaattaagtttgctgtggtggtgaaaataatgggaaggaccggttcaagaggtcaagtgacgcaggtgagagtgaagttcttggacgatcagaaccggttcattatgaggaacgtgaagggaccggttcgtgagggagatatcctcacattgctggagtctgagagagaagctaggaggcttcgttgaagggttatttttatactttttggggtttatgcttgttttgaattgtctaccgtattgcttttgaattacgtttagtaggtattcgtatatcgagacttgcgatttgggagaatggttgttgcttaaacctggattttatgatgattatgttgaaatgaactgaattggttttgagttttggttaaaaaaaatatatattatttcaatatattctcactatcttttaatatttattttatatcttg

SEQ ID NO: 7969 - DNA, 594 bp, Gossypium hirsutum
  Clone ID: GOSHI-09MAY01-C14330_1
gcgaacgcataccaaaccctagcgccaagatttagtgttgaaaatctcgagcacaatggccaccggtgaactcgcctgtacttacgccgcgttgattctccacgacgatggaatctcaatcaccgccgagaagattgctacattggtgaaggcagcgaacttgagcgttgaatcttactggccaagccttttcgccaagctcctcgagaaagtcaacgtcgatgatctcatcaccagcgttggctccggtggtggtgctgcccctgttgccgttgctgctgcttctggtgcagctggcggtggtgctgctgcggcagcccctgctgttgaggagaaaaaggaagaagagaaggaagagagtgatgatgacatgggattcagcttgtttgactagacacaattcttcccagtttggatttttcttttgttttgttgtttgaaattgcggaaaattaggactcgttttaaacattagttgaatttttgtattgggttttgagaacttttgcagagattcaagaagttacatggttaatcttacttggtttaattgatattgccatttgaaatggttctttggttcaatgaggtttc

SEQ ID NO: 7970 - DNA, 369 bp, Gossypium hirsutum
  Clone ID: uC-gsronu33B018f06b1
gcattatggccaccggtgaactcgcctgtacttacgccgcgttgattctccatgacgatggaatctcaatcaccgccgagaagattgctacattggtgaaggcagcgaacttgagcgttgaatcttactggccaagccttttcgccaagctcctcgagaaagtcaacgtcgatgatctcatcaccagcgttggctccggtggtggtgctgaccctgttgccgctgctggtgcttctggtgcagttggcggtggggctggtgaatgtgacccggcttgtgaggagacattggacgcagagaaggaagagagtgctcacaacatgaccgctagattggtcggctagacacaatccgttccagttcgtatat

SEQ ID NO: 7971 - DNA, 657 bp, Gossypium hirsutum
  Clone ID: GOSHI-09MAY01-C114228_1
gaaatgactgttatagctagctaagaaagcaagtcagccatggaaagaactctctttcacctattccttgttttgttagggttttctcatattataagcttgaatgcggtctcggttacaagaatcgaaagcttggtgcatggacctcaagttcatcatgttccagagaatcctcacccggtaattgcagagaaaagttctaaggaaggaagggtttttatggagttgaatgattatccaggttcaggagctaattatcgtcacactccaaggccacaatttggcagatgtgccgattgttgagtgtagatgtatgttttctcatagtgcttttggtccataatctctcattttattgcttcttaaatttgtttctttgtttcttgtctgttttcagagttgggaagttaatctgtttttagagctatccatagaagtaagtttctggcaatagcatgaatgtttagatactttaaaaccaattgataatcctccatattatagttttatgagatggactattaactgcaaaaaaaaaaaaaaaaaaaaaaaaaaaaaaaaaaaaaaaaataaaaaaaaaaagaaaaaaaaaccactattacatacatgaaaaataaaaaataagatataccgtaggccatttaaatcaaatggccc

SEQ ID NO: 7972 - DNA, 261 bp, Gossypium hirsutum
  Clone ID: uC-gsronu33B158e01b2
cccactcgtccgggtttttatggagttgaatgattatccaggttcaggagctaataatcgtcacactccaaggccacaatttggcagatgtgccgattgttgagtgtagatgtatgttttctcatagtataatcctttaaaaacaatgcttttggtccataatctctcattttattgcttcttaaatttgtttctttgtttcttgtctgttttcagagttgggaagttaatctgtatttagagctattcatagaaaaataa

SEQ ID NO: 7973 - DNA, 1022 bp, Gossypium hirsutum
  Clone ID: GOSHI-09MAY01-C15910_1
attgaatcagttggagcaacttgggccaagtgaaggttatagaggctgttaagaatgtaaacactgcgtagagggttgtaccgtcggaatttggtcatgacatagatagggcgaaaccggtggagccggggctgaccatgtatgagcaaaagagcaagattagggggcagatagaggaatgcgggatcccgtacagatacatatgctggaactccattgctgcttggccctaccatgacaacactcatccagcagatggtctaccacccgccgcgtcggcccaaatctatggtgatggcgctgtcaaagcatactttgtggcgggttccgatattggaaagggcactgtcatgtccactgatgatgatcgaacactaaacaaaaccgtccattttcaacctccaagtaacctattaaacatgaacgaaatggcttcactatgggagacaaagatcggccgcgtgctgcctagggtaactatcacagaacaagatctgctccagcgggctcaagagatgcggatcccgcagagtgtggttgctgcgataactcatgacattttcataaatggctgtcaaataaacttcagcttggacaaaactactgatgttgaagtctgctctctctatccgaacacttcatttcggaccattgcggagtgcttcgacgattttgccaagaagatatcagataatgaaaaagcagtgagcaagccagtgactgcaagcaacactgacatttttgtgcccactgctaaaccagaagcattggctatcaccgcgatatgcacatgagaaacatctcaccctatttgatattctaaacaataattcaatggcttcttattgttgaacggtaaagagactattggttactagtgatttgtggacaaactatctattatctaagggtgagatatattagtagttacatcatgtatctagggaatttagaataattttactacagttaataagattattagacctatcaatttgttttgaaggcacctaaattcaatt

SEQ ID NO: 7974 - DNA, 422 bp, Gossypium hirsutum
  Clone ID: LIB3197-015-P1-M1-G12
aaaaataaattacgcatattattataaaaaaggacatcagcataaaggggggggaaataaactggagcgggggcagcactactcatatcgaaacctgctctctctatccgaacacttcatttcagaccattgcggattgctttgacaattttgccaaaaagattttctatgatgaaaaagcagtgagcaagccacatgactgcaagcaacactgacatctttgtgcccactgctaaaccagaagcattggctatcacacctatttgcacatgagaaacatctcaccctatttgatattctaaacaataattcaatggcttcttattgttgaactggtaagagactatacgttactagtgatttgtggacaaactatctattatgtaatgcggacatatattattagttacattatgtttaaa

SEQ ID NO: 7975 - DNA, 661 bp, Gossypium hirsutum
  Clone ID: GOSHI-09MAY01-C15850_1
atactctccacactaaaccaaactacaggaagtactgaatctctgaaacacaaatctcgctttcggaaaagcctcaaatggcagaccaaccgcagatttatgaactcaacaatggaaccgtggttgttaagattaccaactatggctgcactatcacctcattgtctgttcctgacaaaaacggtaaattagccgatgtcgtcctgggattcgacactgtcgaaccgtacgtgaaaggtgcttcaccttattttggatgcattgtgggaagggttgcaaacaggataaaaaatggcaagtttactcttaatggaacggggtactctttgccaatcaacaagcctccaaacagtctccacggtggattcaagggttttgacaagagaatatgggaggtagcagaatataagaaaggcgacaaaccctccattacttttaaatatcgcagcagcgatggtgaggagggttacccgggtgatgtttctgtgactgcaacctacactctaacttcaaccatgacaatgaagcttgacatggaagcagtgcccgagactaaggccactccaattaacttggctcaacatacttactggaacttagcaggccacaactcagggaacatacttgaccatacaattcagatatgggcatcagaaatgac

SEQ ID NO: 7976 - DNA, 496 bp, Gossypium hirsutum
  Clone ID: GOSHI-09MAY01-C115598_1
tcgcccacgcgtccgtgtgatcgtggggtcttaagtggtcatcaaagctgttgcttattttatacactcggtgttcgatgctactgctcttgagggctcgatccctttgattcaaatcatgaatcagaaccttttgactaattttggatcctaattaataagggatgacaaactcccgtcggctgcatacgggctaagggcgagattgatggtcggagtgcggctgttggtttctaacttctgcgatttatcgggaaaccgctgaagccggttgtcatttgactggcgcggaaccaaacatagggttgttgagattagatacactgcaaatatgtgtacgtgttgattatcttgtcactattaatatttttttctccttttatattatacaatgtatctactcctctaaaaatttctactcttatactctcatttctccgttgttaatactttatattttctcctgttttctatctttcttatatttttaaaattt

SEQ ID NO: 7977 - DNA, 464 bp, Gossypium hirsutum
  Clone ID: uC-gsflmaxxa038h06b1
cgtgaatctccaaatattctcgagaaaagaaaaaaaaaacccctcagatttctaaaacgattcgtttgttttttttggaattgtttgtttgtggttttcgaattctgggtcatcatcatcatcttcactgcaacttcgcttttttttttttggcctatagtctgcctcagggatggcaatctccggtcggccgcatacggtataagggcgagattgatggttggagtgaggatgttagtttctaagttctgagatttatgaggaaattgttgaagttggttgacatttgactgttggagaaccaaacattagggtgtttgagattagatatagtggaatttgggtattgatgaatgtcagggcagctcaagttcgctccctcctttcctcgcgaagacgtatgagatggtggatgatccttccacagattctatcgtgtcctggagtgcaagtgataagagttt

SEQ ID NO: 7978 - DNA, 401 bp, Gossypium hirsutum
  Clone ID: GOSHI-09MAY01-C15530_2
tataaatccaaatttcagcaagccatacgaagtacaggagttcgagaaaaaattcctcttttccttccggcaacgtttgaattgtgacagggcgttaatctttgtttggttcccgagaatatcaacaatgactcgcggcaaccagagagaaaaagatagagaaagggctcaatccaggtcaggcaacaaagggaaagctggttctaaggacgatggattgacccctgaacaacgccgtgaaagagatgcaaaggccttacaagaaaaggcctcaaagaaggcagcgcatgctgcagcttgaggtaacacttcctgcggtgatggttggtagtaattcatgtaactacataattattgtcgtttttaatattttatccgtttttgtttaatatatgttttct

SEQ ID NO: 7979 - DNA, 552 bp, Gossypium hirsutum
  Clone ID: GOSHI-09MAY01-C15530_1
caggagtcgagaaaaaattcctcttttcctgccgtcaacgggcttaatctttgtttggttcccgagaatatcaacaatgactcgcggcaaccagagagaaaaagatagagaaagggctcaatccaggtcaggcaacaaagggaaagctggttccaaggacgatggattgacccctgaacaacgccgtgaaagagatgcaaaggccttacaagaaaaggccgcaaagaaggcagcgcaggcggcagctggaggtaacactgccggcggtgctggtggaagtaaaaacaagaaataatataataaagacggtgagatgatctaccgtggaggttaaagttagtgttaatctgttgatcggggaatttgatctttggtttccagtcttcgtttcgtgttttttaaagttcaacaaaccctcggcttgcttatatatttggcattgatgttgactgttaatggaattgatttcctatatagcattatggaatttgcgtttctatgattatctgtagttatcaattccagtagataaaaccccgtatcgatttgatc

SEQ ID NO: 7980 - DNA, 895 bp, Gossypium hirsutum
  Clone ID: GOSHI-09MAY01-C15480_1
acctacgcattatgatttattttggaaattttggattctcgggaggatccagcagcaggaaattgaggaaaaaaaaaatctttggcctttgtttaacaaatctagctcgtagaattgaacggcagccactaaaaaaatacgttcggtgattaatagattttttttactcaagaaatggcgggaagagctcaaattccgacaagtaattcagcactaattgccatgattgctgatgaggatacagtaactggatttttgatggctggagttggaaatgtggatttaaggagaaaaacaaactatctaatcgttgattcaaaaacaacagtgaaagcaattgaagatacattcaaagactacaccacaagggaggatattgcaattattttgatcagtcaatatgttgcaaacatgataaggtttctagttgatagctacaataagccggttcctgcaattctggaaatcccttccaaagatcatccttatgaccctgctcatgattccgttctctcccgtgtgaagtatctcttttctgctgaatccgttgcctccggaaaggcgttaatgatgatgttccccccggtttccttactcaaatccccattattgttatagcacaaccaatgtttctcccaatgctctggcatatcttcataccccaccatgactgtactttcgctgtgattgatctttccctctcgtgcagcccgagttttcttgttgtttaagtgtttatttacctcttgtgtttcttgtacttattgggtgccaaaatcccagaagaagctgactgttcttttataaaaaaaaaaaaaaaaaaaaaaaaaaaaaaaaaaaaaaaaaaaaaaaaaaaaaaaaaaaaaaaaaaaaaaaaaaaaaaaggggcggccgt

SEQ ID NO: 7981 - DNA, 492 bp, Gossypium hirsutum
  Clone ID: uC-gsronu33B154e03b2
ctctttttaaagaaagatcgagcagtaggaaattgaggaaaaaaaaaatctttggcctttgtttaacaaatctagctcgtagaattgaacggcagccactaaaaaaatacgttcggtgattaatagattttttttactcaagaaatggcgggaagagctcaaattccgacaagtaattcagcactaattgccatgattgctgatgaggatacagcaactggatttttgatggctggagttggaaatgtggatttaaggagaaaaacaaactatctaatcgttgattcaagtatgaattttggattaaagtttttttttcttacaattttattgaattttctcaattgtttttttttatgatcccttgcaatgtttataattactctattagctgactagagttaagtaggagttagattttggtacttcacggtcgcagttgaatgatgaagggatctatgctgaatgctagataagggtttgttttatata

SEQ ID NO: 7982 - DNA, 330 bp, Gossypium hirsutum
  Clone ID: LIB3272-018-P1-K1-E12
attccaagaaaaagtggtgtcagagtttcgatcaaataaaagaaattaagttttctgtgtcttcctcggggatccgacgaagctctggaaaaagattttttttactcaagaaatggcgggaagagctcaaattccgacaagtaattcagcactaattgccatgattgctgatgaggatacaggaactggatttttggtggctggaggtggaaatgtggatttaaagagaaaaacaaactatctaatcgttgattcaaaaacaacagtgaaagcgattgaagattcattcaaagactacaccacaaggggggatattgcaattattttgga

SEQ ID NO: 7983 - DNA, 1288 bp, Gossypium hirsutum
  Clone ID: GOSHI-09MAY01-C15450_1
caaatttcctttccatccaaacaacaggctctctttcccgtctctgcatttacgttctatttttttttagatttatttttttaaaaaaaactaaagggatttgagttcgtctggatttgaagtactttcttgagcatatatggaccgtgctgaactatccactgaacaggttctgaagagggacatcccatgggaaacatacatgacaactaagctgatttcaggaacaggcttgcagctgttaaggcgttatgataatagagctgaaagtgtcagggcacagttgttggatgatgatggtccagcctatgttcaagtgtttgttaacatcttacgggatatctttaaagaagaaacagtggaatatgttctggctttaattgatgaaatgcttacagccaatccgaaacgagccagactatttcatgacaagtctcttgctaatgaagatacttatgaacctttcctaaggttgctgtggaaaggcaactggttcatacaagaaaagagctgcaagatactggccttgatagtaagtgcaaggccaaaaacccaggatggcgttgttgcaaatggagaaaattcaaagaagaagggcactaccattaatgatgtactaaaggaattggttgaatggctgtgcacacagctgaagaagccttcccatcctacttgtggtattccaactgctattaactgccttgcatcattactgaaggaacctgtcgtcagatcttcctttgttcaagcagatggggtgaagttactgattcctttaattactccggcatctacccagcaatctatccagcttctctatgaaacatgcctctgcgtgtggctgttatcttattatgagccagcaatcgagtatttagcaacatctagggctcttccaagactggttgatgttgttaggagttccacaaaggagaaggttgtcagggttgttgtattgacctttaggaacttgttatccaaaggcacattcggtgctcagatggttgaccttggactgccgcagattgttcagagtttgaaagctcaagcctggagtgatgaggatctattggaggctctcaatcacctggaagatggttttttggataacattaagaaactgagttccttcgatgaatgtgagcaagaagttctccttggtcatcttggttggtcacccatgcgtaaagatccattgttttggcggcatcatgttccatgctctgtagagtaagatttccagggtctgagggtcctcattgcaattctgggatacgttcagcgaccc

SEQ ID NO: 7984 - DNA, 390 bp, Gossypium hirsutum
  Clone ID: LIB3146-027-Q1-K1-F9
gagccacaccagtggaagaaaaagaaaccgtagtattcaggggcattaattttcgtggaatttgaagtatattcttttggcaccaatggagcgtgcggaactaacaactgagcaggttctgaagagagacatcccatgggaaacatacatgacaactaagctgatttcaggaacaggccttcagctgttaaggcgttttgataatagagctgaaagtgtcagggcacagttgttggatgatgatggtccagcctatgttcaagtgtttgttagcatattacgtgatatatttaaagaagaaacagtggaatatgttctggctctaattgatgaaatgcttacagccaatccgaaaagagccagattatttcatgacaggtctctttgcaa

SEQ ID NO: 7985 - DNA, 353 bp, Gossypium hirsutum
  unsure (1)..(353): unsure at all n locations
  Clone ID: uC-gsflnu33B100a12b1
cttatttttatctttcccgnctctgcatttacgttctatttttttttagatttattttttttcaaacaaaactaaagggatttgagttcgtgtggatttgaagtactttcttgagcatatatggaccgtgctgtactatcccctgggcaggacctgaagagggccctccaatgggaaacatacgctgccactaggcgtggtacatgagccagcctgcgagatgccagggcgccgtcatgctttccaacacggctaaaaggcctgggatcaagccggaaatggctctcactatgccaaagcgctggaacattgctgaccggcctgctggttaccagagacgggggaacactttg

SEQ ID NO: 7986 - DNA, 844 bp, Gossypium hirsutum
  Clone ID: GOSHI-09MAY01-C15470_1
taaaccttcctcatttcttgttcttatgctaagagtacaaggtttatcaaaatgagctgcaatggctgtagaattcttcgaaaaggttgcagtgaaaattgtatgcttagacaaagcttacaatgtatagagaacccacaagctcaagcacacgccaccgtttttgttgctaagttctttggccgtgccggacttatgtcatttctctcctccgtcgccagtcctcaaagacctgctttgtttcagtcgcttttgtttgaagcagtgggacgggcaattaatccggtgagtggagccgtggggttgttatggacagggaactggaacgtctgtcagtcggcggtacaaacggtgctccaaggcggcacgttgcagccgttgcctgaatttagtggtggggtttcaggatcggattttgaggatgttggagaaacggtcggtgttggtggcggcggcggcgctggggggccgtgtatccagtcgggaggtttcgttgacgttgttgaatgtaaagcatctgatctcaatctctgcttgatgatcggcgacgatgatagagcggttaaaaggagaagggaatctacatcgtcggaagagtccgaaacgacgacgttgggaagccggttttctggagatggtaatagttcaaatgacagctgcggcgccgacggtgaaagaaagcttttaagactgttcatttgagagttttttttttcttcttcacattttgtctatgtaattttgattataattgaacgcctgtatgagctatgatcttttgtttctattttcggctatgaaggatgaagttcgatcaaattttataaaatttcgaatttcccat

SEQ ID NO: 7987 - DNA, 1054 bp, Gossypium hirsutum
  Clone ID: GOSHI-09MAY01-C15460_1
caccctcgtcttgattttttcatcaatggccaagtacggcgaaggcgacaagcgctggatcgtggaggaaagacccgacggtgctaacgtccacaactggcactgggctgaaaccgattgcctcccctggtcgaaaatgttcttcaccaaatcgctttcggatctcaccatccttgacggccaaggcaatctccgcatcaagaccaagaaggtcgaaaaggtcgacggcgaagcctatgttaatattcgcaagggtaaagtcattcccggatatgaaatcagtttgagtgtatcctgggaaggcgaagccaaagatggggaagggaagacgctgttgaaaagctgaggtaacctcgagattccgtacatttcggatgaaaatgctgacgaggatccggaagttaaggtgacggttaaagacgaaggacccattggtaaagccttgaaggaagcgatgctggccaaaggcaagcctttggttttggagaaagtgagggattttgttcaagctatggcgaaaggtggccccgttaaagatgaattggaagccaagaaatcggctcccaaaactaatactactactggtaatagtaactcagctgcagtgtctaaggaggaagttgggatggagaaggaagccaaaaaggaagtgaagaaggaagggaagaaagggttcaagacgattacaatgacggagaagtttaattgtagagctaaggatatatatgagattttgatggatgagaatagatggaaagggtttactcagagtaatgctaggataagtaaagaagtcggtggtcaatttagtattttcgatggatcggttactggtattaacttggagttgcaagaagggaagtttattgctcagagatggagatttgggagctggcccgacgggattgattctactgtaagacttgttttcaatgagcctgagcctggggttactataatcaaactcacgcattcagatgttcccgaggaggacagatatgggaatgcgactgtggtggagaacactgagaggggttggaaagaccttattttc

SEQ ID NO: 7988 - DNA, 734 bp, Gossypium hirsutum
  Clone ID: GOSHI-09MAY01-C15740_1
ataaaaactagtttcgcggattttaggttttcgtaagggaaagggtgaggattgttaagcgacacgcctctctcactcaaaccctattctttttcccaatttctcgaatctagggttttacattctccttttcctctccaaatcaaccttatttcattttttttcttctcttagaaataatatcgtcaatgagcaacgaattagttaacttcaacatgtccggtcttggcgatgctcttaatgccgaagcacgagctggtctcgttaacgctctcaagaataaacttcaaagtcttgctggggatcactccgatgtgctggagagcctatcaccgattgtcaggaagcgtgtcgaggttcttagggagatccagagccaacatgatgaattggaggctaggttttttgaggagagggctgcacttgaagctaaatatcaaaaactatatcaacccttgtatgcaaagcgatatgatattgtgaatggccttgctgatgctgaaggaacagcaaatgaagctgccaaggaccaaggagaggaaaaggatgctgaagagaaaggggtgcctgatttttggcttactgcaatgaaaaataatgaagtgctctctgatgagatcactgagcgtgatgaagagctctcaagtatctcaaggatattaattggtacagggtaaagaaaccaagattcaagcttgagtcttactttgacaccaatccttatttcaaaaatg

SEQ ID NO: 7989 - DNA, 449 bp, Gossypium hirsutum
  Clone ID: LIB3048-031-Q1-L1-E7
gttttcgtaaggtaaagggtgaggattgttaagcgacacgcctctgtcactcagagcctattctttttcccaatttctcgaatctagggttttagattctccttttcctctccaaatcaaccttatttcattttttttcttctcttagaaataatatcgtcaatgagcaacgaaggagttaacttcaacatgtccggtcttggcgatgctcttaacgccgaagcacgagctggtctcgttaacgctctcaagaataaacttcaaagtcttgctggggatcactccgatgtgctggagagtctatcaccgattgtcaggaagcgtgtcgaggttcttagggagatccaggcatgttctttttccctaagctttttcgatactctgttaagttttattctgatatcactgatggtttagttgtttttgtagcccggtctactctattatgg

SEQ ID NO: 7990 - DNA, 460 bp, Gossypium hirsutum
  Clone ID: uC-gsflmaxxa090f01b1
gcgcgcacgcgtccgcccactcgttctggtgggtttttaagacgcctttgtgtctcaaaccctattctttttcccaatttctcgaatctagggttttacattctcctttttctctccaaatcaaccttatttcattttttgtcttctcttagaaataatatcgtcaatgagcaacgaattagttaacttcaacatgtgcggtcttggcgatgctcttaatgccgaagcacgagctggtctcgttaacgctctcaagaataaacttcaaagtcttgctggggatcactccgatgtgctggagagcctatcaccgattggcaggaagcgtgtcgaggttcttagggagatccagaggccacatgatgaattggaggctaggttttttgaggagagggctgcacttgaagcttaatatcaaaaactatattaacccttgtatgccaagcgatatgatattgtg

SEQ ID NO: 7991 - DNA, 552 bp, Gossypium hirsutum
  Clone ID: GOSHI-09MAY01-C15760_1
cccacgcgtccgctagttacaacagccatcccttcctctgtctcacaataatttaagtaaaagttttctttttcaaactctctctctctaatatatagatttccatcttctgtactttaaattctgtctcaaaagataagttccaggcaaggtgtttgattcattgttgaaaagagatgaggggtgctgctcttgtagccattgctgctacaattggtaactttttgcagggatgggataatgctaccattgctggagcaattgtgtacattaagaatgacctcgatctaggaactagcgttgaaggtctagtggtggctatgtcactgataggagcaacagctattacaacatgctcaggggctatatcagattggcttggtcggcgtccaatgctgataatgtcttcaatgctttattttgtcagtggtttggtaatgttgtggtcacctaatgtctatattttgtgcctagccaggctattagatggatttggaattggtttagccgtgactcttgtcccagtctatatatctgagactgccccatctg

SEQ ID NO: 7992 - DNA, 518 bp, Gossypium hirsutum
  Clone ID: GOSHI-09MAY01-C15710_1
gcgtcagaaagctatagaaccccacgaactcatagtcctacatagttccacactctgcaaagaactgagaggagagaaaaaagaaaaaaagaaaaagagggtgtttagctttttttttaaaggggtctcgagaaaatataagagttgagttggagagaagaagaagaagaagaagagaaaaagatggggttgatgatggatcaagtttgaaggcttggggggttagtataaaaataaaaatcacccctttcaaaaacctggaaaccccaccaaatggaacttacagatttgcaaagcaataagcaaaccaaaaacaacagcagcagcagcaacaataacaacaacaattctgcagaaccccaccatcagtctctccagcagcaccatctgcaacaccaaaaacagtcggcttctccccagcttgtggtcccttttgatggcaccagatcttcaagtccttcttccggcaacccttttaatatgggctccatttctcaactccatccccaccacccttt

SEQ ID NO: 7993 - DNA, 1993 bp, Gossypium hirsutum
  Clone ID: GOSHI-09MAY01-C15690_2
tgttgtaccatcatttacacagccaaagatgggggggatttttaaaaaaacatttggggggactccacaaatcccgaaacacgttgttggagtctgggcaggtgacagatgacgacattggttatataaatcagaaggtcacaacaactattaatgaaccattatagtccagcaaagattatgttcccaaaagacgggactggctttctgcttactggacgggattcaagtcacctgaacaaatttcacgtgttcggaacactggggttaaaaccccgagatattgaagaatgttggcaaagcaatcacaaccctcccagataattttaagcctcatagagcagtgaagaaggtttatggattacaacgagcgaatgaataagtacatgaaggagagatggtctaggcgacgccttcaagcagttgaatttttgggtggatgttgcaaacagtgtgggtcaattgaatcgttggaatttgtccccttcgacccaaacccacaccctaactcgctttccctttgattttttgctgacactgactcactgagtccaaaattccaccagctccttccttcatcagccatgagccgtttcagggtaactgacatcttcgacccttactctccctctctctgtgttaaagaaacctccattctcgctcacaagcccttagcttttccctcatttttcgaagcagaacatgaacttagctccgccctcgacctactgagtcctttcccttgcttaagccccttcgatatctacgacaacgtcaccgatctggtccaaatcgagagaacgccgtcgtttcgttcgtacaagagggtacaacgccgagtcgaacctgagttttctattcaaaccttgtgcgaccgagttacggcgctggagtctaaattcgaccgtctcgttaacgggaggaactccggaggggacaggaagtacacgtggactgcggagatcaaggggccggttgaaaggaagtacaaatgggtagcggagatcaaggatgggaagaagacagaagaggtgaaagagaaaaagtataaatggacggctgagattgaaggaaagggaattgatgggcctatctcgagaaagtacgtgttctcagcatccactggtggcgatgcaagtgaatgtagcaaatcggagaagaaggaaaagaatgagaagaagcatcagaaaaaggacaagaaaggagagaatgtcccgcgtgtagtggagatcgaagagccgtcagatcacggagctgtcgttttaagacaggcttttgccaaaagagctggagttataagaaatagcaggggcaagaagaaggaattgtctcctcaagatgctgctttggtgatccaagtaacattcagatcttacctgatccgtagatcacaggctcttcgtgcccttagggaattggcaattgccagggctaagctgaaagagctcagatcatattttaataccttctcctatcgtcgtcgagtagcccaggatgcagtagaacgccaaaggttctgtgagaaaatcattgtgctgctccttactgttgatgccattgagggagctgatctaatggtgcgagctgctaagaagtcaatggtagacgaactggaagcgatgcttgatgtggtggatcctcagccccaagggagatcactttcaatgaggaggacatttgacatgccagatagtgtcatccagaaggaaatcgccgagggggtggcagaggtggttcgaatgtttgaaagtgatgcggacactgtttgatgcactcttgtaaaaatgttgtgtaatatgacaaaatcaccctttatgggtgctttgcgagtcagatgtttggaagatgcagattagtttatgatgtgtggacctgatctctcgttttattttctgtggcacttgtgtaattgtgttttgcacgaacatattgggacttatttgaagatggtggtacttgttttatgcaagagcttagttcccttttttgcttc

SEQ ID NO: 7994 - DNA, 1689 bp, Gossypium hirsutum
  Clone ID: GOSHI-09MAY01-C15690_1
tgtctaaccatcatttacacagccaaagatgtgtaggatcattcggaatcacccctcagcacttcagatataccgaaacaagttgttggagtctgggcaggtgacagatgacgacattggtaatataagtcagaaggtcagtacaattcttaatgaagaattcttggccagcaaagattatgttcccaaaagacgggactggctttctgcttactggacgggattcaagtcacctgaacaaatttcacgtgttcggaacactggggttaaacccgagatattgaagaatgttggcaaagcaatcacaacccttccagataattttaagcctcatagagcggtgaagaaggtttatgagcaacgtgcacagatgattgagacaggggagggccttgactgggctatgggtgaagcacttgcatttgctacattactggtagaaggtaaccacgttaggttgagtggtcaggatgttgaaaggggtacattcagtcatcggcattctgcgattcatgatcaggaaaccggggaacagtattgccctctggaccatgttatcatcaaccaaaatgaggagatgtttactgtcagcaatagttctctttctgagtttggtgtgcttggattcgaattgggttactcgatggagaatccaaattcattggttatgtgggaagctcagtttggtgactttgctaatggtgctcaagtgatatttgatcagtttataagtagcggggaggcaaagtggctgcgtcaaactggtctcgttgtgctgcttccccatggttatgatggacaaggtccagaacattcaagtgcacgactagagcgttatcttcagatgagtgatgacaatccttttgtgatacctgagatggatacaactcttcgtaaacaaattcaggagtgcaactggcaggtggttaacgttacaacacctgctaattacttccatgttttgcggcgtcagatacacagggaattccgtaagcctcttattgtgatgtcccccaaaaacttacttcgtcacaaggactgcaaatcaaatctttctgaatttgatgatgtccaaggccaccctggttttgataaacaaggaaccagatttaagcgacttataaaagatcagaatatgcactccgaccttgaggagggtatcagacgcttggtactttgttccggaaaggtctactatgagcttgatgatgagcgaaagaagaacaatgctaccgacgttgctatctgtcgtgtggaacagctttgcccattcccttatgacctaatccagcgggagcttaagcgatatccaaacgcagagattgtttggtgccaggaagaaccgatgaacatgggtgcatacaactacatcgcccctcgtcttgccactgcaatgactgctttgggtagaggaacctttgatgatatcagatacattggccgtgctccatctgcttccactgctactggcttctattctgtgcatgcgaaggaacataccgagcttgtgctaacggccagtcaacctgaaccgatcaagaccaatactactatctgaagcttttcgcaagatcattcttgaaaactacagtattaaagcaatgctctaaaataacatctggtgcagagcttgagaactcttagggtttgttatttcgatgatcgtcatgtttctgctattccttctct

SEQ ID NO: 7995 - DNA, 455 bp, Gossypium hirsutum
  Clone ID: uC-gsronu33B157h05b1
agaaactggtggtgaacggaagagatagccggagagggtgaaaaatgtcacaagcatacgggataatatcacggcctagagagcagtgaagaaggcttatggattacaacgagcgaatgaataagtacatgaaggagagatggtctaggcgacgccttcaagcagatgaatttttgggtggattgttgcaaacagagtgggtcaaatgaatccgagaaatttgaccacattgacccaaacccaaaccctaactcgctttccctttgattttatgctgacactgactcattgagtccaaaaatccaccagcttctttcttgataagccatgaaccgttttagggtaactgacatcttagacccttactctacctttctctgtgttaaagaaaacttcattttcgctaacaagcccttagcttttccctcatttttttgaagcataacaatgaactt

SEQ ID NO: 7996 - DNA, 354 bp, Gossypium hirsutum
  Clone ID: LIB3048-008-Q1-L1-B3
gcttactggaccggattcaagtcacctgaaccaattggaccttttccgaacactgggggtaaaccccggattttggaaaatggtggccaaaccattaccaccctttcaaataaatttaaaccctattaaaccgggaaaaaaggttattaaccaagtgccccgatgattgaaaccggggaaggccttggctgggctatgggtgaagcacttgcatttgctacattactggtagaaagtaaccacgttaggttgagtggtcaggatgttgaaaggggtacattcagtcatcggcattctgtgattcatgatcaggaaaccggggaacagtattgccctctggaccatgttatcatc

SEQ ID NO: 7997 - DNA, 512 bp, Gossypium hirsutum
  Clone ID: GOSHI-09MAY01-C115688_1
tctttcacgcgtccgaaaaaattgaattcgttgagcctggaaaaacaatggtgataacaatcacaattcgggatcttctatttccagtttcatttctcttgcttcttccatgtgaagcagttgctgcaacacttggaatctgctatggccgtgttgccaacaacctcccaccaacctcggaagtgatcaacattctcaaaaccaatggcatttcgaatgtccggatcttcgatcctgatccgtttactttacagtcattttcaggcaccgggatcaatctcatgaccggtgtccctaatgaagccctcccttcacttgcctcaggcccacctgcctctgcactccaatggctccaaaccgacatattcgcgcatattgttccgagccaaatccgatatattgcggttgggaatgaggtcctccttaaagactcattctattctccctatcttgtacccgctgttgttaacctttaccaagcacttaaaatgctaaaccttgatggtactatc

SEQ ID NO: 7998 - DNA, 811 bp, Gossypium hirsutum
  Clone ID: GOSHI-09MAY01-C15650_1
atttcttttttttttttggattttgagcattttggggtttgtctgtcggttttccgcgtcaatttttctcagggcttgtgctgaacggaatggcatcgctatcaagtcagccgcagttccgctacactcaaccaccgtcgaaggtgctgcatttaagaaacttgccatgggagtgtacggaggaagagctgattgagctggggaagccatttggtaaggtcgttaataccaaatgcaatgttggcgccaatcgaaatcaagctttcatagaatttgctgatttgaatcaggctattgctatgatatcatattatgcttcatcttcggagcctgctcaagttaggggcaaaacggtctacctacaatattctaacaggcaagagattggtaacaacaaaaccacggcggttttcgccggaaatgttcttttgggtacatccgaaggtcaagatcgcgcggcttgtttccattggatggtttgcatcttggtattttcagcttttggatttgtgcattagattcctacctttgagaggacagctggatttcaggcattggtgcacgttttcagatgcagaaacagccacatctgcaaaaaatgccttggatggacgaatcatccctaggtatctgctttctgaatcatatctctggtaccctgtatacatatctgtcatacagattgggggaatcagacccaggaccggacttacaatccctattcgtgccccttcgtataaagagacaccgcaatttggggatgaagaacaactccaaagttgttctctttgaaccaatatggcctttgggg

SEQ ID NO: 7999 - DNA, 424 bp, Gossypium hirsutum
  Clone ID: LIB3197-057-Q1-M1-F10
gatcaaagactcaaaacacgtgccctccaaccatttttcctgtttcaccgatcaaagtcccaatccacctacaccgatcaaagtccctatcagaggatagaggtaaaatggtctacctacaatattctaacaggcaagagattgtaaacaacaaaacctcgggggatatagccggaaatgttcatttggtaacaatcaaaggtcaagatgcgtggcttgattccattgatgatatgaatctggtattttcagcttaaggatttgtgcataatattactacctttgagaagacagctggattttagtcagggatatatatattgaatgggaactgatgctattgaagcaggggagactccatttaactcctatcctagattctttgagattcgagaataccctaagaatgccatgtgcaacatca

SEQ ID NO: 8000 - DNA, 956 bp, Gossypium hirsutum
  Clone ID: GOSHI-09MAY01-C115658_1
agaagaccaaactgagagtgaaaccgatcacaatgacgacatagtgatcgtagaagaacaaccgcccaatgtggctgcttctgctacgaatttgatagaagagaaagttgaagaaattgtggaagaatacgaaaaggaactgtgccaagaagagcagctgaagcccatgaaggatcatatagatcttgattcgcaaacaaagaacgcttctggacgagatctcaaagagattgctgggagtttctggtcagctgcttcagtcttcagcaagaaattacaaaaatggaggcaaaaacaaaaacttaaaaagaggggaaatggatgtgggtcagcgagattgccagtggagaagcccatagggagacaatacagagaaacccagtcagaaattgcggattatgggttcgggagaaggtcttgtgatacagacccaaggttttcccttgatgctgggaggacgtcctcggccgcgcccgcgtgggcttttgatgcagcaagaatgtcatgtgatgatcccagatattcttttgatgaaccaagagcttcctgcgatggatatctgatggggagaaatgttcccaagaatgcccacaatgggttccgttgcggaagaatgctccagttcatcatggtatgaggtctgatactcagatccctgtggagggcccgacggctttgatttctgttactgaggaggatgaatcgcttcctggagggtcagctcaaacaagggattattattctgattctaggagaagaaaaagtcttgacaggtccagttctagtaggaagactgctgcagctatagtggctgaaatggaggaaatgaggtcggtttctagtacaaaggtttcccctgcaactgttgattacacccatggacctaagcctgtcattcctgatagggattccagggattcaaattctttgagggatgattattcagacacttttga

SEQ ID NO: 8001 - DNA, 947 bp, Gossypium hirsutum
  Clone ID: GOSHI-09MAY01-C15610_1
ggaaaaccctccaactccaatcgtcatcaatgaatcatatcccaaaccatttcatcaatttcccctcccaaagctcatccttccaccctcctatataacccacataactaagttaatctgagggagacgagaaagttgtaagatataagagcaaaatggaagctgctgtagcatcgaaaccagtaattaaagttgctgccatttgtgggtctttaaggaaagcctctaacaacagaggcttaattcgaaccgctttggagcttaccaaggagtccattgctgggattcaaatggaatacatagacatttcaccacttccaatgctagatacagatctggaagttgatggcaagtttccccctgcggttgaggctttcaggcagaagattttggagtctgatagcatcctttttgcttcccctgaatacaacttttctcttactgcgcctctgaagaatgcacttgactgggcttcaagaccaccaaatgtatgggcagataaagcggctgccatcgtaagcgccggaggaggctttggtggtgcgcgatcacattatcatcttcgccaagttggggttttccttgatctacatttcatcaataaacccgagttttacttgaatgcgtttcagcctccggcaaagtttgatagcgatggcaaccttattgatgaggattccaaggagagaatgaagcaagttcttctttccttgcaagcatttaccctccgactccaacctaaaaactgagtaaactaatcaagtgtttcagtcttttcccaattcttccattgttattgtgatggattaaaaaaaaaaaaaaaaaaaaaaaaaaaaaaaaaaaaaaaaaaaaaaaaaaaaaaaaaaaaaaaaaaaaaaaaaaaaataaaaaaataaaaaaaaaaacaaattaaaaaattataattaaaatttataattaaatataat

SEQ ID NO: 8002 - DNA, 728 bp, Gossypium hirsutum
  Clone ID: GOSHI-09MAY01-C15620_1
gcgatgatggcaggagctgagaaattcgtggaagctgataatgcggaagccataataacaagaatcgagcacaaatccaggaagatcgagagcttacttaaacagaataagcccgttgaagctcttaaaactgcgctcgagggatcttctcatatgatacgtgacgagcgatgcaagtcagcgaattggatagttgtgcatagagcgctaatggctataaaagatgtcgaaggaatgttctcttctttggatcctgagtactatgatattcttatgaagtacttgtatagaggattgtcgaccggagatcgccccacatgtgatcagtgccttaggatccatgagaagctgacggagagagctggtttgggctgcatacttcgttcccttgcagacactgtgaatgcagtttgactccaatcggcccttcactttggaaaatgttttcaagtgttgttgttcttaaatcattgaagtgctttagaagcttttatgttacagcttttcttccatgattcgtatttccagatcagagttgcggtcacatgggttatatggtctcctatctggcttttctacttggggtaattggaggtgtttaagtatagaatcttattaccacctttcaagtcctttccttttcctcctttttatcttaattgagaatcttgttacctatggttgtatgaaatttgcatgaaaagagagatcgatatgaagcaaagact

SEQ ID NO: 8003 - DNA, 470 bp, Gossypium hirsutum
  Clone ID: uC-gsronu33B032f12b1
cattcattgggcaactgtagtaaagcgggtggttggtgacgagacgatgcaagatagcgaattgactagttgtgcatagagcgctaatggctataaaagatgtcgaacgaatgttctcttctttggatcctgagtactatgatatccttatgaagtatttgtatagaggattgtcaaccggagatcgccccacatgtgatcagtgccttaggatccatgagaagctgacggagagagctggtttgggctgcatacttcgttcccttgcagatactgtgaatgcaatttgactccaataggcccttcactttggaaaatgttttcaagtgttgttgttcttaaatcattgaagtgctttagaagcttttatgttacagcttttctttcatgattcgtatttccagatcagagttgcggtcacatgggttatatggtctcctatctggcttttctacttggggtaattggag

SEQ ID NO: 8004 - DNA, 381 bp, Gossypium hirsutum
  Clone ID: uC-gsflmaxxa009d03b1
ttcacgcgttcgcccacgcgttcgcggacgcgtgggctaggactggcttcatggctcaaccgattttggtcattttatttttttcctggcaggtggtagatatgggctgagtttggcgggctcttgggttacattctcgggggagaggcttttatcgcagaaaccccggggggtggaggctgcagtctctttgccaaggttcaccttaacggtaggcattatgatacagcgccaatgcattgttttcatcagcagcacctccagcatagagaaatttaaacctgcatatttgcttcctgatggaagactagaaagggctgggagagttaaaaagaattctcctctagatggcactcgttctcctgctgtcaacaatggcct

SEQ ID NO: 8005 - DNA, 337 bp, Gossypium hirsutum
  Clone ID: uC-gsflmaxxa009d08b1
cccacgcgtccgcagagcgatatttcttggtgtccgaattggtgatcctactgcggtaggccaagagcagttctcccctagctcaccaggatggccgcctttcatgagagtaaatcctatcttggactggtcatacagagatgtgtgggctttcctcttaacctgcaaggtccaatactgcagtctttatgaccaaggttacacttcaattggaagcatttatgatacagtgccaaatgcattgctttccatcagcagcacctccagcaaagagaaatttaaacctgcatatttgcttgctgatggaagactagaaagggctggtggagttaaaaag

SEQ ID NO: 8006 - DNA, 556 bp, Gossypium hirsutum
  Clone ID: GOSHI-09MAY01-C15170_1
cggacgcgtgggttttttttttttttttttgaattctcaaaacttccaaagcaaccacatcaaaacaaaactacgataaacaactcatagcgttctcagatttttctctagtcttccaatcctgaatctttatactaataaagacaaacttagtcaaagagactgaatcccatatcatcatcagactcttcttctggttctggttttttctcctctgcagggacagcagcagccggagcagcaccaccagcagcagcaacaggggcagtagcaacggcaaatttgcttggatccgccaaatactctttcactttatcggcctgacggaaagaatactctgttgcaactgcaacagccaagacattcttgtagccattgatgaacatgtgtggtacagctgcaaatgtcgggtatgagatggcaagagacaatgcagtaaccatggagacgtccactagcaaatttctcaatcaggtcatcctcggtaagatccatcacctcagggcgagtggctgagcccgggtcttccgcagacaatacaacaagaccatatgag

SEQ ID NO: 8007 - DNA, 421 bp, Gossypium hirsutum
  Clone ID: LIB3148-012-Q1-K1-H11
cccacgcgtccgcccacgcgtccgcccacgcgttcgcccacgcgtccgcccacgcgtccgcccacgcgtccgcccacgcgtccgtgcagctgtaccacacatgttcatcaatggctacaagaatgtcttggctgttgcagttgcaacagagtattctttccgtcaggccgataaagtgaaagagtatttggcggatccaagcaaatttgccgttgctactgcccctgttgctgctgctggtggtgctgctccggctgctgctgtccctgcagaggagaaaaaaccagaaccagaagaagagtctgatgatgatatgggattcagtctctttgactaagtttgtctttattagtataaagattcaggattggaagactagagaaaaatctgagaacgctatgagttgtttatcgtagttttg

SEQ ID NO: 8008 - DNA, 344 bp, Gossypium hirsutum
  Clone ID: LIB3149-060-Q1-K1-D5
ggccgacgccacggcgtgcgaatgatctcacctaggataacccgttttatttttatgctagttggcaattacatggcgactaggatagtttctagccatctcatacccaacataagcagctgtaccacacatgttcatcaatggctacaaaaatgtcttggctgatgcagttgcaacagactattctttccgtcaggccgataaacataaagagtatatgaccgatccaaacaaattttccgattctactgtccctgatgctgacttctatggtactgctactgctgctgctgtccctgcaaaggataaaaaaccacaaccaaaaaaagagtctgatgattata

SEQ ID NO: 8009 - DNA, 553 bp, Gossypium hirsutum
  Clone ID: AI726525.1
caaaacacatgaattctctacaggaattttccaggctaagcttttgatgggaaagcaaatacaaataaaacccaaattaattcataacactcgctccctatcatcccctctacatcatttttactctttttcaaaaaacacaaagatccaaagacccaccaaacgaataagttactagattttccgatccattagagaaacgacctattactttcatgatatcatggaaggaggaggaagtgatgatcatcaactccaccaccaccaccaacaccgccctactttcccattccaattacttgagaagaaacaagatgatatccagccttgttcttcctcttcttcccctcctttcccttcccttctcccaccttcctcctcttcttcaccctctgctgatcaacccaacacgagtcgttccatttcaagcctccaaatctcgccggaaccttgtaaaaaaccaccccctaaacgtacttcaaccaaagatcgacataccaaggtcgatggacgtggccgtaggatccgaatgccagctctttgtgcagccagg

SEQ ID NO: 8010 - DNA, 468 bp, Gossypium hirsutum
  unsure (1)..(468): unsure at all n locations
  Clone ID: LIB3197-001-P1-M1-E6
tcgggaagtgatgatcatcaactccatcatnaccaccaccaccaccaccaccgacaggagcagcaacaccgccccactttcccattccaattacttgagaagaaagaagatgataaccagccttgttcttcctcttcttcccctcctttcccttcccttgtcccaccttcttcctcttcttcatcctctgctgatcaacccaacacgagtcgttccatttcaagcctccaaatctcgccagaaccttttaaaaaaccaccccctaaacgtacttcaaccaaagatcgacataccaaggtcgatggacgtggccgtaggatccgaatgccagctctttgtgcagccagggtttttcaactcactcgtgaattaggccataaatctgatggtgaaaccattgaatggctactccaacaagctgaaccagctgtgatcgccgccactggtactggaacaatcccagcaaac

SEQ ID NO: 8011 - DNA, 425 bp, Gossypium hirsutum
  Clone ID: GOSHI-09MAY01-C15080_1
aaaaaaataaaataaatataaatataaaaataataaaattaattaaattttataaaattataattaataattaaaatattttttttttaagtaaattaatacctttattcaaagaggaaagagtcgatagttaaacacagaaaatgaacccggtagtggatacaaaaacctgttatctaaagatatgagatttcctccatggtgaaagtagtgtttccgggaaagcagcagctcctaaccatgaactttttcttgtgcttcatccgtatcatctctcagtcctttcactttgcgtatgctgagttctcgtattttccatcccacctgcagtcttcctgttctggaactttgagctccaaatcctctgcaaatggccgaaatactaggtctatcttctcatcatccacttgatcaagagttctaga

SEQ ID NO: 8012 - DNA, 371 bp, Gossypium hirsutum
  Clone ID: GOSHI-09MAY01-C115048_1
tttacgctttcgaaagcccagaaatcgactatgaatcaacccctgtttcatctctaatttctcaatcctttgccacaaccaatcgaaaatctgttgcgaatcatttcctctccacaaaattctttcaatttcttttgctctctacttcaagaccccttagttttacccgtatgttgcatgccctagcttaattgttgtgatttaggactctcggttttgccactatttaaggcgttaccccatttgcgagaaaccctagtcttcgattttttttaaaattttttgtagtttgtgtacagattttgtgtacagatttcggaatttttttctaggaatttgtggtgttttggagtttaggtttgtgatatgaa

SEQ ID NO: 8013 - DNA, 1269 bp, Gossypium hirsutum
  Clone ID: GOSHI-09MAY01-C15030_1
gccaaaataggcaaccaagggggagcggttttcaaactgattctgtcctcaggactggaacccaaaatagctgcatacactagtatgacatcttccactgttgacgctattggtccagcaatttccacagtcccagatccacataatgatcctcccatgtttgtccttccataagttgttttcaagcccactacaccacatagggatgaaggaatgcgaatagaacctccaccatctgttcctagggcagcagaacatagaccagaagctacaattgctgctgggccagaggaagatccacctgtatatctttcatgtgcataagggtttctggttgttccataatttggattgtttccagttgtgcccatgccaaattcatgcatattggccttcccaataaaaatcacaccacagctccgcaatcttgagacagaaactgcatccttctcaacagacctaacctcatgcatccatgttgatgcacccttagttggatgaggatagcagccgacgcctgcccggacgcccgggaaaattccatccaagattgacaatggatttccttccttaaacctttgtgttgaagctgctgcttgcttcctgatatcctcagcatcaaatgaaatcaataatggtgttggggccttatgatatttacacccctcaacaagtgtgatgatttgttctgctatcttagaaggtgtcacaagttttgatcgataagcataagcaaagtcacgaatcttccagtaccggaacgatggaagtgtatccccactccagcagctagcaggatcataatgaggaagacacttaagggctgattcaactctatcagtaggtttcccttcttcatccacaatgacaacagaaggttctgcttcttgaggaggaaattcaggtttaaacatgggtttttctggtatctcagtgttctgcaacatctcaaccatgttattctcctttttcatgaaagatatgatcaaagaacctataattggaatttcaattatcctcacaaacaacttcagtatcgatcccgtcaaatgaggagcttggattgtttctttctcgtatttaacggtcgacaagtccagttccttggccggaaccattacccgcttcttccccatcgtcggtaatcagtgttttggtggatttttcttactcgtgaatttatgaatctgggagttgtgattattggatggtaagtgttcaacaaaagcaagtgagtcagtcactctgatagaggaagtggttaaataa

SEQ ID NO: 8014 - DNA, 343 bp, Gossypium hirsutum
  Clone ID: LIB3189-051-P1-K1-A1
cttttcttttcaataaaagtgacatattattcaaacatttaaaccttgcatatatattacagaagtatctgtcatgatttataacatacttggaacattagtgtaatgccagagcctccagcaatcatcccgaatgctctaacttcaccaggttgatatctgacaagcagaaagacaagcagatgagtggtacaatgaagattgacaatggatttccttccttaaacctttgtgttgaagctgttgcttgcttcctgatatcctcagcatcaaatgaaatcaataatggtgttggggccttatgatatttacactaattgtccaagtatgttataaatcatga

SEQ ID NO: 8015 - DNA, 807 bp, Gossypium hirsutum
  Clone ID: GOSHI-09MAY01-C15360_1
ttctctctctctgggtctcaaattccggggctccgtgcccctaatacgaaaccgagcaaaacccaactctgatttactcctaattggtactggccgggtattttccatcactttcctgggaaaaaaaagcataaaaggaaaaagtttcaggagaaatgtactcagctattcggtcgttaccgttgaatggaagtgtaggagattatcaagggtcgtttgatggaaccaacttgcctagcgatgcttgtttggttttaacaacggatcccaagcctcgactccgttggacagctgagctccatgaacgtttcgtcgatgctgttactcaacttggtggccctgacaaagcaaccccaaagactattatgagaacaatgggagtaaaaggccttaccctctatcacttaaaatcacaccttcagaaataccggctggggaaacaatcttgcaaggaatcaactgataattctaaggatgcttcttgtgttgcagagagtctggacactggttcgtctacaacatcatcatcgaaactggtagcgcaagatttgaatgatggttaccaggttactgaagctcttagagtacagatggaagtgcaacgaagactacatgaacaattagaggtacagcgtcatcttcaacttcggattgaagcacaaagcaaatacctacagacgatactcgagaaagccttgtaaagctttgagcgatcatgtggctgcttctgctggtctcgaagctgccagagaagagctttccaaactgggaatcaaaatttctaacgattgtcaagggatggtccct

SEQ ID NO: 8016 - DNA, 1412 bp, Gossypium hirsutum
  Clone ID: GOSHI-09MAY01-C15300_1
cccagcgtccgcttttttcaacgatttcagattctggcttttagggttttacgatgaatgagagaagcgattctcaaattttagattctggcggttagggtttggtaatgagggacgacggggctcaatgacggggagtgaggggcagacgttcgaccttgagcaaggatgggagttcatggaaaaaggaattacaaagttgaagaacattttagaaggcttgccagagccgcaatttagctccgaggattatatgatgctttatacaacaatttacaatatgtgtacccaaaagcctcctcatgactattctcagcagttgtatgataagtatcgagaatcctttgaagagtacatcacttcaacagtacttccttctttacgagaaaagcatgatgagtttatgttgagagagctggtcaaaaggtggagtaatcataaagtaatggttaggtggctttctcggttcttccattaccttgatcggtactttattgctcggaggtcactacctccccttaatgaagttggactcacgtgtttccgggaactggtttaccaagagctaaatgcaaaagtgagagatgctgtaatttctctgattgatcaagaacgtgaaggcgagcagattgatcgcgctttgttgaagaacgttttatatatatttgttgaaattggaatggggcaaatggattactatgagaatgactttgaggctactatgctcaaagatactgctgcctactactcaaggaaagctgcaaattggatcgtagatgattcttgtccggattacatgttgaaatctgaggaatgtttaaaatgtgagaaggatagggtctcccattacttgcattctagtagtgagccaaaactgctcgagaaagttcaacatgagttgttatctgtatgggaaacccgactgctcgataaagagcactccggctgccatgcattgctcagagacgacaaggtggaggatttgtcaagaatgtttagactcttttctaaaattcctcgagggttagatcctgtgtcaagtaccttcaaacagcatgttaccgctgaaggcacagcgttggtcaaactggccgaggatgctgcaagcaccaaaaaggcagaaaaacgggacgtggttggcctgcaagagcaggttttcgtgaggaaagtgattgagttgcatgacaaatacctagcatacgtgaatgattgttttcaaaatcatactctctttcacaaggctctcaaagaggcttttgaagccttttgtaacaagggtgttgccggaagctcaagtgcggagctacttgctaccttttgtgataatattctcaagaaaggtggaagtgagaaattgagtgatgaagccatcgaagaaacactcgaaaaggttgtgaagctacttgcttata

SEQ ID NO: 8017 - DNA, 378 bp, Gossypium hirsutum
  Clone ID: GOSHI-09MAY01-C15250_1
gcataatttgcattcaaaattccttgttcttaatacaaagggggggaaaacccataaactgaatcataattttctttccttcatatttgttaacaatttctctgcaattctacaaaaaaaaaaaaaagcttcctgcaaatgaggccttcctgtttagaagcagtctgttttctggtgttgttcattttcctttatagcgttgaagggattcgattggagggaagttttagatcatcaggacatgatcttaaattgcatgaagaagctttgatgaaaataagcaatggagttatgggagatgtcattttctgcaaacaagggcaatgtagaggaaacagtagaaaacttcttacagcaactactactgcaactaccact

SEQ ID NO: 8018 - DNA, 218 bp, Gossypium hirsutum
  Clone ID: GOSHI-09MAY01-C15270_1
ctgctctgcttcctttccgtaagcccctctcatttggatcatttttagccacttatcagcctccaacaaataattgtcttcatgcaagtggctgcttctttctcacttggtttgatttattatgtagtgtttcataactggcggcttcactcactgggtcttgtatgtgttttcaatggtatatttgggcatgttttagtaacagcaactgctcctta

SEQ ID NO: 8019 - DNA, 424 bp, Gossypium hirsutum
  Clone ID: GOSHI-09MAY01-C15200_1
gccatattgaactggctaagttgcattcctcctcgtataggtggtccacttgcgattttaaatccatcagatcctccagaaaggcttgtggagtacttacctgaaaattcgtgtgatcctcgggccgctatttctggtgctttagatagtagtggcaactggaagggaggtatttttgacagggatagctttgtggagacgcttgaaggttgggctagaacagttgtgacaggaagggcaaagcttggaggaatccctgtaggaatagttgcagttgagacacagacggtgatgcaggttatccctgctgatccaggacaacttgattcccatgagagagttgtccctcaagctggacaggtatggtttccagattctgctacaaagacagctcaggcaataatggatttcaatagggaagagc

SEQ ID NO: 8020 - DNA, 810 bp, Gossypium hirsutum
  Clone ID: GOSHI-09MAY01-C15220_1
cttgcttcaagcctcggggagtcatagattcttcgatcgtaaaccccaaaatggtgctgatggaaccccactacgctgatgaacaacaagaacaaaaagctacgaatgccacgctaacaccatctgaaacgacacccgcttccgccgcctcttcaaatgtgaacggagaagacgccgcctccgatggattcgaaacagcgagcgagcgtgacgtcgatgacgacgaagaggaacaccacgtcaataatcaacagccatctgaacagaaagcttccgattcttatcaagatgccttaaacgacgagcaattgaaagagaaagctttggcacaagcaaatgatgcgaaaatggaaggaaataaattgtttggaaacggacaattcgaggaggcattgttacagtatgagattgctttgcaaattacagcggagatgcctactgccgttgaacttcgttccgtttgtcattcgaatcgagctgcttgctttctgaaacaggggaaatatgaggataccatcaaggaatgtacgaaagcattggatcttaatccttcttatataaaaagctcttgttagacgaggagaagctcatgaaaagcttcaaaattttgaagaagctattgctgatatgaagaagatattggaatttgatccttctaacaaccaagctgtaaagaccatacggcgccttgaaccactagctgctgaaaaacgagaatagttgaaagaggagatgatggcaaaactaaaagaattgggcaactctgttctgggtacattcgggatgagcgtggacaacttcaaagctgtc

SEQ ID NO: 8021 - DNA, 631 bp, Gossypium hirsutum
  unsure (1)..(631): unsure at all n locations
  Clone ID: LIB3831-002-Q1-K6-D6
gagatgctgcctcagaggattcgaaacagctagcgaacgtgatgtcagcgacaacgaagaagacgaccgcgctggcgataaacagccaccccaacagagaggtcccgattcttatcaagatgccttaaacgacgagcaactgaaagagaaagctttggcacaagcaaatgatgcaaaaacagaaggaaataaattgttcggaaacggccaataccaggaggccttgttacagtatgagattgctttgcaagttacggcggagatgccttcggccactgaaattcgttccatttgccattcaaatcgggctgtttgcttgctgaagctgggtaattatgaggaaaccatcaaggaatgtaataaagctttggaacttaatgcttcttatatgaaagctcttgttagacgcggagaagctcatgaaaagcttgaacattttgaagaagctattgctgatatgaagaagatattggaattggatcctgctaatgaccaggctcggaaggccattcgtcgcttggaaccattggccgcagagaaaagagaaaagatgaaagaggagatgattggaaagctaaaagaattgggcaactctgttctgggtcgttntgggatgagtattgacaacttc

SEQ ID NO: 8022 - DNA, 565 bp, Gossypium hirsutum
  Clone ID: AW186958.1
gaaaaatcaaccactgtttgtttatttgtttgcttgcttgcttgaagcctaagggagtcatagattcttcgatcgtaaaccccaaaatggtgctgattgaaccccactacgttgatgaacaacaagaacaaaaagctacgaatgccactctaacatcatctgaaacgacatccgcttccgccgcctcttcaaatgtgaacggaaaaaaacccgcctccgaaggattcgaaacagcgaacgaacgtgaactccaagaacaacaaaaagaacaccccgtcccttatccaaaaccatccgaacaaaaagcttccgaatcctatccagaagcctttaatgaagaaccattttaagaaaaagctttgggcccagccaatgatgccaaaatggaaggaaataaattgtttggaaaccgacaattccaagaagcgttgttacagtatgagattgctttgccaattacagcggaaatgcctactgccgttgaacttcgttccgtttgtctttccaatccagctgcttggtttctgaaacaggggaaatatgaggataccctcaaggaatgttc

SEQ ID NO: 8023 - DNA, 419 bp, Gossypium hirsutum
  unsure (1)..(419): unsure at all n locations
  Clone ID: LIB3493-043-P1-M1-H6
aatttccacctcacacctacccatgcattgatgattatataattagtatttactaaaatcgtactttttatcgctaaatgagggtgctccaaattaaaaggaaagggtctaaaatcaagtgcattaatgaaatgtctctgacccatctgaaacgacacccatttccgcctctctcatccaaatgtgcaacgcgagtaagaccccctgcttccagttgccattcttaaactaatgagcagagctgctacgttagatcactaccaatagggacaccttcgcccctaatcaacagtcatatgaacagaaagcttccgattcttatcaagatgccttaaacgacaagctattgaaagagaaagctttggcacaagcaaatgatgcnaaaatttaagcaaataaattgtttcaaaacggacaat

SEQ ID NO: 8024 - DNA, 476 bp, Gossypium hirsutum
  Clone ID: GOSHI-09MAY01-C16890_1
ctgcatcgcccgctcatgtgttccttggtcgacggcgtgtcggcatccgacatggagaaatttctatgcgaccggttgcttgacccgacacaacccatatccgagcgcttccgagctctcttctcccttcgcaacctcaaaggccctgcccctcgcaacgctctcattcaagcgacaagggattcatcaaatttgttggctcatgaagctgcatttgcattgggtcaaatgcaagatgctgaagctattcctgctttggaagtagttctaaatgatctttctttgcatcccatcgttcgtcatgaggcagctgaagcacttggtgccattggtttggagagtaacattcctcttttgaagaatagtttggttctagatcctgctccagaagtccgtgaaacatgtgaactggctctccagcgaattgaggagttaaaatccgatggtagtgatgacaaatcatccatgacagaaaa

SEQ ID NO: 8025 - DNA, 427 bp, Gossypium hirsutum
  Clone ID: GOSHI-09MAY01-C16880_1
tcgacccacccactccggttaaaagctgtgggtgtctgcttcgttcagtggttgtatttttcttatagagtaaaatggagatcaaaagtggacatggacctttctattttgaactgaacacgggagctaagatgccatgtattggtttagggacatggaaagctcctcctggtgtcgttggtgaagctgtcgttgctgcagtcgaggctggttataggcacattgattgtgctcatgtttatgataatgaagaggagattgggcttgcattgaagggactgttttcctcagggcaggtgaagcgcagcgaactcttcatcacatctaaactctggtgttgtgaccatgcgcctgagacgtccccaaggcattggcccgaactttgggagacctccaacttgactatattgatctctatcttatacat

SEQ ID NO: 8026 - DNA, 407 bp, Gossypium hirsutum
  Clone ID: GOSHI-09MAY01-C16870_1
agaaaaatgccgccaccaggatggggaccgcctccaggaggaccgccggggcctcccggtttatgtggctgctttgattttatttgcggtggtatttgccgtcttctttcttcttgtttttatgttctctgctgctgctgcatatttgaaagctgctgtgggccaatgttcggcgggccgcctgggccacctgggccaagacctttttaattatagtgctcatctctttttcccttttactctgtttttgatttgtgttttaggctgttgtgaactgtgatgtgaaacaaaaatctagttctgcccctttctgttctttcttgccagcatggaacatggttccagtccacgcttttatttgttctaaaataaaaaaaattagttaaaatatgctttaaatttctaat

SEQ ID NO: 8027 - DNA, 889 bp, Gossypium hirsutum
  Clone ID: GOSHI-09MAY01-C16860_1
ctcagctgagtcgactcgatcaaaaaacagcaatggcctctacttcatctctcactctgtctcaagctctcctagctcgaaccatcttttccgatgggtccacccaattctccgactgcagtgtttcacttcccaccaccactttttccggtctcaagctcactaccccacgctcccgtcgagtccttcccacgcgctttaaccggagtctccgagtccgttccgctgccgtcgagacaatcggcactcctgccgagacttccttattggaaaaatcagtcaacacgatcagattcttagctattgatgctgtcgaaaaggctaattccggtcaccctgggttacccatgggttgtgctccgatgggtcacattttatacgatgaaatcatgaggtataatcctaagaacccttattggttcaaccgtgatcgtttcgtcttgtctgctggtcatggttgtatgttgcaatatgctctgcttcaccttgctggttatgatagtgttcaggaagatgatttgaagaattttcgtcaatggcaaagcagaacaccaggacatcctgagaattttgaaactcctggagttgaaagttacaactggtcctcttggtcaaggtattgcaaacgctgtcgggttggctctagccgagaagcacctacgtgctaggttcaacaagcctgacaatgagatggtggtccactacacgtatgctattttaggtgatggttgtcaaatggagggtgttgcgaacgaagcttgttcgcttgccggacactggggacttggaaagcttatagctttctacgatgataatcacatttcgatcgatggtgacactgaaattgcctttaccgagaattgtcaggaaccgtttaaggggcttgggt

SEQ ID NO: 8028 - DNA, 416 bp, Gossypium hirsutum
  Clone ID: LIB3197-031-Q1-M1-E6
caacaatggcctctacttcaactctcactctggctgaggctctcctagctcgagccatcttttccgatgggtccatccaatcctccgactactgtgtgtcactttcctatttggaaaaatcagtcaacccgatcagattcttagctatcgatgctgtcgaaaaggctaattccggtcacccttggttacccatgggttgtgctccgatgggtcacattttatacgatgaaatcatgaggtataatcctaagaacccttattggttcaaccgtgatcgtttcgtcttgtctgctggtcatggttgtatgttgcaatatgctctgcttcaccttgctggttatgatagtgttcaggaagatgatttgaagaattttcgtcaatggcaaagcagaacaccaggacattctgagaatttg

SEQ ID NO: 8029 - DNA, 551 bp, Gossypium hirsutum
  Clone ID: GOSHI-09MAY01-C16590_1
tgataacttgctggtgacaaagagttctgaaaatgcggattttggactggcaagagaagtatcatcaatgcctccccatacagaacttgtttctactcgatggtaccgttctccagaagtcttgttgcaatcttcctcttacactcctgctattgatatgtgggctgttggtgctatattagcggagctttttacttcatctcctatttttcctggtgaaagtgaaatagatcaactgtacaagatatgctgtgttttgggtgcgcctgattggacttcctttcctgaagcaacaaacatctctcgtctaatcaatattagttattcagagattttacctaccaacctatcagatatcattcctaatgccggcccggaggctgttgatttaatcatgcaactttgttcatgggatccattaaggaggccaacagcagatcaggcattgcagcatcctttttttaatgtggatgctcgcattcctcatccacgactgcatgatccacttgagctcaggctaaacaacatggagtcaaagccaaatcttgagt
